United States Patent Application Publication US 2005/0228172 A9 - sequence listing, part 55

SEQ ID NO: 229261 - DNA, 612 bp, Homo sapiens
acaaatgtaattcattacattaactaattaaaggagctaaatcacatcaccaccacaataatgcagaaaaacacatttgatacaactcaacattcatgtctgcctaacaaacatctcatgatactaggaaaagaggaagggatatattattttcatgtataaarcactaaccattgtagcatgccaatatactcaaaattcaatgaaattcctatcaaaatcttagcattcctcttagtcctcaacaaagcatttctaaaatgtgtatagaagaccaaagggccaaaagagtcaacttctgaagaagtggaaaaagaaagttgaggaaatcttaaaacatgttattgagcttaaagttgcaaaaataaactcatgtgccataattcatgagtagaaaaacagactagtggaataacataaaaataaaaacaatgcttacataaaatgttgtaactgatttggatgtcattagaaatcagtaagtaaatagatggacaatgtaatgaaagatgctaggcaaataatgtggtagggagaataatggcccgcaaagatgcccatgcctaaccctggaacctgtgaatatgttacactgaatgcaataaaggctta

SEQ ID NO: 229262 - DNA, 496 bp, Homo sapiens
ccaaatactggaatgttaagttctgtaatgtcagatatttctgtttggttcactggtgtattcttaaagcatgttacatactaggtatactcaatgaatatttgttgaataaatatcacattgggcttattccagaaattcaagcttgtttcaatagttagagcaatctacaaatgtaattcattacattaactaattaaaggagctaaatcacatcaccaccacaataatgcagaaaaacacatttgatacaactcaacattcatgtctgcctaacaaacatctcatgatactaggaaaagaggaagggatatattattttcatgtataaagcactaaccattgtagcatgccaatatactcaaaattcaatgaaattcctatcaaaatyttagcattcctcttagtcctcaacaaagcatttctaaaatgtgtatagaagaccaaagggccaaaagagtcaacttctgaagaagtggaaaaagaaagttgagga

SEQ ID NO: 229263 - DNA, 496 bp, Homo sapiens
ccaaatactggaatgttaagttctgtaatgtcagatatttctgtttggttcactggtgtattcttaaagcatgttacatactaggtatactcaatgaatatttgttgaataaatatcacattgggcttattccagaaattcaagcttgtttcaatagttagagcaatctacaaatgtaattcattacattaactaattaaaggagctaaatcacatcaccaccacaataatgcagaaaaacacatttgatacaactcaacattcatgtctgcctaacaaacatctcatgatactaggaaaagaggaagggatatattattttcatgtataaagcactaaccattgtagcatgccaatatactcaaaattcaatgaaattcctatcaaaatcttagcattcctcttagtcctcaacaaagcatttctaaaatgtgtatagaagaccaaagggccaaaagagtcaacttctgaagaagyggaaaaagaaagttgagga

SEQ ID NO: 229264 - DNA, 612 bp, Homo sapiens
acaaatgtaattcattacattaactaattaaaggagctaaatcacatcaccaccacaataatgcagaaaaacacatttgatacaactcaacattcatgtctgcctaacaaacatctcatgatactaggaaaagaggaagggatatattattttcatgtataaagcactaaccattgtagcatgccaatatactcaaaattcaatgaaattcctatcaaaatcttagcattcctcttagtcctcaacaaagcatttctaaaatgtgtatagaagaccaaagggccaaaagagtcaacttctgaagaagtggaaaaagaaagttgaggaaatcttaaaacatgttattgagcttaaagttgcaaaaataaactcatgtrccataattcatgagtagaaaaacagactagtggaataacataaaaataaaaacaatgcttacataaaatgttgtaactgatttggatgtcattagaaatcagtaagtaaatagatggacaatgtaatgaaagatgctaggcaaataatgtggtagggagaataatggcccgcaaagatgcccatgcctaaccctggaacctgtgaatatgttacactgaatgcaataaaggctta

SEQ ID NO: 229265 - DNA, 612 bp, Homo sapiens
acaaatgtaattcattacattaactaattaaaggagctaaatcacatcaccaccacaataatgcagaaaaacacatttgatacaactcaacattcatgtctgcctaacaaacatctcatgatactaggaaaagaggaagggatatattattttcatgtataaagcactaaccattgtagcatgccaatatactcaaaattcaatgaaattcctatcaaaatcttagcattcctcttagtcctcaacaaagcatttctaaaatgtgtatagaagaccaaagggccaaaagagtcaacttctgaagaagtggaaaaagaaagttgaggaaatcttaaaacatgttattgagcttaaagttgcaaaaataaactcatgtgccataattcatgagtagaaaaacagactagtggaataacataaaaataaaaacaatgcttacataaaatgttgtaactgatttggatgtcattagaaatcagtaagtaaatagatggacaatgtaatgaaagatgctaggcaaataatgtggtagggagaataatggccckcaaagatgcccatgcctaaccctggaacctgtgaatatgttacactgaatgcaataaaggctta

SEQ ID NO: 229266 - DNA, 637 bp, Homo sapiens
gagaataatggcccgcaaagatgcccatgcctaaccctggaacctgtgaatatgttacactgaatgcaataaaggcttatcagatgtgattaaggatgcaaaccgagatggagagatcttcctgggttacccagaygggcccagtctaatcacatgagttcttaaaaatggagaacctttcttagctgagtccagagagagatgtgacaatgaaagaatggtcagagaaatgtgacattgccagctttaaaaagagagaggagaggcaatgagaaaaggaatgctgatgttctctagaagatagaaaaggccaggatatggattctaccctagccaccataaagaaacatgcctgtcaacaacttgattttagttcactaaaattcatgcctgatttctgacttgtgtacactgtaagatgacaagtttgtgttattttaggtcacttagtttgtagaaatttgttacagcagtaatagaacaagtggttatccatatgaggcaaattagattggatacctatctccaatagaaatcaattcaaggtgaattccaggaaaatacttaaaacatttagattaaaaataaatgagaatttttgttacttttggtaggtcatagaaccaagaaaaacaaa

SEQ ID NO: 229267 - DNA, 581 bp, Homo sapiens
gagatggagagatcttcctgggttacccagatgggcccagtctaatcacatgagttcttaaaaatggagaacctttcttagctgagtccagagagagatgtgacaatgaaagaatggtcagagaaatgtgacattgccagctttaaaaagagagaggagaggcaatgagaaaaggaatgctgatgttctctagaagatagaaaaggccaggatatggattctaccctagccrccataaagaaacatgcctgtcaacaacttgattttagttcactaaaattcatgcctgatttctgacttgtgtacactgtaagatgacaagtttgtgttattttaggtcacttagtttgtagaaatttgttacagcagtaatagaacaagtggttatccatatgaggcaaattagattggatacctatctccaatagaaatcaattcaaggtgaattccaggaaaatacttaaaacatttagattaaaaataaatgagaatttttgttacttttggtaggtcatagaaccaagaaaaacaaacattaaggaggaaaaatgaacatatgactacatcaaaatataaagctt

SEQ ID NO: 229268 - DNA, 637 bp, Homo sapiens
gagaataatggcccgcaaagatgcccatgcctaaccctggaacctgtgaatatgttacactgaatgcaataaaggcttatcagatgtgattaaggatgcaaaccgagatggagagatcttcctgggttacccagatgggcccagtctaatcacatgagttcttaaaaatggagaacctttcttagctgagtccagagagagatgtgacaatgaaagaatggtcagagaaatgtgacattgccagctttaaaaagagagaggagaggcaatgagaaaaggaatgctgatgttctctagaagatagaaaaggccaggatatggattctaccctagccaccataaagaaacatgcctgtcaacaacttgattttagttcactaaaattcatgcctgatttctgacttgtgtacactgtaagatgacaagtttgtgttattttaggtcacttagtttgtagaaatttgttacagcagtaatagaacaagtggttatccatatgaggcaaattagattggatacctatctccaatagaaatcaattcaaggtgarttccaggaaaatacttaaaacatttagattaaaaataaatgagaatttttgttacttttggtaggtcatagaaccaagaaaaacaaa

SEQ ID NO: 229269 - DNA, 637 bp, Homo sapiens
gagaataatggcccgcaaagatgcccatgcctaaccctggaacctgtgaatatgttacactgaatgcaataaaggcttatcagatgtgattaaggatgcaaaccgagatggagagatcttcctgggttacccagatgggcccagtctaatcacatgagttcttaaaaatggagaacctttcttagctgagtccagagagagatgtgacaatgaaagaatggtcagagaaatgtgacattgccagctttaaaaagagagaggagaggcaatgagaaaaggaatgctgatgttctctagaagatagaaaaggccaggatatggattctaccctagccaccataaagaaacatgcctgtcaacaacttgattttagttcactaaaattcatgcctgatttctgacttgtgtacactgtaagatgacaagtttgtgttattttaggtcacttagtttgtagaaatttgttacagcagtaatagaacaagtggttatccatatgaggcaaattagattggatacctatctccaatagaaatcaattcaaggtgaattccaggaaaatacttaaaacatttrgattaaaaataaatgagaatttttgttacttttggtaggtcatagaaccaagaaaaacaaa

SEQ ID NO: 229270 - DNA, 384 bp, Homo sapiens
ctctgagtgttaactgttggattcactgcagtgtcctacaatattttacaagaagatgaaaaggcaacctgcagacctaggcttgattcccaagtcacagtstgacccctgctacaggaggttaccctcctcaggaagagatagaaatagggaatttgaaggaatagtgaggggaccagggagatttgattgagtctggtttccaggtgaattaaaaggaaggatgtcatccagggtttgttgctacagtcaaaagaataaataaatcaatgaagaaataccttcattgtctgtggttttcatgcagatatactcatggaggttgtatctctccaaaaacagacaaatccaaggctgtgaacaagcatccgcatttgaattcca

SEQ ID NO: 229271 - DNA, 384 bp, Homo sapiens
ctctgagtgttaactgttggattcactgcagtgtcctacaatattttacaagaagatgaaaaggcaacctgcagacctaggcttgattcccaagtcacagtctgacccctgctacaggaggttaccctcctcaggaagagatagaaatagggaatttgaaggaatagtgaggggaccagggagatttgattgagtctggtttccaggtgaattaaaaggaaggatgtcatccagggtttgttgctacagtcaaaagaataaataartcaatgaagaaataccttcattgtctgtggttttcatgcagatatactcatggaggttgtatctctccaaaaacagacaaatccaaggctgtgaacaagcatccgcatttgaattcca

SEQ ID NO: 229272 - DNA, 384 bp, Homo sapiens
ctctgagtgttaactgttggattcactgcagtgtcctacaatattttacaagaagatgaaaaggcaacctgcagacctaggcttgattcccaagtcacagtctgacccctgctacaggaggttaccctcctcaggaagagatagaaatagggaatttgaaggaatagtgaggggaccagggagatttgattgagtctggtttccaggtgaattaaaaggaaggatgtcatccagggtttgttgctacagtcaaaagaataaataaatcaaygaagaaataccttcattgtctgtggttttcatgcagatatactcatggaggttgtatctctccaaaaacagacaaatccaaggctgtgaacaagcatccgcatttgaattcca

SEQ ID NO: 229273 - DNA, 591 bp, Homo sapiens
caatccatgaacatgagatatctttccatttatttgtggcttcttcaattgttttcatcaatgttttgtagttttcagtgtaaagatcattcacctctttgtttaaatttacatctaagtattttttgttgctattataaataggattgttttcttgatttctttttttgtatagtttgttgttgatgtgtagaaatgctacygaattttgtatgttcacattgtatcctgcaactttactaaattcatttatgaattctaaattttttggcagagttattggtgttttctatatataagatcatgtcaactgcaaacagaaacaatttaacttcttcctttccaattttcatgccttttatttctttcttttgcctaattgctctggctaggacatccagtactatgttgaatagaagttctgagagtgggcacccttgtatgaagttttccacaacatctcttatctttttattagctatatattaatacggatgtttcttcttcatcaggagtttgaaaaatatgtcttttctctatattgttcttaatcagtcttcctagaagtatttcaatttcaaaaagtagcaa

SEQ ID NO: 229274 - DNA, 598 bp, Homo sapiens
gtattacttttagagtcaggggaggaatattgttatttttaaagtgtactgagtgtgttccaccatcttgcactacgaactgactgtagcagccatttgtggatgtgagatggcagcttaaagaagtggcaccagttcttcacctttctctggaccatgtgactgcagctcctcccacagtggcagagtgaacctcatggcctctgttttgttttgttcattttctttttctttttttgttttagatggagtcttactatgttgcccaggctggagcgcagtggcatgatcttagctcactgcaagctctgcctcccaggttcacaccattctcctgcctcagcctcctgagtagctgggactacaggcacctgccaccrtgcccggctaattttttgtatttttagtagagacggggtttcaccgtgttagccaggatagtctcgatctcctgacctcatgatccgcctgcctcggcctcccaaagtgctgggattacaggcgtgagccaccatgcccagcctgtttttttctttttcaactgttactttagaattgggggtatatgtgcagatttgttacaaagatatattgcctg

SEQ ID NO: 229275 - DNA, 603 bp, Homo sapiens
ccattcatcacccgcccttgaaaatgccaccatcaccatacttcatgtttccttgctttctttcttcagaggaatccaagcaccttgcagagggagcccactccttgtcacagactctcctggaggctgaaacaggggcagtctgcasagaggagaggtgtagagaggcgcgatttagaaataagaaaaccaaatcgtaaagaagcctaatgtcttgttgcaacatctgaaagaaacaagatgaatatattccactaggtgggaagcttagggtagtgggaagaacatggattcaggactttgagaaacatggatttaaattttgatccccaatgcctctctgcacttcactgttatctataaaatagaggaaataaaaatactatacattcaagtcttaacaccaacagttaactagttgtgtaaccttggacaagttatgtgacctctctgtctgagcattgtcatttgtatatgagatcatggaggttaaatgtccaacctgttgtcactgtgcacctcaaaataataaataaaacatttcatctctcaatcaaggctaaatccactttctctgctcttcaaaacttgaccctgccagca

SEQ ID NO: 229276 - DNA, 545 bp, Homo sapiens
gggtactatctagataattttgactacawtaactatcaataaccagataactgaacaataaaggttttctaaaagaaaattacaaaacatttaaaaatgtgtaatgtaacatactagaaacgtaatgaggagcaacttgagagccataacataagaagtcaagcaaaataaaattcaagaacaaaattaacatttttccaagaaggaaattttaatgagaaatttacaatggaatttataatttaacagtatagaaaaaaaaactctgaaagttagtttacctgatattcaataaagcatctgtccacagatgatctaaatgaaacactgtaaaactgccatttgattttaagcgcctcaagaataggtcaggtgtggtgactcacacttacaatcccagcactttggaaggccaaggcaggaagatcacctgaggtcagctttctattgcttataattcacacttgtttttgcacttgtgaccaattcctgtttcaaaactaaaggtgcaggagggtgagctctctttcccagaagttgagaca

SEQ ID NO: 229277 - DNA, 391 bp, Homo sapiens
tcgggggctggagttcctacaaccacgtacagagggcctggacctgggagcaggatggataggtacaggctgcagccacaggtgaccggsttagcaggagagtgagaccaggtgtgcggggccaggggaagaatgagtgtgtgtgtgacagtcactcgcggtggaggagccctcagctctcatgcggcccccagagatcccaaaacccgcagcctggttctgtggatctgaaggcaccattctctgccctgagtagccatggagaagcccctcacagccacccaggccacctggccttcggatggggtcttgctgctgggccacggcctgggggacaccaggccctcctcagcgagcgctcagcgctcaccctgtgcagcgcaggggacca

SEQ ID NO: 229278 - DNA, 587 bp, Homo sapiens
ggctatccctacttttaaaaaaagactgcatggatggtattacctgccttctaatttatgcaccaagaatgtgcatatgaaaattttttctaacaattacattagagaaaatttgtctatcctgaatacgctttttactgtttcccttttcatcttgtcttcctggaagctcaatattttgaaatgtcatgaatttcagttgcttccctagcttagattttcttctataatttctccatccatcytgtgttatttgaatagtgacatcctaccttgttttaatcatattacagttttaacacatttgtacttttatctgtacttttcgttgtatacattacctcacatccatttcagtgtggcacaccctcttagaaagaagagaagaaaggaaaggagagacagaagagaaagagagagaaaaaaagaagaggtaaaatgaccctgctatcaacattcagcattttatgatgaatttgttcatcatgtttatcttcagttatcctttggaagatagaaagagtgagctaagagtagtggttggggagagggtagtcctaattttgtgtgtgtatgggaggatttct

SEQ ID NO: 229279 - DNA, 549 bp, Homo sapiens
tgagctgagggcattaagggtgggtccactcactataagatcatagatatacctggaaattttcaaggactccaaggaacttataagacttatacacactaggccgggcatggtggctcatgcctgtaatctcagaacttcaggaggccgaggcaggtggatcacaaggtcaggagatccagaccatcctggctaacacggtgaaactccatctctactaaaaatacaaaaaattagccgggcrtggaggtgggtgcctgtaatcccagctacgggaggctgaggtaggagaatggcatgaacccaggaggcggagcttgcagtgagccgagatcctgtcactgcactccagcctgggtgacagagcaagactctatcttggggaaaaaaaaaaaaaaagatttatacatacttatggatgatacttttgccaaaagcctcagtctcagtgaaatagtaataatcatgtattttttctagaaatgcatagggtttaattctttaagagttcataatttaatctcacatcggtcaggtgagtatcattat

SEQ ID NO: 229280 - DNA, 549 bp, Homo sapiens
tgagctgagggcattaagggtgggtccactcactataagatcatagatatacctggaaattttcaaggactccaaggaacttataagacttatacacactaggccgggcatggtggctcatgcctgtaatctcagaacttcaggaggccgaggcaggtggatcacaaggtcaggagatccagaccatcctggctaacacggtgaaactccatctctactaaaaatacaaaaaattagccgggcatggaggtgggtgcctgtaatcccagctacgggaggctgaggtaggagaatggcatgaacccaggaggcggagcttgcagtgagccgagatcctgtcactgcactccagcctgggtgacagagcaagactctatcttggggaaaaaaaaaaaaaaagatttatacatacttatggatgatacttttgccaaaagcctcagtctcagtgaaatagtaataatcatgtattttttctagaaatgcatagggtttarttctttaagagttcataatttaatctcacatcggtcaggtgagtatcattat

SEQ ID NO: 229281 - DNA, 602 bp, Homo sapiens
ctggatctctgatgacattgtgtataccatacctgacttgcctaccttcacacttttgtcatgtgagagaaaaattgatccctttttatgccactgtatttagtgtttcctgtggctagtagttcaatatatctttarctgatagatatagttggcaaaaagctggatatgaaatgtttaataaacaaatatattttaggaagatgtgtttatcattgagaaagtgactttcctttggagtagaaactaaggtattataaatgcaacacagtcattcattttttaagaggctcttctgccttacaaatgtcttctgctatgatataaaaatggtcctaccatttttcacttttttactgtctattggtcataagttttcttaaggaaggagagaaaattaagagattagagacctcatattaatgtccaaggcttattcttagtttctactaatgcttaagcatagttgccctttttctccttaagctttatgttgattgcagacaacagaaagttattctaatttagcagtcccaaacctttttggcatcagggactggttttgtggaagacaatttttccacagatggggtgggagggat

SEQ ID NO: 229282 - DNA, 409 bp, Homo sapiens
gaattccaagggtttagaggctccccctagtaagcaggacaaaggccaaccaagttttatgttatacaacactgaagaaccaggctcaggaaattagtaggaaccaggattacagttaagacctctccactggaatggttgtctaaggacataactgccacctccacagacttccctgaaactctccactgagattaccacaaacagcagatagcactgtgtacactgaataccaacaacactaatgtcacctcaaaatgactggatattgtctagattctttgtgtcccttctcccatattcaaaatccctggcatgagcggctcattatccaaatttagatcacgcacacacactagctcatgagaaagaygaaaatttataccacgtggacttctaaggtgaaagt

SEQ ID NO: 229283 - DNA, 440 bp, Homo sapiens
gtgtattaaatggacactaaactaatagtacagattgcaaagaagaagaaagcattgtacatggggtctggtcaaggaacactttctgaaggaagtaatttaagcaatattataaagaatatatttgggagacattaagcaccaaaggctaatgtttaggtatgactgaaatgtttaaaatgaaattctaattgaataagtgagtgttggatacagattgtgtaagactaaggagaatgggaatcactgaatgttttgaaccaaaaaatgatatgatttcttcatttgatgaaaagtgaatcactcatttctcccataacacatagcttaatctaattctggtttgttcttcctatgcttatgttgcccattgcatagtaactagtctttttgaaggaaascatcagttaacagtcatatttatttcttctagaacatcc

SEQ ID NO: 229284 - DNA, 506 bp, Homo sapiens
atatataattgtatcatcagcaaacagtgacagtttggcttcctctttaccaatttggatgccctttatttctttctcttgtctaattgctctggctcggacttccagtgttaggttgaataaaagtggtgaatgtggccatccttgtcttgttccagttctcagggggaatgctctcaacttttctgtgttcagaatratgttggctgtaggtctgtcctagatggcttttattacactgaggtatatcccttgtatgcccattttactgagggttttaatcataaaacaatgctgaattttgtcaaatgcattttctgcatctattgagatgatcatgtgatttttgcttttaattctgtttatgtggtgtatcacatttattgacttgtgaatattaaaccatctctgcatccctggtatgaaacacacttgatcttggtggattatctttttgatatgctgttggattcagttacctagtattttgttgaggatttttgcat

SEQ ID NO: 229285 - DNA, 586 bp, Homo sapiens
gtccatttgttgtagggtatagtttaagtccattgtttgttgactttctgtcttgatgatctgtctagtgctgtcagtggagtactaaatcccccactattattgtgttgccatctatctcattttttaggtttactagtaattgttttataaatttgggagctccagtgttaggtgcatatatatttaggactgtggtattttcctgttggactaatttttttatcattatataatgtccytcattgtgttttttaactgccgttgctttaaagtttgttttgcctgatataagaatagctactcctgctcacttttgatgtccattttcatggaatatatttttccactcctttatcttaagtttatgtgagtccttatgtgttaggtgagtctcctgaagacagcagaaaattgattggtgaattcttactcatactgccttcctgtatcttttaactggagcatttaagccatgtacattcaaagctagtattgagatgggaggtactattctattcattgtgctatttgttgcctgaataccttgtgtttttttttttcattgtgttattgttatatatgt

SEQ ID NO: 229286 - DNA, 586 bp, Homo sapiens
gtccatttgttgtagggtatagtttaagtccattgtttgttgactttctgtcttgatgatctgtctagtgctgtcagtggagtactaaatcccccactattattgtgttgccatctatctcattttttaggtttactagtaattgttttataaatttgggagctccagtgttaggtgcatatatatttaggactgtggtattttcctgttggactaatttttttatcattatataatgtccttcattgtgttttttaactgccgttgctttaaagtttgttttgcctgatataagaatagctactcctgctcacttttgatgtccattttcatggaatatatttttccactcctttatcttaagtttatgtgagtccttatgtgttaggtgagtctcctgaagacagcagaaaattgrttggtgaattcttactcatactgccttcctgtatcttttaactggagcatttaagccatgtacattcaaagctagtattgagatgggaggtactattctattcattgtgctatttgttgcctgaataccttgtgtttttttttttcattgtgttattgttatatatgt

SEQ ID NO: 229287 - DNA, 640 bp, Homo sapiens
atatttctcagaggttttgttcattccttttcactcttttttctctaatcttgtctaatgccttatttcagtaagttgatcttcaatctctgatatcctttcttctatttgatcgatttggctgttgatacttgtttatggttcacgaagttcttgtgctatgtttttcagctccatcaagtcacttatgttcctctctaaactggtgattctagttagcaactcctgtaacattttatcaaggttcttagcttctttgcattgggttagaacatgctcctttagsttagtggagttttttattacccaccttctgaagcctactcctgtcaattcatccatctcatcctccaaccagttctgcgcccttgctggagaggtgttgagatcatttggaggagaggaggcattctggcttttggaattttcaacatttttgcattgttttttcctcatcttcctggatttatctacctttgatctttggggctgatgaactttggatggattttttttttttatggggggaagggatctttgttgttgttgttgtttttgctttctgtttgttagtttttcttctaacagtcaggccccttttctccaagtctgctgcagtttgctgaaatttcaccccaga

SEQ ID NO: 229288 - DNA, 630 bp, Homo sapiens
tggcatgagaagttagcaaggcaggtgtatgggttcagagtcaacacgatttgatgtcactgccctccatgtgacactcccacatcatttagtagaggagctggcagcacctgcaacacatcatctcagcttatcttttcttgggtggttacytttacaaagcagcagtaagaggatagattaaattaatccttctcaacttttcatcagaatatcccctacagccatgaagggtgagcactctggattttggggcagaagggtggtgaaatagaaggctggcagaatattttggagctgtctgctgcaaaactaaaatttatttgaagtcttgtgctttttacttaagatgtttaactttgaattttattccatagaatatccatgtgatttttcaagtgttttttcttactaatcacttaatagtgtggggggggttttttttccaaataaaattgacactcctaaatgacataccatttcattcactttggcacatagctatttaccactggactatacatacggcagttcaagaagcatgggattaagtaaactctgcacattgtctccagcctgttattctcaggtagctctcattagccataaatgttaaattaaagctgtcat

SEQ ID NO: 229289 - DNA, 238 bp, Homo sapiens
tttatttagtggaataaatagttatgagaatggcatcaaaatgtaaaccagacaatggctcrgtcagttggaggaggggaaatactgcaatcaggatggctttatacagttcattttctacatgaacaaattttgatatgtaagaatgtcagtgctgacattctatagtaatatcctaatagcttggagacctcctggggatattatttctctctctgcctatctggtggtatgtgaa

SEQ ID NO: 229290 - DNA, 504 bp, Homo sapiens
tagccaatgtataacaagtgaggatgtatgatagtgactcatattttggcattttaaaatgtaaaccaagcaagtttttaattgtctaaatatgcagagttcaaggaacaggctaaattaccttcttcgatcacyttaacagttataaatcacttagtaaatattttaagtactttttgttatttacagaaggccgataacttttaatttgcctaatacctcataatagtttattaaaaaatgatgcacaatataaaaagcaatatatcacctaaattacttatgagtaaagccatttgcttccccagccttgttttattttattttattttttattttttattatgctttaagttttagggtacatgtgcacaacgtgcaggtttgttacatatgtatacatgtgccatgttggtgtgctgcacccattaactcgtcatttagcattaggtatatctcctaatgctatccctcccctctccccccaccccacaacagtcccca

SEQ ID NO: 229291 - DNA, 620 bp, Homo sapiens
tgggctgcttggagtctgccctgcacacgaaaggtgttttctagagattttggaaatgtatacttttgttctcctttctagcattcccccactttccagctactgcaattaccttaaactttggttcctcgcaaacagtaagactgtgcatttctgtccatattttaacagcctatgtgttagtaatctggggctcaccctcaggctagaaactctaaaaaatgaagctcacccagtaccatttcttttcttcaaatctaacccctctttcagtatttttctgcttttgtttactctacatagcctttagatagctgctttacattttgcccaaaatgtgtagatattatttgcaggataggtgatccgatagacctacttggccattagtggaagtggaaccagaactcatatttttagttgtcacttatcattttagctaacayaaaaagcaattgatatttactaatatttaaggattaacacaccgtcatttggatcatataaaaggaagttatcattattatatgttatatgaaatattctataggaaaagttggagaactggtagaggttacagacatggaattgttgaagacagtgatacagtttggatttgt

SEQ ID NO: 229292 - DNA, 546 bp, Homo sapiens
gtgagctatgttggaagtattaatagttctgacagtctcagtagagctgcctggcagatactgtatggagctgagatgaaccactctcatgaatctttgttcgaattgcagatttgaggccaaaatggatgtttgtttaaaccattaagttttggatggcctgtttcacaataggtaactagaacatttatataaatagaatcctaccacatgtacttaaaaaaaatctgactataatggttagtttcatgtgtcaacttgaatgggccatggggtgcccagattaaatattatttctgggtgtgtctgtgaggatgtttctggatgagattaacatttgaataggtgggctcagtaaaggagattgttcttcctagtgtgagtagccatcatccaatccattgagagccagaatagaacaaaagatggagccaggaagaatttagcccctttttwttctgcccaactacttgagctggaacatctcatttcatcttctgccctttgactgagatttacaccattgtctcctctggttttcaggcc

SEQ ID NO: 229293 - DNA, 542 bp, Homo sapiens
gtcttctgttttcattctggaaggaaagacaaaaacaaacaataaacatatatgcaacatagctttacatagtaataaaggctataaaggaaataatgctccataagaaatagaatcatggatatgtacatttttgatggggtcatcagggagcatctctctgagaaattgacaattgaacagaggcttacatcatgttaaggagcaagtcatagtaaatatctgagggaataactttctggacagaagaaataaggggcagaaataagcttggtatattttgacaaaagccagaagaattgccggtagtttcagaatgtaattttaagatattctcatctgattccttctattttctcaaggaataagaattgakatgattatttgataatgagtgggacagatattggagagaggagaaatacaaaatgttcttttgtgaaatgagagaacagtaatacaagagaagtgtggcagtattgcttgggcacttgggagtgttctttgagatctggatcatgaattgaatagtagttagtaat

SEQ ID NO: 229294 - DNA, 561 bp, Homo sapiens
agatctctttaatttctggcttaaaacagaacactagattctcatatccatttctgcactcgatatgttgcaataaattgttgggttgaaacatttgaagaaaaactggcccacatgacatgtagttggaaaagaaaggagtattttcagttagctgtgggtgttcttgatattacatcgaaattctacaaatggtagtttcttacatattagttgcaatatgaaatctgaaacaatattaatgaactttgtatattttgttacattatattattgttctattttatattttgaataaatgtttttacctatgcatggttcatattatgcatctgaattttttgaaacacttcagatgattccaatgtgcagccatatttgaaaactattgctccagaatttatgatcagagccataaggaattagaatgtgtttctcttacttccactagccctggccataataatacctcctctctgttattctggatgtgacacasagagagagagagagagaatttgaagattaggagaaggaggaaaaccagatgaagctaggaaa

SEQ ID NO: 229295 - DNA, 593 bp, Homo sapiens
ggtttcctttctcctccaacaggacagcacttcacatctgctgtgttctccctccctcagtgcccagagattctgtatgcaccatgttgctggctggggtgggagaggggtggtgtaggtgatttaaaactgtttgtttttgttttgttttgttttgtttgagacattggctcactctgttacccaggctggagtacagtggtgcaatctcagctcacttcaacctccacccmctggggttgagtgattctcctgcttcagcctcccaagtagctaggactacaggcacctgccaccatgcccggctaattttttgtatttttagtagaggcaggttttgccacgttggccagacttgtcttgaactcctaacctcaggtgatctgcccacctaagcctcccaaagtgctaggattacaggtgtgagccaccatgcccagcctaagaactatttttttatatgttttcattgcttctttcagagatgagaagttaaaaccaggtattctgagtgctcacctggttttggttcttatgaaagtggttttttatttttgtttgttttcctgtgtagatagttgttaatttggtgt

SEQ ID NO: 229296 - DNA, 593 bp, Homo sapiens
ggtttcctttctcctccaacaggacagcacttcacatctgctgtgttctccctccctcagtgcccagagattctgtatgcaccatgttgctggctggggtgggagaggggtggtgtaggtgatttaaaactgtttgtttttgttttgttttgttttgtttgagacattggctcactctgttacccaggctggagtacagtggtgcaatctcagctcacttcaacctccaccccctggggttgagtgattctcctgcttcagcctcccaagtagctaggactacaggcacctgccaccatgcccggctaattttttgtatttttagtagaggcaggttttgccaygttggccagacttgtcttgaactcctaacctcaggtgatctgcccacctaagcctcccaaagtgctaggattacaggtgtgagccaccatgcccagcctaagaactatttttttatatgttttcattgcttctttcagagatgagaagttaaaaccaggtattctgagtgctcacctggttttggttcttatgaaagtggttttttatttttgtttgttttcctgtgtagatagttgttaatttggtgt

SEQ ID NO: 229297 - DNA, 568 bp, Homo sapiens
aaaaaccatctgatggattttaaaaccaaaaaatgtagcaacaggagaattaatacttcaagaacatgaggtaatttggctagagacaaaagtgagaatagtgaccacaagataaataagataaaaactaccagtattagaaatgacaagaaaataagtaaatacaactggaaataaaaatyatttttaaaaaaattttagatgcgggggaatacatgcacagatttgttacatggatatactgtgtaatgctgtggtttgggcttctattgaactcatgacccaaatagtgaacacagtacctaaaagggagtcctcaaccatgcctcctctctgttcctccacttttggagcttccattgtccattgttctaatctttatgtccatgtgtacccagtgtttagcttcagcttgtaagtaaaatcgtacagtatttgattttctgtttctgcattaagtcactgaggataatggtgcatccatgttgctataaagaataagatttcattcttttgctgcctggatactattccatgatgtatatgtaccatatttctttatccaatc

SEQ ID NO: 229298 - DNA, 568 bp, Homo sapiens
aaaaaccatctgatggattttaaaaccaaaaaatgtagcaacaggagaattaatacttcaagaacatgaggtaatttggctagagacaaaagtgagaatagtgaccacaagataaataagataaaaactaccagtattagaaatgacaagaaaataagtaaatacaactggaaataaaaattatttttaaaaaaattytagatgcgggggaatacatgcacagatttgttacatggatatactgtgtaatgctgtggtttgggcttctattgaactcatgacccaaatagtgaacacagtacctaaaagggagtcctcaaccatgcctcctctctgttcctccacttttggagcttccattgtccattgttctaatctttatgtccatgtgtacccagtgtttagcttcagcttgtaagtaaaatcgtacagtatttgattttctgtttctgcattaagtcactgaggataatggtgcatccatgttgctataaagaataagatttcattcttttgctgcctggatactattccatgatgtatatgtaccatatttctttatccaatc

SEQ ID NO: 229299 - DNA, 444 bp, Homo sapiens
aatgctcaactcatgcttagttatgaatggcttctgacgtgctggtgctgacaggttccmatgtaaactggacagacgaaattttatttgtgattgaatgtatttttgttagaggcaagtaaacagttgacataaagcattactcactcattcaatccttgaagcttcgtaaaacaaaaataaattatttggtaaattttgtttatgagttaattataaattagtgagcacatgaatttaatctcctgaaactcatcaaattattttatcattataaaagggggtttatagtctattaaacagtaattctttaatagaaaaggaatgtatggcccactttacctatcatatagattaaaggcttcaataattttgcaaactattcttgaaaacaaaattaagagtccattagcacttcacacccccaacaatagaaacattaac

SEQ ID NO: 229300 - DNA, 444 bp, Homo sapiens
aatgctcaactcatgcttagttatgaatggcttctgacgtgctggtgctgacaggttcccatgtaaactggacagacgaaattttatttgtgattgaatgtatttttgttagaggcaagtaaacagttgacataaagcattactcactcattcaatccttgaagcttygtaaaacaaaaataaattatttggtaaattttgtttatgagttaattataaattagtgagcacatgaatttaatctcctgaaactcatcaaattattttatcattataaaagggggtttatagtctattaaacagtaattctttaatagaaaaggaatgtatggcccactttacctatcatatagattaaaggcttcaataattttgcaaactattcttgaaaacaaaattaagagtccattagcacttcacacccccaacaatagaaacattaac

SEQ ID NO: 229301 - DNA, 515 bp, Homo sapiens
catgataagatgatgagtaggatgtattagtgcaagaatgaacacagtgtcaatggtagtgacatcctcatcataataatatttgctggtagtagtaaatagtcatggtcaaattcaaggaaagacaggcataacatcttatggggttggagaggaagggagaagtcagggagtatttcacagaggaggtgaaaaatgacccatgattaaaggtagcaaaaccactaagcttttgacagatccttaaataaattttctagcccattgttctttatattctcatccagacctgtgtaaaagcatgaattttcctttttgtatgcttttatatccttctcactttctgtctagctttaaggcagcaattcctagtaacaggattatctcrtgattaaattattgctacctctttggagctgttcctactttcagcactattttctcaactaatatttcttctaaatgtatttcagtatgcagtgctttgatgaataataaaccccttctccatttca

SEQ ID NO: 229302 - DNA, 515 bp, Homo sapiens
catgataagatgatgagtaggatgtattagtgcaagaatgaacacagtgtcaatggtagtgacatcctcatcataataatatttgctggtagtagtaaatagtcatggtcaaattcaaggaaagacaggcataacatcttatggggttggagaggaagggagaagtcagggagtatttcacagaggaggtgaaaaatgacccatgattaaaggtagcaaaaccactaagcttttgacagatccttaaataaattttctagcccattgttctttatattctcatccagacctgtgtaaaagcatgaattttcctttttgtatgcttttatatccttctcactttctgtctagctttaaggcagcaattcctagtaacaggattatctcatgattaaattattgctacctctttggagctgttcctactttcagcactattttctcaactaatatttcttctaaatgtatttcagtatgcagtgctttgrtgaataataaaccccttctccatttca

SEQ ID NO: 229303 - DNA, 491 bp, Homo sapiens
tcttttataaaagctactgtgactaagaaatctcattctaatttacttctttttttatagattttaaaacctaatttaggttatagagaagtccagctagcctgtgagacctttgatttatttaaagtatctttgtatgtagctgcatcgtttgctacgttgtgatttcatgttggattctcagagacgaataatattgcctatttttccaagttatttgtaaggaarggactatgcagtggtaaaatggtgtggctactcgcctgtctttcttacacagttttagtgagaatcaataatggttataataataataaatgttattaacttgtaacactgaatgtgtgccattcactgttctatgcataacagatatcggtcctttttacctgaaagtcatcctataaaatagatactcatagaatcctcatattttagaagacaatgaagcacaaataagtcaaataccatgcccaaggtgatgtagccag

SEQ ID NO: 229304 - DNA, 512 bp, Homo sapiens
cccagaggcttaacatcacatggaatccaccaaggcttatggcttgcaccttccagaacaacagcccgagctgagctatacctggggccctttgagccaaggctggagccataacagcagatatgcaggaagcagagcctggaggctgcacagggcagcagagccctggccctggctcataaaactattcttccctcttaggccactgggcctgttatggaagtrgctgcctccttagagacttctaaaatgtctgtgaggcctttttctcattgttttggctattatcaattggctcctttttcattttgcaaatctctctagcaagtggttgctccacaacctgcttgtattcttcccctgaaaacaggaaaaccacattattcccctgaaaatggggaagaccccacatggccagtctgcaaatcccctaaacttttacactctacatcccctttttaaatataacttccaaatttaagtcatttctttgctcctgcatctcaatttag

SEQ ID NO: 229305 - DNA, 512 bp, Homo sapiens
cccagaggcttaacatcacatggaatccaccaaggcttatggcttgcaccttccagaacaacagcccgagctgagctatacctggggccctttgagccaaggctggagccataacagcagatatgcaggaagcagagcctggaggctgcacagggcagcagagccctggccctggctcataaaactattcttccctcttaggccactgggcctgttatggaagtggctgcctccttagagacttctaaaatgtctgtgaggcctttttctcattgttttggctattatcaattggctcctttttcattttgcaaatctctctagcaagtggttgctccacaacctgcttgtattcttcccctgaaaacaggaaaaccacattattcccctgaaaatggggaagaccccacatggccagtctgcaaatyccctaaacttttacactctacatcccctttttaaatataacttccaaatttaagtcatttctttgctcctgcatctcaatttag

SEQ ID NO: 229306 - DNA, 632 bp, Homo sapiens
ggggtggggagatttttggttaaaaggcaaaaagtttcagttagacaagtggaataagttttgaaatctattgcacagcatggtgactattgttaacaataatgtatcatatattcaaaaattctaaaagagtggattttaaatttttatactacacacaagaaaaatatgtaaggttatagatatgttcattagrcagatttaattattccataatgtgtgcatatatcaaaacattacagtttaccctacaaacaagaataatagaaagtattaatttataattgttttgtttaagagacaagatctcactctctcacccaggatggagagtggagagtagtggcaggatcatagctcactgtaacctcaaactcttgggctcaagcaatcctccaccctcagactgccaactacctatgttacaggtataatacctagtattacaggtacatgccaccacatctggctattatttttttagacacagagtcttgctatgttgtcctggctgctctcgaactcctgtacacaagaaattctcccttctcttcctcctaagtgctgagattacaggcatgagccactgcacccagcctgataatagtcttttaataaaggtaactcaagta

SEQ ID NO: 229307 - DNA, 632 bp, Homo sapiens
ggggtggggagatttttggttaaaaggcaaaaagtttcagttagacaagtggaataagttttgaaatctattgcacagcatggtgactattgttaacaataatgtatcatatattcaaaaattctaaaagagtggattttaaatttttatactacacacaagaaaaatatgtaaggttatagatatgttcattagacagatttaaytattccataatgtgtgcatatatcaaaacattacagtttaccctacaaacaagaataatagaaagtattaatttataattgttttgtttaagagacaagatctcactctctcacccaggatggagagtggagagtagtggcaggatcatagctcactgtaacctcaaactcttgggctcaagcaatcctccaccctcagactgccaactacctatgttacaggtataatacctagtattacaggtacatgccaccacatctggctattatttttttagacacagagtcttgctatgttgtcctggctgctctcgaactcctgtacacaagaaattctcccttctcttcctcctaagtgctgagattacaggcatgagccactgcacccagcctgataatagtcttttaataaaggtaactcaagta

SEQ ID NO: 229308 - DNA, 632 bp, Homo sapiens
ggggtggggagatttttggttaaaaggcaaaaagtttcagttagacaagtggaataagttttgaaatctattgcacagcatggtgactattgttaacaataatgtatcatatattcaaaaattctaaaagagtggattttaaatttttatactacacacaagaaaaatatgtaaggttatagatatgttcattagacagatttaattattccataatgtgtgcwtatatcaaaacattacagtttaccctacaaacaagaataatagaaagtattaatttataattgttttgtttaagagacaagatctcactctctcacccaggatggagagtggagagtagtggcaggatcatagctcactgtaacctcaaactcttgggctcaagcaatcctccaccctcagactgccaactacctatgttacaggtataatacctagtattacaggtacatgccaccacatctggctattatttttttagacacagagtcttgctatgttgtcctggctgctctcgaactcctgtacacaagaaattctcccttctcttcctcctaagtgctgagattacaggcatgagccactgcacccagcctgataatagtcttttaataaaggtaactcaagta

SEQ ID NO: 229309 - DNA, 531 bp, Homo sapiens
gttaacttttgttaatatatggtgagaggtatgggtctagtttcattctccatataaccattcaagttttctagtgccatttattgaatagggtgtcttttccctagtgaacacttttgttgactttgttgaaaatcagttgtaggtatctggctttatttcttggttctctattctgtttcattggtctatgtgtttaygtttatgaaagtagtatgctgtttgggttaatatagccttgtagtataatttggagtcaggtaatgtgatggactgcagctttgttctttttgcttaggattgcttcagctacttgggtttttttttaattccctatgaatttcaaaattgttttttctaattctatagaaaaagacattggcaatttgatggggattgcattgaatctgtagattgcttttggcagtatggtcattttaatgatcttaattcttccaatccatgagcgtgggatgtttttccatttgttggtgtcatttacgatttctttcatcagtgctttgtagttcc

SEQ ID NO: 229310 - DNA, 420 bp, Homo sapiens
ggggatttgtacacatgctgtaaagggctgctgtgtgataaaccaccctacaatttggtggcttaaaacaacagcaatgtcctttgctgatgaccttatcgtttgggcaggagtggcggaaatgacatatctggactctgtgtggtgttagctgcgacgactcaggtggaggctggaggggtccccctaaagtctcttaaccgcatggctggcaaggtggtacaggctgcaggccacgggcctcaggggttccccacgtggcccccacatccacacttcctgtgggcttcctccaagcatccccaaaaagcacatgaaaacatagacatgctacggcgaattctaggaaatccagagcattacagtagcccccttgkccacaattgcactttccacggtttcagtgacctgcggtcaatc

SEQ ID NO: 229311 - DNA, 474 bp, Homo sapiens
ctttttaataacagtcattctgtggccaggtgtagtggctcacacatacaatggcagcacattgggaggccaaggtgggaggattgcttgagcccaggagttcaagaccaacctggcaacatagtgagactctgcctctacaacaacaacaaaaattagccaggcatgacggtgcacacctgtagtcctagcttctcaggaggctgagataggaggatcacttgagcccmggagttcaaggctgcagtgaactataatcacaccactgccactccagcctgggcaacagagtgagaccctgtctctaaataataataatagccattctaactggggtagaatgatatctcattgtggttttgatattcatttccctgatggttagtgatatcaaccattttttcatagacctgttggccatttgtatatcttcttttgagaaatgtctatttagatcctttgcccactttttaa

SEQ ID NO: 229312 - DNA, 224 bp, Homo sapiens
actctggcaaactgttgaaaaggcatgattgtgttttgaaacgttgggacatgagatttgggaggggccggggtggaatgatatggtttggctgaatcctcacccaayctcatctttagttgtagttcccatgatccccacatgttgtgggaggaacccattgagaggtaattgaatcatggggcagttatctccatgctgttcttgtgatagtgagtgagttc

SEQ ID NO: 229313 - DNA, 596 bp, Homo sapiens
ttgaggggtcaatttaaaattgaaatatttaaaataataacaggtttaccaatctatatctaatactatatctatatttatactaatctgattagttgttagtaaccctccattttcttacatgtataattctatgttaaaagagtttgatactgtataaaagtgccaggtcctcaaacttttaaatttttgcaaatgtgatagagaaaaagataggttattatgggtttaatctgcatatctctgattactaataaggttgaaaatcttttcatgtgtttattgagtttttgcttttcgtctgtgaattgcttgttcatttctcaagcccatttctctgttgggacatttgtctttttcgcatcaatttgtaggtgctytttatagattctggatgtaaatcctttgttgtacatgttactaatatctctgtttgtcatttgtcatttagctttctttatagtatcttctatcacccagaagttacaatttttatgtaattgcatggcagacatttctttgttaactgtggggttatcaagcctgacttctagaatgctagggtgttacaccaagggaacactcaagtcagaatc

SEQ ID NO: 229314 - DNA, 594 bp, Homo sapiens
tgcagtttcagtggtggctaattgtttggatagatagaggtaacgtatggagtttctgcaatgccattaaaaatgagctgtgggcagatccatagagttctggagaatgccatgccttcttcagcagagaattatgatgtttgcaaaacagctcctggcatttaaatgtttcctactggagactgcacacctcatcatggagcaccaagcgcctctatgaatggaggtgctctttatggtctggatatcaccaggtccactgaaccaagtagtagagcaggcacaacagcaaatcactgtataatgaaaggggtttattggggacaagattccagtacctccgaaagaatgagtaaattacaaaatcagatggcccagatccctgtattaagtacttaagttacattgatgcctctccctcactcatcatacctttgaccaatgagattttttccacaattgactattgaaggtctaaagggttctrgtccaattcactaatgagtctgagcaatatgttggtgctagttgtaaataggcagctgctacactacagcgccacacaggtttgacctgaattgatggtgaaggaaa

SEQ ID NO: 229315 - DNA, 594 bp, Homo sapiens
tgcagtttcagtggtggctaattgtttggatagatagaggtaacgtatggagtttctgcaatgccattaaaaatgagctgtgggcagatccatagagttctggagaatgccatgccttcttcagcagagaattatgatgtttgcaaaacagctcctggcatttaaatgtttcctactggagactgcacacctcatcatggagcaccaagcgcctctatgaatggaggtgctctttatggtctggatatcaccaggtccactgaaccaagtagtagagcaggcacaacagcaaatcactgtataatgaaaggggtttattggggacaagattccagtacctccgaaagaatgagtaaattacaaaatcagatggcccagatccctgtattaagtacttaagttacattgatgcctctccctcactcatcatacctttgaccaatgagattttttccacaattgactattgaaggtctaaagggttctagtccaattcactaatgagtctgagcaatatgttggtgctagttgtaaataggcagctgctacaytacagcgccacacaggtttgacctgaattgatggtgaaggaaa

SEQ ID NO: 229316 - DNA, 196 bp, Homo sapiens
ggagagggtaatgatttacctttgaagtgactattcctggtgtggatttatccacagtgccttcaaccatctgagggcttatagaatgtctagtctattggcatcagatcctatacaacactgcctcagaccaacatgcataayttatggcaaaggagatgacaaatggactcaatcataggcttcactgatttta

SEQ ID NO: 229317 - DNA, 592 bp, Homo sapiens
tgactccattttagtcatgctaatctctctagcaagtggtttctccccggcctgcttggattcctctcctgaaagggacttttctttctctggcacttgggtactttttaaatgtaagttccatctttaagtcatttatatgctgtcacatctgatccaaggcttttagaagcagccaggccacatcttgaacactttgctgcttagaaatttcttgcacccaataccctaagtcatcagtctgaagttcaaacttccacagatccctaggacatggacagaatgcagctgagttttttgctagggtataacacgggtgacctttactycagtttccaataagttccttatttccatctgagacctccatctagccttcactgtccctacctctatcagtattttggtcacaaccatttaaccagtctctaagaagttccagactttcccatatctttctgtctttttctgagtcctccaaactcctccaacctctgccctttcccttattccaaagccacttccacatcttcaggtatcttcatggcaacaccacactccttggtattaatacaatttttgttgttagtcc

SEQ ID NO: 229318 - DNA, 524 bp, Homo sapiens
tttatgattaatgcctcaaaaactcaggcaacaaaggcaaaataaaccaatgggattatatcaaactaaaacctctgcacagcaagaaaacaatcaacaatcaacaaagacaatctacagaatgggagaaaatatttgcagactattcatttgacagggtattgatrcccagaatatataaggaactcaaacagaactcaacagaaaaaaaatcccaaacaatacaattaaaaaatggacaaaccatctgaataaacatttctcaaaagacatacaaatggccaacaagtatattaaaaatgctcaacatcactaatcatcaggaaagtgcaatcaaaactactacgaaagaacatctcaccccagtgatgtttagtatcaaaaagacaaaaaataacaaatgctgcccagggtgcagagaaatgcaaaggcttatacactgttgatggaaatgctaactaatgcaattactgtggagaatatggagaacagtatgggagtgtctcgaaaaactacaagtaatt

SEQ ID NO: 229319 - DNA, 524 bp, Homo sapiens
tttatgattaatgcctcaaaaactcaggcaacaaaggcaaaataaaccaatgggattatatcaaactaaaacctctgcacagcaagaaaacaatcaacaatcaacaaagacaatctacagaatgggagaaaatatttgcagactattcatttgacagggtattgatgcccagaatatataaggaactcaaacagaactcaacagaaaaaaaatcccaaacaatacaattaaaaaatggacaaaccatctgaataaacatttctcaaaagacatacaaatggccaacaagtatattaaaaatgctcarcatcactaatcatcaggaaagtgcaatcaaaactactacgaaagaacatctcaccccagtgatgtttagtatcaaaaagacaaaaaataacaaatgctgcccagggtgcagagaaatgcaaaggcttatacactgttgatggaaatgctaactaatgcaattactgtggagaatatggagaacagtatgggagtgtctcgaaaaactacaagtaatt

SEQ ID NO: 229320 - DNA, 572 bp, Homo sapiens
aattctgtatagcgtttgccacccttctcagttacacacagaagaggrattgggggctcagagaggttaagtaactaggaaactatgacccagagcccaggtctgttggattctgaaactcctgccttttgtaaacgaagattaggtgtttgcaagtggttaaatgggatgtgagaaacattccccacttcggatcatgcacaatttgttcaatggtatgaagcagcttttgtggtacaattcacaaatatatctcaggagtttatttaaaaatagttcatattcagtaataggaatatgaaccttcactgcaatgtttcattataagtaatttctcaggaaaattatgataacaatgccatcaaatgaatggcacttgacaagaagctgtgaagttgtcctcaatgacaaccagtaaatctatatatgctatagcattcagaatacctataactagtagatctatagatgttagtgcgtgggagaaacccggcctgagatgattgatgcccctacaaaacctttgggaactgaggcataattgccctcacaatgaagactgaaggagttac

SEQ ID NO: 229321 - DNA, 406 bp, Homo sapiens
caacattcttcttttaattgattgtgtctggcatcatcactaaactgaagagtagccagctaaattctctcttcagacaatttagaattgggcttgagaaacagtcagtctgagctggtctctcaagtcacagacagttctagttaatgatttatttctatgaatttcatcaaaacttttaaattaatcacataaagtygttcagaataacttatctttttaatatctgtagcatctctggtggtgacctctctcattcctaatattggttatttgtgccttatctcttttttttccagattgcccttgccagagatttgttaattatattagctttaaaataaaacaacatttggttttttcatcttctttatttgtttttgtttctatttaattaaattctgtt

SEQ ID NO: 229322 - DNA, 631 bp, Homo sapiens
tagtcacatactcagatttatgtaccatcttattgtgtgttatttatcttcatctgttttgtttctttttgtcttcatktctgccttcttttgtattaactaagcattttattcttatttccttttgttcctgaacttccttcaaggttatatactctactcatttaatgtgtaggctacaatttacaatatacatatctatttaccttatcaaaattaaatttaatcaatacctttaccatttcccttacaatattttggaacttattaattcaagtaagtactaccatctcccaactaaaatgttattttatatcgtcaatttttttgaatgttttacatactactactttcttttctattctttcctacttgcatataatactttccattttaggtcactcttttcagactaatgagcatcctttaaaatgtcctttagtgaatatctatcagtgacaaactttcaaatttttgttagaattaagtttaaaaggtttctaaaccttttgttagaattaagttgaaaaggtttaaaaccttttcaggaggtgaattagaaaccttttcaacttaattctaacaaaacagtttcataccatacaggaggcaattttaacagtacttagaa

SEQ ID NO: 229323 - DNA, 495 bp, Homo sapiens
taagttattctgaacaactttatgtgattaatttaaaagttttgatgaaattcatagaaatatatcattaactagaactgtctttgacttgagagaccagctcagactatttctcaagcccaattctaaattccctgaagagagaatttagctggccactcttcagtttagtgatgatgccagacacaatcaattaaaagaagaatgttgcattaaatcacaaaaatatgtctgccagaggttagtactgagcagagagtgaaaaattttgtttcccttactgttgaaagacattgtagattggtaaagaattctaagattggacattattatttttctgcaccttaaggacattgctccactgtattctagctttgatttttattgttcctagtcagctgtcastctgttactcctagagggtaatatataatttttctctggatgttttcagatcttatctttgtctttagtatcttacagtatttctatgct

SEQ ID NO: 229324 - DNA, 470 bp, Homo sapiens
aaccacagacaagagtaccttcgtgaayatccctgaatgtgtgagagaggctgagacacccacttggaccacagaactgagaaaggtacattcaaaaagtaagagttttcactttgactacatcatctttccctcaagccagcacagcatcacccagcacatcactcctgggcccatggtttctacagtgggaaaagagagtgggaagtagaaattcagtttcctcaccatttcccccatgagaaacattgaaagttttgttggggctagactaggtgggttcagttaaaaaacaaagaataagggtaaggctcacagcaaccaatgtgcaaatcttggcagtggctctgcattatggcaaaagaaggcattccactagaaaaactagccaatagcagcactccagaagaagcacagctgacaagtctgccagactccagtccctacttagcttctccacccagccctgg

SEQ ID NO: 229325 - DNA, 420 bp, Homo sapiens
gagacacccacttggaccacagaactgagaaaggtacattcaaaaagtaagagttttcactttgactacatcatctttccctcaagccagcacagcatcacccagcacatcactcctgggcccatggtttctacagtgggaaaagagagtgggaagtagaaattcagtttcctcaccatttcccccatgagaaacattgaaagttttgttggggctagactaggtgggttcagttaaaaaacaaagaataagggtaaggctcacagcaaccaatgtgcaaatcttggcagtggctctgcattatggcaaaagaaggcattccactagaaaaactagccaatagcagcactccasaagaagcacagctgacaagtctgccagactccagtccctacttagcttctccacccagccctggtg

SEQ ID NO: 229326 - DNA, 420 bp, Homo sapiens
gagacacccacttggaccacagaactgagaaaggtacattcaaaaagtaagagttttcactttgactacatcatctttccctcaagccagcacagcatcacccagcacatcactcctgggcccatggtttctacagtgggaaaagagagtgggaagtagaaattcagtttcctcaccatttcccccatgagaaacattgaaagttttgttggggctagactaggtgggttcagttaaaaaacaaagaataagggtaaggctcacagcaaccaatgtgcaaatcttggcagtggctctgcattatggcaaaagaaggcattccactagaaaaactagccaatagcagcactccagaagaagcayagctgacaagtctgccagactccagtccctacttagcttctccacccagccctggtg

SEQ ID NO: 229327 - DNA, 612 bp, Homo sapiens
tgtagtgccccaccaagtattggcactctgctttagactttcctgggccagaaggcaagtgcaggtcagcaattacctgcaaagaaaagtatctgatcttgcccaactccagctgcaagcagtgaccacacaaagcctcagtgttctgcttaaagcttctccagaccaggagacaagtatgcatatatgcacatctgtggagcaaagcctctggcctaaatctactcttaatacattcagacacataagatactaatttcatcttcctgagtaaacattccctggagacttccaacctctttcaatctggacagattgtccttactgctcaattgtcctttcaagagctgtctttaccattacccagtggattctattttccctcaatcctgtatgaatcttctgtttcctaatcttgtgttcatttwggtggagtacatctttgattaattttctgagaaaaagggcgggtaggtacatattttgagaccttgaatgtctaaaaatatttttaacctaacctcatatttgattcatagtttgagagggcaaataatttacaggttatttaaatattttttcaaatatttatggcatttttcctttgtgttc

SEQ ID NO: 229328 - DNA, 438 bp, Homo sapiens
tgcctaatctcagagcttagcacrtggctttgctcatctacagattccaaacagcagtattacctagtgagagaagacaatctgtaactctgctcagaggcaatcacaaaacttagctaatagctctgcctaactacagagtccagccagtgatctcatcaaactctagagcacagccagcatttccatttgacctcaaagcggtcagcagtacagcccagctagagaatctgacagcaaggcctgcctgccaggacttgccaccagctgggccatccagaatcccaggctagactaaacagtgaaggtttattgctactgaagaaaattagcaaagactggaagaggtagccatttcttcaaatgtgtagacactagtgtaaggtttacaaagatccagagaaatatcacaccaaaaaaagcaactaataaatctct

SEQ ID NO: 229329 - DNA, 438 bp, Homo sapiens
tgcctaatctcagagcttagcacatggctttgctcatctacagattccaaacagcagtattacctagtgagagaagacaatctgtaactctgctcagaggcaatcacaaaacttagctaatagctctgcctaactacagagtccagccagtgatctcatcaaactctagagcacagccagcatttccatttgacctcaaagcrgtcagcagtacagcccagctagagaatctgacagcaaggcctgcctgccaggacttgccaccagctgggccatccagaatcccaggctagactaaacagtgaaggtttattgctactgaagaaaattagcaaagactggaagaggtagccatttcttcaaatgtgtagacactagtgtaaggtttacaaagatccagagaaatatcacaccaaaaaaagcaactaataaatctct

SEQ ID NO: 229330 - DNA, 593 bp, Homo sapiens
agggcatggtgtgaaggatgctgtgtctgctggtcccctcagtccccgagcaaaaggactgatttttttttggttccaggttcttttctggttcagatgacatggctgtgtgtcccctaacttttgacccatcaatccatactttttgacatctctcatctgttcttttgccccgtatttccttccacctcccagtacattaactagggcaatgtgaactgctgtatcaaagccaaaactcagttgttgacacaatagaagcacatttcttgctcatgtaagagtcttctctggtcaatcagaggctttcttccatatgtgggtttasataggaggcttccttctgttgcatggtttgccattccctaggacctgagttctcagcatttagatggtagaggggcaagaaggtggagaaagtatctttattacttaaaaccccacctacacctccattaataagaacttaccacatgagggagggagcaggaagttttgcttgacagcaagccacctctgtcacatccagcctgcctatgtcttaactccttttttttctcttgtctttatttatctccttctcctactatctg

SEQ ID NO: 229331 - DNA, 409 bp, Homo sapiens
ggtcttatatttaaatatttgatccatctaagttgatttttatgtaaggtgagagatgagtatccagtttcagtcttctacttgtggcttgccagttatcccagcagcatttgttgaatagggtgtcctttctccactttatgtttttgtttgctttgtcaaagatcagatggctttaagtatttggcttttgttctgggttctctattctgtttcattggcctaggtgcctatttttataccagtaccatgctattttggtgactgtggccttatagtataatttggagttgtgtaatgtgatgcttccagatttgttctttttgcttagtctttctttggctatgcaggctctttgtttcatatgaattttgggattgttttttcwagttctgtgatgagatggtgg

SEQ ID NO: 229332 - DNA, 555 bp, Homo sapiens
gtatagggatgatcaggcagtgggcagtgccctagagttcccaagggagctctttgtttttggctaccagggcaggtagagaaagaccatcaggtgggggcagggttaggtgtgtctgagctcagactctccttgggtggggcttgctgtggctgctgtgggggattggggagtgggggtgtggttctcaggccaatgaagttatattctcagggggattatggctgcctctgctgtgtcatgtatgtsaccagtaaggaaagccgacagttataggcctcatccagctgctatgcagcccaaaatgccagtctcactcccaccataccccctccccaacatcactgggttgtttccaggcagcaggtgagcagggctgagaacttgccccaggctgccaaccttctggctatgaaagtgagcggggctttcaggtttcacacttcctgcctgccatggcttctgtgctgtgtctgcactccagattcatgccctctcccaagttatgcccaggaaaatttgcattcagttgaaattgttacaaagttcagctgg

SEQ ID NO: 229333 - DNA, 399 bp, Homo sapiens
tgtttttttttttttttctaggagttttatggcttaagatattacatttaagtctttgatctattttaatttatatatatagtgtaagaaaagggtttgatttttttttttttttgcatctggatatccagtctgcccaacaccatttattgaaraaactttccttacattgtgtgtttttggcgcactagaaaaatattagttgaccatatagattttcttgaataaatatgtcttcatttcctgtatgcccttaggaaatttacagagactttaaataggtgctagtttttaaaaataattttcaccagttaaagctgttttgtatgggagcagctttgagctcctcacactgtcattccagaagttgtatctctccaattatctgtagaagaaatt

SEQ ID NO: 229334 - DNA, 521 bp, Homo sapiens
ctttattcacaacaaaatgcctccatgagcacattcttcgaaaaattcattctcattaatttttttattagaaaaacaattgtaaccattatactgaacaagccgaacccgtgggatgtaactataaaaaacaattttttgtccacgactagcctttaaagttactctgtagccatagttaatgtccctgaactttcatttaggctaatgatcatgactttggtcactcccaagttataaaaacaatctgacttttaaaactgaaagatccagctgggcatagtggctcccacctgtaatcccaacaatctgggaggctgagacagaggatcacttaatcccaggagctggagaccagcctgggcaacatagggagaacccgtctctamaaaaaaatttaaaaaaataaaaaaacttagccagatgtggtggtgcatacctatagtcccagttacttaggaggctgacgtgggaggatcactcaggccttggaagtcgaggctgcagtgactgaaagatct

SEQ ID NO: 229335 - DNA, 480 bp, Homo sapiens
ccactaaggatgtcatggagcccaacctagttatgaacatccatgctacagggaggacagattcatctgctcaggctgccattgcaaaataccatagactgagtggcttacacaatrgaaaattctctctcacggttctggaacctggaagtccaagatcaatgtgccagcacggtcaggtctggtgagggctcttgtcgtagcttgtagaaggccaccttctcactgtgtcctctggtggagacagtgagagctctggagacaacaagctctctggagtcccttcctataagggcactgatcccatcatgagagccccgccctcgtgacgtcatctaactccagttacctcccaaaggcctaatttctaaatactgtcactctactgtgagggattcagtatgaatttggaggagacatacacattcagaccacaacaaaggggaaaccaaatgcagccctgtgctgttggttgcaggg

SEQ ID NO: 229336 - DNA, 562 bp, Homo sapiens
gcattgtaccttctatgattgaatcttactctgaagtttaaaatatgcttcgaacagtaagaacttcaaaactgcagttaactgcaatctcaaatggaaccagaaggacatttcaactcaaaagacctagatttgagtacaaatgtcattaatccttatgacaagtctaaaatacttgcagcaatcttaaaatggtccagaatgcttcttagcccaaatctttaaagtgagaagccagccagttgaaaagttccacttatctatgttgagggctgtggaaatggggcagtggygagttaattatgggcatgtttggtggaagagatgaggcaatggatttctctaaattgtgaagaaaggctggggcataggcacactaaccaggtgcgttttagagactagactggggttcaaaggatttacctacaccagagcagactcatacctccctccagtgggcagtaattaatcccagctgatatggtttggttgcgtccccacccaaatctcatcttgaattcccacgtgttgtgggagggacccagttggaagtaactgaata

SEQ ID NO: 229337 - DNA, 360 bp, Homo sapiens
tggtttccatggtgaccagccggtcagctggctccttccaccgccccctccttcacccccctttcttgtagcttccagggaagggtactgtgtgtgaatggagaaggcaggggtagccttttgtctcttgggagctctagcrttggccaaaaagagctaaactgtccctcctccaaagccctttgaagtggagacaggaaggcagtgggggtgggtgtcaagaggaagattatggtgcctaaatggggagcacgaaaggatcctctgtgggtttggaaaggccaaggttaggggctctgctctctgtgggggaaggggttgaaactggaacaagaggggctggagttagctgtgaggcca

SEQ ID NO: 229338 - DNA, 360 bp, Homo sapiens
tggtttccatggtgaccagccggtcagctggctccttccaccgccccctccttcacccccctttcttgtagcttccagggaagggtactgtgtgtgaatggagaaggcaggggtagccttttgtctcttgggagctctagcattggccaaaaagagctaaactgtccctcctccaaagccctttgaagtggagacaggaaggcagtgggggtgggtgtcaagaggaagattatggtgcctaaatggggagcacgaaaggatcctctgtgggtttggaaaggccaaggttaggggctctgctctctgtgggggaaggggytgaaactggaacaagaggggctggagttagctgtgaggcca

SEQ ID NO: 229339 - DNA, 567 bp, Homo sapiens
tctgtgagtgctagcaggtgaccttgagtaagccattcactctccctctgccttggttccctgtgagtaattggggagaacagttactgtatgtcaaagactctaatgacacatagtaggattccacagtgactgtgtatgcacaagattgatcatgcatggcttttattatattcttcataatggttgtttttcatgttcttttctccccattagactttgtgctccttgcaggaaggaaactgtgtttcatttctgtactgggcacacaataggtacccaacacctgtttactgaatggagacatccagaaatgaatgaatgaataaatgtcagggtccttcctgctgtgccaggggatacagggaaaagcagtgtggggtggatggcctgaaaggataggctgcctgcagtggctcagcctggcytgcttcctacacctacaagtcagagccttagaaattgtccagtcaacttcctcactgcacagatgaagaaattaaggctcagagacaggaaggcacttgcccaaggtcacataactccttaatgacagatacagaattc

SEQ ID NO: 229340 - DNA, 600 bp, Homo sapiens
gacaaagccattctggaagagctatgatgagatgtttcaaaaatgagccacaatccaaaaaaatgctttccaagtgagtattaatcaaaatgccattaatgagcagggggcttttaataatgaggatgattcaacacatggacttcagtcagtcagctttcccagcttycccagggagtatcatgaaccaatgttatggaggtccctgtggggactcaataatatgactttcaactaactgagacctacagggctaccggcttttctgaacatctaatttgtcaagaagaacccctaacattgtatgatacatcagggctcagactaacagcttgtattaggtgatactagtggacctcatgtaacataaggaaagcactggttattttcctatatatgaatttgccattcttatcggttatgtttctgcataaaatattatttgaggattttccaagtgctttcatcaaaatcaggaaattcttccataaaatggctttggatcaagcaagttatttacctcaaaaaagaagagcgaagtgtagcttatgatcttgtcttgtgcacaggtgcaactttccctatagacagggcaaaaac

SEQ ID NO: 229341 - DNA, 600 bp, Homo sapiens
gacaaagccattctggaagagctatgatgagatgtttcaaaaatgagccacaatccaaaaaaatgctttccaagtgagtattaatcaaaatgccattaatgagcagggggcttttaataatgaggatgattcaacacatggacttcagtcagtcagctttcccagcttccccagggagtatcatgaaccaatgttatggaggtccctgtggggrctcaataatatgactttcaactaactgagacctacagggctaccggcttttctgaacatctaatttgtcaagaagaacccctaacattgtatgatacatcagggctcagactaacagcttgtattaggtgatactagtggacctcatgtaacataaggaaagcactggttattttcctatatatgaatttgccattcttatcggttatgtttctgcataaaatattatttgaggattttccaagtgctttcatcaaaatcaggaaattcttccataaaatggctttggatcaagcaagttatttacctcaaaaaagaagagcgaagtgtagcttatgatcttgtcttgtgcacaggtgcaactttccctatagacagggcaaaaac

SEQ ID NO: 229342 - DNA, 600 bp, Homo sapiens
gacaaagccattctggaagagctatgatgagatgtttcaaaaatgagccacaatccaaaaaaatgctttccaagtgagtattaatcaaaatgccattaatgagcagggggcttttaataatgaggatgattcaacacatggacttcagtcagtcagctttcccagcttccccagggagtatcatgaaccaatgttatggaggtccctgtggggactcaataatatgactttcaactaactgagacctacagggctaccggcttttctgaacatctaatttgtcaagaagaacccctaacattgtatgatacatcagggctcagactaacagctkgtattaggtgatactagtggacctcatgtaacataaggaaagcactggttattttcctatatatgaatttgccattcttatcggttatgtttctgcataaaatattatttgaggattttccaagtgctttcatcaaaatcaggaaattcttccataaaatggctttggatcaagcaagttatttacctcaaaaaagaagagcgaagtgtagcttatgatcttgtcttgtgcacaggtgcaactttccctatagacagggcaaaaac

SEQ ID NO: 229343 - DNA, 405 bp, Homo sapiens
gatcacagtcatgtgaagcattacttgcacttggatcgccagtgaggcaaagggaagatgaaacgcatagtgggatatggaggtggaaacattcmtggtcagcttaaacgtggaaaagtgtatttattttttctctttagatttatcactgaatcagttggatctgagaaaagcgattatgactggttaggtagaaaggtgtttattatcatgaattaaatggattgaaaacatttggagaaaccagtggcagcttagggatctccaagtactccctttgctattccctcaccctgcccaccccttgttttccacagtgaaggaagatactctcattttgatagaaacatggcaagtgaagatactgtgcccacaagactgtgctgcctggctgtgacccagacc

SEQ ID NO: 229344 - DNA, 405 bp, Homo sapiens
gatcacagtcatgtgaagcattacttgcacttggatcgccagtgaggcaaagggaagatgaaacgcatagtgggatatggaggtggaaacattcctggtcagcttaaacgtggaaaagtgtatttattttttctctttagatttatcactgaatcagttggatctgagaaaagcgattatgactggttaggtagaaaggtgtttattatcatgaattaaatggattgaaaacatttggagaaaccagtggcagcttagggatctccaagtactccctttgctattccctcaccctgcccaccccktgttttccacagtgaaggaagatactctcattttgatagaaacatggcaagtgaagatactgtgcccacaagactgtgctgcctggctgtgacccagacc

SEQ ID NO: 229345 - DNA, 592 bp, Homo sapiens
atctccaagtactccctttgctattccctcaccctgcccaccccttgttttccacagtgaaggaagatactctcattttgatagaaacatggcaagtgaagatactgtgcccacaagactgtgctgcctggctgtgacccagaccaggaaattgagtacatttgagtgagatcaggcacttcccctccctcatctcaatccaaaagcactctgtagtaacacatctgatgggcattcttcaccacctatgggacttaggaagccaaggacatgaggaatagcctttccagactctaccatagagaaattattgccagaaactagagaataaaataaatacrgaagaagctggtgacaataacgaaatgagccattcatatatgtatgttaaataatttagtcttttcaatacaccctttctttaaaaaaatcaaagtgctatttttagccacctttataatatagaccacatattaaataatatgtacacagattaatggctcatgagagaagatcattttttcctggacggtgttgggctgaacagattggagattccccacattttggggagcacaatgctatgtgggga

SEQ ID NO: 229346 - DNA, 592 bp, Homo sapiens
atctccaagtactccctttgctattccctcaccctgcccaccccttgttttccacagtgaaggaagatactctcattttgatagaaacatggcaagtgaagatactgtgcccacaagactgtgctgcctggctgtgacccagaccaggaaattgagtacatttgagtgagatcaggcacttcccctccctcatctcaatccaaaagcactctgtagtaacacatctgatgggcattcttcaccacctatgggacttaggaagccaaggacatgaggaatagcctttccagactctaccatagagaaattattgccagaaactagagaataaaataaatacagaagaagctggtgacaataacgaaatgagccattcatatatgtatgttaaataatttagtcttttcaatacaccctttctttaaaaaaatcaaagtgctatttttagccacctttataatatagaccacatattaaataatatgtacacagattaatggctcatgagagaagatcattttttcctggayggtgttgggctgaacagattggagattccccacattttggggagcacaatgctatgtgggga

SEQ ID NO: 229347 - DNA, 588 bp, Homo sapiens
ttgtccagcgcatccaggctctacctgctggttagtcacttagccatcttggttgtcagagctactgtcatggtatcaccgtgtttgtgttcaagaaacccttgtagtacttaacattggccccaacttgcaagagtagtgatgctggcacattgttataattgtcctatttattattacttattgttaattgcttactgtgcctaatatataaattaaactttatcataggcatgtagtctgtaggaaaaaacaatatacatagggatgggtactatctgaggyttcaggcatccgctggggatcttggaacatatcccctgtgaataagaggggactactgtatgctaaaacggggaggagagaaagagctggaaacaaaaaaatgatggaagtggagaagccaggagatgttttcattcactgataggcagaggaacagagttcagatttgagtaccaaggaccccccaggagcagaacattgccaaggaaagccctaagtccctcttcctgaactggggtagatcagccttctcctcagcatcgctgatctcgggaagcacatggctctgccatttggtaagct

SEQ ID NO: 229348 - DNA, 369 bp, Homo sapiens
ttctggtctagaaactaagtcagtgccawtgcaatgcagggaaggggaaatcatcactgggtcatgggctgcactcgtggagaaggaatggaggtcaagaccataaaccagcccctaactgcttctcatttaatgtaatcctcactgttcatcattgttggtttgaataaagtcatgaaatcttttttttttttttttgagacaggtctattgctcaggctggagtgaagtggtgcaattgtggctcactgcagccttgaatacctcagctcaaacgatcctcccacctcagcctcctgagtagctgggaccacaggcatgtgccaccacactcagcacacttaaaaaaaatttttgtagagacaggtt

SEQ ID NO: 229349 - DNA, 494 bp, Homo sapiens
atggtatttttgacatgggaatgagttctcattaggcacctccctatcatgtatatggctccatgttttaaacgtagatatgcttaactttgtgagttaaatcactccaattatccaccaagcgctacaggcgggaaattcccagcgatggaaagcagctgaggctccatttggctccgcggctcccagggtcccggcgaactccgacgaccccgcctcaggcggtgcggggaaaccgggcctgggggmcccctcccaccgagggctgagcccccgctacctgtcttttctgtcgcggacgtccaagtcccggaacctgcgcgtcaggcagtgctccacctctgcggcgtcgcccttgatggccgccctgtggatcttccgcagttcccagtcccgaatgtggtacccccgacccgcatactcttggtccatggagctcaggagcgcctggcccaggcgtctcccaaaactgaggagcttcctcatggtggcga

SEQ ID NO: 229350 - DNA, 344 bp, Homo sapiens
tctccctgcctcacccctgcagaaagatctgcagaaaaagctggaaggggtgggagggtgtgtgcaggggtggggactggggctatgcaggttccagacctggtctttggcaccctctacaggacagttccattcccagacctgagctttggacaactgaatcttatgccccttcccacccrtggagcctggtgccggaagttcccaggacttacccaccgtccaccacgccacatagcaagcgtcctcagtgtctgcagaccagaaacacctcccttgtgtctcagcactgggccacctgctgaaaccccaaactgcctgccccattgtttgagacccagtca

SEQ ID NO: 229351 - DNA, 494 bp, Homo sapiens
atggtatttttgacatgggaatgagttctcattaggcacctccctatcatgtatatggctccatgttttaaacgtagatatgcttaactttgtgagttaaatcactccaattatccaccaagcgctacaggcgggaaattcccagcgatggaaagcagctgaggctccatttggctccgcggctcccagggtcccggcgaactccgacgaccccgcctcaggcggtgcggggaaaccgggcctgggggccccctcccaccgagggctgagcccccgctacctgtcttttytgtcgcggacgtccaagtcccggaacctgcgcgtcaggcagtgctccacctctgcggcgtcgcccttgatggccgccctgtggatcttccgcagttcccagtcccgaatgtggtacccccgacccgcatactcttggtccatggagctcaggagcgcctggcccaggcgtctcccaaaactgaggagcttcctcatggtggcga

SEQ ID NO: 229352 - DNA, 600 bp, Homo sapiens
aagcacatactgcatttttcttagtcactcactggtgggaatagaaagttttctcaggcatgcatttttcccacttctgaaatgatctccttagaataaattccccaaattgtattgctgggttcaaaggcatgaacattttacatttttatacaataatgtcaaactaccttccggaaatratgctcactttactttccctccaagactgtgtgaaaatgcccattttcctaaatgcttactatgactggtttccaactacattttaattcttgttcaatctgataggcaaaaaatgatatttaatttttatttgattgataatgaccttgaacgtgcccattagccttttgcatgtattcttttatgaaacatctgttcctatccttcgtcaatgttcctcttcatatgttaacttttcttattgatttgttagagcactttgtatattgtgaatattagcttttgtgatcagaattatggaattgttgttgtctttagttttgcttatcaagtttaaagccattcagagatgttgtaaatgtgtatgttgttaaatttatgtcttattttgtgttttctgatgctcatatgtttaga

SEQ ID NO: 229353 - DNA, 437 bp, Homo sapiens
tttttaaatggaccagtagaagtggaaaggagggacatgtatgtctatactctgggagagatgacagatgccctcatttgcccccaaattggtgcatgaggrcagggctggggttgggctttgggtgctgcatcttgcaccccttaatgggtgtgaagggtcccaggtgctcaggtggggctggccacgtctccaggggacttctgtttcctgcttgtcttgctggaggccggctgctttgtcttcttcaattccttgacattcctgatattaagccccttcttgggccagtgtgagtgggcttcctcccttctaaagatcagcccgccctgagacactcgctgtttctccctaggtggaagcaccctcagtgggtgatgctagaaatacctgcccgtcatttctacttctactggtcccattttaaaaattaaaaa

SEQ ID NO: 229354 - DNA, 448 bp, Homo sapiens
tttaatttttaaatggaccagtagaagtggaaaggagggacatgtatgtctatactctgggagagatgacagatgccctcatttgcccccaaattggtgcatgagggcagggctggggttgggctttgggtgctgcatcttgcaccccttaatgggtgtgaagggtcccaggtgctcaggtggggctggccacgtctccaggggacttctgtttcctgcttgtcttgctggaggccggctgctttgtcttcttcaattccttgacattccygatattaagccccttcttgggccagtgtgagtgggcttcctcccttctaaagatcagcccgccctgagacactcgctgtttctccctaggtggaagcaccctcagtgggtgatgctagaaatacctgcccgtcatttctacttctactggtcccattttaaaaattaaaaatctgaa

SEQ ID NO: 229355 - DNA, 448 bp, Homo sapiens
tttaatttttaaatggaccagtagaagtggaaaggagggacatgtatgtctatactctgggagagatgacagatgccctcatttgcccccaaattggtgcatgagggcagggctggggttgggctttgggtgctgcatcttgcaccccttaatgggtgtgaagggtcccaggtgctcaggtggggctggccacgtctccaggggacttctgtttcctgcttgtcttgctggaggccggctgctttgtcttcttcaattccttgacattcctgatattaagccccttcttgggccagtgtgagtgggcttcctcccttctaaagatcagcccgccctgagacactcgctgtttctccctaggtggaagcaccctcagtgggtgatgctagaaatacctgcmcgtcatttctacttctactggtcccattttaaaaattaaaaatctgaa

SEQ ID NO: 229356 - DNA, 448 bp, Homo sapiens
tttaatttttaaatggaccagtagaagtggaaaggagggacatgtatgtctatactctgggagagatgacagatgccctcatttgcccccaaattggtgcatgagggcagggctggggttgggctttgggtgctgcatcttgcaccccttaatgggtgtgaagggtcccaggtgctcaggtggggctggccacgtctccaggggacttctgtttcctgcttgtcttgctggaggccggctgctttgtcttcttcaattccttgacattcctgatattaagccccttcttgggccagtgtgagtgggcttcctcccttctaaagatcagcccgccctgagacactcgctgtttctccctaggtggaagcaccctcagtgggtgatgctagaaatacctgcccgtcatttcyacttctactggtcccattttaaaaattaaaaatctgaa

SEQ ID NO: 229357 - DNA, 462 bp, Homo sapiens
tctaagtcactctctttctctttgtgtacatgtctgcacatttgttaaaagggatagtcatagacagagaggcattaaaggtctrtcagcacctaatcatcaataatttcaggaagactgagagataaatggaagtgggaaaactttctcaacaaccgtttgcatgtctactataggacagccattggcacatagcagacagtcatctttaatgctatgtctggatagctcctgaaattatctcaagaaccacgtcaaatcatcggacagcatccaccccgtggttagagatgactctacagctattaagaagacaggcacttgggttttccaagcttaggtggctgttctggcgatgagagaatgcaggccaggtgtcagcacagggcctttacatgaagtaagggtgtgataaatcctggctgtgagcatcactgccatcctcattgtcaccagtgtcac

SEQ ID NO: 229358 - DNA, 582 bp, Homo sapiens
ttgtaatcttcttttagagttgtggactttggctttgtaatgatttctgcaatcgatgtgagctgctataggtctttattctaatgaccagtgtcctagcatgatcgggatatcagaaagcatttgggtatagggtcacagaatgtttataaaatgggctaatttattttttgatgagtgacttctgaaatatggagacaagccataacagacccaatgggttgcccaataactgatgcatgagcagttgcatacctgttgacaatgtcttattgtgagtgcaggtgttctttacgatttcatcactgcaacactgtggtttactatgaagytgaaattcaggttgtaaactaggaaaggaaattataaagaaaaaagccctgaaccatgtatcacattactcacctaacatcataggaagtccttaggtagtcaaactttgttctattttgacttcagtggaatggagctgctgggaactgggcttggttctcaggcgtgcttggctgtacatttgttcattaactctttcagggtggaaagatgttgattaacattcaagaaaagtaatagttgaagctt

SEQ ID NO: 229359 - DNA, 440 bp, Homo sapiens
gcacactatgcactttgcatgcctcatcttattgaattttcaccagaacccataggggcgtgtgtgtggtaggggcaatcttgcttccctattttacaggggagggaaccaaagcctccacyttctaggttttggtgtatctctgggttcccttcagtgtcctgcaaatattgtagtaagtacatctctggtgactgcttaaataaactgccattcacacactttctctaagtgaagccgtcacttatgatttatggggtaacctgatactttaaaatctgctggatagtgtgaaatagcgtcaatgagaccattgtcaaggtccattgcctgctttattttctttgaaatataacttcattattgaagcgtcactattaaaataacagaaacccaaggcagaaaatgcccacaatcccatccctgaatctaaacagttt

SEQ ID NO: 229360 - DNA, 440 bp, Homo sapiens
gcacactatgcactttgcatgcctcatcttattgaattttcaccagaacccataggggcgtgtgtgtggtaggggcaatcttgcttccctattttacaggggagggaaccaaagcctccaccttmtaggttttggtgtatctctgggttcccttcagtgtcctgcaaatattgtagtaagtacatctctggtgactgcttaaataaactgccattcacacactttctctaagtgaagccgtcacttatgatttatggggtaacctgatactttaaaatctgctggatagtgtgaaatagcgtcaatgagaccattgtcaaggtccattgcctgctttattttctttgaaatataacttcattattgaagcgtcactattaaaataacagaaacccaaggcagaaaatgcccacaatcccatccctgaatctaaacagttt

SEQ ID NO: 229361 - DNA, 657 bp, Homo sapiens
ggggccatatgaagccttagcatcattgttatggtctgaatgtttgtatctttccccaaattcatctgytgaaatcctaaccaccaaggtgatcgtattaggaggtggggcctttgggaggtgataaggtcatgaggatggagccctcataaaggagatcagtgcccttataaaagaggtttcatccacgtgtgtcaaaatggcttttttaaaaagagaccccagggagctgccttgccccttctaccatgtgaggacacagaaagaagcagccctctctgaaccaggaacaagccccgaccggacactgaatctgctgccatcctgatcttggatttcccagcctccagaacttgagaaataaacttctgttgtttataagccacccaatctatggtatgttgtagcaatgtgaatggactaagacaactatagtttaccaacttctagcagactatgtgcatgtcccatagtaaaaagtcaaatatttgaatgaaggacatagaatctgagagctaggtagcagatttttaaagggaaagaaactgagtccaagaaagaggaagtaaacaaataaaaattgtaacatattttatcataaaaatctattttgtgtgcagattacgcattttaataaaggacaaaggtaagctgggt

SEQ ID NO: 229362 - DNA, 657 bp, Homo sapiens
ggggccatatgaagccttagcatcattgttatggtctgaatgtttgtatctttccccaaattcatctgttgaaatcctaaccaccaaggtgatcgtattaggaggtggggcctttgggaggtgataaggtcatgaggatggagccctcataaaggagatcagtgcccttataaaagaggtttcatccacgtgtgtcaaaatggcttttttaaaaagagaccccagggagctgccttgccccttctaccatgtgaggacacagaaagaagcagccctctctgaaccaggaacaagccccgaccggacactgaatctgctgccatcctgatcttggatttcccagcctccagaacttgagaaataaacttctgttgtttataagccacccaatctatggtatgttgtagcaatgtgaatggactaagacaactatagtttaccaacttctagcagactatgtgcatgtcccatagtaaaaastcaaatatttgaatgaaggacatagaatctgagagctaggtagcagatttttaaagggaaagaaactgagtccaagaaagaggaagtaaacaaataaaaattgtaacatattttatcataaaaatctattttgtgtgcagattacgcattttaataaaggacaaaggtaagctgggt

SEQ ID NO: 229363 - DNA, 651 bp, Homo sapiens
actgattaaagaaattgaagaggataccaaaaaaatggaaagacagccaggtgcagtggctccctcctgtaatcccagcactttggtaggctgaggcaggcagaacacttgaatccaggagttccagaccagtctggacaacacagtaagaacccatctcacaaaaactacaaaaattagctaggcacgacagcacatgtctgtagtcccagctactggagaagctgaagtgggaggatctcttgagcccaggagggagagattgcagtgagccaagattgcaccactgcactccagcctccagcctgggtgacagagtgggaccccatctcaaaaagaaaaaaaggaaagatgtctcaagctcatggactgaaataattaatattcttaaaatgacaatactctcccctagtaatctacagattaagtgcaattgctattaaaataacaatgaccttcttcacagaaatagaaaaaaaatcctaaaatttgtgtggaaccacaaaagaccccaagtatccaaagcaatcctgagcaaaagaaaaaagctggagtcatcacactaccagaactcaaaatatactacaaacctgragtaatcaaaacgcatgatactggcatgaaacagacacatagaccaatagaacaaaa

SEQ ID NO: 229364 - DNA, 649 bp, Homo sapiens
tcttttcttcttttctttccttttcttttcttctcttmtcttctctttctgatacgagtctcactctgttgccgaggtctgagtgcagtggcatgatcatagcccatttcagccttgaactcctgaggtgggagggctcaagcaatcctcccagtttagcctccagaatagctgggaccacaggcacatgccacatctggctaattttataatttttttttgtagagacaggagtctcactgttagatataagttctaaatttcttttcaaataatcaatatgccagtatgttcaattctttgccttctacttttaaacttaacttcctcataaagcaacctttttcgattacttactccaccctgactcattccaattacctgctctgtcatagccatttttcccgccaaaccactcaccccatcactctctttaaattagccaattggaattagtttagcctgtgtggtctaaccctagccaataagggaaggatacagcagcagggtccacatgagtcagggataagaactctttcccctcccttgtccaagtgtgtgctcaccattgctccatctgtaaggttgcacccttctatagaagtacattgccttcctgagaatcaaaaagaaaattttatatttgagt

SEQ ID NO: 229365 - DNA, 582 bp, Homo sapiens
aaccgtgtcccagccaccgcacctgcactcacacatgctgtgacgggaggggagccgcgcaggtgccctcagcaaggcccagccccgcctgcagcactagatccctctctactgagtctactccagcaaatcgctccaacagtccttacttctctcttgcaacttgaatctcttcctctctgctggatcattgccatctgtatcmaagaatgcgtttatttctcctatcttaaaaagaaagcactctcttcactgtacttccccttctagttactaagctattcctcagtttccctttgcaccaaaattcttcaaaatagttaggtatactcgctgtcccaaacttgccttttaaacctcttttaattttcaagttctctcttgattcccttctttccctcacaatctatcaactggaaaaaccaatacataaaattatgatttatctattgaagaagccatttgctgtgcagaggtcccaaagtctggattttgttgattgcgtatgcatttgttgtttaacaagttcctctgtcccctgtatttcctgcaaattggcaggtgtatccagagactcaaatt

SEQ ID NO: 229366 - DNA, 613 bp, Homo sapiens
ggatttgttgtgtgttcctttgtgtatgtttaaaatatttcattttgacttttttttaaaaaagggctgaatagattcagattatctctgtaagaagcaaatatctaggaagttagaaaaaaacatccatctggatgatcattctattgccattcagatataaactggagagtttccaaagggacgggacacagcacaaatagctttttttttttttttttgagacagagtcttgctctgttgcctaggctggagtgcagtggtaccatcatagctcactgcagcctctaattgctgggctcaatctatcctcccacctcagcctcccaagtagttaggacttacaggcatgtaccaccatgcccagctgatttattttttatttttattttttgagatgaggtctcactatgttgcccaggctggtcttgaacctctagcctcaagcgatcctcctacctcaaactcccaagtagctgggaccacaggcgcatgctacaggctgggattacagccgtggaccaccacacttagtcacaraaatctttaaaagaatcaattttcagatctcaatttctcaatatactctttcctagaacatatccacctgaga

SEQ ID NO: 229367 - DNA, 524 bp, Homo sapiens
tttcaatatattctcagaaactgagacagggaataactcaaagaatggaggacaaatcatcttattaatagctttcaataaaatttaaggagtaccgaaccaagttgtcagctgatcagtcattaaaaatcacattgtgatttctgggacataattcagaaacagttcagagtactgagtgacactgctatactaaaactcctttcatttgcacttacttatttctatatatatatgaacaaagtttcttaacattaaaatctataaattgaaaaaagagagaagcagaaaaaattgatgctgagtgcagtttcattctgaaaataacaatgctcaaaactagatataggaactaattgaaaactaaacagccacatttatctcattaagatgcagttgcaaaaaaattttctttttgtatttcataattatgaacatttataatgtatttattgctttgagcgattgtgtactaaaataattgkgataactcagtacttagggtcatataacatgtttaaaaa

SEQ ID NO: 229368 - DNA, 516 bp, Homo sapiens
aataattttgagacaaatgagacaaaagcatcaggtaacctattaaaaagcaaaacaaaacaaaaaaacctatcagactaacagcagacttttcagcagaaaccttacaaaccagaagggattggggtcctatctttagccgccttaaagggaataactctcaacctagaattttttatccagaaaaactaagatttataaacaaagaggaaataaagtcattttcagacaaacaaatgctgagggaatttgtcactaccagaccagccctacaagaaatgctaaaaggagttctaagtcctgaaacaaaaggtcaatatacaccagaatagaacctcttgaaaggacctataaaacaataacacaatgaaaaaaaacaaagtatctaggtagcaattaacatgatgattagaacagtamctcacatctcactatgaacattgaacataaatggcctaaatactccacttaatagattggcagaatggattaaaaaaaaatccacaaaccacagaa

SEQ ID NO: 229369 - DNA, 618 bp, Homo sapiens
attcctaggaacattccagtttgagaagcactgctccaggtcatatgacaggcaaggtcatctcccgaatgagagggagagaggaaagagttgaaggcaaaaattcaaagagcaagctaatgaagaacgggtaaaagaaytgacaggtggccactgccaaaagcccagaagaggtcacagacaatctgccaccttgccaattactttggatacaaagataacgaagtgaagcttctctgccttcactcttacatttggacaaaagactttctattactatgcagtatgcaatgctttgattcgagcatccttatttaaaaaataaaatagagatttcttttaaggaattgtctcacacaattgtgacaagtccaaaatctgtggggtaggacagcaggctggagacacagggaagagttgatgttgcagcttgagtctgaagactgagtgttggcagaattcactcttgctgggggaagccaatgtgttgttctagttcatccttcaactgattacatgaggtccacccacatcagagagggcaatctgctttattcaaagtccatgatctaaatgttaaccccatccacaaacaccctcacagaaatattcagaatg

SEQ ID NO: 229370 - DNA, 424 bp, Homo sapiens
tctatcatgattttacatgttacaccagatcactcagctcagtgagaattccccagctgtttcagggtgacagcctgacattcacgtgataaacatctggctctccccagccctttctagcccakctcaatttatcctaaatgccagtttctgcctgtcctgcggatgtctactgaatctaaaggaatgctcatttcctaaaggtttgctcctgttacacgtgaaatgacaggtctttgcaaattcatctctagcttattgattctgacagcatgctccaaggggcatggtgtgagcgtggacttcctgtgaggagaccacccaggagtgacggtgatgttctcaagctgtgtcttcctggccagcacaagaaggcactgggcacttcgctgataacaggcagcaggctgtccattcattcatt

SEQ ID NO: 229371 - DNA, 451 bp, Homo sapiens
ggattctttttatttctatcatgattttacatgttacaccagatcactcagctcagtgagaattccccagctgtttcagggtgacagcctgacattcacgtgataaacatctggctctccccagccctttctagcccagctcaatttatcctaaatgccagtttctgcctgtcctgcggatgtctactgartctaaaggaatgctcatttcctaaaggtttgctcctgttacacgtgaaatgacaggtctttgcaaattcatctctagcttattgattctgacagcatgctccaaggggcatggtgtgagcgtggacttcctgtgaggagaccacccaggagtgacggtgatgttctcaagctgtgtcttcctggccagcacaagaaggcactgggcacttcgctgataacaggcagcaggctgtccattcattcattggcagctaatcct

SEQ ID NO: 229372 - DNA, 278 bp, Homo sapiens
cggatgtctactgaatctaaaggaatgctcatttcctaaagstttgctcctgttacacgtgaaatgacaggtctttgcaaattcatctctagcttattgattctgacagcatgctccaaggggcatggtgtgagcgtggacttcctgtgaggagaccacccaggagtgacggtgatgttctcaagctgtgtcttcctggccagcacaagaaggcactgggcacttcgctgataacaggcagcaggctgtccattcattcattggcagctaatcctgca

SEQ ID NO: 229373 - DNA, 593 bp, Homo sapiens
tgacttgtcaatgacaaactcacttgagtgaaatgcctgcaattaaaacttctctaattctaggccaatgctctttctataagagcatgcagcctctcatttaccttgattgatttgctcaatgtgccagctagccacctctgcacactttgtgtctctgtgtgtgtgtgcttgcatgtgttcttcctgttcttttcaccaatgattcttagctttgactagacttgttaaataaagatttataactttaatggctttatatgcctgataaaatgcttgattgttttcaataaaagttgctaaattattaaattatttttaatggaagaccaactaatcattcattcgacaaaaatatactcagtccatactatgtgtcaggcattagtattgctattcatcacgaaattgatggtctctgctccagagaagctcacaacaatcaatttgaggaaatacatacctagaggttaggagtgtggwctccagtgtcagatggactcggagagaatcacagctctcccacttattcattatagaatcttggacatgttaacttcagtagatctctattttataagtagtaaaatgag

SEQ ID NO: 229374 - DNA, 589 bp, Homo sapiens
aagaatttgatggatgaaggattgactagtgcacagagaagaaattaaacatgcaaagatccagagatgagagagaacatgatatgtttgggaaactgcaagcacttgtatgtgttatggggactagggggtaaaggaaagaccaagacaaagtgggaatgttaaagggagtggaatyggtaataaaaaataatactactgaggaacattattctgatgacaaaccctcatgtaggtcagagtggaagatttgttctgatgtgactacgttgtcacagaagggaagagaagtgaaaaggagagggaaaaggcgctaatatttgttgaaaatatctgggtgccagatattttcaggtagaactccattctacagaggaagaaactatggtaccagaaggtgaaggaatctgtctgaggtcacacatctagtaagcagtgtgccagcatccaaactctattctttctgcctgatttctggaatcatcttgtgcctctatttccaaggactttctagtcccaccagaagtaaataatcaagactggcaaacaataattgcattaatccagactcttatctgtaaatgacaag

SEQ ID NO: 229375 - DNA, 458 bp, Homo sapiens
gacattcataaaaataaaagaataagaagctatagttgtatatggaatgagcagtcatattaatcagacagagaatggctatggtgtttgttgtaccttccagtcagagcaaaccagtaacattagaaatctttgtggtctccaaaattcttgcatctctgacccttctcaagtgtcatcctctctatttttcccyattttcccttcctggcaaactcctacttattccacaatttctcaaatgccacttctgcaacgacttttctctgtctctcatatgaccttaaagagctctcttttctgtgcagttactaaagttaggtacatccacatcatacaaattcattactataattttgtatgcttcccccagttcctattggatagtgaacaaatatatgacaaaatatatattttcatcttctaatttctagttagattatttaatttttaaaaca

SEQ ID NO: 229376 - DNA, 458 bp, Homo sapiens
gacattcataaaaataaaagaataagaagctatagttgtatatggaatgagcagtcatattaatcagacagagaatggctatggtgtttgttgtaccttccagtcagagcaaaccagtaacattagaaatctttgtggtctccaaaattcttgcatctctgacccttctcaagtgtcatcctctctatttttccccattttcccttcctggcaaactcctacttattccacaatttctcaaatgccacttctgcaacgacttttctctgtctctcatatgaccttaaagagctctsttttctgtgcagttactaaagttaggtacatccacatcatacaaattcattactataattttgtatgcttcccccagttcctattggatagtgaacaaatatatgacaaaatatatattttcatcttctaatttctagttagattatttaatttttaaaaca

SEQ ID NO: 229377 - DNA, 538 bp, Homo sapiens
gaattctttcttgtgctgtgaactatcatgcctattttattttcttcccgatgggaagtgggggttgtattcacatgttgtgtcaacatcaggaattgctaatggtggggaaatgttggagagattgtattgtttcatcttgaggagcatgcttctaattagcaagagagcctgttttatttcaacataaatgggcaatrgctaagcagatggtcccactattcctgagtcccagtgtgctccagaggaaatgtacaacaaacacttcagagtgagtgcattgttttttaatttatatgaagctctcttttatttgaaaattgtttcatgaagttttcattacttcacagacttttggaccttaaagagaccctagtgatcagtaggaataactccctattgttttatagttaaggaatcagaggctctattgcctcccctccccaaaagcatttcaggaacaatgacaactatcttcaactatttaaaagattaataaataagagatcaataagtcttatgaaactgacttcagaaa

SEQ ID NO: 229378 - DNA, 517 bp, Homo sapiens
actatcatgcctattttattttcttcccgatgggaagtgggggttgtattcacatgttgtgtcaacatcaggaattgctaatggtggggaaatgttggagagattgtattgtttcatcttgaggagcatgcttctaattagcaagagagcctgttttatttcaacataaatgggcaatggctaagcagatggtcccactattcctgagtcccagtgtgctccagaggaaatgtacaacaaacacttcagagtgagtgcattgttttttaatttatatgaagctctcttttatttgaaaattgtttcatgaagttttcattacttcacagacttttggaccttaaagagaccctaktgatcagtaggaataactccctattgttttatagttaaggaatcagaggctctattgcctcccctccccaaaagcatttcaggaacaatgacaactatcttcaactatttaaaagattaataaataagagatcaataagtcttatgaaactgacttcagaaa

SEQ ID NO: 229379 - DNA, 535 bp, Homo sapiens
cctattttattttcttcccgatgggaagtgggggttgtattcacatgttgtgtcaacatcaggaattgctaatggtggggaaatgttggagagattgtattgtttcatcttgaggagcatgcttctaattagcaagagagcctgttttatttcaacataaatgggcaatggctaagcagatggtcccactattcctgagtcccagtgtgctccagaggaaatgtacaacaaacacttcagagtgagtgcattgttttttaatttatatgaagctctcttttatttgaaaattgtttcatgaagttttcattacttcacagacttttggaccttaaagagaccctagtgatcagtaggaataactccctattgttttatagttaaggaatcagaggctctattgcctcccctccccaaaagcatttcaggaacaatgrcaactatcttcaactatttaaaagattaataaataagagatcaataagtcttatgaaactgacttcagaaattaatggagatgggtcattttgaattc

SEQ ID NO: 229380 - DNA, 567 bp, Homo sapiens
acaaattggtgttttcaattctctagcaatagaaaataaggtaacaaaattggggaggagcaccaagaaatttgttagctacatgtgaagtagagraagcctgctctgaagaatggaattggttggaattttttcagtgtttcttaaatataatatacatacagaaaagcatacatatcacaagcatttgccttattgaacttttataaatgaacaagccaaatgaagaaatagacattaccattcactccagaatctctttcattcccattttttgttactaccccctactcagtaaacactatggtgacttataaaaccatagattagtttccatgttttcgaagtttatataaattgaatcatacaaaaaagtatatgattccatttatataaacagcttctttgacttaatgttatatccatgaaatttatccatactgttgtgtacacttgtattttttcattctcagtgttgtatagtattccactgtgtgaaggtacaatttatttatccactgtacaaagggttaggaaactacaattcatgggccaaatttggcccgg

SEQ ID NO: 229381 - DNA, 554 bp, Homo sapiens
gtgtgcccttgccatttcagtaacattatatcacatggcgatttttactacaaccactcagatggagagaaagggaacaattccttcagaaggcatgacaggcaaacaactttctcagtatcttctaccataaggagcagcacaaakagagaaataattaatcatcacaatagttaggatcattttcataaagagaagcaactgtagttacagaaagcatatgagagataagttgtcttatattgctaagcacttattgtgcatagaactatgcaaacaaacgggttatgactgtgttctatgtggtagtttctttaaatcaatgagtggttttcaaataacttttagcatctatgccagaaagaatgtattatgttatactgtggtaacaaacaactctaaaatctcagtggcttcagaaagcaaagatgaacttcttgttcatactacctgtctattacaagttgaccaagggctcttctcccctttctccatcaggaatacacgtgaactgaacatcccccaactgtctcccacagcaggaagaaaagaaa

SEQ ID NO: 229382 - DNA, 588 bp, Homo sapiens
ttgaagtaaccaaatctgccagagacaaagaaaaaagaattttcaagaaatgaacaaggctccaataaattagagattatggtaaatgaccaagcataagaataattggtgttcctcaggaagaagagaactctaaagtttggaaaacttatttgagggaataattgaggaaaattccttgctcttgttagagatctagacatccaaatacaagaagctcaaagaacayctgggaaattcatcacaaagagatcattgcctaggcacatactcatcaggttatttaaactcaagacgaaggaaagaatcttaagagctgggaggcaaaaaggaaaacctatcagagtaagagcaaatgtcccaacagataccctacaagatagaagggattggagtcctatttttagcctctttgacaagataattatcagtcaagaattttgtatccagtgaaactaagcttcataaatgaaggagagacgaagtctttttcagacaagcaaatgctgagagaatttaccactaccaagcaaacactacaagtaatgctaaaagaaatttgtttctaaatcttgaaacaaaacctca

SEQ ID NO: 229383 - DNA, 591 bp, Homo sapiens
ataattctaaatatatgtgcaactaactctggagctcccaaatttataaaacaattactgctagacctaagaaatgagatagatggcaacacaataatagtgggggacttcaatactctactgacagcactagacaggtcatcaagagagaaagacaacaaagaaacaatggacataaactctatcctagaacaaatggacttaatagatatttatagaacattctacccaacaactgcagaatatacagtcttttcatcaacacgtggaacattctattttttttatttttaattgatttttaaattatggccatttttacaggagtaagccrgtattccattatggatttagtttgaattccctgataatcagtgatgttaagattttttttcatatgtttgttggtcatttgtgtatcttcttttgagaattacctattcatgtccttagcccacgtgttgatgggattatttattgttttcttgctaatttgtttgagttccttgtagattctgaatatttagtcctttgttggatgcatagtttgcaaagattttctcccactctgtgggttgtctgttaactctg

SEQ ID NO: 229384 - DNA, 580 bp, Homo sapiens
ccattgtagcaggaagggaacaaaatgcaaagaatgaatgcaagcaaatccctttaccttaaatgtacatcatgggttgaaggatctagtattactgagtttccctcatctacaaaatgaagatttaaaatatctatccttcctacatcatagggttgttgtgagaatcaaattcaataataaataatatccatgcctctgtgatgacctgctttaaaccaagtataaagttgtatatgtaagagaaggagagcaaatgcaaatgtgttgaattagtcaagaaatctaaaaaattcaattttaagtaaattgtcccataaaatgcatarctaaatattacagatttggacattgctattgtttgaatatgatttgtccccaccaaaactcatgttgaagcttggtctccaatgtggcagtgctgagaaagaatatctttaggaggtgattagttcattaagagggattagtgcctttcttgtgggagtgagttttcatctctcacaggttatcatcagaagcggaccagatgcctggccctggatctgggacctcccagcctccagaattatgagcggca

SEQ ID NO: 229385 - DNA, 580 bp, Homo sapiens
aatagtgcctaccatatagtaggtaactaatggatgctaacacgcattattttacttaatccttacaataactgtatgaggaagattttgttttcctgttcagacgagaaaacttgggcacaagaagctatttttttaaacatacaaaatgctatctcatatcccaaggggcagacagtgtccttggacagccaagggctattgcttcagtcccacccaagcatcaaagtggactcagtggggatagagctgaacaggggtcaagartccaagaattctcaggatagtaatcagggaaggcaaccagtattgttttggagaacagacaaggcagtggccagaaaaatggtactgagaaacatcaataaaagagctgagaaaataaataggggaatttagcagaaatatgaatacttggggaggtcgggaacaataattacttaagaaggacaaaagtgagaggagcagcaatccaaacctaaggtcatcttacaaggggattaggattttgtatagcaataggtttaactattataaaggattgtttaaggaaacgtacaggttaataaaagacataaca

SEQ ID NO: 229386 - DNA, 601 bp, Homo sapiens
gacgaggtggtttctcagtactttcctaattatttatttagaaacagagtctcactctgtcacccacactggagttcagtggtgcaatctcggcccactgcctcctgggttcaagcgattctcccgcctcagcctgctgagtagctgggattacaggcgcccaccaccatacctggctaatttttgcatttttagtagagaccagattttgccatgttggccaggctggtctcgaactcctggcctcaagcaatcagcttgcctcagcctttcaaagcggtgggattacgggcgtgagccaccatgcccagccagtatgtttctattttaaaataaagacatgaagaaattataaaatgtttctgacaatgaattaaggtgtatatgctatatggagcagcattaagccatttagttggttttctccttgtttgtatggaggagggaaacatgtcccttcttcagaaattttgttatctcaagctacctaacatgcaactgttgatctctgattagcaaatgcagagctgtacrtcaccagtggcttttgtgctcaatgtttgtagacaattctactgatttttttttttcattgagtgaa

SEQ ID NO: 229387 - DNA, 478 bp, Homo sapiens
ggtgtttggctttctgttcttgaaagctcctttagaatttattcgttaatccccacaccctgagaggacaaaaagagaaaataatttctgcrggtctatagatttgtctattacagattattgcatattcattcaaagaatatttttgattgccttctataaattagacattgagcatagaacaatgagagaaaacaaaaagattgtgaatttactgtgtaaattaaaggtgaggagtttggtaactggtccaaggtcaaatagttaaaccatagagccaggattaaactcggctaaatctgactcaaaagcccatagattttctgtctcaccatactagttaaatatgaactacaaaatcatagaattttatgcttagaggtgtactactctgttttttaaagccagatgggcaacttgttttatttaataaatctctaaactcccttaaagaagtttgcatccctatgtctattcg

SEQ ID NO: 229388 - DNA, 478 bp, Homo sapiens
ggtgtttggctttctgttcttgaaagctcctttagaatttattcgttaatccccacaccctgagaggacaaaaagagaaaataatttctgcgrgtctatagatttgtctattacagattattgcatattcattcaaagaatatttttgattgccttctataaattagacattgagcatagaacaatgagagaaaacaaaaagattgtgaatttactgtgtaaattaaaggtgaggagtttggtaactggtccaaggtcaaatagttaaaccatagagccaggattaaactcggctaaatctgactcaaaagcccatagattttctgtctcaccatactagttaaatatgaactacaaaatcatagaattttatgcttagaggtgtactactctgttttttaaagccagatgggcaacttgttttatttaataaatctctaaactcccttaaagaagtttgcatccctatgtctattcg

SEQ ID NO: 229389 - DNA, 484 bp, Homo sapiens
agcacagactcggatacacagataatacttgttatggactgaatgttagctgctgccccactgcataaactcctatgttgaagccagtgtatctgtatttggaagtagggttgtaaaggagctaattaaagttaaatgaggtaatagggatgagaccttgacctgataggatcagtgtccttataagcagaagttctttctgtgtgctctctttcttttactctcctgtacctttcctacctwgagagggcacgctaataagaggtcatgcgaggacatagtgagaagtcatccatctgcaacccaaggggaaagccctcatcacaaaccaaccctgctggcaccttgacctcggacttccagtctccataactctgaaaaaattaacttctgtcatttaagccacccagtctataacattttgttgtggaagcctaaaaagactaataaaaactcaacaaacattattttctagtattattat

SEQ ID NO: 229390 - DNA, 513 bp, Homo sapiens
tatagctttattcaagattaatttttattcaggggattaaaaatcaaatccccttattataaaaatgagaaaactgaagctcaaagagaggggtggaagcgtgtgttgaaggtcatggtgcttatctgtacctcctcctcaggacacctatgctaacatttgaaaagtttcacctgtgcctcatgagccctctcttctccagaatcagtggccccagcttcttcaaatctcactccagtgaagagattytaagccatctcaccaattcattgttcaactccttgttaaaatcacttcacttcaagtgtagtgccaagaaataatcatgatgagtcaaatgcatctgagcagcagagagaagagcaggactgccctatgtcccatcagaatgttgcactcttaataatatagccagggatcacattagctagttggcaggcacagaacaccattgcctcatactgtccgttaaaactcttaagatgtttttacaagctgctgcaaagactgttc

SEQ ID NO: 229391 - DNA, 575 bp, Homo sapiens
aaactatcttgcatatgtccaaagttacttatacaaaaatgaactttttagaattgttaaaaagtaggaaaccaaatatttctcagtggtgatgatggggggctggatgcatacataaactaaggagcatacaaataacataaactaagaagcatacaaataacataaaccaagaataatacctatgtgttatgggttgaattatgtctccccaaaattcatatgttgaagccctaaccctccagttcagaatatgattatatttggagatagagactttaaagaagtgattacattaacatgagaccattagggtggactctaatccaatctgactgctgtccttataaggaaaggaaatttgggcaaatacagagacaccaggagatgcacacacacagagaaagtaccatgtaaggccccagcaggagggcaggcatcgtcaagctaaggaaaatggcctcagaagaaaccagacctgctgaaaccttgatcttggacttctggcctctrtaactgtgagaaaataaacttctgttgaagccatccagcctgggatggggttgtgggggtgg

SEQ ID NO: 229392 - DNA, 639 bp, Homo sapiens
catgaaaaaatgctcaacattgttagtcatttgggaaaagcaaatcaaaactacaatgaagttctacctcacacccactaggacgactatagtaatatttaaagcagaaaagagcaagtattggccaggacacagataaattggaactcttgtacactgctgttaggaatgtacaaaagttcagcyaccatggaaaataatttggcaattcttcaagaagttaaacacaaaattgtcatatgaccccacaattccacttttagggctatactcaaaagaaataaaaacaggtatgcaaacaagtacatgtgcacataattgttaatagcagcactattcacaatagccaaaagatagaaacatttcaaatgtccatcaacagatgaaaggataaacaaatgtgtattatattcagttagccctccatatcctgggtttttcatccatggattcaaccaactatgaatcaaaactattcaaaaacattgtgtctgtactgaacatgtacataccttttttcttgtcattatttcctaaatgatatagtgtaacaatttgtatatagtatttacattgcagtaaacattataagtaatctagagataatttaaagtatatgagaggatgtgcataagtcac

SEQ ID NO: 229393 - DNA, 369 bp, Homo sapiens
ataatagttatgtattcattcaccagaaatttactgagtatcttattctgtgccagayttatattatgcaataggaataaaaaaaattcttggttttaacagtcaaaacagacaagtaatctaattattgctatggtgtgagccatgaccttgtcactccaagtgtggttcaaggaccaacatcattatcgtcatctaaaagaatgttaaaaatgcagaatattggtcctatcccagacctactgaattataatctgcattttcacaaggtcctggggtattcctgtacacattaaagattgagaagcactgggctcagggcaatgctaacgtaagtacagggtactgtggggctataaacaagacaaa

SEQ ID NO: 229394 - DNA, 541 bp, Homo sapiens
tcccctactggcatatccattcatgtggctgatacctactccaggcagacttgtgacatgggccatctgtgtcctttccactctttctttaatcccccgtgtgcctccctgtcccaacttcatgtgttcagtcacagaaaaccactggagatagcccttctgcagtgaggcacagccctccgccaagcstgaactccctcacaggatccactgcctcaaaacgtcttactgtcttctcactgcctcagtaaaaccctctctccttactgccaatgccatctagagctttggacagaattgataggtgtatagaaattcacactaaggggtgaatgattggccccttgacctaaattacaaatctcttgactcttccctctccacagaaccactagggtgaacggtctaaaatgatgattccctgtgacccacagaaaatgtgaaagttcccaactttactcctcctggatcctcaccctattcaacccagctctgcccagacatcaaccctgcttctctctcttcttgtcccagaacccag

SEQ ID NO: 229395 - DNA, 569 bp, Homo sapiens
caagcttttgttaaagtctacccatttatttaccactcaaggcaggcccaagtagataccagctggggaggtccagtggccagccaaactgggcccaacatggcaacttctcaaggaaatgcatgactagcctccatgttaaattctcaaagtgcagtacctgttaacaactctgtgaggtatacgcttttattccaatcttgcagctgaagattctaagaagggctgaggaagtcgctcaaggatatacagaaaaggtaactacgtatcacacctgccatctgtgcctggtctggagytgattacaaatgcagtgtccttcttaacacactacagtgcccatggcatattactcttacaactacagaagatccttttaaataatacgaatataggagtaggttataggtccccactcttattaaggtttatcatcattggggtttctaaattacccctttgtggcaagtaaatgataacaatgaaaaataattatgatcctggaaaactatagattcttaatattgaaaaacagaacacacaagtatatacaacagaaactgatcaag

SEQ ID NO: 229396 - DNA, 363 bp, Homo sapiens
agaccgcagttgacgtagccagagaaccagagagaggttcatttaacagcaaagtttgggcacttgatttgcctgtggacctaatctaatgtgttaactggttacgagccttcccctcgacttcctcttgaataagtaaatgaatctaaactttaaatattggaataccatacacatacrgaaaagtgcatgaatcatacatgtctagctcagtgacttttcaccaaaggcagccacctgtgtaaccagcccttggatcaaggaacagagcaggatcattgcccagaaacccctcccatgccccttgcagtcaccaaggttaaccaccaccttgactttcaatactgcagatgaattttgcct

SEQ ID NO: 229397 - DNA, 321 bp, Homo sapiens
acaggttgattttatataaggagaactcacaatcaggtgtgtcagtggggagggattgctgtattcaacttcatgactctgctctgaattaagaaatatagaaaaggcacggatactgttatgcttcataatsctattttcttctttctgggcaaataaaattaggctttgtggctggaaagaaggtatatgcagcttagggaaaattatgaagcagaaggaaatggagcgaacaaaagataaatattcaaaacataaacttgccctggaagtctcaaatgtactaaatactctatgaattgtgtttctttccataaaaac

SEQ ID NO: 229398 - DNA, 321 bp, Homo sapiens
acaggttgattttatataaggagaactcacaatcaggtgtgtcagtggggagggattgctgtattcaacttcatgactctgctctgaattaagaaatatagaaaaggcacggatactgttatgcttcataatcctattttcttctttctgggcaaataaaattaggctttgtggctggaaagaaggtatatgcagcttagggaaaattatgaagcagaaggaaatggagygaacaaaagataaatattcaaaacataaacttgccctggaagtctcaaatgtactaaatactctatgaattgtgtttctttccataaaaac

SEQ ID NO: 229399 - DNA, 321 bp, Homo sapiens
acaggttgattttatataaggagaactcacaatcaggtgtgtcagtggggagggattgctgtattcaacttcatgactctgctctgaattaagaaatatagaaaaggcacggatactgttatgcttcataatcctattttcttctttctgggcaaataaaattaggctttgtggctggaaagaaggtatatgcagcttagggaaaattatgaagcagaaggaaatggagcgaacaaaagataaatattcaaaacataaacttgccctggaagtctcaaatgtactaaatmctctatgaattgtgtttctttccataaaaac

SEQ ID NO: 229400 - DNA, 500 bp, Homo sapiens
gaattctccttcaagaagagtctggtctgcaactctgctgctcagtaaaacaggcaaatactgtatatatactattgttttgccatcaggaggaatagaatgatagtgaagagcacaaattctgttatcaggtagacctaaggttaaattctgacactagttctgtgaccacagggaaactatgtaatttatctgggtctcagtttctttgtatacataagatggacaattcataactcataaagttagtatgaagattatattagatagttacataaagctttgaagcacaatgtctcgtatataataagccctcaatactgctagctgatttgatgcttttacaacagaaaatagcacagtgaaacatatatgtgtgcttcatggaatgcataaaatcgagaacacattacattytttctggatggggtataaaatgtttgtaattatatgaaatttgatttgaagacagaatagtaatattccaacatatatcacac

SEQ ID NO: 229401 - DNA, 645 bp, Homo sapiens
gcttgtgcaatgaggcatcagagtgattatttcaggacatatatattgattttatttataccaaacaacaacatttatatgtgattttaactagcagcatttgtttttttcctatctgaatcattctactaaaatatwtgcagccctctaatctttgtttctgtttttttttctcagtttgatttaaagcattgcttctcaagcttaaaacaaatatgagttacatggagatttataggcacattcatcaaactgcagatttttcattcagtgagtctagggtagggctgcagaatctgtatccatcacataggttactctgatggtgttgatctacccaccacattttgagtaacaagaattcagaagataggtcacagttttagatggtttcagaaagattcttgaatgattcctattgtatatttctgtgtgtttgtgtgtgttttccatgtgcaaaaatactattataacaataagttttttaaacgtacattttcctcttcagacaaatgccattcctgtgagatcaacaatacatcactaagtagttaacaaaccatacatacttcttctcttacttactttgtaatttgtcaataattctgaataaagattgtccttgccttgaagataagtgtgcac

SEQ ID NO: 229402 - DNA, 645 bp, Homo sapiens
gcttgtgcaatgaggcatcagagtgattatttcaggacatatatattgattttatttataccaaacaacaacatttatatgtgattttaactagcagcatttgtttttttcctatctgaatcattctactaaaatatatgcagccctctaatctttgtttctgtttttttttctcagtttgatttaaagcattgcttctcaagcttaaaacaaatatgagttacatggagatttataggcacattcatcaaactgcagatttttcattcagtgagtctagggtagggctgcagaatctgtatccatcacataggttactctgatggtgttgatctacccaccacattttgagtaacaagaattcagaagataggtcacagttttagatggtttcagaaagattcttgaatgattcctattgtatatttctgtgtgtttgtgtgtgttttccatgtgcaaaaatactattataacaataagttttttaaacgtacattttcctcttcagacaaatgccattcctgtgagatcaacaatacatcactaagtagttaacaaaccatacatacttcttctcttayttactttgtaatttgtcaataattctgaataaagattgtccttgccttgaagataagtgtgcac

SEQ ID NO: 229403 - DNA, 573 bp, Homo sapiens
gagaatatttaacagccacattttggattttacaagaagacattttattgttaactatcaataccatgctgtacaatagatgtcttttttttttttttttttttttgagacggagtctcagtctgtcgcccagggtggagtgcagtggtgcgatctcagctcactgcaagctccacctcccgggttcacaccattctcctgcctcagcctcccgagtagctgggactacaggtgcccgccaccaygcccagctaattttttgtatttttagtagagacggggtttcactgtgttaggcaggatggtcttgatctcctgacctcgtgatccacttgcctcagcctcccaacgtgctgggattacaggcgtgagccaccatacccggccaatagatgtcttaaattcattcctcccatctaactgcaaatatgtattatttggccaacatctccccaaattctgtgatctttgtacctctctttattgtgctattacacatgtactccaataggctttaataaatgtcatttacgttcagtagcaaaagtcatacattgagaataaaagaaaatt

SEQ ID NO: 229404 - DNA, 573 bp, Homo sapiens
gagaatatttaacagccacattttggattttacaagaagacattttattgttaactatcaataccatgctgtacaatagatgtcttttttttttttttttttttttgagacggagtctcagtctgtcgcccagggtggagtgcagtggtgcgatctcagctcactgcaagctccacctcccgggttcacaccattctcctgcctcagcctcccgagtagctgggactacaggtgcccgccaccacgcccagctaattttttgtatttttagtagagacggggtttcactgtgttaggcaggatggtcttgatctcctgacctcgtgatccacttgcctsagcctcccaacgtgctgggattacaggcgtgagccaccatacccggccaatagatgtcttaaattcattcctcccatctaactgcaaatatgtattatttggccaacatctccccaaattctgtgatctttgtacctctctttattgtgctattacacatgtactccaataggctttaataaatgtcatttacgttcagtagcaaaagtcatacattgagaataaaagaaaatt

SEQ ID NO: 229405 - DNA, 501 bp, Homo sapiens
caggcatacttgcatcacttgggcacctgcattcaggcttgacaatcagctctttattgtaatctcactttgtgtaatcattttttgccactgtaggtatggcaaggctgaataatttcatccataagtgagctgcagtgacttttagagtagaaagtagtagctactgaaatgtatggaagaatgtgactgctgttaaaactagaggctcagccgctttgtgtgtgtgtgtgtgtgtgtgtgtktaaaattccagaaggactacacctttgagcttgccatataaacctttgactgaggaatttcatttggagcaagccagcggaaatttaattttcaattaaatttaaaaagatctaactcaataaggagaagtgtgcctttctcgttaggagatatagaaagaaaacactgaaaaccaaatccctgccaagggatcttattgtagaagtctttgattaggttcactgacattttaatattctgcaagtttaaaacttt

SEQ ID NO: 229406 - DNA, 464 bp, Homo sapiens
cactattagatttgtagcatttaccacataatagaaacacacagacatatacatatacacattctagaagtaaaaggaggagagtaaaatagaattactttattgctgtgcttgttttagttatccattgaaaatggttttagaagtggttgtttttagaataagacaaacttctctttctatcaagtttccagacattggtgtcagggcatttttawctcttccttctcttcatttcccacctccaatcaatacttaagccttctctatggtttttatatgactccgtttttcttccttcctttttattttttatttcaccaaccgtgtgtagactaaaggttacctcattcctttattcattcaaccaaagagcatttattaaatggctggctattagcaaggtattaaggtactttaattcctaaatatgccaatagctttctaatttttctccaggactc

SEQ ID NO: 229407 - DNA, 464 bp, Homo sapiens
cactattagatttgtagcatttaccacataatagaaacacacagacatatacatatacacattctagaagtaaaaggaggagagtaaaatagaattactttattgctgtgcttgttttagttatccattgaaaatggttttagaagtggttgtttttagaataagacaaacttctctttctatcaagtttccagacattggtgtcagggcatttttatctcttccttctcttcatttcccacctccaatcaatacttaagccttctctatggtttttatatgactccgtttttcttycttcctttttattttttatttcaccaaccgtgtgtagactaaaggttacctcattcctttattcattcaaccaaagagcatttattaaatggctggctattagcaaggtattaaggtactttaattcctaaatatgccaatagctttctaatttttctccaggactc

SEQ ID NO: 229408 - DNA, 462 bp, Homo sapiens
aagtcctgacattaatgagagcatgagactgctgcttcgtgactgccagtggctcgttatcaccaagataaaggctgacaaagtatagtaagagaaagtttgttctctattacaatctgtayttgaaagattcagaacaacaaacgcaataagggggaagtgcactgtgtatgttttacttgctttctattgcatcattagttttgacaatttactctgacatcttgtaattctgatcatttttattctgataaaatatgaaaactcaatcgtcaggcaaaaatttcaacatgtttcatagaatacttttgcaaatgaggtaaaagtgcacaccttcactgtagttagttgatgaaaaaaaaggtctggttccttaccaattgctttcccctcagtgtcaacatgcacaacgaccaaaactggctgacattagagaagttactaagaattcacaggtgccta

SEQ ID NO: 229409 - DNA, 462 bp, Homo sapiens
aagtcctgacattaatgagagcatgagactgctgcttcgtgactgccagtggctcgttatcaccaagataaaggctgacaaagtatagtaagagaaagtttgttctctattacaatctgtatttgaaagattcagaacaacaaacgcaataagggggaagtgcactgtgtatgttttacttgctttctattgcatcattagttttgacaatttactctgacatcttgtaattctgatcatttttattctgataaaatatgaaaactcaatcgtcaggcaaaaatttcaacatgtttcatagaatacttttgcaaatgaggtaaaagtgcacaccttcactgtagttagttgatgaaaaaaaaggtctggttccttaccaattgctttcccctcagtgtcaacatgcacaacgaccaaaactggctgacattagasaagttactaagaattcacaggtgccta

SEQ ID NO: 229410 - DNA, 584 bp, Homo sapiens
cctcactatcacttaaaatagatttttaaattaaatttgcttcaagagatattaccttttgtgaagcaytaattatttttagagagagatagggaaactcaagattacaaagtgttccaaatgaattacaatgagtgaatcccttctatcccagcacactcagcttcaaatcccatgcaagaggccctcaaaatgtctatcaagaaaaaaatatgacatgttatctcctcactgtgagtatcttagaaaaggtcagaacctgtctcaaaagcaatgaacagtggagtgttttcgtccagagagctgcagagtataagaagacgcttttattaggttatatttaagctgttaatgttaagataaagccatacaatataggacaaaatcctttgtattttttaatctaatgtatacattttccttccatacctacttagatgaagaattgtacatatgtacccaattctttgtactaataaaagaaatacatgggtacacatatgcatttatatacccttacagccctttagaaatacacaatttattgcaaatatcaagtacataagtatgtagattgtaactga

SEQ ID NO: 229411 - DNA, 413 bp, Homo sapiens
taatttttgcatttttagcagagatggggtttcaccatcttggccaggctggtctcgaactcctgatctcgtgatctgcccgcctgtgcctcccaaagttttgggattacgggtgtgagccaccgtgcccagacggcaatttacatttatacctaagggtcagttgccttattttctcatctgtaaaatggataagattaatctcttaaagtaaatggcaagattaaaagagaccatttagattgggggyttagcatataggaagcatttaataaatgcaaatgatcagaggctgcagcctcttgattataagggaactttcttgattacaaggaaatttttgattgcaaaaggaaatgtctgtgctgtttcaacatttaacataatctttaatatggtttgaggtagccttt

SEQ ID NO: 229412 - DNA, 413 bp, Homo sapiens
taatttttgcatttttagcagagatggggtttcaccatcttggccaggctggtctcgaactcctgatctcgtgatctgcccgcctgtgcctcccaaagttttgggattacgggtgtgagccaccgtgcccagacggcaatttacatttatacctaagggtcagttgccttattttctcatctgtaaaatggataagattaatctcttaaagtaaatggcaagattaaaagagaccatttagattgggggcttagcatataggaagcatttaataaatgcaaatgatcagaggctgcagcctcttgattataagggaactttcytgattacaaggaaatttttgattgcaaaaggaaatgtctgtgctgtttcaacatttaacataatctttaatatggtttgaggtagccttt

SEQ ID NO: 229413 - DNA, 583 bp, Homo sapiens
gataaatcacctgctctgatagtactaaagaagtagtggaggcagcctggcactaaagctcatgctsgtaatactgtgctatgctgctggcctttttccttttatcatggtctggaacattcctgtcttgcgactgtgttgataagggcaatatccaacaccatagcgtttgttaggggttacggggaagtaacttatctagtagaaatcaaatccaatgaaatctacattttaaaattaagaacaacaaaatcaaagatcttgtctactaaagcatcttctccaaaatgtagtgtcttcatactcattgcaccagctgcctatgacctgtgttaatcaaatatgttatcacaccgtattgtccagagaagccaaaatgggaactctctcaaagagaaatttcttttgagtttgactatatttttgttgttgttgttattgttaaatgtagataaattactttctttttgaaatgcctattcagcttgcttctttttgagatctactttaggcgtattttcaagattaaattcatctataactataatttgctttgcttcagagaagatagagtcatttgttt

SEQ ID NO: 229414 - DNA, 583 bp, Homo sapiens
gataaatcacctgctctgatagtactaaagaagtagtggaggcagcctggcactaaagctcatgctcktaatactgtgctatgctgctggcctttttccttttatcatggtctggaacattcctgtcttgcgactgtgttgataagggcaatatccaacaccatagcgtttgttaggggttacggggaagtaacttatctagtagaaatcaaatccaatgaaatctacattttaaaattaagaacaacaaaatcaaagatcttgtctactaaagcatcttctccaaaatgtagtgtcttcatactcattgcaccagctgcctatgacctgtgttaatcaaatatgttatcacaccgtattgtccagagaagccaaaatgggaactctctcaaagagaaatttcttttgagtttgactatatttttgttgttgttgttattgttaaatgtagataaattactttctttttgaaatgcctattcagcttgcttctttttgagatctactttaggcgtattttcaagattaaattcatctataactataatttgctttgcttcagagaagatagagtcatttgttt

SEQ ID NO: 229415 - DNA, 526 bp, Homo sapiens
aaggccagtatgaacttgatgtgtctaaagatgaaaaaaacccatgtgtctcaaggttagtgtgtaaggagaatactacaagacaaaattggagatgaagcttagtaagctgaggtaagtagtttggattattccaagtagcatggaaagcttttggaatgatgtgattttattgtatttacaaaatggatctcattgatggatgtataaaaatatgcatcraaattaaattgttgagtttgttttttttctttttttccattccagtgactggaatctagctttccatcgcctgtcctaacatccaatggaatttattttgggaaactatctcttcattggtgggtgtaattgggtgggccctgaccttgtcccaacccaggacatgacctaaaatatgttcagcatatatttccaatctgaatttgaatataaggcagatcaacaatgaaattgagaatgtttgaagcctgttcatgttgaatgggacaggtcctatagtctctgtttcttggccctattatag

SEQ ID NO: 229416 - DNA, 423 bp, Homo sapiens
aatcacttacaggtgatgctgatgctgctgacctggggaccatgttttgacaaacactggcagagtgcattaygcatatcaaagtgccttcacagacatggtctcattttcattccaaacataaaacatgtgatacaaagctccaaaacccgggtctgccaggctttaggaaagcccattaacatatatttaaaccatcagccctattaaatgatttgattgctaaaggatttcatacggaatctccctaaataataggccctctgagtacagttagaaaaggcttcaatccagtgcaacaaaacagaaaaagcagcactaagaatccagaattttagtttctagagttggaggctgtgtctggtggcgtccctgcgtacctcatgtcatctttctgaacctcaatttcttgatctccaaaat

SEQ ID NO: 229417 - DNA, 423 bp, Homo sapiens
aatcacttacaggtgatgctgatgctgctgacctggggaccatgttttgacaaacactggcagagtgcattacgcatatcaaagtgccttcacagacatggtctcattttcattccaaacataaaacatgtgatacaaagctccaaaacccgggtctgccaggctttaggaaagcccattaacatatatttaaaccatcagccctattaaatgatttgattgctaaaggatttcatacrgaatctccctaaataataggccctctgagtacagttagaaaaggcttcaatccagtgcaacaaaacagaaaaagcagcactaagaatccagaattttagtttctagagttggaggctgtgtctggtggcgtccctgcgtacctcatgtcatctttctgaacctcaatttcttgatctccaaaat

SEQ ID NO: 229418 - DNA, 538 bp, Homo sapiens
tagtgcccaactcctatattaaaaaacaagaaagatctcaaataacctaactttacacctcaagggactaaaaaaagactaaaatcttagtccaaatttaggagaagaaaggaaaccacaaacagcagaaataaatgatacaaaaagcatcagaaaaaaaaatcaacaaaattaacagttggtggaattttttaaagataagcaaaatttataaactcttaactaaactaaggaaaaaagagaaaactcaaakagataaaatcagtaatgaaataaaagacattacaactattgggagctcagctatgaaaacgcaaaggcaacagaatgacacaatggactttggggactcagggaaaagggtggaagaagggcgagggataaaagacacattgggtacagtgtacacttattgagtgatgggtgcaccaaaatctcagaaatcatcaccaaagaacttattcatgtaaccaaataatgataataataacaataagaataatttgaaaagttaaaaaaaaaaaaaaaaaaaggagag

SEQ ID NO: 229419 - DNA, 558 bp, Homo sapiens
tcacttgaggttaggagtttcagaacagcctggacaacatggtgaaaccccatctctactaaaaatataaaaattagccgggcgtggtggcatgcccctgtggtcccagctactcaggatgctgaggcaggagaatagcttgaacctgggaggcagagcttgcagagagctgagatcgcgtcctactgccctccagcctgggcaacagagtgagactgcatctcaaaaaaaaaaaaataaaataataaaataaaatatatatatatatagatatagatatagatatakatatatatatatatatatatatttaagcaatgactacaaaaaagctcaaaaagctcatttcaaatgtgacttctttcagtggtattttttcttctttctaatattaatgcaatcaaatataccataacaatacttgccttttctctgctaataacaaaatgttgtcagaatgagtgtagcataaatctctattcaaagagtatatgccaacacaaaggcattcatacaacgaaaaaattctctggagcataggttgacatagcaaagatt

SEQ ID NO: 229420 - DNA, 565 bp, Homo sapiens
aggacacaacataatttattttaccaattgcctaatgatgggcattttagttgtttttggtcttttgtgaatacaaactgtgcattagtcatttaaatagccttgtacttaagttatttcacacaattatgtatgaagtatgagtatatacgtaaattcctctgagtggtaattttgatggatactttcaaattacccttcatggaccaattttatagatggaagaaaggttgtaagaattaatgattgcaaatcaagggctgcaaacagcttgmctacttagaagtgtgattttcctgagttggatgtggatgggtatgagtaacacaaggtcaaagaggtttggtattgtacactgaagcaggctgctgtgaggtgggcaagcagagccactcaacaactcaccaaagcacacactgaaataatgaggcttggttgcagcatgctgggaagtcacagcagcagatgtgagcctagtgctatcaatgcatgagcaggcactttgtgagccagaagcccagagtgtggggacgggcttggcaggaggctccagagatagcagtta

SEQ ID NO: 229421 - DNA, 590 bp, Homo sapiens
aagggctctgtggggtcaggactggaactatggatccctgctcaggcaccctgcctggcagaggcgtgaaactggtgttagacaacttcacygcaaacagaatctgtagcaagagtgcttcttggagtggcagaaatgacctataccccttttgtatctgagttacaggatatgctttagattgagggagaggtaggggctattttgcctctggttatccagctttactacgcttggccagcaggcgtacaccaatggctcttaaaccccacacagcagcagcagcagcccctggccactttttagaagtgcagattctgggctctacccaagccccactgaatcagaaaacctaggggtgggacccaggaatctgtggatgacaaatctcccagatgattcaggtgcacgctcaattttgcgaacaactgttgtggactactactgcagaacaatgaatgacctcatctgcatccaggtggcttaatttctccatggatgattacacccaaagatgtcaatttactagtcacacctgcagccagtgtgctcagtgagagcaggcgctggcaagggtggggtgagggtga

SEQ ID NO: 229422 - DNA, 590 bp, Homo sapiens
aagggctctgtggggtcaggactggaactatggatccctgctcaggcaccctgcctggcagaggcgtgaaactggtgttagacaacttcaccgcaaacagaatctgtagcaagagtgcttcttggagtggcagaaatgacctataccccttttgtatctgagttacaggatatgctttagattgagggagaggtaggggctattttgcctctggttatccagctttactacgcttggccagcaggygtacaccaatggctcttaaaccccacacagcagcagcagcagcccctggccactttttagaagtgcagattctgggctctacccaagccccactgaatcagaaaacctaggggtgggacccaggaatctgtggatgacaaatctcccagatgattcaggtgcacgctcaattttgcgaacaactgttgtggactactactgcagaacaatgaatgacctcatctgcatccaggtggcttaatttctccatggatgattacacccaaagatgtcaatttactagtcacacctgcagccagtgtgctcagtgagagcaggcgctggcaagggtggggtgagggtga

SEQ ID NO: 229423 - DNA, 546 bp, Homo sapiens
tgatggaaaaaaaaaaaaaaaaaaacagatgatatcagggattctaactccaggctccaaaagcacataccgagcctcagatcttcyaagattgtcctgagtggagagtcttatctcctgtagacaaggggcagaaattgtggaaactcagacacaagctcttaccataccaatggctgacctgcaatgaaaggtaaacgctcagcctcgccgggtgtctgttgttaaagtgagggcagtgattggaaaagaatgggaccctgcaacttgaaactgggatgtgtgggaggaccctgatgagctggagacactgagcttctaaattctgatgaccctttttttgacagaggaaacagcctctccacccccagtggtggcaacatcccctcccccacacatgctgccatcagcctttccacctttgtttggggagattaaccctgtgttgcctgaggcaacagtgagggcctcccttgaggcagttgccaggcaagacaacgcttattcttctcaggaccaacacccaacacccctgtttgcttctat

SEQ ID NO: 229424 - DNA, 546 bp, Homo sapiens
tgatggaaaaaaaaaaaaaaaaaaacagatgatatcagggattctaactccaggctccaaaagcacataccgagcctcagatcttctaagattgtcctgagtggagagtcttatctcctgtagacaaggggcagaaattgtggaaactcagacacaagctcttaccataccaatggctgacctgcaatgaaaggtaaacgctcagcctcgccgggtgtctgttgttaaagtgagggcagtgattggaaaagaatgggaccctgcaacttgaaactgggatgtgtgggaggaccctgatgagctggrgacactgagcttctaaattctgatgaccctttttttgacagaggaaacagcctctccacccccagtggtggcaacatcccctcccccacacatgctgccatcagcctttccacctttgtttggggagattaaccctgtgttgcctgaggcaacagtgagggcctcccttgaggcagttgccaggcaagacaacgcttattcttctcaggaccaacacccaacacccctgtttgcttctat

SEQ ID NO: 229425 - DNA, 593 bp, Homo sapiens
ggaggtcaggtaattaatggagttttagctcagctctgacttacagtgggtccagtgagttcccagactcatcctgtggtcatttcccgagtgccagaatgcataattggcatagatatacttagcagctgacagaatccccacattggctccctgactggtagagtgagggctattatggtgagaaaggccaaacgaagccattagagtcattagagctgcctctacctagaaaaatagtaaatcaaaaacaatatcatatccctggagggattgcaaagattagcgccaccatcaaggacttgaaagacacagaggtggtgattcccaccatgtccccrttgaactctcccatttggcctgtgcagaagacagacagatcttggagaatgatagtggatgatcgcaagcttatccaagtggtgactccaagtgcagctgctgtaccacatgtagtttcattgctggaacaaattaacacatctcctgtacctggtatttagtcattactttggcaaatgcttatttctccattcctgtccataaggcccaccagaagccatttgccttcagcaggtaaggccagcaatata

SEQ ID NO: 229426 - DNA, 491 bp, Homo sapiens
gtaaggccagcaatataccttcactgtcctacctcatgggtatatcaactctccaactttgtgtcataatcttgtttgcagggctcgtgatcacttttctcttccacaggatatcacactggtccgttacattgatgacattatgctgactggacccagtgagcaagaagtagcaaacacactggacttatgtactgatccatggactatagccaatggtttggctggatggtcagggacttggaagaagcatgattgaaaaattrgtgacaaagaaatttagggaaaaggtatttggatggatctctctgagtgatcaaaaactgggaagatatttggatcccatgtgagtgctcatcaatgggtgacctcagcagaggaggattttaataatgaaatggataggatgactaatacaaatgtcatgtaaaattaaaattagcattaagtgcaaagagggcagcaaaacacatccagactgttcctcttcc

SEQ ID NO: 229427 - DNA, 488 bp, Homo sapiens
agaagtttctctcactggagtaaacttgggaactgtgacaatttgacaatgagcccctggaacatgaagggagatttgtccttcaaatcttataagaacagtgatggtgcataaaggcgatgatcccagacttttaacaagaggacaagaaaaacgtgcccctagtcaccatggagtgtgaggaaagtctcagagaggagatatctggagaaggctccccttaatctatgtgcaagttctgggctcactgcaaagctatgcatgcctgggtctgacccaaagcagcmcagcgaaggctgttagaaccaaatgacaggattgaatgctccagggcccagctggcccagcatggtgcacacttcaggaggacctgaatagaatagctaaggctttgaaaatgtaactcactttggaaacacaagcaacagaaggtggattgggtgtataatctgaacctaattcatagattgcctgcaaaagttagaaaa

SEQ ID NO: 229428 - DNA, 541 bp, Homo sapiens
gaattctcctgttcccagtcttgcacaggtccttgtggagagcatgaatcccccaggggctctcactctctcaccctttcttgcattagagaggttctcctggctccacagtgagcccagacaggctggtatccagcttcactcctctctgctatctgtgtcccctgcttccttgatggatcccattgkggtttctcagatgatcagcttgcagggtcagtgtttaccagcccttttgtttcctgtgacagcacatgagctgcttctagttcgccacctgggccccatccccagtctttcttgataaatgtattctgtgtatttgaaaacagtatctacccttcagttgttgactgaaatattctataaacataaattagttctaggtaattagtaatattgttttagtcttctataatctcccaaagacacacttttaatatttactttaatctgaaaatacttttaaaattaaaatgcctggtggattggtcataggggacacggagctctgcttgctttcctgatgagccttggacct

SEQ ID NO: 229429 - DNA, 590 bp, Homo sapiens
ggggcccctgtgggccagtgggaaagaacaggcctcttgtttgtaggtgtccatgtgcttcagacaccatgtcttggtttcttggtcagcccattttctaccaagcttgagacctccgttctgggcctgaggctgaaggactgttcgtttatttcatttatttattggctctttctcttccttgccacgcaggaggatgagtaaaaacagagtgagatacttyggagcaacctcgtgagttaagagcttgtgagctttctcagagacgctggctccatcttaatttaattaatgcagaaatgaagactcgaacatttgagaatctttaaaaatcatattttagccaaaagatttatctcacagaagataatttccaacacagccaaaagcagcaaatatttgctagttctataatgttttgtgtgaatttgatacttggcatattttctggtgtgtattcgtctccaggacatctgtgcatggcagttagtcacggaatttaagttcagtgtggcatgcatcctagcggtgggaagccagaaagtaaaatgtgcaaccaccccaagagaaatgcttatagccagggagca

SEQ ID NO: 229430 - DNA, 552 bp, Homo sapiens
tatatacatatatttaaaaattctggcagagtaagatgatggaatagaaacctacaccattcattccccctgcyggaacaccatagaacaccatatttttgttgttgttgttgttgttttgtttttgtttttgttttggacagagtcttgttctgttgcccaggctggagtgcagtggtgtgatctaagatcacttcagcctctacctcctgggttaagtgattcttgtgcctcagccacccaagtagctgggattgcaggcatgaggcaccacattgagttaatttttgtatttttagtagacgtgggtttttgccatgttggccaggctggtcttgaactcctggcctcaagtgatctgctaatctcagcctcccaaagtgctgggattacaggcatgggccacaacacccggccttggaacaccatattttaacaattatctgcacgcagaaaagctccatcacgagaaccaaatatcaggtgaggaatcacagtatctggttttaacttcatatcactgaaaaaggcatgaaggagggcaggagagac

SEQ ID NO: 229431 - DNA, 480 bp, Homo sapiens
aaggattaagaaaagagcaaggaaggagaggacctatatggcagagctttagtgactcaaatccaagtatgtgacatctttcttaatagcttgaaatctatgggtatgcagccaagcctagaatagcagaagaatcctgcgggaagcagcaagacaaggacagaaccaagcaagtgttcactcatctcgtgggtcaaaaaaatastttataggctttatatttgtacagtactaatcctattaataaggagtagcttcttaaagctctgtattgaaaaagtgtctgaggctctgtctgggatcaacagtagagtactgcaattgattagtggtatctgccatgggtccagggttggagagtgggctcaactaatgtgggaaaaaggagtgctacttgtggcacagtgtatcccactgatactctctatactggggtttaggttcaaaggctcaactaacactgaagtgtgtctgtctttt

SEQ ID NO: 229432 - DNA, 589 bp, Homo sapiens
gtttcttgcaggtatcaaatcttaggaaaccacgggtgcttagagcatgtgactgcttagggctgcttcaaggtacagctgcctcacccacctgctaggagagaagcaccgaaacccagaaagcacagagaaagggaagtaaaaacacttatggtgtgcatggaatgcattttatggtatatcttagattaaaatacaggtggaaataagtgaaaagtaattaatagaagtaataaaacagaaggaggaagagaaggcggggagagaaaattgagaaaatagattttggatttttaaacaccgttttctacaaaaaatctagagctattttaatatgtggctaatcctatttctagtgcatagaaaggaggaagacacaaaaaacgaaaaggaaaacattaaaactaatagggacgactgaacgttcacagacaaggctcctactggcaagaataattatgacataagcatgcaaattattataattaattgctacatactgattttttttaaaaagactccattattaaattcaagaacraaacaaaaaagaaatgacttctgattttgctactgttatagtgactat

SEQ ID NO: 229433 - DNA, 302 bp, Homo sapiens
tggagtgtagtcataatagagatctgtgaaacagccctcttgccactgccattctcatatgatcacagtatcctcctaatcaaaattctccaaggtttttttttgactacccacagcaagaagggaaaaaaatgctttctccatggtttgtgttttgtttgtttttgactactcacaacaagaagggaaaaagtgcttaccttacaaactttaatgggaaatacttccaccattaagagagatatttgtcacttcatgattcatgaaatagcaagtaaagkgtgctcactgagaatctttca

SEQ ID NO: 229434 - DNA, 498 bp, Homo sapiens
gatacagtgagtaccaggtgtacaccccatgaccatctacaatcgcagaagttctaatttgtctcaataactgccaacctgaaagtgtccacaggaatagacacaaaccagaaagatyccatgggagttgttttctgatggagtatactcactataggcagctattggttttgagtgacaaggtgtggtccctactaaatctgtgatgtacccaggtttgactttaggaatgaggtacttatttctccagctgccacaagtgatggctgctgatcatttgtgactgagctccttttggagaaatgccctcagctgagtaaaggtgcctctcccaggtttacacctctctctggatgcaggttgcactcaatgactggccaaggtgtggggacaaatgtctggcctccattgcttcaatttggaacaccattgatgggccattccagctttagaaacttctgaggaattggctgaggttgttactactactctatagtt

SEQ ID NO: 229435 - DNA, 590 bp, Homo sapiens
gtggctctaatctctgtaattctgctgcaaagtgctattatttttattgctctcctagacagcaggcatagagcagatttagaggcctccagttagtcttcctcattatgaaatctcttaccacatagcccatggaactaatatgggagttctttcaattaccaaaggtttccattccaattataccatcagtgatgaaaaaaatgaccactggatgggtccctgggcccagtagacctaacatgagcaaaacctggccagaatctcatttataacctggcccccrtatatactactttaatagcagggcagtaataatgctttggggccctggaaatcaatgtcaagttggaatctgtgcccaacagtcctcaaaatatttgattcacaccctgttcccagtgtatggtttcccaagtaaatgaccacaggtccctttgccaaatgagtgggagcataattaatgtatatacttgtcttcataagtctttcttcctgaatacttagtcccatcttgaatttttagatgtcatgtgtgaagagtagctcaggttttttattttttatttttggttttttaaaagatgagg

SEQ ID NO: 229436 - DNA, 634 bp, Homo sapiens
gttagcatcatattcttacgtccttcccaggtgctaaatcctctattataggagaatgctcccatgttaataaacttctttatattctcctatatttccccctgcccaacacatacacacttgattcagcacccatgggagccatactttcccagctcctgctggtataagttaggttagtcttgcagcttcttagaggtacaattcctttcctctcttagcataaaagcactttccccgctggattatgttgtaatatgaccctaatcattggtctgatggccaggaaggtggtgagggtagatcctaaaagggctacaagttgtcatccaagacaaatacttctgcaccttctgcaaaaaggagggagaactagcctataacagagaggagcaggccctctgcaggcccagaagkctcagggagaaagcaaagcacacaaaattttgtagtgtattgtcaccatgctgaatctcaaggtctcactttttccaatgagggtcctaaccttggcagagcagacttactggcgtggagactttggccttccctggtgctctgctacccttaacaatctagaacaaagccctaggtcatccactctttttgttctctaactgcaagagatgagtct

SEQ ID NO: 229437 - DNA, 486 bp, Homo sapiens
taagctaaaccagtcaaagactgcattggctttagagcctagaaaaagactaagactttaggtagggaccaagtcattagataggtaaaatttggttaaaataagcatcaaaaagaggccttaggccacagagtccaaagaagtactgttagctacataagacaaaagcaaacagcttcaagaagttctaagagatgggtagggggcttgcacaaagattgaaaygacacttaaatcatcgtctcctcttcctcttgcattttccagaaaggattccaaaaacacagggctaaggagattgctgccatgtgaaataccaaaaaaggtggttcacaggctgactccaggtcctgaaaaacaaagaaatataaggcaagaggtttttaagatatttcgcaaagatggcccagagagagaaagagaaagagagaacacaaaccacataccttatttggctagcaaaaacaaccatgcattctcagaaat

SEQ ID NO: 229438 - DNA, 431 bp, Homo sapiens
gaattctaactgatattttaatcccatcagtatcccagtcactctcacacccttacagaagcccaaggcacctcagctggctcccacccccacccaggcatggagtgatggcagaagcatatgaggaagtcatttgacttcttgaccctacccaatcatttggtggctgtcacaaggataccaaatgtgaagcagaaggttttcagagatgagctgggctctgagagaagttctaagggcaacgaaaagcctaaagagcctccggggatccatcygtcttcccaaagagccttgtgaactgcgatttagaatcaggtgtgccatcttgagaaaccatcccacattccaaacaaaattagtttaatgttcccacataaaaaggtcccgagccaggtggaggatcattatatgagcatacaccatggaactaa

SEQ ID NO: 229439 - DNA, 524 bp, Homo sapiens
agaattcatggggaaatttattacagatccatttcttatgtaagttgtgtcctcctgtgatgagctcagtggaaggagcaaggccaagaaaggttatttgggccaaatatcattatcgtttcccctttgagaaataagatattcttcatctagatattcttctagtcccaggaagaggaaggagggcaggaaaaaaaaaccctcaaactttctacaaggacaattctttgcctttaggagaagtctatctatttctcaattcttcctgcaaactgggcgaaactgaagaacagtagggataaacagaggctgaaaaaactcacaggttggcaaataccacagtcctgaggggtaagagggtcttyagaatctcaggttctttatcttccatggtaaactcttgcagagtgcgagtccttttataccacaaagactctgagaccacagacatcacaagtaacaagacagcactgtggaatgtcaaagcatggactgggaagctaaatggactcatagcctaattc

SEQ ID NO: 229440 - DNA, 563 bp, Homo sapiens
cgttttatgggatggcatgacacagttcacatcaattcccccatcttgctcataacattatcctgactatctgggccaggccattacctgctgttcagaaatcacagtaaatcttgaccttagccatgtcttcatccaacaagatacactgcctcaattctgcctattgggagtgtttacttgcccaccatcctgcagggcccctcccatgagaggctgtaatattgcagcaatccacctgtgctggcatagtggaaaggttcatctgttatctaggccgaagtgttttcatcttttgactcctggtcatgggaagccccaaaaacccaaaggggctgactgagggaggtcaggccacaggggcggggggtggtgcggtggacaggtgtaggcacactaagaacttgagcaacctatgcttgcaacttgctcatgcatcccagaactcacttctatacctaatactacccgtttcttgatacactacagctgatagaatgaagtagttgtggtagcacctacaatgkatcatgtatgtgaagaatcagaattctgagcaccat

SEQ ID NO: 229441 - DNA, 572 bp, Homo sapiens
ttcactccagagttcactgctgggaggactgaagcttcatcaggcctgcctcacaggtcagtttcttcctctgttcagccctactttctcctcattgcctttcacaggtgttgatcactaataaaccttttgcaccccaaactccatctcagtgtctgcttttggagaatccaaaacctgaagcagcagacaagcagtaagaataatcaaatactccaaccagcaatgggtaaaattcattgagcactaataggacccagggatttttgctgagtgctttatattcagtatatgtcttgtttcagcctaaggaaaataataaactcgtgggatagatactattattatcatcaccactttgcacataaaggaacttaaggcacagagaacttatacaatttgcctaaggtcatatttctaggaactccagagcccatgcacttaatcactaaatacattaaaaagtaaaataacttgaggtaagattatcttgaagagttttgtaagctgtgacacattattcaaatagtrgtacatgaccatgtgtcaggatccctgcagtaaggtgatga

SEQ ID NO: 229442 - DNA, 476 bp, Homo sapiens
aagcttaaagggcattttaggaaggctaggcgtttatatggcttttctctcaccctttacaatccatgggaaaatgaagttccactcctgttacttccttccaaagaatctgctggtggcttctgtgccctctgtcatcctttactggaagagagaaggtacatatacgtaaacacatgtctcaatagccctgacttcactacattccaaaaagactccstttcagcatgctgcactcagggttcaatgtacattacagattcttaaggaaaactagaaaactgggtgatttatgggttatatgtccctagggagatgccaaaaacatctatgatgagttctattgttcctaaaatttccatttgagaaaagtcaattttaagtaaatacaaaggcaactttaaatgttgaaaactaaatggtaggtaggaatgacaaaaggtgattccatcagttttgtcaacaacaccatgggt

SEQ ID NO: 229443 - DNA, 568 bp, Homo sapiens
tacatctctaaaaacaataatattaagtatgttacagctgattttttaattttaaatttccacatcaaaatgccaaagaatagatagatagatagayagatatagatatatatacatatagatagatatagatatagatatatagatatatctgttctcctctccctatctcaaaaatcaagtaaaaccctgtatagttttaaggaagaggattggaaggtcattgcttatgctatatgtgttgaacccactaagttcaattatataacaggttcattaagtattctctttggcatacttttgcctctctggacagtgaatttatgagctgtgtgaggtctcacccatatgctctgccttaatcttaaattccaacccaatttatgactcatcacctcaagtgggaatatgaacaatgacatctgctgcaacactgagtaatttttcctcatgactcagccaccaagtggtcataaatgtgtcattaagaaccactcaaatatggttgcactaagttgtcttgtgtaaataccccacattttaatctgaaactaatagcaatcataat

SEQ ID NO: 229444 - DNA, 632 bp, Homo sapiens
tttcctcatgactcagccaccaagtggtcataaatgtgtcattaagaaccactcaaatatggttgcactaagttgtcttgtgtaaataccccacattttaatctgaaactaatagcaatcataatctaagatagggagcactttcccatgttatcaaagagttgatctaccccagtttctgtcagcagttaccacataggatcatggtattataaaatcagctaaaacgattccattgagcccaatccctcagcttccaactgaaaagtacggctaagttttgttagaatttattccyattgcattctttcactgtatatttaacaagtatttattgagttcatatagtttatgggaaagaaattaaaatgctcatctggagatctgagttctggtcgtaatagctaataacaagttatatgagcttgatcaatcacttaatctatttggaaccattttctcctttatcaaatgactggttgtacctcacagggtcattgtaaatttcaaataagacaaaaggattttaaactatcattagtatattacttaagtaattgttattctcatattgttatcttgacagtctcaagttattggcagcttagccattaccaataacacaggtacag

SEQ ID NO: 229445 - DNA, 611 bp, Homo sapiens
tggtctttttgctgttccctgaatttgccaaacaagctcccatcctccccagggcctctggcctagatgctctctgcttgtatatatctcccagatgccacatagctaatccttcatttccttccagtctttgttcrcatatcagcttttgaaatgaggcaacctgtgatgacccaattaataattaccagcttccatcatctcaatctggttaccttgctttattttttgaatagcacttaccatgtactatcataatatgtaactattataatcagttttcattatctgtcttccttaatgagaatttaagctccataaaaggatttttgtctgttttgttgactaggatactcccagtttttgaaacatatcctggcatgttgtaagtaatcaagttgcacttgtcaagctagtgaataatattaacagaatgcctggcatgaagcaggtttaatattgtaatgccaggcattctggtaggccctgagaattagcatgaccagcagacatggcccttacccttctggagcctacaagatgtaagctgcaaaagggccactctgatgaactcagattgatgcctggtgtttacggaaactgggaaaagg

SEQ ID NO: 229446 - DNA, 427 bp, Homo sapiens
tgatggaattgcacggttccctgggccttcctatcatcaaggcttatggaggagtagctcccagataaagatctatgggaagaaaggcataatatggcctcctaattcaccatggtgcatttctaacatgcattcagaatcccctttacatctacacattgctaccaaaatcctattcttattaagatgtctctatattcagaacagaatgcccacacccaaaatmctgccttgacagaatgtatgaagtaaggccctttataatttatagaaataatagactaccaattatttaggacctatcatgctgcgcactttatggcaatttttccttttatcctcacaaaaacatatgtttagaagtgaaaacagatcaggaaaggtcttaaaattgaacagttcttttaatagccaacacatttaagct

SEQ ID NO: 229447 - DNA, 428 bp, Homo sapiens
ggaacaaacaaaacccccaaaaagtagattatataaataaatcaaaatataattttaaatacaataaatataaatggactaaactctccagctaaaagacaagctccagcaggctgaatagaaaaacaataaaataaaaatccagtccaaatttagatgtgcacttacaagagacacacctaaaacaacagttcactggcagatgaaaaagataaagaatgatacaaggataaaacaaaaataagcttgtttaggaatattaatatcataattagacttgaaaacaaaaattggtcattatgttttgawagccaaggaaacacgatacactgtaatacacctattatctaaacagggacaaaacctaacgagcaaggaaaaattggaaaatcactttttcaaatataggtccatcagatatccaaaaa

SEQ ID NO: 229448 - DNA, 478 bp, Homo sapiens
tacaaaaagcagaaattgctattcttatttcaaacaaaacagaccttaaagcaagaaggatcaaaaaagacaaaaaagggcattacataaaggtaaagggttccattcaacaagacctaactatcctaaatatatatgctcccaacattggagcactcagatgcacaaaacaagttcttggagacctatgaagagacatgggtaaacacaacaatagtgggagactccattaacagtattagacagatygttgagctagaaagctaacaaagatattcaggaaataaactcaacacttgtccaaatgaacctaacagacttcagcagaacactggactaacagcagaatatacattattttcacctaggcatggtacatagtctaaaattaaccacacactcagccataaagcaattctcaacaaattcaaaaacccaaaatcataccaactacactctcagaccacagcatattaaa

SEQ ID NO: 229449 - DNA, 448 bp, Homo sapiens
aattctggggaggcctcagaaaacatacaatcatggtgaaaggcaaagtgggaacaggcawgtcacatggcaggagcaggaacaagagaggggtgagggggtgctatacacttttaaatgagcatatgtcacaagaagtcactcactattatgagaaaagcatcaaggggatggggctaaaccattcatgagaaataaacccccatgatccaatcagctctcaccaggccccacctccaacactggggataacaattcaacataaaatttggtggggatacagatccaaaccatatcaggcatactacatatttggcatgcagtaaacatctggtgaatgaatgactgaatgaattcatgaaagaatacagccaaacttccctaatcttggcaacctgtgttctgtttggttaatatcagtattcccctctaaccctaatagaggcct

SEQ ID NO: 229450 - DNA, 513 bp, Homo sapiens
acagacacgtcatgtatacaacagaaatttttagttttcaaaatctgaaatggcaagattgcaaagggaagccatcacagaatctaagtgctcttgagagaggtttagataatccaactgaaaaaattcaaacccttgcatttgacatttcaaactttcaagagtccattgtagaataacagttcattcaacaggtrtttgttgagcatctactgcattttttgagttgtcagtggagacctagactttttttaaaacccaagaactccaacttggcaaatctttggagatttctttatataaaccccttagctatagagccatgaagtaatatttctaatatggctatatgccacataacgtttcagtcaacatggattgcatatacggtggtggtcctgtaagagtataatgtatttttactgtaccttttctgtgtttagatgtgtctagatacacaaatacctaccattgtgttacagttgcctgcagtattcagtcccgtaacatgct

SEQ ID NO: 229451 - DNA, 510 bp, Homo sapiens
taatatttctaatatggctatatgccacataacgtttcagtcaacatggattgcatatacrgtggtggtcctgtaagagtataatgtatttttactgtaccttttctgtgtttagatgtgtctagatacacaaatacctaccattgtgttacagttgcctgcagtattcagtcccgtaacatgctgcacaggtttgtagcctgggagcaatagactacatcatgtagcctaggtgcgtataggctgtaccatctaggtttgtgtaagtgccctctaagatgtttgcgtgaggaaattgcttaatgatgcatttctcagaaggtaaccccatcattaagcgacatgaatgtatatccaaaattgtatatactattcttttaaactaatgtcaatttattttgataatatagccttaattttactgtattttgatagcaataaaaatggaatcaggtacatgcaatacttacttttctttggtgtttttaaggagcgacgaaaatttggccc

SEQ ID NO: 229452 - DNA, 463 bp, Homo sapiens
tattagcaattgtggctttcacatcaaggatgaatgtaataaataacacctaccagactcaaactcttcttaaaatgttttacattttagggaagtaatatataacacctaagtgagaaaaaaccagatgtcttttatggttattaaattctttatattggaacctataccggtaattctctacttaaatgattcttttttcttgacaaaattaaagcctcaacaacaaagcacaagctttgggagtattttgataagctgggggttgactagaaaacggatttttaacctttacttgttttagcaagtttttcttgaagctacrtatggagaactgtgaaaaataataagtgttggtgagaatgtgcggagggaggagccctgctgctgggaggtcaaatggacacagacctcctggaaagcagtccagtaatacttactgaaattaggtatctcaggtaga

SEQ ID NO: 229453 - DNA, 463 bp, Homo sapiens
tattagcaattgtggctttcacatcaaggatgaatgtaataaataacacctaccagactcaaactcttcttaaaatgttttacattttagggaagtaatatataacacctaagtgagaaaaaaccagatgtcttttatggttattaaattctttatattggaacctataccggtaattctctacttaaatgattcttttttcttgacaaaattaaagcctcaacaacaaagcacaagctttgggagtattttgataagctgggggttgactagaaaacggatttttaacctttacttgttttagcaagtttttcttgaagctacatatggagaactgtgaaaaataataagtgttggtgagaatgtgmggagggaggagccctgctgctgggaggtcaaatggacacagacctcctggaaagcagtccagtaatacttactgaaattaggtatctcaggtaga

SEQ ID NO: 229454 - DNA, 561 bp, Homo sapiens
caagttcacgtgagtggacagagaaagaactgataagtcttaatgcacttgcaaatttgtgactgaaaatgttctcatatgagggctctgaactttaattccatccttgacaagagactggggagtcacgagagctggttcctggataatccacargatcccaacaagatgaaaccatttcaccctcacccagggtgatggtgcacctaggccttgttcactgcaggctgtttcactcaccagctctcaagaaagatgaaacagggctagaaaaggtccagagaagtacaacgcaaatgtaaaagcaattggagacaaagacaaagacaaaccattttttccttgactttttatttggaatgattacaaactctcagaaaagttgcacatacagtaaacattcatacgctccatcgagatccaacaattgttcatgttttgatccatttgctttttctccttctatatttatatctctgtatgcttatgtatctacagctatatctatgtataatcacatatatttctctgtgtgtgtgtttgtgtgccctctcagtggat

SEQ ID NO: 229455 - DNA, 561 bp, Homo sapiens
caagttcacgtgagtggacagagaaagaactgataagtcttaatgcacttgcaaatttgtgactgaaaatgttctcatatgagggctctgaactttaattccatccttgacaagagactggggagtcacgagagctggttcctggataatccacaggatcccaacaagatgaaaccatttcaccctcacccagggtgatggtgcacctaggccttgttcactgcaggctgtttcactcaccagctctcaagaaagatgaaacagggctagaaaaggtccagagaagtacaacgcaaatgtaaaagcaattggagacaaagacaaagacaaaccattttttccttgactttttatttggaatgattacaaactctcagaaaagttgcacatacagtaaacattcatacgctycatcgagatccaacaattgttcatgttttgatccatttgctttttctccttctatatttatatctctgtatgcttatgtatctacagctatatctatgtataatcacatatatttctctgtgtgtgtgtttgtgtgccctctcagtggat

SEQ ID NO: 229456 - DNA, 561 bp, Homo sapiens
caagttcacgtgagtggacagagaaagaactgataagtcttaatgcacttgcaaatttgtgactgaaaatgttctcatatgagggctctgaactttaattccatccttgacaagagactggggagtcacgagagctggttcctggataatccacaggatcccaacaagatgaaaccatttcaccctcacccagggtgatggtgcacctaggccttgttcactgcaggctgtttcactcaccagctctcaagaaagatgaaacagggctagaaaaggtccagagaagtacaacgcaaatgtaaaagcaattggagacaaagacaaagacaaaccattttttccttgactttttatttggaatgattacaaactctcagaaaagttgcacatacagtaaacattcatacgctccatcgagatccaacaattgttcatgttttgatccatttgctttttctccttctatatttatatctctgtatgyttatgtatctacagctatatctatgtataatcacatatatttctctgtgtgtgtgtttgtgtgccctctcagtggat

SEQ ID NO: 229457 - DNA, 572 bp, Homo sapiens
gctctgttctgcagctctgtgtttggtaatttttttggtctctgagtacctaggtttgattcttctttcctctggctctgaaatatctggtggatggaatcctggcaagtgagcttgccttcttcaaggacttctctacgccccttgctgttcccccaccggccaccaggaagcagtaagcaataacagatgaagcatcccagctgaaacccacctctggtcctcacccagctccagcaagatgtaactctccaagttctgagtgaaatgaaagaaggggtcaaagatgccctgacattgcttgtctgggagctggggtagtggaggagttgggaacaggagtatgttggaggagaagttacagagttctgttgggggcatgttgagctgggaaagaacatgggatataamtgaatggggtgagaaatatggactggagcccaggtgaaagatttgaatgcatgtgtgcagagataacagcttcagccatgagagaagactctctaagatatgctggctaagtctgtgtgaatgtccccagccagaggaatcattaatttatctgaccatcc

SEQ ID NO: 229458 - DNA, 522 bp, Homo sapiens
ttcatctcagagcatttatgaggactgttctcctgaaagcccttgggcttttgtggcatatagagagatttgcaattctctgttatagctagctaactaggcttctgcctttcatatctttgcaaacataaaatcacattgtggaaaaagaaatgtgagttgttcagccctggaataccagggaatgacattctgtgcatagtaaaatgtgtgttggggagagcttggctagctcttattcacagtggatcagcttttcaaggcttcttcccaacatctatgttttgaggcccrtgttcagatcatctcataaaaaattaaatcactcatcatgaaagtgatttattaggtgggatctagcagcagcagcatctccatcagcctctccttggagcaccagtgaacttggccagagtcagcagagagcaaaatggtcatctctgcaatggtgtgcactgttgggacctagcccctggtgctgagcacacttccacggagggctcaagctgaaggtgactgaga

SEQ ID NO: 229459 - DNA, 398 bp, Homo sapiens
gggaggatgaggaagaggctgagcctggagtctgggtttccaggaggctcctggctgtagaccatttgatcagctgacgctccagtttgcccactgacagctgctgccctctgtgcaatgtgctcactgtgtgccgggcactgtgcctctcccttacatctttgcaacaatcctgagacaggatgaytatcattcccattttacagatggggaagccgaggcttatagaggtcacacaaattgcccatagtcacccagctcatgcctggaggagccaggcttccaaccaggtctgtcatcccaaagcctgaggtcgtaaccgctgtgcagatccaaaaaacttagtgacatcagtggccatcactggttgagtacctggccaagtgccagatctttta

SEQ ID NO: 229460 - DNA, 391 bp, Homo sapiens
ctcacgggtctgacttctcccggagtgggaggatgaggaagaggctgagcctggagtctgggtttccaggaggctcctggctgtagaccatttgatcagctgacgctccagtttgcccactgacagctgctgccctctgtgcaatgtgctcactgtgtgccgggcactgtgcctctcccttacatctttgcaacaatcctgagacaggatgactatcattcccattttacagatggggaagcygaggcttatagaggtcacacaaattgcccatagtcacccagctcatgcctggaggagccaggcttccaaccaggtctgtcatcccaaagcctgaggtcgtaaccgctgtgcagatccaaaaaacttagtgacatcagtggccatcact

SEQ ID NO: 229461 - DNA, 542 bp, Homo sapiens
ttggcacatttgacgacggcttccacccattgctgggaacttacccacagcaaatgcaaacattttttatttctatgcagttcaatcactgataccaaaattagaagaaaaaattcagtgactttgtcacacacagcatctgtttggttgaggacttctttgacttcagagtacagatgattaacaacctgtgctatgtaagccacacccaaatccttaagatccatgagggactggacaaaagggatgaaccatagaaatgtgctgttatgaacacgcatgtcttgaccaatatctgactgaagtacactggctaatgtttccatttcttcatacatgttaggacaataatctgggcaaatggctgttctccatccagaatcctaaaatgaaagaaatgctgatgttcagataaataagcaccacttatgacaggttcaacacccaagtcgttargaaaaatacgtttctcaactctcttattttggtttaccacatcattattatgctatacaatggtataattgtggcatataattata

SEQ ID NO: 229462 - DNA, 580 bp, Homo sapiens
ccacaaatgagtttatatacaacattcaagttgcatgaagagaatgaggggaaaaaattataytcattatgttttctcataggatctggtatacttggtctttattaattcattacttcctaaagattagaagcacttatttaattacagatccttcatgattagcatgatacaagcatcagcaaaaggaggtcaggatctaataataaacatgactacaagttttaggcctcattatctagactatctggagcagcatatccaagagaatgttctgtgatgatggaaatcttctgtctctgcattgttcaatacagtacaggatagagtacaggcacgtgtggccattgagccttgaaatatgactagtgggaccaaataactgcatttttaattttaattgacttaaatttattttaataatcacatgtggctggcagttactgtattagagaaccacagagaaacaaagaggcaggcaaagggaggccatgggacagagaaggcttaccccacaatgttaaccacaatgtcattacaaatgggtctcccagaggttctgatgttcatcctaccacca

SEQ ID NO: 229463 - DNA, 580 bp, Homo sapiens
ccacaaatgagtttatatacaacattcaagttgcatgaagagaatgaggggaaaaaattatactcattatgttttctcataggatctggtatacttggtctttattaattcattacttcctaaagattagaagcacttatttaattacagatccttcatgattagcatgatacaagcatcagcaaaaggaggtcaggatctaataataaacatgactacaagttttaggcctcattatctagactatctggagcagcatatccaagagaatgttctgtgatgatggaaatsttctgtctctgcattgttcaatacagtacaggatagagtacaggcacgtgtggccattgagccttgaaatatgactagtgggaccaaataactgcatttttaattttaattgacttaaatttattttaataatcacatgtggctggcagttactgtattagagaaccacagagaaacaaagaggcaggcaaagggaggccatgggacagagaaggcttaccccacaatgttaaccacaatgtcattacaaatgggtctcccagaggttctgatgttcatcctaccacca

SEQ ID NO: 229464 - DNA, 603 bp, Homo sapiens
aagacctttgaagcttgcaacaaaggggtttctaagaaagttcagcccttaggaccrgggggggaatgcacagatggagctgctgggggttggtggcagggccactcagttcgggtggcggcggtagagaatgattagggaattaccaagttattgaccaacaggcacacagggccaaaggttgagaagaaggcaggcaaaatggtgcgcgtgactcagggcaggttgtttggggggtatcagaaatgcctggaggaagttttctctgaaatagtcaaaattggatccgacggcttatgtctttccaactgatctactaatcatatttcttcaaattttatatccctgacccttgtaaaaggattgcattgaaggcgtgttttaagctgcattttaataagtcaataagaaagctcaaaattatttaaagcttcttaaagaggattatatttgatttcttgtgggaattctggggtgtggaagagaaagaggctcagtccttctgaggttgtttaacatgaaggaaaatgcatcatttcagacaaaaacttttaactgttttgttgttccaatagagatgatttaggacaaggagactttcat

SEQ ID NO: 229465 - DNA, 556 bp, Homo sapiens
ctcaccttccgtctggtctgctggatcatttgccgctgcctgcatttctgtccaggcttttctgccatcttggcctgctctgtgaaatcctgcaccatagctctgcattcagcattccaagtctttctcgaatgccacctcttctgggaggtctggcccgagcctggcaggcagatgagcttgcttctcagagttctcgtggcctgtaagacttcccttgtggcgttcctctatgcccagctgttctgtaagtgtctatcctctgcttggtcctggggttggttgcttccaggaacaccctcaagattgactatcagaaaagtctaactcaacccttactcactgygtcccataccgcatgctctgagaaaccttcccctagtgacccaccctcctcttgtggggctggatggtgagctgtcttcagtctctgggtccccagaactttgcttatgtctgtcttcaagctctgatcttccatctccccacaagctgtaataggggcacacaggtggtgtctgtccgagcagatgggtgtagctcatctagatgcagt

SEQ ID NO: 229466 - DNA, 553 bp, Homo sapiens
ctcctatcaggcggtgcctatggaaggccagactccagactggcttatgcccaatcaattcagggctgagtgatggataaaatccaagccagaaaaacgtactcactcactgccacgcattttagttttctaagtcaggtcgtcaccctttactcccgggcagaagcagcattagaagacactactgggctgtaatcccccaagtcctggggttaagaggggatgataatgaagcaattatcagtggttaattggtctccacctgcttgtctcagtgcctcacaaatattaggggttatccactgtgctgatttcattcctaccttcacctggatcrgatcttttagttgagaacagatttggatgcaggttttattcatctaaggcaatgatgagggagaactggaagcagaaccttaacagttccttttctactttattctcccacagcccattttattctctggctgtgggagaatgctctgagaggtaattccatagtgcctcccacaggcactgccagataggacccaataccccagagtgaaaagga

SEQ ID NO: 229467 - DNA, 557 bp, Homo sapiens
gaattccttttcactctggggtactggctcctatcaggcggtgcctatggaaggccagactccagactggcttatgcccaatcaattcagggctgagtgatggataaaatccaagccagaaaaacgtactcactcactgccacgcattttagttttctaagtcaggtcgtcaccctttactcccgggcagaagcagcattagaagacactactgggctgtaatcccccaagtcctggggttaagaggggatgataatgaagcaattatcagtggttaattggtctccacctgcttgtctcagtgcctcacaaatattaggggttatccactgtgctgatttcattcctaccttcacctggatcagatcttttagttgaraacagatttggatgcaggttttattcatctaaggcaatgatgagggagaactggaagcagaaccttaacagttccttttctactttattctcccacagcccattttattctctggctgtgggagaatgctctgagaggtaattccatagtgcctcccacaggcactgccagataggac

SEQ ID NO: 229468 - DNA, 483 bp, Homo sapiens
atttcaaaaatgtacctctcatatatcctcttctctggaagcctgaaggacaggcctcgctaacatgagtaaccaagaaagatgacgggggtggaggagatacagacccaacccaaggataaggactactatttcaggaatatcatcatgcaccacacacagaacaaatttatagattaactaacgtacctgatcatgagcgatttaaacattcaagaaaagacatcctggcattaatttagtgataagtagaaaattaaataaacatataaaacaataaatccaaggaaaacacagagtttggaaggaaatggaaaggcaattacagcatactacatggcttagctgaagatatctttcacatagtcaaaataacaaaaatggatctaaaaatttcaagacaatcccataatgaggrtgagggaacaggaagagtgtgtgcaagggttgggctggaaatgggggtagttcctgaagcaggaa

SEQ ID NO: 229469 - DNA, 575 bp, Homo sapiens
tctcttccaggctgcacagacattttcagaggtcccctctgtgtgtgcaaacctaggcaagccaggtgcctccctgtgaaacaggagaatgttgtgtagtcagagagtgacaggacctcctgagggatttgggggaggatggggatttgacagaaagaggccagaactggagagagacagaaccagtctacgttgcagctctgtcccccttagtagctatttgagtgtgaggaagttactgaacttctgtttcccacatgagaaatggtgataatagattcagccttgcagagtagtcgagtgggttttctaagcttatgttgtaatttctcttgggtacagagcacccagcaccgkgtagaatcttcataagtgttagctgttactgtggtacaacattacttaaaggaagttggaagagttaactccgcaaatctggggaccctaagaggctgtgtgatgcctcagcacttgagcccacgtggaaaggctgtggccagggccctgacctgctgtgtctgcagtggggttgtcccagccctcatgggcagctgaccttgagttctggccttatt

SEQ ID NO: 229470 - DNA, 428 bp, Homo sapiens
gaattcggtagtaaatttagaggagtggtactacagagattgaccgccctgccccctactgtggaggtagacaagcattgtactgagacagaagaagcgactgggacccayctgggttggctgtaggtaaatttgcctgtgctgggggctgtattgggaccgcttgaagcagaaacacaatattggtctgagtctgaggtgtcccatttgatactggggcctgggactggccctgcttcccatttccctggttctgtggcaagggattgccatctatatcagacttagagtggcaagtacttgcccagtgtttacctttacgacaatgagggcaaacagtagcaggagcatttggccatgtttgttgagctggcttggccgcttttaacagtgcaatttttttgggtatgatgaagttgaccacaatt

SEQ ID NO: 229471 - DNA, 415 bp, Homo sapiens
gattgaccgccctgccccctactgtggaggtagacaagcattgtactgagacagaagaagcgactgggacccatctgggttggctgtaggtaaatttgcytgtgctgggggctgtattgggaccgcttgaagcagaaacacaatattggtctgagtctgaggtgtcccatttgatactggggcctgggactggccctgcttcccatttccctggttctgtggcaagggattgccatctatatcagacttagagtggcaagtacttgcccagtgtttacctttacgacaatgagggcaaacagtagcaggagcatttggccatgtttgttgagctggcttggccgcttttaacagtgcaatttttttgggtatgatgaagttgaccacaattatagcaggctccaagaaaagaatt

SEQ ID NO: 229472 - DNA, 347 bp, Homo sapiens
tgaaataatgttgtgtgctatgatagcaaacactattattatataatcagaactgaaagagttgttatcttcaagacatcttcaaatcagccttccttcaatcctaaggaacttcatttccgtaaagttctttacttcaggtgagttggggttcctacaatggcaacaacgtacctggatagcyttgcccgttgtatgggatgctggcacactgagaagaatcacagtatccaggaggacctgggggtcctcggatacctgagtttccaggacggccaggggggccagggggacctcttgaacctgtggaccctggtggacctgttctggattctccttgtggacct

SEQ ID NO: 229473 - DNA, 590 bp, Homo sapiens
aaatctttgttatatctgaccctcataggtatctgagccctctcacagtttctcttgcctggtttttcttacatatgggtcacactttcctatttctttgcatgtcttataattttttgttgaaaacagtacattttaagtaatatattgtggtaactctaaatactgatttctacttctccccagaacttcttgtyatgggtttagtgacttagctagaatattctagtgaaatctatttcccttgcagggtgaagcctctgatgtttctcctcaagaggtgtacatagtgaccctaaaataacagttttttaacagagctctctttgactttctttaatttaagtcttaaattaaggagtcttaaattaagactcctgaagtcttaattaacctgtctgcctctgttggtattacacccagccattaagctccactaattgccagctgatttttcttttgtgttccacaatgtcttgggggcatcatttgctccacagtctaattcaattcatttctggccccattgtagagagagtttttgagcagtctttgaggtttattctgactccaggcaggcttttctcagc

SEQ ID NO: 229474 - DNA, 273 bp, Homo sapiens
tctatggtaggagtcaaaaatgatataaatcccccatataacctagggagcatcagatttgcttcttggctctctcagggactgcccctgctgttactgactcctatgttggcctacctgctccccactatgtgatttcttataccaacacaatttcatttatcacactragactttttttcaacaagtagtatcaggctcctggtacatctttagtccctgtatatgcccatctgcttcatcttgaggttttaaatttcactgataaataaa

SEQ ID NO: 229475 - DNA, 594 bp, Homo sapiens
gctcaaaatagtgttgtcatgccattaattagagcttaaaaayattttttagttgatttttaatttgcatcttaaaaagtgctgttgtagattattttcaggatatcgataaaccttgggaaaggtcttcattgcattttactagtattttgttctagctttacaagtcttgagagtgttaaaatagttgattaaaatccataggaagacatgtcttgtgatcttaaatccttttgttttaagcccagaaatatctttgtgaatgtatttttgcttcaaccacaattctcttcctattatttttctcacagtgaaatcattagcctgtgtttatgagattgatgtctgttgtcatggaaataaacaatgtcacaaatttagtgctgtagaaagaaaaataggttgagaagcaaaacctttgggaaaaataaaagctgaaattgttttaaaattaccccggtgttaatttgaaagataatttccacattctagttaaccttatttgtctgatacttttttgaaacgtcgttaatgcagctcatttaaattcaaaattgctttcaagcaaggtcatttcacaacagctgttcctga

SEQ ID NO: 229476 - DNA, 493 bp, Homo sapiens
aagtgacctgtatatttatcttacatttaaaatatggagagtgagggttttattgaaagacatttgtgcctcctgttaagttgaggtttccatatttttccacttgggttgtatgttttttgaatgaaagagccaaaatttagtagcagacgtttttgatcagctagaacaagtggtatgttttattttggtgactaatcacttttaagttttccagaagaattggttgttttcarttttgttagggttaagctatattgaaagtttgcactgctacgttttaaactgcatgagcaaataaaagtttcaccaataaactgttgttggcattaagttttgtaagtgatatgagattgttgcagttgttgtaaatcatgcattgaaactgagtttatttaaattagatcagagaggaaaagatcatggtaaggaaataaagatctttgtgaacaatgggccatgtcacaaggcagacaaaaatgtgataaaattc

SEQ ID NO: 229477 - DNA, 568 bp, Homo sapiens
ctcactcttactgatattttttttttttgtaaataattatgaattacctatcataatcatctggctggtgaaagatgtgtcaggatatcttaattcactatcctaaaaggttatttgtttaagtgataatcatgtgtcagtgtaggttcagcagttgtaacaaatgtaccactttggtgaaggatattgataatgcaggaggctgtgcatgtgtggaggtgggaaaaggtacatgggaaayttctgtaccttctgctcaatctctgtaccaaaactgctctaaaacaatacaaaatctattaaaaacaaacaattgaaaccaaaccaaagcaaatgtcatttgttaagcatgggcatttctaagcatttgtaggagaaaactttaatccttttgttttgggaaggttttaggaaaaggagaaagactgggcattcatgcatttccttctataaaaaagaagtagaggaatttggtgatttttctggcaaaggaagagagagggagaagtgccatgagcaatttcagttaagtcctatatcttgattttaagttgtccttaaactaaaa

SEQ ID NO: 229478 - DNA, 568 bp, Homo sapiens
ctcactcttactgatattttttttttttgtaaataattatgaattacctatcataatcatctggctggtgaaagatgtgtcaggatatcttaattcactatcctaaaaggttatttgtttaagtgataatcatgtgtcagtgtaggttcagcagttgtaacaaatgtaccactttggtgaaggatattgataatgcaggaggctgtgcatgtgtggaggtgggaaaaggtacatgggaaacttctgtaccttctgctcaatctctgtaccaaaactgctctaaaacaatacaaaatctattaaaaacaaacaattgaaaccaaaccaaagcaaatgtcatttgttaagcatgggcatttctaagcatttgtaggagaaaactttaatccttttgttttgggaaggttttaggaaaaggagaaagactgggcattcatgcatttccttctataaaaaagaartagaggaatttggtgatttttctggcaaaggaagagagagggagaagtgccatgagcaatttcagttaagtcctatatcttgattttaagttgtccttaaactaaaa

SEQ ID NO: 229479 - DNA, 631 bp, Homo sapiens
agttaactctctttatctttctctctgtctttcatgtcccatttaatttgtgagggaagcttagttcaaagaagtattactcttgttgtcaataagcatttattgacatttgagctcatgacatgcatcagagcaggaggaacatctggctaaataatgtaaataaactgccattgagtgtgtatgatgtaagtggagacttacttttgcgtgggtatgtttttgtcctctttctccaagaccatcttaaatggagatgaaaacactttggtgttcgaaaacctgaaccccaacaccatctatgaagtttccattactgccatctatcctgatgagtcagaaagtgatgacctgaytggcagtgagcgcacacgtaggtgtttagctttcaaataggacattgatattttaaagttaatttttaaaaaatagggctacagctatattagtaatgtgttcccaaattctgttttcttttagtgcctatcttaacaacacaaggtaagaatttaatttgatgaattgtttgaatgaacaaataatgaatgaatgtataaatgaaaagtaccataagatacataataaataggtcatctgcttttaaatcctaagatgttcattgagaactctt

SEQ ID NO: 229480 - DNA, 443 bp, Homo sapiens
ataatgtgaaatatttggttccataggagaccacaaatgctttaataaaaagaacccagaaattttaagagtttctcagaacaaaggaactaatgactttycagcatcttatggttccaataatagtctgagagtagtttgtattttgattaatcaatcaagttaaaatatatgactagcagcaggatctgaggaagccagtactataacagctgtcactaaacataaatctatcaaccttaacacctccaagacaccattgggcagagaggtaggccattcagagggagcaaagatttgccctaagataatacaaaatggtagatgatatgccagtgaactttatttgttcccatgcctccttttgagtttcagggagagaaaagagagaggtcaaagagaaaactgtattttctgggatatgggatgtggaggtagttctg

SEQ ID NO: 229481 - DNA, 443 bp, Homo sapiens
ataatgtgaaatatttggttccataggagaccacaaatgctttaataaaaagaacccagaaattttaagagtttctcagaacaaaggaactaatgacttttcagcatcttatggttccaataatagtctgagagtagtttgtattttgattaatcaatcaagttaaaatatatgactagcagcaggatctgaggaagccagtactataacagctgtcactaaacataaatctatcaaccttaacacctccaagacaccattgggcagagaggtaggccattcagagggagcaaagatttgccctaagataatacaaaatggtagatgatatgccagtgaactttatttgttcccatgcctccttttgagtttcrgggagagaaaagagagaggtcaaagagaaaactgtattttctgggatatgggatgtggaggtagttctg

SEQ ID NO: 229482 - DNA, 600 bp, Homo sapiens
taatgtgtttgaagcatttgttgaaaccatgctaaactcatggatttgacttggtactagttcaaaatttttctctctgggttgttataatattctgggatgaaaattgtggttactgggtttctttaaaaggagaatgggattatgarccaagacacatatttctgcgctgtataaacactcagagctgggtcagcaaaatgattctttttacttaggagtggtatgctgcttaagatggaaaaatacatgacgatggtgcacagcgcctccatccctagcttgctaatgttaacccttttgtggcattatccagctttccatttgttcttttgtatctagttgaggaggctagaacatcagaaccagaattaaaattatttattaactttatcattttacttttttaatactgtcctgccccaatttataccccatttaactttctcttatgcagatattttggttaaaataatagttgagatagtagtacacatatttagtatttccaaattagtatctccaaaactgaatttgaagtttctaaaatatacacaaatatttgtaatgagtgttgggcttcatattttttacaagctt

SEQ ID NO: 229483 - DNA, 523 bp, Homo sapiens
gtttgatcctgtcatcatgttgttagctggttattatgcagacttgattgtgtggttgctttatgtcaatggtctatgtacttaagtcagttttcatggtggcaggtaacagtcttccctttccacatttagcattcccttaaggacctcttataaggcaggcctggtggtggcaaattcccctagcatttgcttgtctgaaaaggatgttatttgtcctttacttatgaagcttagtttggctggatatgaaattctcagctggaatttacgttytttaagaatgctgaatataggctcctaatctcttctggcttataaggtttctactgaaaggtttgctgttagcctgatgtggttccctttgtaggtgacctgacccttctctctagctgcctttaatattttttctttcattttgaccctggggaatctgatgactatgtgtcttggggatggtcattgatatcatttagatatttgtccctgctcaaatctcatgttaggatataatccccagtgt

SEQ ID NO: 229484 - DNA, 523 bp, Homo sapiens
gtttgatcctgtcatcatgttgttagctggttattatgcagacttgattgtgtggttgctttatgtcaatggtctatgtacttaagtcagttttcatggtggcaggtaacagtcttccctttccacatttagcattcccttaaggacctcttataaggcaggcctggtggtggcaaattcccctagcatttgcttgtctgaaaaggatgttatttgtcctttacttatgaagcttagtttggctggatatgaaattctcagctggaatttacgttttttaagaatgctgaatataggctcctaatctcttctggcttataaggtttctactgaaaggtttgctgttagcmtgatgtggttccctttgtaggtgacctgacccttctctctagctgcctttaatattttttctttcattttgaccctggggaatctgatgactatgtgtcttggggatggtcattgatatcatttagatatttgtccctgctcaaatctcatgttaggatataatccccagtgt

SEQ ID NO: 229485 - DNA, 623 bp, Homo sapiens
gcaatttccatcaaaataccaccagcattcttcacagaactagaaaaaacaaacctaaaatttatatagaaacaaaaaagagcctacacagccaaagcaagactaagcaaaaagaacaaatctgcaggcatcacattacctgacttcaaaatatactataagggtatagtcaccaaaacagtatggtactggtgtaaaaataggcatatagatggaaggaacaggatagagaacacagaaataaagccaaatacttacagctaacttatcttcaacaaaacaaacaaaaacataaagtagggaaaggacaccctattcaacaaatggtgctgggataattggctagccrcatgtaggagaatgaaactggatcctcatctctcatgttatataaaaatcaactcaagatggattaaagacttaaatctaagacctgaaaccataaaaattctacaagataacattggaaaaactattctagacattggctcaggcaaagactttatgaccaagaaccaaaaagcaaatgcgacaaaaacaaagataaatagatgggacttaattaaactaaaaagcttctgcacagaaaaataaataatcagcagagtaaacaaacaaccccc

SEQ ID NO: 229486 - DNA, 619 bp, Homo sapiens
ttgcattaaacacagctttgaagcaaagactcttgagtgggaaaggccaggaacaaaacactgcatgactgcggagctcccactcttgccccctgacttcactgtgtgtggagctgggtggcagkaggacacttcagaagcaaatctgagtggtggaggcaaacaaaggcagggccgccataaaaaaccctagacgtctgagaacacaagtatgaacagcggagtagcactcgggactgcagggacaggagctgccattctcaccaaggtgccttggtcaagaataggacattgggttattggtgaggcagagtagatacaggaggcagcatcccggcagagaacagactgcttgtgctgagggtggacatgaccctgcctcattttgaaactcacccagacaatgactacacagctagtacccaccttggattcactagcacatttccgtcagaggccacagccttctccataggtgtctttaacaatgggcaataagaaaataatcaccagccatgctgaagtgcactcagtgggagagggaacatgccaaagggtgggaaacaatagagcaagggagcttaacaagaaagtgatgggcagctctgattcacagaat

SEQ ID NO: 229487 - DNA, 619 bp, Homo sapiens
ttgcattaaacacagctttgaagcaaagactcttgagtgggaaaggccaggaacaaaacactgcatgactgcggagctcccactcttgccccctgacttcactgtgtgtggagctgggtggcagtaggacacttcagaagcaaatctgagtggtggaggcaaacaaaggcagggccgccataaaaaaccctagacgtctgagaacacaagtatgaacagcggagtagcactcgggactgcagggacaggagctgccattctcaccaaggtgccttggtcaagaataggayattgggttattggtgaggcagagtagatacaggaggcagcatcccggcagagaacagactgcttgtgctgagggtggacatgaccctgcctcattttgaaactcacccagacaatgactacacagctagtacccaccttggattcactagcacatttccgtcagaggccacagccttctccataggtgtctttaacaatgggcaataagaaaataatcaccagccatgctgaagtgcactcagtgggagagggaacatgccaaagggtgggaaacaatagagcaagggagcttaacaagaaagtgatgggcagctctgattcacagaat

SEQ ID NO: 229488 - DNA, 539 bp, Homo sapiens
agaaatcattgcataaatcggcaaagattcatgctacaagatattatgcagttattaaaagaatgaggtagcttcatatttagagatctgtttctgatctttttaaatgaaaaaagcctggtacaaaataacaagcatagaatgatattatttttataaaatcagatgaccctccttcttgtaagcaagcaaaacaaacctctgtaaatgtgtgtaaaagaaaaacattggttgatattaagtgggtccatttactaaggcaattcctgcattacagtatgagagctttcaagcagctgtgagcaatgcactttttggctattggcactgctattccatttacttgttttccattatttataaaacctaatatacaagttttggcttttatggtaataccattcccaagggcacattgataaagtagatgagggcttagccaagcracctgcacaggcttggatgttgttagtacttctttgatatttgcataaatgcttctgaaaccttttagcagggtcagtgggcaaaaatgtgct

SEQ ID NO: 229489 - DNA, 539 bp, Homo sapiens
agaaatcattgcataaatcggcaaagattcatgctacaagatattatgcagttattaaaagaatgaggtagcttcatatttagagatctgtttctgatctttttaaatgaaaaaagcctggtacaaaataacaagcatagaatgatattatttttataaaatcagatgaccctccttcttgtaagcaagcaaaacaaacctctgtaaatgtgtgtaaaagaaaaacattggttgatattaagtgggtccatttactaaggcaattcctgcattacagtatgagagctttcaagcagctgtgagcaatgcactttttggctattggcactgctattccatttacttgttttccattatttataaaacctaatatacaagttttggcttttatggtaataccattcccaagggcacattgataaagtagatgagggcttagccaagcgacmtgcacaggcttggatgttgttagtacttctttgatatttgcataaatgcttctgaaaccttttagcagggtcagtgggcaaaaatgtgct

SEQ ID NO: 229490 - DNA, 572 bp, Homo sapiens
cgttttcaaaagtgaaaaagcttacaccaagtttgtcaagtttgcaaatacgtttgaaaaggttatggtaacattgtccaagatacaatattcttctgtgagttcacgccacttgaaatatccacacatactgtaaatacaaattatatctgtgacaggttttggcccatggagtgtgagcakatgtaatgccagcaaaggctttaaatgggcttgcatgtttgggctcacctcttgtgtttaatgagtatggttcagctactgcatgccctgggagttgttgccccatagttagaccctggagtgagatgtgcgaacagaactaagacagacccaaagcatggagcaaaacccagctatctgggggtctcaagcagagtcactacagctaacccacagatttaagaaaaacaaattcttactgtttatatgtcattgcattttggggtggtttgttccacagcattattgcaacaaggactaactaatacatcttccaaatcattattacataggttgtcagcaccatgcctatatgtgaagcaactgtgtacttagaaattttgagaatt

SEQ ID NO: 229491 - DNA, 560 bp, Homo sapiens
aactgtttggtaagcaatcaatagtatttattatagcatttattcctttagaaaaatctatataaatactaacaaatacttcttttaaagaattgttcagattattttattacttagggtcatattsttaaggtcataatcctcctacattatcttttgactgtctcagagtcaatcacttccccatgaggcatgtaattttcttataatgagctagcaattgttttccctggtgggaattttataagcacagagccataaaagtggtctgtgtttttattatgtttgtttaaatgtttacttcagctgaggtttccctaatccaaaacctgttttatttatttgtttttctgagatggagttttgttcttgttgcccaggctggagtgcaatggcatgatctcctctcactgcaacccccgcctaccgggtttaagtgattctcctgcctcagcttcccaagtagctgggactacaggcgtgcgcctctatgtctggctaattttttggtatttttagtagaggcgggatttcaccatgttggccaggctggtctcaaa

SEQ ID NO: 229492 - DNA, 567 bp, Homo sapiens
ccttgttcaaaaataaaaataaaaaatcgagtacaataccagtgaaattcttgtccctggacatgttcaggcagaagctgaatgattgacttacttgttggaaaagaaggaatgtaaattactgaactagatcatgactgacctctcaggttccttacaatgttgtaattgtacartgctcaatccatttatcctacaaaataagttcagtacaagaacaggctctacaacctacacaagaggctcaatttcctatgatgttttctccgaaagacaaaaaattgcagccaaagataaaataagaggaaaacatttatttttgccagaacttcaagatgcccagtggagatggcaaaccgagatataaaatgtgagtacagatggaatatatacctcatattcatacttgaatgtgtatgagtaggtgtgtatacggaagagcagattggaaaggaaatttcaagtcataatgacttgacctgggtttgcattccttgtctggcatttagtagataatgtggtattggtgaggatgcaacctttccagacctcagcttcttcatctgt

SEQ ID NO: 229493 - DNA, 567 bp, Homo sapiens
ccttgttcaaaaataaaaataaaaaatcgagtacaataccagtgaaattcttgtccctggacatgttcaggcagaagctgaatgattgacttacttgttggaaaagaaggaatgtaaattactgaactagatcatgactgacctctcaggttccttacaatgttgtaattgtacaatgctcaatccatttatcctacaaaataagttcagtacaagaacaggctctacaacctacacaagaggctcaatttcctatgatgttttctccgaaagacaaaaaattgcagccaaagataaaataagaggaaaacatttatttttgccagaacttcaagatgcccagtggagatggcaaaccgagatataaaatgtgagtacagatggaatatatacctcatattcatacttgaatgtgtatgagtaggtgtgtatacggaagagcagattggaaaggaaatttcaagtcataatgacytgacctgggtttgcattccttgtctggcatttagtagataatgtggtattggtgaggatgcaacctttccagacctcagcttcttcatctgt

SEQ ID NO: 229494 - DNA, 593 bp, Homo sapiens
ttcatgtggagcaggccgctggagccataaaccagtaggtgcacttaaatggtgattttgatgaagtgcctggaagctgagtgtgaactagtgcagttgagaaacttctaaaagccttagccttaggagatgcactcacccttttataaatgttacctctagaaactagggtttcatgataaagggtgaaaaaaaaattcccctcatgaatctggcatggtagagggtagaaaagaaatcccctcataaagagtaatctttatgaaatacacacatrgcattctccataacgaaggcctaatttcaggagaaagtaatttaccaagtcttatctcacctatggcagcaggtcatttctcccagtctagtgctccctagtcttccaggcttgtggactgtggggtgggaggcgggaaggaacctaagatatacttgtgaaggtcacaacccagagacataaacacagtagaagaccgagatttaatcataagatgttaaacactcctccctcccacacacaacttgttttcagatgaaaaatcttcaataaacagactctgaaactccaagtcaaaagggaagacaaaaacaac

SEQ ID NO: 229495 - DNA, 593 bp, Homo sapiens
ttcatgtggagcaggccgctggagccataaaccagtaggtgcacttaaatggtgattttgatgaagtgcctggaagctgagtgtgaactagtgcagttgagaaacttctaaaagccttagccttaggagatgcactcacccttttataaatgttacctctagaaactagggtttcatgataaagggtgaaaaaaaaattcccctcatgaatctggcatggtagagggtagaaaagaaatcccctcataaagagtaatctttatgaaatacacacatagcattctccataacgaaggcctaatttcaggagaaagtaatttaccaagtcttatctcacctatggcagcaggtcatttctcccagtctagtgctccctagtcttccaggcttgtggrctgtggggtgggaggcgggaaggaacctaagatatacttgtgaaggtcacaacccagagacataaacacagtagaagaccgagatttaatcataagatgttaaacactcctccctcccacacacaacttgttttcagatgaaaaatcttcaataaacagactctgaaactccaagtcaaaagggaagacaaaaacaac

SEQ ID NO: 229496 - DNA, 547 bp, Homo sapiens
agggtttaataaatagagcagatggcatggggaataactaatatggtgagcgaaagaatcaaaactcaaaacaatataagtcacattgatgcactgagattgcacaataatatagattttcttcgttaggttaaaataatayaactgcttgaatacaagttaaaagagaatgcttagtgcaatataacctcaggatgttaggccactgcaaactctacttagtaccaattacagtatgaaacaactgcctaaaaaagaatggaaaatacagagggaagcagagaggaaggaagaaagaatgaatgaacaaaagaacaaaggaattaagaaatgaagggggaaagaagatcatgccatttctggctctacaactaaatcgacagtcttcagatccaaggaccttattcttctgggctgtatgctagccagcccacaactggagttcgatgggctactggattttaaaagaagtatttacacataagtatatttagaaaggcatagtcaggatggagaaattgttagataacatgtcatttaagaaata

SEQ ID NO: 229497 - DNA, 524 bp, Homo sapiens
ctgtcatcttgtaacaaaacttcagctactaaaaagtttaccaaaaaaaaaaatgttgatatagtttggatatgtgtcctctctaaatctcatgctgaarcataatctccaatgttgaaggtggggcctagtgggcaatgttttggatcccatatggcctggcactgtcctcaccccagtgagtgagttctcacgagatctggctgtttaagaatgtgtggcatcttgctcccactcttgccatgtgatctaccgccttcccctttgctttctgtcacaattgttagcttcctgaggccttgtcagaagccgagaagatgcttggtaccatgcttcctgtatatcctacaaaaccataagccattaaacctcccttctttataaattattcagtctcaggtatttctttatagcaatgcaagaacagcctagtacacatgtattgcctaagtcttcaaatatgaatgtgtgcttagtacaatgcctcacaactagaaatctcttggtaaatatttattgagtaa

SEQ ID NO: 229498 - DNA, 524 bp, Homo sapiens
ctgtcatcttgtaacaaaacttcagctactaaaaagtttaccaaaaaaaaaaatgttgatatagtttggatatgtgtcctctctaaatctcatgctgaaacataatctccaatgttgaaggtggggcctagtgggcaatgttttggatcccatatggcctggcactgtcctcaccccagtgagtgagttctcacgagatctggctgtttaagaatgtgtggcatcttgctcmcactcttgccatgtgatctaccgccttcccctttgctttctgtcacaattgttagcttcctgaggccttgtcagaagccgagaagatgcttggtaccatgcttcctgtatatcctacaaaaccataagccattaaacctcccttctttataaattattcagtctcaggtatttctttatagcaatgcaagaacagcctagtacacatgtattgcctaagtcttcaaatatgaatgtgtgcttagtacaatgcctcacaactagaaatctcttggtaaatatttattgagtaa

SEQ ID NO: 229499 - DNA, 538 bp, Homo sapiens
ccattctaatccttatacctatttctttatttcaagaagctgtaatttgtaagacaaattcattttccagaaagaaaaagaatggtagagaagtatgtcatttttataacatatgcaatatcagaaaagttaaaatgtcactgtgaattgggaggaatatgtgaatatctttgatgctttaattttattgcagtgatatctgttacttgaaataaaaggacttctgaaatatatcatttaattccttattttattmtgaaatatcaacatattcatcctctttcaggatataaagtcagaggtagagccaggctacacataatacctaaactaatacacctattgcatttatagcacctaatatcttcaaaaatatgaccaggctgtcatttgttggcttttcttagctatcatatatatcccttctttggtgtcatctatcatcgtgattgtattacatctgtaataagaggcagaatgcagtgactaagaccatgaattatgggaccatgttatctaggtttgcatttggagccat

SEQ ID NO: 229500 - DNA, 538 bp, Homo sapiens
ccattctaatccttatacctatttctttatttcaagaagctgtaatttgtaagacaaattcattttccagaaagaaaaagaatggtagagaagtatgtcatttttataacatatgcaatatcagaaaagttaaaatgtcactgtgaattgggaggaatatgtgaatatctttgatgctttaattttattgcagtgatatctgttacttgaaataaaaggacttctgaaatatatcatttaattccttattttattatgaaatatcaacatattcatcctctttcaggatataaagtcagaggtagagccaggctacacataatacctaaactaatacacctattgcatttatagcacctaatatcttcaaaaatatgaccaggctgtcatttgttggsttttcttagctatcatatatatcccttctttggtgtcatctatcatcgtgattgtattacatctgtaataagaggcagaatgcagtgactaagaccatgaattatgggaccatgttatctaggtttgcatttggagccat

SEQ ID NO: 229501 - DNA, 488 bp, Homo sapiens
tgtttattagcttttgtctattggaaacatctatgtggtgcaatttgattaaagcagagttaaatccaagggtactatcaagtttatgaacgtgttttcttttttctatatattagtcctatttgcttctgcctgccttcattcgcagacatgctttttcaacatggcattatgatgtcaggaaaaccgtcataggttgacccaagcctctattgtttttagaacttttattaacagaacagggggataattcttttttcagtatccatacatcaatagacaaaaattctgattgcatctacttagaacatgtggttatttggtggggctgcrtgagggttgggaatgggggcaggcagggttgacttgggactaagccacatatttctgtggattcagggagggagatatttcccaaaggagagtgtgctacacagatgaaaactgtatgtctatttaagtataaaacaggtaactcaccaatgaac

SEQ ID NO: 229502 - DNA, 569 bp, Homo sapiens
tatatacgatatggagttaatatccaaaatatataaggagctcctaaatttcaatagtgaaaataatcaaataacgcaattaaaaatgggcaaaggatttgaaaaggcatttctcaaaacagacatacaaattgtcaataagtacrtaagaaagttctcaacatcactagttatcagggagatggaaatcaaaaccactatgagatatcatctcacacctgttaggaagctattatgaaaaaagtaaaaacaaatgttaataaggatatggagaaactggaacccttgtactttgttgctgtggatataaaaggttgcagccactatagaaagcagcatggagattccgcaaaaattaaaaatagaagtactatatgatccaacaattcaacttctgggtatttatccaaaagaattgacatcaggatcttgaaaagatatttacacttccatgttctctgcagcattatacggaataaccaaaatgtggaaacaacctaaatgtccatcaatggataaagggataaagaaaatactctgtgtgtgtgtgtgtgtgtgtgtgtgtgtgt

SEQ ID NO: 229503 - DNA, 569 bp, Homo sapiens
tatatacgatatggagttaatatccaaaatatataaggagctcctaaatttcaatagtgaaaataatcaaataacgcaattaaaaatgggcaaaggatttgaaaaggcatttctcaaaacagacatacaaattgtcaataagtacgtaagaaagttctcaacatcactagttatcagggagatggaaatcaaaaccactatgagatatcatctcacacctgttaggaagctattatgaaaaaagtaaaaacaaatgttaataaggatatggagaaactgsaacccttgtactttgttgctgtggatataaaaggttgcagccactatagaaagcagcatggagattccgcaaaaattaaaaatagaagtactatatgatccaacaattcaacttctgggtatttatccaaaagaattgacatcaggatcttgaaaagatatttacacttccatgttctctgcagcattatacggaataaccaaaatgtggaaacaacctaaatgtccatcaatggataaagggataaagaaaatactctgtgtgtgtgtgtgtgtgtgtgtgtgtgtgt

SEQ ID NO: 229504 - DNA, 570 bp, Homo sapiens
cttttaaatatgtcaaagtattctgttcttcttaaccaggtctgccttcaggagaaactgtaaccaaaataatcaactgagattttaacagagcctaactgrtttgggagaagaggaatatccaactcgaacctactctagctatcttgttctatataggacttttctttttggaatttccactatatgtatgtttcaccttttgtagttgtctcacagttcttggatatcctattttgttgtacttttgcagtactctcacccatctatcagaaatgtacaaatcaagcaggcagaaaattagtaaggatctagttgaactcaacactattaagtaacttgatataatggacatctgtagactatttgattcagcaacaggagaatacacattcttctcaaactcctgtggaacattcaccaagatagagcatattctgagtgacataaaaatcttaaccaatttaaaataatagaaatcatataatgtctgctctcagaccacaatggatttaaactagaaattgataacagaaaaacagttggaaagttccaaatatttagagatta

SEQ ID NO: 229505 - DNA, 609 bp, Homo sapiens
caattttggccaaaaagtacaaattgaagtcatcttcctggatttccaaaatgatagtagacatttaaaactctatgtttatctaaacactttgagtatatcttcatgataaatgccatgtgacattttatgataccagtcacagaaatgtagctttcaacactcaaatcgtattacactagccatattagctaatttatatattctatcatggattttagattttgtgatgccaaaatggctcactgaaattgttaacwgtaggtttacaaagatctgattctcattaggttggtcctgatggatttacaggcatagggcatatgacccatacttatgtttaaggctagatgcataaataaactttaagattagagagagaagattattgtattttcacattttttttgataattaaagccaagatttccccccctaaattgctacttgcattatttattagaaaattactttgaaagcaatggttgctcgaagtattataggaaaggaaaattgagtattgaacaaaatttacgtaaaataaaatgaatactaaaacatgtaggagaaaactgtttcatatctcagagacaaacatcaatactaaaa

SEQ ID NO: 229506 - DNA, 609 bp, Homo sapiens
caattttggccaaaaagtacaaattgaagtcatcttcctggatttccaaaatgatagtagacatttaaaactctatgtttatctaaacactttgagtatatcttcatgataaatgccatgtgacattttatgataccagtcacagaaatgtagctttcaacactcaaatcgtattacactagccatattagctaatttatatattctatcatggattttagattttgtgatgccaaaatggctcactgaaattgttaacagtaggtttacaaagatctgattctcattaggttggtcctgatggatttacaggcatagggcatatgacccatacttatgtttaaggctagatgcataaataaactttaagattagagagagaagattattgtattttcacattttttttkataattaaagccaagatttccccccctaaattgctacttgcattatttattagaaaattactttgaaagcaatggttgctcgaagtattataggaaaggaaaattgagtattgaacaaaatttacgtaaaataaaatgaatactaaaacatgtaggagaaaactgtttcatatctcagagacaaacatcaatactaaaa

SEQ ID NO: 229507 - DNA, 609 bp, Homo sapiens
caattttggccaaaaagtacaaattgaagtcatcttcctggatttccaaaatgatagtagacatttaaaactctatgtttatctaaacactttgagtatatcttcatgataaatgccatgtgacattttatgataccagtcacagaaatgtagctttcaacactcaaatcgtattacactagccatattagctaatttatatattctatcatggattttagattttgtgatgccaaaatggctcactgaaattgttaacagtaggtttacaaagatctgattctcattaggttggtcctgatggatttacaggcatagggcatatgacccatacttatgtttaaggctagatgcataaataaactttaagattagagagagaagattattgtattttcacattttttttgataattaaagccmagatttccccccctaaattgctacttgcattatttattagaaaattactttgaaagcaatggttgctcgaagtattataggaaaggaaaattgagtattgaacaaaatttacgtaaaataaaatgaatactaaaacatgtaggagaaaactgtttcatatctcagagacaaacatcaatactaaaa

SEQ ID NO: 229508 - DNA, 576 bp, Homo sapiens
gggtacgtgtgctacttcagattttggctatctggaagcacatctttgtgtgtgtatatgatttcatttctcttgggtaaatacctagaagtggaatatttggaccatacagaaagcattgttcaccttttgccatgcttattccaaaagtgcctgtacccctttgcattcacgtcagtaatctagtaaatatccagttgggtcactttctcatccacatttctaatgtcagtctttttgtttgtttgtttgtttgtttgtttgttttaagagggagtttmgctcttgttgcccaggctggagtccagttgcacgatcttggctcactgcaacctccgcctcccaggttcaagcaattctcctgcctcagcctcccaagtagctgggattacaggcatgtgccaccacgtccagctaattttttttttttttttgtatttttactagagatggagtttaaccatgttgattctaatgtcagtctttaacattgactgttctagtgggtgtgtattgataactcatttttgtcttaatttgcatttatctcatgaatgtcaatgttgactgtatttt

SEQ ID NO: 229509 - DNA, 625 bp, Homo sapiens
cttaaattttgcctttggtttggggaaagatgtgtcactagtcatattctaagttactgttacaatgagaagatgtaagggtgattgctttaagggtggcttttcagctaagggtgtggtatacatacttttgaccaaaccaactctgatttcttattctgactctattagcttgcttacgactattgggccagccacttaacgattttgttcttcagctttctcattgtaaaataaatgtatcagatatgacccttaattatttcacactctataaactatatgtgatatgtcttcctactcaataagcatcttgacagtatataaagctttaagtgctagacaactaaccattggacaaaaacaaataatagctgtgcagtattkagaaactgatctaagtgaaagacgacacaattgcaaatccaacacaactcttctcaacacacagacacatacacatactctcctaatgaatatttaaagatctccaaataatagatcagaaaatgtattacttctccacattttttcacttattactctgaaaaaaataagtggaaagtgaaacttcataataaattggggtttaaaattgagaccaacatcattagggtaaaatgtg

SEQ ID NO: 229510 - DNA, 625 bp, Homo sapiens
cttaaattttgcctttggtttggggaaagatgtgtcactagtcatattctaagttactgttacaatgagaagatgtaagggtgattgctttaagggtggcttttcagctaagggtgtggtatacatacttttgaccaaaccaactctgatttcttattctgactctattagcttgcttacgactattgggccagccacttaacgattttgttcttcagctttctcattgtaaaataaatgtatcagatatgacccttaattatttcacactctataaactatatgtgatatgtcttcctactcaataagcatcttgacagtatataaagctttaagtgctagacaactaaccattggacaaaaacaaataatagctgtgcagtatttagaaactgatctaagtgaaagacgacacaattgcaaatccaacacaactcttctcaacacacagacacatacacatactctcctaatgaatatttaaagatctccaaataatagatcagaaaatgtattacttctccacattttttcacttattactctgaaaaaaataagtggaaagtgaaacttcataataaattggggtktaaaattgagaccaacatcattagggtaaaatgtg

SEQ ID NO: 229511 - DNA, 625 bp, Homo sapiens
cttaaattttgcctttggtttggggaaagatgtgtcactagtcatattctaagttactgttacaatgagaagatgtaagggtgattgctttaagggtggcttttcagctaagggtgtggtatacatacttttgaccaaaccaactctgatttcttattctgactctattagcttgcttacgactattgggccagccacttaacgattttgttcttcagctttctcattgtaaaataaatgtatcagatatgacccttaattatttcacactctataaactatatgtgatatgtcttcctactcaataagcatcttgacagtatataaagctttaagtgctagacaactaaccattggacaaaaacaaataatagctgtgcagtatttagaaactgatctaagtgaaagacgacacaattgcaaatccaacacaactcttctcaacacacagacacatacacatactctcctaatgaatatttaaagatctccaaataatagatcagaaaatgtattacttctccacattttttcacttattactctgaaaaaaataagtggaaagtgaaacttcataataaattggggtttaaaattkagaccaacatcattagggtaaaatgtg

SEQ ID NO: 229512 - DNA, 543 bp, Homo sapiens
cagatgggatggctgggtcaaaggatacatagtttgcaatttgaataaatttaccagattgcagtatatagaacttgtaatacttcgcacaaccccagcagtgtctgagaaatctgctcaattggcctaaatttcaaagtgttttcagcaaggctagtggaaagttctctaatattgttattcaccatgttgaccaaatgttttaaagagagagccatctacatttatatagaactgtaacattgatttaaagtgccagaatgtattactgagaaatgtrtagccctgaaaagataaagttgtgcatttctggaaagttgaagaaaatagagaatatttatacactataggaaatcatcagagatctactaaattattaacaaagattttatcatcatagctctagataataatcttctatgtgtcagtaaccgaaattacaggtcattttcttaaattggcatcaatcgttgagaagaaaacgttcaacatatttatacacctaactagaaactgttaaaaaaataccagtcataaacccaa

SEQ ID NO: 229513 - DNA, 626 bp, Homo sapiens
ctgttccactttcatcagtgctgaaaagaggtgaaatataagtggaatgaacccaatagtgggcagaatgtcttatctttgagaaatttggggtaaatattaatagtacttataaggactatgaaagttgctgactgttggtgaaggtaaatattggaaatgttaatgaatgtctgagtgttatcaccaatttagggtgaagtgtaaagccagatgacctcctaaacagcacaaatggtctttcatctttctcaacacaggaagaaaaagctaaatgtcaggcccaggacttaagggaagtagagatgtatagtgagttgaattctcaatccctgsaagtcttctctgtcaaggtcaggtccattattgtgtgtcaacaaggtcctgaaacttgggatggaggcattcaggtacatgcattgaaaattttcattcttcttcttctcctgaaccttctggggttacacaactagcccattcctctctaccaaagactaatgctcctcccttacctgaagatgatgcataggcctctcccttgcaagacaacattgaacaccccaggactgactgtcttctccactcttggccattagaccacttacgtaggacaaactcacaaaaaa

SEQ ID NO: 229514 - DNA, 412 bp, Homo sapiens
ggactcatacaatatatgtcttttgcttggcttttttttacttagttcaatgcttcaagaatcatccattttgttgcatatgtcagtagtttgtttctttctcttgatgaatagtgttccacttatggattaatcaccatctgtctatccactcaccatttgaaggacatttggattttttacagtttggggcatttacggcccaaactgctaaaaccattcacgtacaggtccttgtacagaaacatgttttcagttctcttcggtttatgaataggagtggaattattatcccatatagtaaatgcatgcttacctttataaaaaaagtcaaactgtttttcaaagtggctgtgcattcatattttcaaagtgscattttgcattcccccaacaataaatgaaaatttca

SEQ ID NO: 229515 - DNA, 561 bp, Homo sapiens
gagtaggcttttcatatatctaaaagtggacaataggctggacatggtggctcatgcctgtaaatcccagcactttgggaggccgaggcgggtggatcacgtgatgtcaaaagttcaagaccagcctggccaacatggtaaaaccccatctctacaaaaaaaatacaaaaattaggtgggcatggtggtgcatgcctgtagtcccagccacttgggaagctgaagtatgagaattgcttgaactcaaggaggcggaggttgcagctgagattccaccattgcactcaagcctgggtgccagagcgaggctccctccttaaataaacaaataaatattaaaattttaaaaagtggataataaatatacacctaaaataatgtgttaaactatgtcagcctttaaatttacccccatttgactgtctatgtcaggacattaaatgtaatgcttaattaccttaacattttcattcattcatatttatacattccatattatattargtagatcttgaggtggttaaaagataaatcagatatagattctaataactcataatt

SEQ ID NO: 229516 - DNA, 570 bp, Homo sapiens
ctctgtgttccccggtcaattttctggtcctttcttcatggaaattacttagcagattttaagattcttggtgagaggattcttatgttcttcatctatgtattrtcatcaatgtacctaacaattttcaataaaattctctcaaacaaatgaagagaaatacacaagaagtcatcttaattttttaacctgtggtctgcagatctattttgtgagtacccatgaaaatggtggctgccttgtttatgctggaaaatgttagccatggggcaatgaggacaatgaacataggaggcattggagtccaggaacctgaagtcacaccctgtcaatgggatcatataagatacttcaactttttgagcctcagttttctcaaatacaaaatgggaatcatacaacatatacatttcaggcttatagtgaagattagaaataaatctacaaatcacatagcaataataattattattatataatggttgattatctaaagaataatgtgctctggatagtagaatgttcctgtaaattgagaattataaattttcaagaaaatagaataggtag

SEQ ID NO: 229517 - DNA, 636 bp, Homo sapiens
cagctactttctcacaaaagtaatcattagaggataaagggttaagctgtactggctgggtaagacattagctgatacagagcaccagaagtatttgaaatcacaagggtttcaaagctaaaaataccttatgcataattcagctttttttggataattcattaaccttttataaattttctaaaccacatagtctttatcatgattattaattattagtatacagaagtgttctggaaagatctagttaaagtgtgctttagttaaaagcacagaagactttcctatatatgaatgtaagccaggttgaaataaaagagttattgttttccccatagtttattgagatgtgttccatgcccctgaatacagaggggaaaattggttaaaatgagaatttcaaccctctttgcttcaaaatatttgaaaatatcacataatggaagaatggcccrgcctagaccagaggttcctaattaggagtccatgagccacgttcaattatatatattttttcttctggtatttttcttgtttcagtgaaaattatttttaaataaattacttttatataaaatgttttggaagcaatgtttcaccctaaacaaattgtagtgagccaggagatcctactgt

SEQ ID NO: 229518 - DNA, 636 bp, Homo sapiens
cagctactttctcacaaaagtaatcattagaggataaagggttaagctgtactggctgggtaagacattagctgatacagagcaccagaagtatttgaaatcacaagggtttcaaagctaaaaataccttatgcataattcagctttttttggataattcattaaccttttataaattttctaaaccacatagtctttatcatgattattaattattagtatacagaagtgttctggaaagatctagttaaagtgtgctttagttaaaagcacagaagactttcctatatatgaatgtaagccaggttgaaataaaagagttattgttttccccatagtttattgagatgtgttccatgcccctgaatacagaggggaaaattggttaaaatgagaatttcaaccctctttgcttcaaaatatttgaaaatatcacataatggaagaatggcccggcctagaccagaggttcctaattaggrgtccatgagccacgttcaattatatatattttttcttctggtatttttcttgtttcagtgaaaattatttttaaataaattacttttatataaaatgttttggaagcaatgtttcaccctaaacaaattgtagtgagccaggagatcctactgt

SEQ ID NO: 229519 - DNA, 535 bp, Homo sapiens
agcactggcgtattaacagagtaaaaggtttaacaaatcattgcccatatcctgtaatcaagcacatagaatatgacctagttatctataaaaagcatgataactggatcaagataaaggaacaatatttatagcctttccaacacaaatgtagaatataagtgtattagaagaacactaataaattaaacatagagttatatgattcaaggttagcaggattaagaaaattacaaactaggctaggaaaatcctctatgaaattcagttctctctcttgggtatctgacctagccagtagggctgggatrgcacattcatgttttttaatgcttcagttctatatattttgagaatctccaggcacctagcacaaacctttgaaggttcccttgtccccaggcttatcagcacttgcaaatagatgcctgagggccttaatccaaccagtcagcagtcagggaggctctgcctttcaaagccatttgagaatcagctgggaacagcctcgcatactcagaataaaatgatatag

SEQ ID NO: 229520 - DNA, 535 bp, Homo sapiens
agcactggcgtattaacagagtaaaaggtttaacaaatcattgcccatatcctgtaatcaagcacatagaatatgacctagttatctataaaaagcatgataactggatcaagataaaggaacaatatttatagcctttccaacacaaatgtagaatataagtgtattagaagaacactaataaattaaacatagagttatatgattcaaggttagcaggattaagaaaattacaaactaggctaggaaaatcctctatgaaattcagttctctctcttgggtatctgacctagccagtagggctgggatagcacattcatgttttttaatgcttcagttctatatattttgagaatctccaggcacctagcacaaacctttgaaggttcccttgtccccaggcttatcagcacttgcaaatagatgmctgagggccttaatccaaccagtcagcagtcagggaggctctgcctttcaaagccatttgagaatcagctgggaacagcctcgcatactcagaataaaatgatatag

SEQ ID NO: 229521 - DNA, 475 bp, Homo sapiens
ggtatgcaattaagcactttctggggggacagactctcaaaaagaataaataacctgtatcatggaacaataattggagttctctctactccattgcttcagcctaatgctggcaagagagactctttggcccactgctggcactcagggctgaagaggtggttgaggcttctggaaaaggaagattattagaatgattgtgcaagtctcttatggcttttgaatacctcacccatgtttgactcatcaatgcattttggtcacaccaatgataaatttagtggtttagtcatgataaaaagacaggtgcaacgttatcttttggaagaaagarcaatgagacccatataatttcaatcttggatgaaaatcaccagttgctaaaataaacaaaatgttttcagacctggttctcatctccttttatatgcaattcccttaaaaattgtgctttatatttctattatctactgtc

SEQ ID NO: 229522 - DNA, 512 bp, Homo sapiens
cagcagtcagggaggctctgcctttcaaagccatttgagaatcagctgggaacagcctcgcatactcagaataaaatgatatagcttctgagataatttctgatgttagaataaattcatgtatgttgttccccaaatactcttataagcacttccattgaaagatgtacgccatgtcacaaaaagtaaaaaacattgtttatctgctattattttattttctttggatggggggagcaaaattgcatatagaatttagaataatgggtgaaaattatcatctaaaaattctgaatctctcattcacaaatatcctctcctttttcttttcctacmtttctcccactggcctctgctttctctgtctcctactgtctctcttctaaagataaaaatcttgtgttaaataagcaatgccaaaataaaacgagaacgcattgccaagaagagaggtagagcacaagtagattttcattcagacaaattcttttttatataaaaaaaatggtctg

SEQ ID NO: 229523 - DNA, 512 bp, Homo sapiens
cagcagtcagggaggctctgcctttcaaagccatttgagaatcagctgggaacagcctcgcatactcagaataaaatgatatagcttctgagataatttctgatgttagaataaattcatgtatgttgttccccaaatactcttataagcacttccattgaaagatgtacgccatgtcacaaaaagtaaaaaacattgtttatctgctattattttattttctttggatggggggagcaaaattgcatatagaatttagaataatgggtgaaaattatcatctaaaaattctgaatctctcattcacaaatatcctctcctttttcttttcctacatttctcccactggcctctgctttctctgtctcctactgtstctcttctaaagataaaaatcttgtgttaaataagcaatgccaaaataaaacgagaacgcattgccaagaagagaggtagagcacaagtagattttcattcagacaaattcttttttatataaaaaaaatggtctg

SEQ ID NO: 229524 - DNA, 405 bp, Homo sapiens
ttctctaatgcaaccatgatgaattatgcacactgttgtccaaaataattcctctgcttgcaatcttacaaaccttgactttgttgactcatgcttgagacttagctcatacttatatcttccagaaagyggcctataacccctgaattcctaagtcttcaccgtggacctttcatgttaatcccatagcaccctctgctgtcttccattatagcatgtatcatagtgcttttttccatctttccttcttattgaactggaattgtgaactcctcaatgtcaaggacaaatgtattgaccagtattttattcatctctctgctgtactcctctttccaccttttggatgggaacaggtggacagagagagacagagtaaagcagagacaaagataccagaaatat

SEQ ID NO: 229525 - DNA, 405 bp, Homo sapiens
ttctctaatgcaaccatgatgaattatgcacactgttgtccaaaataattcctctgcttgcaatcttacaaaccttgactttgttgactcatgcttgagacttagctcatacttatatcttccagaaagcggcctataacccctgaattcctaagtcttcacygtggacctttcatgttaatcccatagcaccctctgctgtcttccattatagcatgtatcatagtgcttttttccatctttccttcttattgaactggaattgtgaactcctcaatgtcaaggacaaatgtattgaccagtattttattcatctctctgctgtactcctctttccaccttttggatgggaacaggtggacagagagagacagagtaaagcagagacaaagataccagaaatat

SEQ ID NO: 229526 - DNA, 405 bp, Homo sapiens
ttctctaatgcaaccatgatgaattatgcacactgttgtccaaaataattcctctgcttgcaatcttacaaaccttgactttgttgactcatgcttgagacttagctcatacttatatcttccagaaagcggcctataacccctgaattcctaagtcttcaccgtggaccyttcatgttaatcccatagcaccctctgctgtcttccattatagcatgtatcatagtgcttttttccatctttccttcttattgaactggaattgtgaactcctcaatgtcaaggacaaatgtattgaccagtattttattcatctctctgctgtactcctctttccaccttttggatgggaacaggtggacagagagagacagagtaaagcagagacaaagataccagaaatat

SEQ ID NO: 229527 - DNA, 257 bp, Homo sapiens
tgtttcatgagttttgtttgaggcttattggtgattagactcaaattatacatctytaattacagtatcatagaagtgatgctgtgttcttcccaatgcatcctatcctgccatgtggcaaacaatttaaatctgtccctttaccaacaatgttcactttgatcatttaattaagaaaatgtcttccagacttctccagtgcagttattcttttcctctttgaaattgatggaaatttggcgggaggtattttgaaa

SEQ ID NO: 229528 - DNA, 594 bp, Homo sapiens
gaattcaagtgacaactagctattaggaaatacctggggctatgagctgttgattcagctgaactctttacatatctaaatccaattgatttctgagtgtcaataggcctttggcttttgagtcagaagaagcctgagagtgactaggaaaagacatgaaggctggcatagaagttagtgtttctacttctactttatggtggaatatttttgtggttctcaagaaatgtccaacccctggtttggtaaagacttgccattctggattaaatttgcatcagcagttcatttggcacagaaatagtcatttatttggattccacctttcctactcttgaacattattcttcagttacttttaagaatcttccatggtctgtccataattttatctatactgtatagttcagttggtcaaagttgtcttttctgtcttctattcttccaaaagctctcttctctgtgagcrtcttgagtccatctctagtttcttagacacctcatctctttatttgtagaggaagagctttaggttatcccttggtatgtttggataaggtatgtgagaaagacagaaaagttttttatgctaag

SEQ ID NO: 229529 - DNA, 339 bp, Homo sapiens
ttttataaatgtaatcatcttaaatttgggtaaaatttgtttatttcagattattgccattggacctgttgcctatgatgtcaaagtttaaacgtatttggggaatccatgaaaaccttatataccccatagtgargttgttctgtgtggtctgccagaaaggagataagtcttcatggtcaaaagacgagagatggtgaggagtctgtaaggagcaatgagagttagtttagaacagaaagaaaaggtagaaaatgcttaggtgccaggtgcttaagtcttttcttgggtgagtttgatatcttggcaaaccagagaaaataataatttttgaacttt

SEQ ID NO: 229530 - DNA, 602 bp, Homo sapiens
aggtggggagacatgttgcgtgtaaaaatatggctaaagaagctttgctgtttctttgaatcccttgatacttcttttatgcatrtacttacaagttgttggaaaggaaaatataatattttatcttccaaattaaagagtgtattttgctgctattaagataccatgggctttgctttattggatcattaatttgactttggtcaaagggacttattcagtaagcatgtatctcgcaacacacaagacgtgtatattaatgaaagactagaacatacccaggagtctcttattgccatattaaaacatttataaatgggactttaatttaaagtgctgctaaaatgaaaatgaagtgttgtattgattctcatgccagatgctctttagaaaatgcagtgtgtgtgtgttattcccacttcaaattataacatcaaatctgacctggacatacttaaagataattctctgaagacaagatgtagcatataaggcaattaaactaagtcatttagatttctaggatggcttttgtacactaggtggcagaggcttctaagaatatctctcttatataaagtaccagagttttgtttggcttt

SEQ ID NO: 229531 - DNA, 602 bp, Homo sapiens
aggtggggagacatgttgcgtgtaaaaatatggctaaagaagctttgctgtttctttgaatcccttgatacttcttttatgcatgtacttacaagttgttggaaaggaaaatataatattttatcttccaaattaaagagtgtattttgctgctattaagataccatgggctttgctttattggatcattaatttgactttggtcaaagggacttattcagtaagcatgtatctcrcaacacacaagacgtgtatattaatgaaagactagaacatacccaggagtctcttattgccatattaaaacatttataaatgggactttaatttaaagtgctgctaaaatgaaaatgaagtgttgtattgattctcatgccagatgctctttagaaaatgcagtgtgtgtgtgttattcccacttcaaattataacatcaaatctgacctggacatacttaaagataattctctgaagacaagatgtagcatataaggcaattaaactaagtcatttagatttctaggatggcttttgtacactaggtggcagaggcttctaagaatatctctcttatataaagtaccagagttttgtttggcttt

SEQ ID NO: 229532 - DNA, 593 bp, Homo sapiens
gtgatgcctcacattcttacaacacctctttatttttgaaagacttttcacatgcatttttaaatttgatccttaaaataacactgtactgtgttagcacaatttacaggacaggaaataaatttcagataaggtcagtaacttctyccagattaagtaataaagtgctcctgtgttttccctttctatttgagcacaaaaacattcaatagaattttcactaaagaggagctgtgagtatattagtgagagtgggaagtggaagagtgtcatctagtttttaaaaggtggcagatcaacaatatttagcgagaaatggggaggaggacaagccaaaacaaatgaactcattcatttaaaaacattatcagcatctccctgaaaattatcaacatctcatatactatatcaatatattttgggaaccattttatgggaatattcttaatagagttttaatgcatttaatgcatgctctttttttcagttgtccaaagagaagtgtgccttttgcaatagatcaatatttctctaagcctgcttcccacaccaactaatatcagattcactaaagtttattaagaataggcttc

SEQ ID NO: 229533 - DNA, 635 bp, Homo sapiens
actaactcatgctacaaaagaggaaatacaacatattacttcttgtctactcctgcccatgagactttgcaatgtaataatgattctttgaaacctcgctgatttctgtagtctccagacctaaattctccaaagtgataccttcaaactactgcttaggacacggcttgtcattggaggacactgaggtattccccagtccctgccactcacatagaagcatttatgggaataggactaagctaaaaatttcatgaggcaataaactatttctgagccagtgctagcattgtttcacatctctgtattycaggacttagttttgcagctcttgcctaacacagagaaagccctcaatatctttgtgttagaagaataatcagaaaatatagataaataattgaaagcaatgcctgaattatataatcaaagcagattgtcaacaatacatactgtataacttgaaggacattgtctaaaatttatttttaaggtagaaaaggattatcatctttactatatttccaaaaagcatgattaagccctcatcaatttctgtacctgtgaatgtgctttggcattatacttacacaacatcagatattttatactctggataattagtggacagtttt

SEQ ID NO: 229534 - DNA, 541 bp, Homo sapiens
tctgctgggttaatttttaattgatgagttgtaagagtgtctaattgtattaattagtgcctgaatataaacattaacttagaccatgtcatatattgacagtaatgtcttattcctgattttaaagcaaatgtatccagtaattccactgtgcccttggaattatataataagcctatagttttttccagttttctatttctattatgtttcatcttcaatttttatatttatttctatgatgttttaatcttaatttattgttacatgtatattgttgctatttggcacattcctaactactcgatattcactatggattgcattctttattgttacaaagtatatatttcatttcttgtttttcattttcttttttgtttttgccctttattcatcctgtaggaacatcttcttcaactctcagttcccacatttgcagcatattacatctgctcaattatcccatgatttaatgatttctcccctacttggggagcagttaaatkaattcaagtttctaacacttcccaacaaaaaa

SEQ ID NO: 229535 - DNA, 601 bp, Homo sapiens
ataatgtcaaatattccagcaactgtaatacatgcatttgagaatttsggttaagaatttgcaataccacaaattcatttagcaggtgaggaaacaggctaagagagataaaagggcctgcatactttcactacatttcaatgctatgtgctgctagctgatactgtagcttttgtgtgaaacagaaacacgcatgtgcacatctgtcccagaggcaaggatttgaagagcaaagccccagctggatgtggctcccattccctactttgcgcagtgctcaaacaacaccactgtatgtggtgacatgaattcaaaggtggcagaatctggattcagacataggttcatgcagaaaaggaaaaggaagacaggatccaaccaggagacctcatacatatttgttcttatctaatattgaaataccagatatttctattcttgacaacagaaatatgtggcagccattatagctcattcaataaagacatgaaatattaacaacaaaaactgaccaaagcaatattatgaaagagaaaatagaacaaagaagaaaatacatccatggtactgagttccacagtctttgctgcagcacacaaca

SEQ ID NO: 229536 - DNA, 601 bp, Homo sapiens
ataatgtcaaatattccagcaactgtaatacatgcatttgagaatttgggttaagaatttgcaataccacaaattcatttagcaggtgaggaaacaggctaagagagataaaagggcctgcatactttcactacatttcaatgctatgtgctgctagctgatactgtagcttttgtgtgaaacagaaacacgcatgtgcacatctgtcccagaggcaaggatttgaagagcaaagccccagctgratgtggctcccattccctactttgcgcagtgctcaaacaacaccactgtatgtggtgacatgaattcaaaggtggcagaatctggattcagacataggttcatgcagaaaaggaaaaggaagacaggatccaaccaggagacctcatacatatttgttcttatctaatattgaaataccagatatttctattcttgacaacagaaatatgtggcagccattatagctcattcaataaagacatgaaatattaacaacaaaaactgaccaaagcaatattatgaaagagaaaatagaacaaagaagaaaatacatccatggtactgagttccacagtctttgctgcagcacacaaca

SEQ ID NO: 229537 - DNA, 601 bp, Homo sapiens
ataatgtcaaatattccagcaactgtaatacatgcatttgagaatttgggttaagaatttgcaataccacaaattcatttagcaggtgaggaaacaggctaagagagataaaagggcctgcatactttcactacatttcaatgctatgtgctgctagctgatactgtagcttttgtgtgaaacagaaacacgcatgtgcacatctgtcccagaggcaaggatttgaagagcaaagccccagctggatgtggctcccattccctactttgcgcagtgctcaaacaacaccactgtaygtggtgacatgaattcaaaggtggcagaatctggattcagacataggttcatgcagaaaaggaaaaggaagacaggatccaaccaggagacctcatacatatttgttcttatctaatattgaaataccagatatttctattcttgacaacagaaatatgtggcagccattatagctcattcaataaagacatgaaatattaacaacaaaaactgaccaaagcaatattatgaaagagaaaatagaacaaagaagaaaatacatccatggtactgagttccacagtctttgctgcagcacacaaca

SEQ ID NO: 229538 - DNA, 601 bp, Homo sapiens
ataatgtcaaatattccagcaactgtaatacatgcatttgagaatttgggttaagaatttgcaataccacaaattcatttagcaggtgaggaaacaggctaagagagataaaagggcctgcatactttcactacatttcaatgctatgtgctgctagctgatactgtagcttttgtgtgaaacagaaacacgcatgtgcacatctgtcccagaggcaaggatttgaagagcaaagccccagctggatgtggctcccattccctactttgcgcagtgctcaaacaacaccactgtatgtggtgacatgaattcaaaggtggcagaatctggattcagacataggttcatgcagaaaaggaaaaggaagacaggatccaaccaggagacctcatacatatttgttcttatctaatattgaaataccagatatttctattcttgacaacagaaatatgtggcagccattatagctcattcaataaagacatgmaatattaacaacaaaaactgaccaaagcaatattatgaaagagaaaatagaacaaagaagaaaatacatccatggtactgagttccacagtctttgctgcagcacacaaca

SEQ ID NO: 229539 - DNA, 641 bp, Homo sapiens
tccctaagtagttatctcatggtttgggtctataacaaatatagtcaccccttggtatccatggggaattgtgtccaggacctctctcaggtaccagaactcaaggatgctcaagtcccagctataaaatggggtagtatttgcgtataaccgatgcacatcctcctgtttactttaaatcatctctagactaaatatagtacctaatacaatgtaaatgctgtgtaaatagttgttatactgttttttaaaacttggtgttgttttttatttttatatatttttttcttcaaatatttttgattcgtggttggtcgaatccttgaacacagttgaatccttgatctggaactggtggatccagagggccaactgtaatacaggagatgtttgcaaggacatgcacattttatcagcttggctccaagtcctgacattcctaactacggttaaagcttagggaaatattaatcattctcaggtcaatatacacattttggtcttttctaaaaatgctctatgaatgcggcaataattgcrtggtatatcatcttctgagctgagacaggtcttccgtatctctctttaatgacgtattggcttggtaatcagttgtctcttgttaagcgtgtgtaatcatt

SEQ ID NO: 229540 - DNA, 632 bp, Homo sapiens
ccaacattttccccttcagaaaatcattgaagtattcgtgttaaaagttctactaaagtcaataattagcatgtctctatatcagtgattaatgccatcaaatcaaatgctagctttctcacatttttctcaaatatggtttcttaccaatgagagacggttagtataaaggtcccaaaagataatttataatcataaaatgtatttagataacatcttcccagatggacaagttgtagtctatagtgtggatataatttttaggaagtactttaaaacagagatatattagaaactatgagacatattaaatcagagacagattagaaactctgtgaacagaggtgaggaacatgtactgccataaaagaaaatggggtttatttaagccactaaaagtaaggatataaaatggacaatcctgatagttaaaaagtgtcatgttcatctattcaaaatgtagtatarttttatttgagattgtctttttttaagttttaagatgaaaaaaatttgtatcaaaagaattatttgaaaaatattcttcatctgagtaaaaagtcctgggtctctgggtagataataatttcatttcaggtgatttaacaagttgcaaattggagaatgggatg

SEQ ID NO: 229541 - DNA, 679 bp, Homo sapiens
ttatgtgttatctcactaaaaactggatttggaatgcatgaagtttatctgcatctatttccattttcgacattaacattccgttaatcttaatttaatgacaaaacacctaagactgaaaactttaactgcttccagcccacattccttttagagaaaatttattaaacccacaaatgattactgacacaaataaaggatttaactttaaataaaactggtagagataaaattgagtgatatcgatttaaaattaaatgtgaaaaatgtcaaaatcagtgaagattcatatgcaggtggctttttgtaatgagagaaaccgaacagtcacaaggcttttattagtttaaagataaagttgayttctaaaagcaatgattatgaataactgttataataacctctctggcatgacatgtacttatattttatgacccttttaatattttttatttttgatatatgaatgttttagcttaaaaattttgaaattcaactacaatgtgaggccacagatattctcaaatatagaaatgaaatagattttaaaagattaaatcatatcaaccatagaaaatcagatgattttacaatgtatatctgattgaagagaaattttcagagcgaatttgcattttgtgcattacaactctcaagtcacatattatgttattgcaat

SEQ ID NO: 229542 - DNA, 445 bp, Homo sapiens
gaattcaagaccagcctggccaccatgatgaaaccctgtctctactaaaaatacaaaaaaaaaaaaacaaattggccgggcatggtggcgggtgcctgtaatcccacctacttgggaggctgaggcaggagaatctctcgaactccggaggcagaggttgcagcgagccaagattgtgccactgcactccagcctagacaacagagcgagactctgtctcaaaaaaaaaaaaattaaaattaaaaaataaaaatttcatttaaaatactactgatctcccgtgctgacttctcggggtttaactctcactgaggagacgctgctttcataagggtaagctcagcaggggcaactaaagtcatttaagcagagagctgcaaagargcaacagcctcactgcaggcaggggtcctcgtcacagcttcagggctttgcagaggattac

SEQ ID NO: 229543 - DNA, 564 bp, Homo sapiens
tgctcatgggtccctggcagagaatgcccactccccagcagactcagggcaggcccccaactgcaggcttccaggaaggcccagggtgtccacctcacgccaggtggtctcagaggacccctgtgcaaccacattaaggaaagctgcagcccccacccacccgcctgccagttcaacaagcaccggctgcacacgcaggctcccaggcaccatcacccccctcccccgtcgcccctccctcatggggagccccttccccctggaaagacagcaggtactgtagcctcgcctgctggccaggggcgccggctcagaggacctgccctgacctgcacgtgctgaccagacagcccagcgtaaggacccgygatcccacgccaccgccctgggtttaccacggtcaccgccacctctctcacagggcccccgggggacccagccgcgcccggcctggtgtctgcaccgagggaccgcgtctcacgcccggcggctcctgcaggggaagccgtggtcagcgactcaccacgaggacagggcagggcggctgagtgcggaagagaagca

SEQ ID NO: 229544 - DNA, 585 bp, Homo sapiens
gcagagaatgcccactccccagcagactcagggcaggcccccaactgcaggcttccaggaaggcccagggtgtccacctcacgccaggtggtctcagaggacccctgtgcaaccacattaaggaaagctgcagcccccacccacccgcctgccagttcaacaagcaccggctgcacacgcaggctcccaggcaccatcacccccctcccccgtcgcccctccctcatggggagccccttccccctggaaagacagcaggtactgtagcctcgcctgctggccaggggcgccggctcagaggacctgccctgacctgcacgtgctgaccagacagcccagcgtaaggacccgtgatcccacgccaccgccctgggtttaccacggtcaccrccacctctctcacagggcccccgggggacccagccgcgcccggcctggtgtctgcaccgagggaccgcgtctcacgcccggcggctcctgcaggggaagccgtggtcagcgactcaccacgaggacagggcagggcggctgagtgcggaagagaagcatgaagctgggggcgggggtgggggaggaggaacaaaa

SEQ ID NO: 229545 - DNA, 555 bp, Homo sapiens
ctcagggcaggcccccaactgcaggcttccaggaaggcccagggtgtccacctcacgccaggtggtctcagaggacccctgtgcaaccacattaaggaaagctgcagcccccacccacccgcctgccagttcaacaagcaccggctgcacacgcaggctcccaggcaccatcacccccctcccccgtcgcccctccctcatggggagccccttccccctggaaagacagcaggtactgtagcctcgcctgctggccaggggcgccggctcagaggacctgccctgacctgcacgtgctgaccagacagcccagcgtaaggacccgtgatcccacgccaccgccctgggtttaccacggtcaccgccacctctctcacagggcccccgggggacccagccgcgcccggcctggtgtctgcaccgagggaccgcgtctmacgcccggcggctcctgcaggggaagccgtggtcagcgactcaccacgaggacagggcagggcggctgagtgcggaagagaagcatgaagctgggggcgggggtgggggaggaggaac

SEQ ID NO: 229546 - DNA, 600 bp, Homo sapiens
aagatacacatttcccatatgatcatagtacctttaaaatagttgatcccatatttggccacaaagaaattctttttcttttcttcccctggagatagggtctccctctgtcacccaagctggagtgcagtgtcacgatcatagctcactgtaacttcaaactcctggacccaagcaattctcccgcctcagcctcctgagtagctaggactataggtgcatggcaccatgtccagctaatttcaatttttaaattttttgtcgagatgaggtctcactrtgttacccaagctggtctcaaactcctaccctaaagtgattctgatccttccccaccccaccagcctcccaaagtgttgggattacaggtttgagccaccacacctggcctaagcaattcttgatacattaaaaaatagaagaggtataccacaggccatgatatggcttggatctgtgtccccacccaaatctcatgttgaattgtaatccccagtgttggcagtagggcctggtgggaggtggttggacatgggggcagtttctcacgaatggtttagcaccattcctctagtgctgttctgctgatagagttaccat

SEQ ID NO: 229547 - DNA, 619 bp, Homo sapiens
gggaatcacttgaacccaggaggcacaggctgcagtgtgccgagatggtgccactgcactccagcctgggtgatagagtaagactctgcctcaaaaaaaaaaaaaaaaaaaaaaaaaaaaaaaaaaaaaaaaagaattgcaacttttggagaaaagttcctgtgcatgggataagaaggttgaaaggaaaatcaatcaaatgctaacaattgttttagaattatgggatcakgggtaatcttttaaaatctattttacaaattttcttttactgtggccctattatgaaatataggtaaacaaataaaaacattcaaactcacttaaaacttatgacacatattgaacaagtctttaaactgttgtaaatagatagataattagatagacagatggagatcatgagaaggctgtgttcgtgaggatataggagaatatctccctgggaatcacttgcaatagggagaaagagtagggagactcacagcagggtaggaagtgctacaatagtagatggggctgatacagacaggagacagggaagtacttggtagaagagggcagttccctggcaaaggccccacccccatgcctggaaagccgcagccctaaatgggaa

SEQ ID NO: 229548 - DNA, 565 bp, Homo sapiens
ctcctggctcaaaggctccttaatctttagcacatcctatacaacttcattcttacctgaacactgataaaaccaaggtgctacactatttaaaaatcactgcttagaccagataatagtaaatacaaataatttccaaatatctctccaaagtcatttctcaaaataatctctactaatccctaatggaatcaaagtagtctgggactcccycccatccccggcctcctatcaaagacttacttctgagggagttgagagatcttcggttgtaaaataaaagataataataaatctaagatcctatctgattctccccgctttaattcctggcctttaaatgcaacatttgccacgagaaaaaaataaaagtaagttcagttcatctgtcatatttctgccttctccattaaaggcatctattttacatattgtcttgagacttggcactattcagagagatttaaatagaccttgtattagtttgctagggttgtcataacaaagaccacagactgagtgactcaaataacaaatttcttttctcacagttctggaggctaga

SEQ ID NO: 229549 - DNA, 565 bp, Homo sapiens
ctcctggctcaaaggctccttaatctttagcacatcctatacaacttcattcttacctgaacactgataaaaccaaggtgctacactatttaaaaatcactgcttagaccagataatagtaaatacaaataatttccaaatatctctccaaagtcatttctcaaaataatctctactaatccctaatggaatcaaagtagtctgggactcccccccatcccyggcctcctatcaaagacttacttctgagggagttgagagatcttcggttgtaaaataaaagataataataaatctaagatcctatctgattctccccgctttaattcctggcctttaaatgcaacatttgccacgagaaaaaaataaaagtaagttcagttcatctgtcatatttctgccttctccattaaaggcatctattttacatattgtcttgagacttggcactattcagagagatttaaatagaccttgtattagtttgctagggttgtcataacaaagaccacagactgagtgactcaaataacaaatttcttttctcacagttctggaggctaga

SEQ ID NO: 229550 - DNA, 565 bp, Homo sapiens
ctcctggctcaaaggctccttaatctttagcacatcctatacaacttcattcttacctgaacactgataaaaccaaggtgctacactatttaaaaatcactgcttagaccagataatagtaaatacaaataatttccaaatatctctccaaagtcatttctcaaaataatctctactaatccctaatggaatcaaagtagtctgggactcccccccatccccggcctcctatcaaagacttacttctgagggagttgagagatcttcggttgtaaaataaaagataataataaatctaagatcctatctgattctcccygctttaattcctggcctttaaatgcaacatttgccacgagaaaaaaataaaagtaagttcagttcatctgtcatatttctgccttctccattaaaggcatctattttacatattgtcttgagacttggcactattcagagagatttaaatagaccttgtattagtttgctagggttgtcataacaaagaccacagactgagtgactcaaataacaaatttcttttctcacagttctggaggctaga

SEQ ID NO: 229551 - DNA, 436 bp, Homo sapiens
atctctaaactgaaagacttcataaaaaatatggatttctgacttttctggacagatgagaactggcaaatgctgggacagtgcttgtgygtgacagtaaccagcccattaactgggatacatgctccagttgtgggcaacccccacctagcccacttccctcacttctgtcgcctgcctggctgctgacggtattgagtttagaggaacagacatcaaagatacaaaattcatctgagtttatctgaaatagtccagggtacaggtacctaaaaattgtcccaaatatctgacagtacataaaagtaaggtatcaggctaccagagtttgatgaaagtagccccactaaaaacatctcacgtcctttattctaattctgacccaccaaaaagccttctaagtcaatgacacaatgtctggagtgcctctgtatgt

SEQ ID NO: 229552 - DNA, 662 bp, Homo sapiens
tttgtttactcatctttcacatcacacaaggcatataaaatccatcagaagagttgttcatagagactacgggtcatatgctggctagagctactaataagcaaagataaattgagcctcttagcttatcgtgtttccatgcatttattcaaaactgatcttgtatarggggaatgttcagcaattgcattgctctgctgcagtcaatggtgtatttggctaccaattctgaacggtttggcttcggaggcctggaactcctcacccccaagagaaaaccggactgtgggaagctactttgaacattctatatacacatctaaatctaactcaacaattctaactcgataaaagtacacccttatggagaggacctgggcataagctatgccaaatataaaaatgaatatggctccccaaatttgtgggccaataaatctgccttttacagaaagatgaaatatctaagtaagaatttctgaaaaacctcaatgtgaaaaacttctacctggctttggagaaaagccaaacaacccagtagagaggtaagtggtttggtaaaagacaagccacatttgagtcaaaaagcctgagtctgagcctcagctttgctagttgtgtgatcttgggtatgtcacttaacctctttaagcttcaaaatt

SEQ ID NO: 229553 - DNA, 662 bp, Homo sapiens
tttgtttactcatctttcacatcacacaaggcatataaaatccatcagaagagttgttcatagagactacgggtcatatgctggctagagctactaataagcaaagataaattgagcctcttagcttatcgtgtttccatgcatttattcaaaactgatcttgtataaggggaatgttcagcaattgcattgctctgctgcagtcaatggtgtatttggctaccaattctgaacggtttggcttcggaggcctggaactcctcacccccaagagaaaaccggactgtgggaagctactttgaacattctatatacacatctaaatcyaactcaacaattctaactcgataaaagtacacccttatggagaggacctgggcataagctatgccaaatataaaaatgaatatggctccccaaatttgtgggccaataaatctgccttttacagaaagatgaaatatctaagtaagaatttctgaaaaacctcaatgtgaaaaacttctacctggctttggagaaaagccaaacaacccagtagagaggtaagtggtttggtaaaagacaagccacatttgagtcaaaaagcctgagtctgagcctcagctttgctagttgtgtgatcttgggtatgtcacttaacctctttaagcttcaaaatt

SEQ ID NO: 229554 - DNA, 662 bp, Homo sapiens
tttgtttactcatctttcacatcacacaaggcatataaaatccatcagaagagttgttcatagagactacgggtcatatgctggctagagctactaataagcaaagataaattgagcctcttagcttatcgtgtttccatgcatttattcaaaactgatcttgtataaggggaatgttcagcaattgcattgctctgctgcagtcaatggtgtatttggctaccaattctgaacggtttggcttcggaggcctggaactcctcacccccaagagaaaaccggactgtgggaagctactttgaacattctatatacacatctaaatctaactcaacaattctaactcgataaaagtacacccttatggagaggacctgggcataagctatgccaaatataaaaatgmatatggctccccaaatttgtgggccaataaatctgccttttacagaaagatgaaatatctaagtaagaatttctgaaaaacctcaatgtgaaaaacttctacctggctttggagaaaagccaaacaacccagtagagaggtaagtggtttggtaaaagacaagccacatttgagtcaaaaagcctgagtctgagcctcagctttgctagttgtgtgatcttgggtatgtcacttaacctctttaagcttcaaaatt

SEQ ID NO: 229555 - DNA, 626 bp, Homo sapiens
atatttttatttttaaactttttttaaagatagagtctgactgtgttgctcaggctggccgtgaactcctcccayctcagcctcccaaagagctgagattacaggcatgagccatcatgcctggcctagttcttagtttcaatggagaccaatttattaaggttttcttttggtgtgtgagtgtgtatcttgcttttgctgttgaatctaagaaatttcaaggctaccaagattttcttctctattttcttttataagttttatcgttttagctcttacatccaggactatgatctatttcaagttagtttttataagtgatgttagattttttttgtcactgtcagtttttactcattaatatttctctgcgttcttatcatgtgtgtacataaagagcttccttttgtttttccaggtacaacagcaggttcttttctgattccgcaaagtcctgcatggggtggaggcagagacagaagagaatgtaaacactgggttccaccccctggaaattaagggaagaccccttacccagatagggactgattggagaggtggaagggaacaaggtgaaaggtaggggtcctggtaagagaaagcaggggggcctgagaacacagagg

SEQ ID NO: 229556 - DNA, 626 bp, Homo sapiens
atatttttatttttaaactttttttaaagatagagtctgactgtgttgctcaggctggccgtgaactcctcccacctcagcctcccaaagagctgagattacaggcatgagccatcatgcctggcctagttcttagtttcaatggagaccaatttattaaggttttcttttggtgtgtgagtgtgtatcttgcttttgctgttgaatctaagaaatttcaaggctaccaagattttcttctctattttcttttataagttttatcgttttagctcttacatccaggactatgatctatttcaagttagtttttataagtgatgttagattttttttgtcactgtcagtttttactcattaatatttctctgcgwtcttatcatgtgtgtacataaagagcttccttttgtttttccaggtacaacagcaggttcttttctgattccgcaaagtcctgcatggggtggaggcagagacagaagagaatgtaaacactgggttccaccccctggaaattaagggaagaccccttacccagatagggactgattggagaggtggaagggaacaaggtgaaaggtaggggtcctggtaagagaaagcaggggggcctgagaacacagagg

SEQ ID NO: 229557 - DNA, 413 bp, Homo sapiens
tgtaaaattgattattaaaattaataacatatcagaaatgtctttaattggttggttcaaaaactgatttaaaattcttaaatgacctaaaaaagttggccaaaacaaaacaataaaactggactttaaaacacttagaaggagatgggctgttagaacaggtctttaggtaaaatggtcttagataaattgacctgaaggccagttggagagttctcaggacaaagcctgtctgaggcccaagctgaagatgcagaaggtgaytcagaccctgtctcctggatctctcagggcaatgagcaagccaacattctccctgggcaaacaaggagccctaggcagagagtttactggagaaagctggagaagtgggaagagaaggagcagcagtctgagggtaaaccagagtgcca

SEQ ID NO: 229558 - DNA, 594 bp, Homo sapiens
tatgtttctctgccgtagaaaggattaagctgtttcttgtccggattcttctctcattgacttctaasaagcctctactcttgagtctctttcattactggggatgtaaatgttccttacatttccacattaaaaatcctatgttaacataagctatgtgtacagcccttcaggagacacactcagcgatctttaaagcaagggacacaggtgaccagggcagagagtggggagcaggatgacatggaatggaaatggacatccatcacccaaattcctctattctcgaagctgttctttgatctctttcaattaagtgtaataacccaaggaaagctgcttctagtgagctctgaatctttttggtgatgacctcctacaagccaaactttgaaacctctgtttagagagaactggtgtttagcaaaagtatgctaaggggtgttgagatgaatcttctagacttggatctgaagataactagctgtatgacattggccaagcacctcttcccatactgacctcaatttccacacccacaaagtgggaaaatcagactagatgaaaatcatgatcatcctttgtcctagaatt

SEQ ID NO: 229559 - DNA, 570 bp, Homo sapiens
aagctgtttcttgtccggattcttctctcattgacttctaacaagcctctactcttgagtctctttcattactggggatgtaaatgttccttacatttccacattaaaaatcctatgttaacataagctatgtgtacagcccttcaggagacacactcagcgatctttaaagcaagggacacaggtgaccagggcagagagtggggagcaggatgacatggaatggaaatggacatccatcacccaaattcctctattctcgaagctgttctttgatctctttcaattaagtgtaataacccaaggaaagctgcttmtagtgagctctgaatctttttggtgatgacctcctacaagccaaactttgaaacctctgtttagagagaactggtgtttagcaaaagtatgctaaggggtgttgagatgaatcttctagacttggatctgaagataactagctgtatgacattggccaagcacctcttcccatactgacctcaatttccacacccacaaagtgggaaaatcagactagatgaaaatcatgatcatcctttgtcctagaattct

SEQ ID NO: 229560 - DNA, 430 bp, Homo sapiens
ctacgtggtcatcagttggttctctgggcttgatagtgtgcaggctaattctttctcccccagggcattttcatagcttccctggatagatagcytttttcacccatgctgcgaatctgtcacctactttgtcattcacaatgcactctcagtgtgaccactgatgactctctctttggcccctgtttcccggctggtccgttttcatacagactttccctactagggttctattgctccttcaagtgaccctcttgacaaattcttttaaggtcccgtgtccagcagatgaaaagcagtttcatttgactcctcaatggggatgcagtttccacactggtagtcctgactctgcggccataggctcagatgtgagtcaagcacctgtccagtgcatccccaagctgcaggggacacacatcaagttctc

SEQ ID NO: 229561 - DNA, 391 bp, Homo sapiens
agaatttgatgaataaaattaaaacacattagataagactaaaggtgcaaagtcaccttaaaagatacagcagaggttccaggctgaaagccagtccagacagtaacccaracaatgttattatcatatctaaggaaagagagagtccattgagaggaagaaggttagttggaaatattgaaaatgtggattttcagaaggaagttcttggcaaagcagcactcccaaggctaggaagaacctctggctcaagaaatctattttccattaactgaggttagcaaatccccatcctgaagacggatggatcagaccattagagttggctgccacaaaatattaagattatgcaaccaactccccttgcaatggtgctacacacataaagcaa

SEQ ID NO: 229562 - DNA, 579 bp, Homo sapiens
tgccaggacactgttctgaagtaggagaaggtaaaagccggaggtgggtgcaatagagagatctatcatctagctacctctactacccagggaagcactttcagtcccagcttctgttaaaagtagaaagctttatgcagagtaatttatctactgtatacaggtgggttaacagaggacctctgtaaracctcctaacaccaagtgtacaggaaaggccaaacatgaaaggagttcacttaatgtttacctcaaatccctgatgggatcctctatgttcttgtttgtatatcccaatctattttccataaacattctaccttatagaagcctgtcttatcatggactaataccgagttcactgaacctttctcctaggccatggtatgcaggagagcgcttgagcttcagaattaaacttgtctcttgctgtgctacttcctgctttggaggagaagagccaagtgagccagaagtttcagcagtttcttctgtacttgataattaatatggtatgtggggaaagaagaaagaacatggtttttttcttctaaaaaagggcttctttccctggggcct

SEQ ID NO: 229563 - DNA, 582 bp, Homo sapiens
aagcttcaaacgtgcctccatgtctaacaaaggtttacttcttactttcacctggaaaataacttagcctctcagtgtccatttcctctttatagaaacacctggccaatcccacaggttatcttccctttacctcaactttctacccctatccttccttttatccaaacagcaaggtcttactgaaaacgaaattgtacctgacaaacagcattttgtcaagtcaaaaaccacctgttctttcccaagcggcccaggctgtatactctgsgtctactgggtgcccagtgggaaatcaaatcagatagggcacagcaggtcagtgagtgtgtttattgggcatattctatcatgcctctgtggacaggttcacagtaggagagcccaagaggaaagaatcttcctctgaagtcacaatctggagtccaaatcagcactggaagttctatcccaatctcttccacccaagtatttctctagattgttagttggctatactaaaacccctgtgaatgttatacttcacaattcaccattacctggtgtaaagaataatgatagttgtgatgctaatcatagaga

SEQ ID NO: 229564 - DNA, 431 bp, Homo sapiens
taggacaggtagaagatgaagaagacttatgccagcagcagagactgcctgagcaaacctatggaagtgaggaggctcctcaagaagccaagaaaaaccttgggtcycctgaacccaattctcaggctggagcccagtgaggcaaatgaattgcccaaggacacctatgagtaaatgttggagacacttagaattcaagcctctgggatctgagcttggtgatatcctctgtcaggtccctgtccagtgagtggtttagtgaggcgaagagagagggagagaacatgcattgcaggctcttgcactctatgctcaaacaggctttcccatttgctactcgcagataccctagactggcatagttactgccattttatagataggttcaaaggtccccaaaataataggtgacttgcccaaggtcacacagc

SEQ ID NO: 229565 - DNA, 431 bp, Homo sapiens
taggacaggtagaagatgaagaagacttatgccagcagcagagactgcctgagcaaacctatggaagtgaggaggctcctcaagaagccaagaaaaaccttgggtcccctgaacccaattctcaggctggagcccagtgaggcaaatgaattgcccaaggacacctatgagtaaatgttggrgacacttagaattcaagcctctgggatctgagcttggtgatatcctctgtcaggtccctgtccagtgagtggtttagtgaggcgaagagagagggagagaacatgcattgcaggctcttgcactctatgctcaaacaggctttcccatttgctactcgcagataccctagactggcatagttactgccattttatagataggttcaaaggtccccaaaataataggtgacttgcccaaggtcacacagc

SEQ ID NO: 229566 - DNA, 431 bp, Homo sapiens
taggacaggtagaagatgaagaagacttatgccagcagcagagactgcctgagcaaacctatggaagtgaggaggctcctcaagaagccaagaaaaaccttgggtcccctgaacccaattctcaggctggagcccagtgaggcaaatgaattgcccaaggacacctatgagtaaatgttggagacacttagaattcaagcctctgggatctgagcttggtkatatcctctgtcaggtccctgtccagtgagtggtttagtgaggcgaagagagagggagagaacatgcattgcaggctcttgcactctatgctcaaacaggctttcccatttgctactcgcagataccctagactggcatagttactgccattttatagataggttcaaaggtccccaaaataataggtgacttgcccaaggtcacacagc

SEQ ID NO: 229567 - DNA, 492 bp, Homo sapiens
actctctttgtttctctatgctctttcttccaaaaggagcttaactgttcctcctgattaatttctaactgtacatatactgaatagaattaaaaacaggcaggcaagccatagaaaacatcaaatgagctacatcctaaaataactgtctttgtttcaaagacagagtatgggctgcctatgccaatctcatctgagttcataatagggagaaggacgcaatgaaatctgaactggccccggaggccatacagcattaccattgctggtggtgggtccatgggcccctctcatgacaatgagggtgacayactcactcagttttacttacaagagctctggagcttgatgacccttcagtgctgccccaaattggggccagatcaagcttttattcttccatatctaccattcactgaatgcaggctgacctgggaaaggagctgctaccttgggcaagggggccctctccagctagagacaaggcccaga

SEQ ID NO: 229568 - DNA, 482 bp, Homo sapiens
tggagacagatgggggtaactgttctctcttcaaagggctgtgactaaaaggctctcactctttgtgctggcagcctctccaaacccagaataaacagggaggttaccaaaggtatctgaaaccgtattaacattggtatgttcccaactttgatatgttcccaactatgcacagtgtattttttaaaagggactcttggatgaatttctagcttctccaaaaaaatgaaaacaactgaactttacattaagttatgtaagtctcagagactgtgctaaattcttcaaatacattattttatttaatcctcaaaacaaccatctgaggtgaatattatttccatctccatttaatgggtgaagatattaggcactaagcagtaaattaattttyctaagactagaatgtgtacaaagctataatttgaaccaaagtagtctgattttccagaactttgctcttcctctttgcctaagaattc

SEQ ID NO: 229569 - DNA, 410 bp, Homo sapiens
actctcaaaataagtttagagaaaagaccaaatcaggatgtgagtcaccaagcatataatcttgaccactcataagacaaaatatactatattttgaccaatttcagaacattttcagcaggatttgaaaaaygactcttctaacttctggccccttcaggaagtagttatcacataaaatatgtaaaatcaggactatctgtgagaatttgccaaatatcttatatagtgagtatatgaaaatacatttccttcattctctaaacattcttccttccaattcagagaaaattcctttttataacctttgggaacaaaataataagacccaggctgaggctgacatcacttcacaggaaattattcttattactcattcattatattttaattctttgaaaactgactca

SEQ ID NO: 229570 - DNA, 506 bp, Homo sapiens
ggctaaccttggggaaaatatctatactaatcatcacaaaaacatgaatttttaaaaggcaatgattcctgttattcttatgtcttcttgacagaagcacaaccctcttgaacttttctttcctagtgcatatatgtattcttcagagctttcaagctggaaccacacraaaagcttagcaaatggttttaaaataccattattgaacaagtactttgtggcaagaactatgctaaatattaggcatgaatctaacccttccttcaaactgcttagtgtccctcagaggataagcctgtaacatagcaaagcacacaaaagaaggaatgggtgcagcttctgcctaggctggccagagcagcttaacaaggaagtggtacctggccagggtgtggagggtgtaaacagtacctgacaaaatagattggtgggtgatgagaccctgatgaggaagcatgttacaggtagagggaataacatggagaaagacttaggtatagtatgtg

SEQ ID NO: 229571 - DNA, 384 bp, Homo sapiens
ttctttcctagtgcatatatgtattcttcagagctttcaagctggaaccacacgaaaagcttagcaaatggttttaaaataccattattgaacaagtactttgtggcaagaactatgctaaatattaggcatgaatctaacccttccttcaaactgcttagtgtccctcagaggataagcctgtaacatagcaaagcacacaaaagaaggaatgggtgcagcttctgcctaggctggccagagcagcttaacaaggaagtggtacctggccagggtgtggagggtgtaaayagtacctgacaaaatagattggtgggtgatgagaccctgatgaggaagcatgttacaggtagagggaataacatggagaaagacttaggtata

SEQ ID NO: 229572 - DNA, 590 bp, Homo sapiens
taatagactctaagtctaatgaatctgagagtaagttaaatatctgttcactccccagcttcactgaaatgactctcatctattcttttccttctagctattcttctaatgcattgcctaattgcctaagatataaagaagcattttgcctaaatgaagcagcatcagtaaaacaaatgatgctagactttgactatgatagtcattctagtgcttaatcattcatccrgagaaaattatctctaaagggccctgttccctctcctatctgtctctaaaaacacccacctacatattctggaaacattttattttatttgaattttagtgaaaatagacttatgtatgagaagtttaccaagtttaaagtcatgtggcagatttcttttttaagtattaaaatgctacctgggcttcattccctaaattcttctctcaacaatatttgaaaaatagttgtgcatgagtaatagaattagtatcacctgctttgtttaatgtaacactatttttaaaatatttcagcattctaaacataaaaaaacggaacattgcaaatcgtgtttaactacagaaggttcttaaacttt

SEQ ID NO: 229573 - DNA, 457 bp, Homo sapiens
atgggtgtttagaaaatctttattataatggagtggatgttaccgaattagccaagaaacacaaaccacagatcctcatgatggtaaggaagcctaatgggaaggaaagaaaaaaggacattttattttttgcatttaaaaattattcatgtgaagtctccatttcatctaatattttaagaatcagttcttactttaacagctgcccatgtaatatagtaatttagttttatttatttatttatttttaagacagagtctcyctcttgtctcccaggttggagtgcagcggcgcaatctcagctcactgcagcttacgcctcccaggttcaagcaattctcctgcctcagcctcctgagtagctgggattacaggcgcccgccaccatgcccagctaatttttgtacttttagtagagacggggtttcgccatgttggccagggctagtctcgaat

SEQ ID NO: 229574 - DNA, 457 bp, Homo sapiens
atgggtgtttagaaaatctttattataatggagtggatgttaccgaattagccaagaaacacaaaccacagatcctcatgatggtaaggaagcctaatgggaaggaaagaaaaaaggacattttattttttgcatttaaaaattattcatgtgaagtctccatttcatctaatattttaagaatcagttcttactttaacagctgcccatgtaatatagtaatttagttttatttatttatttatttttaagacagagtctccctcttgtctcccaggttggagtgcagcggcgcaatctcagctyactgcagcttacgcctcccaggttcaagcaattctcctgcctcagcctcctgagtagctgggattacaggcgcccgccaccatgcccagctaatttttgtacttttagtagagacggggtttcgccatgttggccagggctagtctcgaat

SEQ ID NO: 229575 - DNA, 570 bp, Homo sapiens
gtggtcctactaaggaacatggttggtgaaggggaggtggaagaagacttggaagttgaaaccagagaagaatgtgtgatgacatatttttcagttgatatggtttcctatgagacatagcatcattaaggataaaataagtgaaactgaaaagagtatagttaatctagttttcataatgagttcattctgttatgtttctttttcttttccattgtcaatttatattggctcagagaaaacaggcttgatggataaagtccatggtatttcccaattttgccatgaaaaatatggcaaagttrgaaaacgtgtgatatgtgaaattcttggtgtccctgatgatgaagcagtacagacctttttagaatttgagagttgagtcagcaattaaagctgttgttcacttgaatagaaggtattttggtggacaggtggcaagaggatgtttttacatttgtacaaattcagcatcttggatttggtggaacaagtttgattttaagaactagagcatgagtcatctctggtgacccttaaatgaccagcaggctgagaaaagaaggaaaa

SEQ ID NO: 229576 - DNA, 570 bp, Homo sapiens
gtggtcctactaaggaacatggttggtgaaggggaggtggaagaagacttggaagttgaaaccagagaagaatgtgtgatgacatatttttcagttgatatggtttcctatgagacatagcatcattaaggataaaataagtgaaactgaaaagagtatagttaatctagttttcataatgagttcattctgttatgtttctttttcttttccattgtcaatttatattggctcagagaaaacaggcttgatggataaagtccatggtatttcccaattttgccatgaaaaatatggcaaagttggaaaaygtgtgatatgtgaaattcttggtgtccctgatgatgaagcagtacagacctttttagaatttgagagttgagtcagcaattaaagctgttgttcacttgaatagaaggtattttggtggacaggtggcaagaggatgtttttacatttgtacaaattcagcatcttggatttggtggaacaagtttgattttaagaactagagcatgagtcatctctggtgacccttaaatgaccagcaggctgagaaaagaaggaaaa

SEQ ID NO: 229577 - DNA, 542 bp, Homo sapiens
aggcaaatgattattgtccatagacatgcaaatgaattttgtctggcaggaatacaattgaacttcttcctggttcctctaccccatcccatggaataagccagttttacattatacacaaaatcattgcagcagtaacatcttactgattcyctcataaactaatgagttaaacaaaatctttgacatgttctttttataactgcaaaaagtgccctctttaagaatatcttttgacaaataaaagcagatctttgtataactgttttcatgtctatcatccacatttgttttatttttgttttctattaggttgtatttggcctttggccatagtttatgcacaagaaaatcagatacagtagaatctataaatatttcaatgagaagttactaaattaattgcccacaacatagatgttattttaaacacatttgatatgaagatgatctcttgttaacaactacaacattttaactgcagaggcaaaatatcacactcacaaagccatgagctaaagcaaaatcctgatgagatttaa

SEQ ID NO: 229578 - DNA, 542 bp, Homo sapiens
aggcaaatgattattgtccatagacatgcaaatgaattttgtctggcaggaatacaattgaacttcttcctggttcctctaccccatcccatggaataagccagttttacattatacacaaaatcattgcagcagtaacatcttactgattctctcataaactaatgagttaaacaaaatctttgacatgttctttttataactgcaaaaagtgccctctttaagaatatcttttgacaaataaaagcagatctttgtataactgttttcatgtctatcatccacatttgttttmtttttgttttctattaggttgtatttggcctttggccatagtttatgcacaagaaaatcagatacagtagaatctataaatatttcaatgagaagttactaaattaattgcccacaacatagatgttattttaaacacatttgatatgaagatgatctcttgttaacaactacaacattttaactgcagaggcaaaatatcacactcacaaagccatgagctaaagcaaaatcctgatgagatttaa

SEQ ID NO: 229579 - DNA, 542 bp, Homo sapiens
aggcaaatgattattgtccatagacatgcaaatgaattttgtctggcaggaatacaattgaacttcttcctggttcctctaccccatcccatggaataagccagttttacattatacacaaaatcattgcagcagtaacatcttactgattctctcataaactaatgagttaaacaaaatctttgacatgttctttttataactgcaaaaagtgccctctttaagaatatcttttgacaaataaaagcagatctttgtataactgttttcatgtctatcatccacatttgttttatttttgttttctattaggttgtatttggcctttggccatagtttatgcacaagaaaatcagatacagtagaatctrtaaatatttcaatgagaagttactaaattaattgcccacaacatagatgttattttaaacacatttgatatgaagatgatctcttgttaacaactacaacattttaactgcagaggcaaaatatcacactcacaaagccatgagctaaagcaaaatcctgatgagatttaa

SEQ ID NO: 229580 - DNA, 542 bp, Homo sapiens
aggcaaatgattattgtccatagacatgcaaatgaattttgtctggcaggaatacaattgaacttcttcctggttcctctaccccatcccatggaataagccagttttacattatacacaaaatcattgcagcagtaacatcttactgattctctcataaactaatgagttaaacaaaatctttgacatgttctttttataactgcaaaaagtgccctctttaagaatatcttttgacaaataaaagcagatctttgtataactgttttcatgtctatcatccacatttgttttatttttgttttctattaggttgtatttggcctttggccatagtttatgcacaagaaaatcagatacagtagaatctataaatatttcaatgagaagttactaaattaattgcccacaacatagatgttattttaaacacatttgatatgaagatgatctcttgttaacaactacaacattttaactgcagaggcaaaatatcayactcacaaagccatgagctaaagcaaaatcctgatgagatttaa

SEQ ID NO: 229581 - DNA, 588 bp, Homo sapiens
tgggttgtatctgcctggctatataaatggatgaaatttctttatctttgcaatcacattagcgattgcctgaaatgtacatcacagtctggcttaatacttattccataataagattatttcatttctaccttgtgaaactgattcactatgttggtgggccattttatctttacttatttccctaacactggttctctcatcaatgagttaaagaaaatctctgacatgtgttcattctgtatctgtgtgtaggtcacgattttaacctttcttggaaaaaatcttattcgtgaggaaatggaaactaggtttgcatttctaaaagataaaaaatatacgtcccctctgaatatctgttttatctcccctgaaacacctgtgtgaggtggacayagattctaacacccaggacttgcctgattgttccagaagtactgagataaggccccgccctctgaatttcttcacgggtcttgaaatcgtgcttttataccacaacatttaatagcagtatagtcacgtgtgcctcttacagccaaaaggaatctttttttgagtatgattaccccctggtctcaagcagaa

SEQ ID NO: 229582 - DNA, 605 bp, Homo sapiens
ttaccaggggacagaagatgggaaaaatggggagatgttggctaaagggtacaaagtttctgttatacaggataaataatttctggagattttatttacagcatggtgactatagttaatactgtattatatacttggaatctgctgaaagcagttctcagatgttctcaccacacacacacacacacacgcacaccacacacacaaatggtgactatttgaggtgatgcatatgttcattagcttggtagtggtatcatttcacaatgtatatgtgtatcaaaacatcagattgtataccttttttgatgtttgttttgttttgaaacagagtctcacttttgttgcccaggctggagtgcagtggtgagatcttggctcactgcaacctccccctcctgggttcaagcarttctgcctcagcctcctgagtagctgggattacagacacccaccaccacgaccagctaatttttgtatttttagtagagacgcggtttcaccatgctgtttgtttggtctcgaactcctgacctggggtgattcgccagctttggccccccaaagtgctgggattacaggcgtgagccaccgcgccaggcctg

SEQ ID NO: 229583 - DNA, 372 bp, Homo sapiens
gtgtgcctgggcgcatacaagacrctggatatgtgttaaaagaatgaatgaatgaatgaatgaatgaatgaatgactcaaatattatctcaaacttcactgggtactttgagtttttacaataaagttctcattcactcttcccagtcacggtaggcagttcctctcctcagtggatggctgccattaactagaaaatgggcaggtgctatcaatcaatctgggtacaatttaatttaggttaaccgggattacctactacatgatttttgaaggttcattgcaaataatgcagttatccaaggcaaaacactaaatatttctaggcccatttgattccttaaaatttttgcctctcggtaactaatgttca

SEQ ID NO: 229584 - DNA, 372 bp, Homo sapiens
gtgtgcctgggcgcatacaagacactggatatgtgttaaaagaatgaatgaatgaatgaatgaatgaatgaatgactcaaatattatctcaaacttcactgggtactttgagtttttacaataaagttctcattcactcttcccagtcayggtaggcagttcctctcctcagtggatggctgccattaactagaaaatgggcaggtgctatcaatcaatctgggtacaatttaatttaggttaaccgggattacctactacatgatttttgaaggttcattgcaaataatgcagttatccaaggcaaaacactaaatatttctaggcccatttgattccttaaaatttttgcctctcggtaactaatgttca

SEQ ID NO: 229585 - DNA, 372 bp, Homo sapiens
gtgtgcctgggcgcatacaagacactggatatgtgttaaaagaatgaatgaatgaatgaatgaatgaatgaatgactcaaatattatctcaaacttcactgggtactttgagtttttacaataaagttctcattcactcttcccagtcacggtaggcagttcctctcctcagtggatggctgccattaactagaaaatgggcaggtgctatcaatcaatctgggtacaatttaatttaggttaaccrggattacctactacatgatttttgaaggttcattgcaaataatgcagttatccaaggcaaaacactaaatatttctaggcccatttgattccttaaaatttttgcctctcggtaactaatgttca

SEQ ID NO: 229586 - DNA, 336 bp, Homo sapiens
ttgacctggtgctggggcgaacctggaagctgaactggtgctggggtgagcctggaagctaagtctatgaaaatgagccacatattgagaccacagggatcagtctggcattaggcacactggtattagggcacactggtacctgattccatgggaacaggtctggtgcctgagaccatgaaggtggrtctgtagcctggaacaatgggaccggctttgtgccaagattcactggtaggagtctggtgccaaaatccatgtgagagtcaggcactcacttcactttcctttccctatgcaaaaggtatctctctctctactgtgatgtgcaaactt

SEQ ID NO: 229587 - DNA, 336 bp, Homo sapiens
ttgacctggtgctggggcgaacctggaagctgaactggtgctggggtgagcctggaagctaagtctatgaaaatgagccacatattgagaccacagggatcagtctggcattaggcacactggtattagggcacactggtacctgattccatgggaacaggtctggtgcctgagaccatgaaggtgggtctgtagcctggaacaatgggaccggctttgtgccaagattcactggtaggagtctggtgccaaaatccatgtgagagtcaggcactcacttcactttcctttcccyatgcaaaaggtatctctctctctactgtgatgtgcaaactt

SEQ ID NO: 229588 - DNA, 579 bp, Homo sapiens
aactgataatttactatgcatgaatcaattgactaatgtgtcartgaaggacagatagcaagcaaacacctgcctactataatttattactcaatataaatgaaacttatcacattctctttttctgattaccagaaaaaaaatccttttagttcattttggaagaaaattgaaacctacattaaaagcattacaatttttggtaaaatatacccttgagcaaatatatatgaaaaatgttaattgtaagttggctgtcattcctacctaacatgtagtttatctcaacacaaagctgagcagccaagcacaaagataatgctaatttttttatagccattaatagttaatgctagaaaagctgtcatattttgttttaaaatattccctagaatgtagtatttcatatctatgacatttcataggaatacaaaaatgcatacctctcaacatttataacaacaacaaaatccttcagtgtgatattttggcaaaaataagggagaaagttccaaattttgaataaattaatctttagtactttttcttatagttgaaaaatgagacagaaaaattctt

SEQ ID NO: 229589 - DNA, 579 bp, Homo sapiens
aactgataatttactatgcatgaatcaattgactaatgtgtcagtgaaggacagatagcaagcaaacacctgcctactataatttattactcaatataaatgaaacttatcacattctctttttctgattaccagaaaaaaaatccttttagttcattttggaagaaaattgaaacctacattaaaagcattayaatttttggtaaaatatacccttgagcaaatatatatgaaaaatgttaattgtaagttggctgtcattcctacctaacatgtagtttatctcaacacaaagctgagcagccaagcacaaagataatgctaatttttttatagccattaatagttaatgctagaaaagctgtcatattttgttttaaaatattccctagaatgtagtatttcatatctatgacatttcataggaatacaaaaatgcatacctctcaacatttataacaacaacaaaatccttcagtgtgatattttggcaaaaataagggagaaagttccaaattttgaataaattaatctttagtactttttcttatagttgaaaaatgagacagaaaaattctt

SEQ ID NO: 229590 - DNA, 588 bp, Homo sapiens
cctcatcaagcctgttaataaaaggttttttttagataaatattaaggggagaaattgttctacctgtaaccatagttgaccaagatacattttcttgtcaccattactaaaatagttatagtggacatatctatttggatatgtgctggcatcttactyccaacatatgtaaatcttaactgaaaataaaggactgatttttaaagaatgaggcttgtagtgtgaagctaaatgggctctctaaaacaaaaggaatgaaacccctgatttgtagcatttgctgatttctattgtgtaaattctctcaccatggcttttattacaaaggatatgtctaatacctggctggtaaaattctcagatagcttctcgggaacaccttctatgaccagtcagggtaaagctgaatttcttctacccatgggttactctcttacctgtggacctgccttttcttctcaattgacctataacacatttatgtttttgtttgaaatagtctccctatattggaatagagccccttgggagcaatgacttcagctcacgcctatgttccctttaccaagaaggtctcaactcacaaa

SEQ ID NO: 229591 - DNA, 588 bp, Homo sapiens
cctcatcaagcctgttaataaaaggttttttttagataaatattaaggggagaaattgttctacctgtaaccatagttgaccaagatacattttcttgtcaccattactaaaatagttatagtggacatatctatttggatatgtgctggcatcttacttccaacatatgtaaatcttaactgaaaataaaggactgatttttaaagaatgagrcttgtagtgtgaagctaaatgggctctctaaaacaaaaggaatgaaacccctgatttgtagcatttgctgatttctattgtgtaaattctctcaccatggcttttattacaaaggatatgtctaatacctggctggtaaaattctcagatagcttctcgggaacaccttctatgaccagtcagggtaaagctgaatttcttctacccatgggttactctcttacctgtggacctgccttttcttctcaattgacctataacacatttatgtttttgtttgaaatagtctccctatattggaatagagccccttgggagcaatgacttcagctcacgcctatgttccctttaccaagaaggtctcaactcacaaa

SEQ ID NO: 229592 - DNA, 588 bp, Homo sapiens
cctcatcaagcctgttaataaaaggttttttttagataaatattaaggggagaaattgttctacctgtaaccatagttgaccaagatacattttcttgtcaccattactaaaatagttatagtggacatatctatttggatatgtgctggcatcttacttccaacatatgtaaatcttaactgaaaataaaggactgatttttaaagaatgaggcttgtagtgtgaagctaaatgggctctctaaaacaaaaggaatgaaacccctgatttgtagcatttgctgatttctattgtgtaaattctctcaccatggcttttattacaaaggatatgtctaatacctggctggtaaaattctcagatagcttctcgggaacaccttctatgaccagtcagggtaaagctgaatttcttctacccatgggttactctcttacctgtggacctgccttttcttctcaattgacctataacacatttatgtttttgtttgaaatagtctccctatattggaatagagcccyttgggagcaatgacttcagctcacgcctatgttccctttaccaagaaggtctcaactcacaaa

SEQ ID NO: 229593 - DNA, 554 bp, Homo sapiens
aaggctttgagagcagacagagggaagacacagatgttgggctgaagggggaggaaggcgggaaccctgcaaggggcaaccgtgcaccaggactcattccaggtccccaaaatctcctggaggagaggtgagttgaacaggcaaggggcaacctcctcttgtcgcaggcccctgaawtcctgacaggaggagaccctacaaccaccagggacacttgagttgtcaggaagacctgcttataaagtgttaatggtagaattccagactgtgcaaagcccagaaggttttgtgtgggagcatctgtagtggagaatggtcagggacacccattgccctaggctaaacttgttctcataggagacttcagccctaggggaactgtcagacctgaactctgcagggcattcttgcccctgagacagggccagtctgacctgagcatccttcagtctgctcgcccctcctggggccccagcctggccacacctgcttgcagtgcagcttcacagcggggtgcagtggaggctacctcctgaggacctgcatcatagttc

SEQ ID NO: 229594 - DNA, 557 bp, Homo sapiens
gggaaggctttgagagcagacagagggaagacacagatgttgggctgaagggggaggaaggcgggaaccctgcaaggggcaaccgtgcaccaggactcattccaggtccccaaaatctcctggaggagaggtgagttgaacaggcaaggggcaacctcctcttgtcgcaggcccctgaattcctgamaggaggagaccctacaaccaccagggacacttgagttgtcaggaagacctgcttataaagtgttaatggtagaattccagactgtgcaaagcccagaaggttttgtgtgggagcatctgtagtggagaatggtcagggacacccattgccctaggctaaacttgttctcataggagacttcagccctaggggaactgtcagacctgaactctgcagggcattcttgcccctgagacagggccagtctgacctgagcatccttcagtctgctcgcccctcctggggccccagcctggccacacctgcttgcagtgcagcttcacagcggggtgcagtggaggctacctcctgaggacctgcatcatagttc

SEQ ID NO: 229595 - DNA, 399 bp, Homo sapiens
gaggtgagttgaacaggcaaggggcaacctcctcttgtcgcaggcccctgaattcctgacaggaggagaccctacaaccaccagggacacttgagttgtcaggaaracctgcttataaagtgttaatggtagaattccagactgtgcaaagcccagaaggttttgtgtgggagcatctgtagtggagaatggtcagggacacccattgccctaggctaaacttgttctcataggagacttcagccctaggggaactgtcagacctgaactctgcagggcattcttgcccctgagacagggccagtctgacctgagcatccttcagtctgctcgcccctcctggggccccagcctggccacacctgcttgcagtgcagcttcacagcggggtgcagtgga

SEQ ID NO: 229596 - DNA, 531 bp, Homo sapiens
gaagacacagatgttgggctgaagggggaggaaggcgggaaccctgcaaggggcaaccgtgcaccaggactcattccaggtccccaaaatctcctggaggagaggtgagttgaacaggcaaggggcaacctcctcttgtcgcaggcccctgaattcctgacaggaggagaccctacaaccaccagggacacttgagttgtcaggaagacctgcttataaagtgttaatggtagaaytccagactgtgcaaagcccagaaggttttgtgtgggagcatctgtagtggagaatggtcagggacacccattgccctaggctaaacttgttctcataggagacttcagccctaggggaactgtcagacctgaactctgcagggcattcttgcccctgagacagggccagtctgacctgagcatccttcagtctgctcgcccctcctggggccccagcctggccacacctgcttgcagtgcagcttcacagcggggtgcagtggaggctacctcctgaggacctgcatcatagttc

SEQ ID NO: 229597 - DNA, 579 bp, Homo sapiens
ttgagagcagacagagggaagacacagatgttgggctgaagggggaggaaggcgggaaccctgcaaggggcaaccgtgcaccaggactcattccaggtccccaaaatctcctggaggagaggtgagttgaacaggcaaggggcaacctcctcttgtcgcaggcccctgaattcctgacaggaggagaccctacaaccaccagggacacttgagttgtcaggaagacctgcttataaagtgttaatggtagaattccagactgtgcaaagcccagaaggttttgtgtgggagcatctgtagtggagaatggtcagggacacccattgccctaggctaracttgttctcataggagacttcagccctaggggaactgtcagacctgaactctgcagggcattcttgcccctgagacagggccagtctgacctgagcatccttcagtctgctcgcccctcctggggccccagcctggccacacctgcttgcagtgcagcttcacagcggggtgcagtggaggctacctcctgaggacctgcatcatagttcctgtgctggctgactgtgcctgaccagcaga

SEQ ID NO: 229598 - DNA, 518 bp, Homo sapiens
aggggcaaccgtgcaccaggactcattccaggtccccaaaatctcctggaggagaggtgagttgaacaggcaaggggcaacctcctcttgtcgcaggcccctgaattcctgacaggaggagaccctacaaccaccagggacacttgagttgtcaggaagacctgcttataaagtgttaatggtagaattccagactgtgcaaagcccagaaggttttgtgtgggagcatctgtagtggagaatggtcagggacacccattgccctaggctaaacttgttctcataggagacttcagccctagggsaactgtcagacctgaactctgcagggcattcttgcccctgagacagggccagtctgacctgagcatccttcagtctgctcgcccctcctggggccccagcctggccacacctgcttgcagtgcagcttcacagcggggtgcagtggaggctacctcctgaggacctgcatcatagttcctgtgctggctgactgtgcctgaccagcagagatc

SEQ ID NO: 229599 - DNA, 569 bp, Homo sapiens
tgagagcagacagagggaagacacagatgttgggctgaagggggaggaaggcgggaaccctgcaaggggcaaccgtgcaccaggactcattccaggtccccaaaatctcctggaggagaggtgagttgaacaggcaaggggcaacctcctcttgtcgcaggcccctgaattcctgacaggaggagaccctacaaccaccagggacacttgagttgtcaggaagacctgcttataaagtgttaatggtagaattccagactgtgcaaagcccagaaggttttgtgtgggagcatctgtagtggagaatggtcagggacacccattgccctaggctaaacttgttctcataggagacttcagccctaggggaactgtcagacctgaactctgcagggcaktcttgcccctgagacagggccagtctgacctgagcatccttcagtctgctcgcccctcctggggccccagcctggccacacctgcttgcagtgcagcttcacagcggggtgcagtggaggctacctcctgaggacctgcatcatagttcctgtgctggctgactgtgcctg

SEQ ID NO: 229600 - DNA, 334 bp, Homo sapiens
aagacctgcttataaagtgttaatggtagaattccagactgtgcaaagcccagaaggttttgtgtgggagcatctgtagtggagaatggtcagggacacccattgccctaggctaaacttgttctcataggagacttcagccctaggggaactgtcagacctgaactctgcagggcattcttgcccctgagacagggccagtctgacmtgagcatccttcagtctgctcgcccctcctggggccccagcctggccacacctgcttgcagtgcagcttcacagcggggtgcagtggaggctacctcctgaggacctgcatcatagttcctgtgct

SEQ ID NO: 229601 - DNA, 579 bp, Homo sapiens
ttgagagcagacagagggaagacacagatgttgggctgaagggggaggaaggcgggaaccctgcaaggggcaaccgtgcaccaggactcattccaggtccccaaaatctcctggaggagaggtgagttgaacaggcaaggggcaacctcctcttgtcgcaggcccctgaattcctgacaggaggagaccctacaaccaccagggacacttgagttgtcaggaagacctgcttataaagtgttaatggtagaattccagactgtgcaaagcccagaaggttttgtgtgggagcatctgtagtggagaatggtcagggacacccattgccctaggctaaacttgttctcataggagacttcagccctaggggaactgtcagacctgaactctgcagggcattcttgcccctgagacagggccagtctgacctragcatccttcagtctgctcgcccctcctggggccccagcctggccacacctgcttgcagtgcagcttcacagcggggtgcagtggaggctacctcctgaggacctgcatcatagttcctgtgctggctgactgtgcctgaccagcaga

SEQ ID NO: 229602 - DNA, 588 bp, Homo sapiens
aactctgacagctcaaaaagcagaatgtcttcttacctccaaatgacccagcagtggttcttaatcaggctgaaatgacagtcatggaattcagcattgggacaggaacaaagattaccaagtttcaggagtaagttgaaacacaatcaaaggaatctaaggaatttatttaaatgatgcaagaagtgaacgacaaaatcaccgttctgagaatgaaacccatctgacagagctgaaaaactcactacaagaatttcataatacaatcagaawtgttaacagcagaatagaccaagctgaggaaagaatctcagaacttgaagaccagatctttgaatcaactcaatcagacaaaaatgaataaaaaagcataaacacaacttcagagaaatatgggattatgtaaagagaccaattctatggctcattggcctgaaagagaggaagagagagcaagcaagttggaaaacatatttgatgataactgtccatgaaaatttccccaactttgctaaagagctcgacattcaaattcaggaaatgcaaagaatcccttgagatactacacaagatgtccattcccaagac

SEQ ID NO: 229603 - DNA, 543 bp, Homo sapiens
tcaggctaacagcagacctttcagcaggaactatacaagccagaagagatagggggcctatrttcagcattcttaaagaaaagaaattctaatcaagaatttcatatccagccaaagtaagctttataatcaaaggaggaataagatccttttcagacaaacaaatgctaagggaattcaccaccatcagactcaccttacaagagatccttaagggtgtgctaaacatgggaacagaagactgttaccagcaaccacaaacacacactgaagtacatagaccaccgacataaagcaactatgtaatccagtctgcataacaaccaactaccaacatgacaggatcaaatctgcacatatcaatattaaccttaaatgtaaaagggctaaaggccatacttaaaaggcacagagtggcaattgaataaagcaagacccaatgacatgcagttttcaagagacccatctcacatgcaatgacacccataggctcaaagtaaaagaataaagaaaaatctatcaagcaaatataaaacaaaaaca

SEQ ID NO: 229604 - DNA, 382 bp, Homo sapiens
tgtcataactgaaaatataactaactgcatttcttttaatgccatgggaaatgtgttgaagaaaacaaagtgtatataattttttcatataataatgtgtttataatacaatctacttaatattttggaaaattatttttctgtaaaacactgaagtgctaattaaatttcaacaaatttttttaaaaataaataaagcyggtcacagtggctcatgcctgtaatcccaggactttaggaggccaaggcaggcagattacttgattgcccagcctgggcaacacagcaaaactccatctctacaaaaaatacaaaaattatctggacatggtggtgtgtgcctgtggtcccagctactcagtgggctgaggtgtgaggattg

SEQ ID NO: 229605 - DNA, 537 bp, Homo sapiens
tgaaataataaataagattgatagtcccatagctagaataataaagaaaaaagggaaaagattcaaataaacacagtcagaaatgacaaagagggcattaccactgactccacagaaatacaaacaactctcagagacaaytgcaaacacctgtatgcacataaactagaaaacctaaaagaaatggataaattcctgaaatcatgcagcctcccaagattgagccaggatgaaattgaaccctgaaagaccaataacaaggtccaaaattgaatcagtaataaaaagtctgccaaccagaaaaatccctggatcggacaaattcacagccaaattcaggcagatgtacaaagaagactggtaccattcctgctgaaattattcccaaaaattgagaaggaagaacttctctctaactcatttattaggccagcatcattctgacactgaaacctggcagagacacaacaaaaaaagaaaacttcaggccaatatccatgttgaactacagatgcaaaaatcctcaacaaaattcta

SEQ ID NO: 229606 - DNA, 382 bp, Homo sapiens
tgtcataactgaaaatataactaactgcatttcttttaatgccatgggaaatgtgttgaagaaaacaaagtgtatataattttttcatataataatgtgtttataatacaatctacttaatattttggaaaattatttttctgtaaaacactgaagtgctaattaaatttcaacaaatttttttaaaaataaataaagctggtcacagtggctcatgcctgtaatcccaggactttaggaggccaaggcaggcagattacttgattgcccagcctgggcaacacagcaaaactccatctctacaaaaaatacaaaaattatctggacatggtggtgtgtgcctgtrgtcccagctactcagtgggctgaggtgtgaggattg

SEQ ID NO: 229607 - DNA, 640 bp, Homo sapiens
ggatacctattataggcgatgatactttaaacaaacaaagcaagaggaagtcttagaagtgagaaacctttgccataaatgattgaagatcctgaccaaaacacacaacttatatttgaagaccaaaatttcgaaatgatttttataagctgttaatcttgatataattatatatatacatatacgtgtgtgtgtgttaaacatactcaaataggtgataaatttaaactttttaactctaattttgaaataattacctttactaacaaataatgggtaaatatattatctttaayttaccaacttaataacctgcacactttttaaatcagacaacatatattcattatcaagtgtacatattctcttttccctgtacatattcctcttgagggatgatatatccgaaatagtgcctcactgtggaaatagtttctgccttctgaaacacaacttgaggatataacagaatttccagcagggaggtatagtttgaaaagattccagaaacgattctgataccacactcactgttgcgaatcaatgacaatatgtcacttccatttgagaaattaaatagtaaatgatgtttattactccctagattttaatgtaaagtttaatagttcagtttagtttt

SEQ ID NO: 229608 - DNA, 604 bp, Homo sapiens
ataacctgcacactttttaaatcagacaacatatattcattatcaagtgtacatattctcttttccctgtacatattcctcttgagggatgatatatccgaaatagtgcctcactgtggaartagtttctgccttctgaaacacaacttgaggatataacagaatttccagcagggaggtatagtttgaaaagattccagaaacgattctgataccacactcactgttgcgaatcaatgacaatatgtcacttccatttgagaaattaaatagtaaatgatgtttattactccctagattttaatgtaaagtttaatagttcagtttagttttatacatattttgtcctaagcagttacagatcaatatttttaaaagtttctactttttattaatttcattaaagtcctttagataaagttagacttcctggaatccttatgtttggcaatgaatttccagattgattcaggtttataaggacaaatacatgtgacactacagaagtgtgagggagtaggacttacatgctttttctagggcctcagttgatcagaagtggacagcagctgttctatcaaaaactcaaatggggttgtgggga

SEQ ID NO: 229609 - DNA, 640 bp, Homo sapiens
ggatacctattataggcgatgatactttaaacaaacaaagcaagaggaagtcttagaagtgagaaacctttgccataaatgattgaagatcctgaccaaaacacacaacttatatttgaagaccaaaatttcgaaatgatttttataagctgttaatcttgatataattatatatatacatatacgtgtgtgtgtgttaaacatactcaaataggtgataaatttaaactttttaactctaattttgaaataattacctttactaacaaataatgggtaaatatattatctttaatttaccaacttaataacctgcacactttttaaatcagacaacatatattcattatcaagtgtacatattctcttttccctgtacatattcctcttgagggatgatatatccgaaatagtgcctcactgtggaaatagtttctgccttctgaaacacaacttgaggatataacagaatttccagcagggaggtatagtttgaaaagattccagaaacgattctgataccacactcactgttgckaatcaatgacaatatgtcacttccatttgagaaattaaatagtaaatgatgtttattactccctagattttaatgtaaagtttaatagttcagtttagtttt

SEQ ID NO: 229610 - DNA, 560 bp, Homo sapiens
caactatctttaccaggaaatgggagaaggagaaaagagagaggaaagaaaagaaatagagaggaaagatcatgcatgaaaattaaagagagagatcaaggcctttactgagaatgcagaaccaaggcctgttttccctaagttcctcttattatgcccagaaggaaagaaaatatgtgagtgaataaaggcaaatatttcctaggaaagctttgtgtattcatcgattgcaggattcaatattcttatcatcctccccgaattgatctacrgaatcccaatacatctattctaacttattattatattaaaatgaatcatcactagtctttagagaaataaaatcacaatgagaaaccactatacacctagcagaaaggctaaaattaaaaagggtggaaacaccaagtgtttggcaaagatatggaattcttatacattgctggtgggaaatgtgaaaatgatactatcactttggaaaacaatttggcattcttctaagctaaatatacacttaatatatagctcagcaattccactcccatgtatttacccagcag

SEQ ID NO: 229611 - DNA, 367 bp, Homo sapiens
gagaggtcagcttgtagaaaataaagaccaagagggagaagcagcaaagagctacatattagtaggaggtcagcttaagagctaagagggagcaacctcagggccttatggcaattaaagatattgaatatcaaggaattagaaggatttaaagaattatgactgagagtcttctattgtattcactttgacasagttcataagtcttatggactttttacttgcctttgttggctgggtttcattttttaaaattgcagttctacagagatacttagccatgaggcaagacaattatatttgtgctactcaattaaattgtgttacatcttaatgtcagagtctatgctctataaattctaccagt

SEQ ID NO: 229612 - DNA, 449 bp, Homo sapiens
taatcataaagtaagtttcccagtttatgctattaattctccattgttttcagataaagcacttgtaaactgttgaacatttttatgaagtgttatatcacaaattggggctattgcataaatgttrtgttattctagcccacctaaaatataacttctttctgcactctactcttcttcaagttgtcttatgatatccaaaatttgcaccatcattttttcactcaggaaaatacttttggacaattaaattatatgtatttaacacagtgttaaatgatttatggtatttcttaatatctgaatatttttgctgaaccactgagcttatttggcataaattatgtcaagcattaagaaaataataagttatcctatagagaaattttatgtgtttagaactattattattattattttttgagacggaatctcgctctgtcgcccag

SEQ ID NO: 229613 - DNA, 449 bp, Homo sapiens
taatcataaagtaagtttcccagtttatgctattaattctccattgttttcagataaagcacttgtaaactgttgaacatttttatgaagtgttatatcacaaattggggctattgcataaatgttatgttattctagcccacctaaaatataacttctttctgcactctactcttcttcaagttgtcttatratatccaaaatttgcaccatcattttttcactcaggaaaatacttttggacaattaaattatatgtatttaacacagtgttaaatgatttatggtatttcttaatatctgaatatttttgctgaaccactgagcttatttggcataaattatgtcaagcattaagaaaataataagttatcctatagagaaattttatgtgtttagaactattattattattattttttgagacggaatctcgctctgtcgcccag

SEQ ID NO: 229614 - DNA, 449 bp, Homo sapiens
taatcataaagtaagtttcccagtttatgctattaattctccattgttttcagataaagcacttgtaaactgttgaacatttttatgaagtgttatatcacaaattggggctattgcataaatgttatgttattctagcccacctaaaatataacttctttctgcactctactcttcttcaagttgtcttatgatatccaaaatttgcaccatcattttttcactcaggaaaatacttttggacaattaaattatatgtatttaacacagtgttaaatgatttatgrtatttcttaatatctgaatatttttgctgaaccactgagcttatttggcataaattatgtcaagcattaagaaaataataagttatcctatagagaaattttatgtgtttagaactattattattattattttttgagacggaatctcgctctgtcgcccag

SEQ ID NO: 229615 - DNA, 449 bp, Homo sapiens
taatcataaagtaagtttcccagtttatgctattaattctccattgttttcagataaagcacttgtaaactgttgaacatttttatgaagtgttatatcacaaattggggctattgcataaatgttatgttattctagcccacctaaaatataacttctttctgcactctactcttcttcaagttgtcttatgatatccaaaatttgcaccatcattttttcactcaggaaaatacttttggacaattaaattatatgtatttaacacagtgttaaatgatttatggtatttcttaatatctgaatatttttgctkaaccactgagcttatttggcataaattatgtcaagcattaagaaaataataagttatcctatagagaaattttatgtgtttagaactattattattattattttttgagacggaatctcgctctgtcgcccag

SEQ ID NO: 229616 - DNA, 560 bp, Homo sapiens
caactatctttaccaggaaatgggagaaggagaaaagagagaggaaagaaaagaaatagagaggaaagatcatgcatgaaaattaaagagagagatcaaggcctttactgagaatgcagaaccaaggcctgttttccctaagttcctcttattatgcccagaaggaaagaaaatatgtgagtgaataaaggcaaatatttcctaggaaagctttgtgtattcatcgattgcaggattcaatattcttatcatcctccccgaattgatctacagaatcccaatacatctattctaacttattattatattaaaatgaatcatcactagtctttagagaaataaaatcacaatgagaaaccactatacacctagcagaaaggctaaaattaaaaagggtggaaacaccaagtgtttggcaaagatatggaattctyatacattgctggtgggaaatgtgaaaatgatactatcactttggaaaacaatttggcattcttctaagctaaatatacacttaatatatagctcagcaattccactcccatgtatttacccagcag

SEQ ID NO: 229617 - DNA, 612 bp, Homo sapiens
tcaacaacacgtggtactgacaatatttttaatcataaccattttagtgggaagaataactcactgtggttttaatttgcatttccttaatgacaaaaygatattgaacatttttgtgtgctttttgtccactggcctagcacttttcgtcattttttcttatattcattattttcattttatttttgctaattattgagttgttaagagttctttatgaactatattctgaaaaaaatttacagcattcaaataaagtgttgcaaatattttctcccagtctgtagcttgactcttattctcttaacaatgtattttaaaaggagagttgttaatcttaaggtcaaatttatcagatttttattttatatcttgctatttgctttctatttgtcccatttgttctttgtcctctttctcatcttttttgtctactttcaagcatttaaaaatttattctatttcatcgctgcattgtaatattattgtgtaatattgtaatattatcactgtttttgttactctagcatttgctttagggattacaccatacagatgttttaacttaaagataacttgtaatagccaacttttaataggcattatacgact

SEQ ID NO: 229618 - DNA, 612 bp, Homo sapiens
tcaacaacacgtggtactgacaatatttttaatcataaccattttagtgggaagaataactcactgtggttttaatttgcatttccttaatgacaaaacgatattgaacatttttgtgtgctttttgtccactggcctagcacttttcgtcattttttcttatattcattattttcattttatttttgctaattattgagttgttaagagttctttatgaactatattctgaaaaaaatttacagcattcaaataaagtgttgcaaatattttytcccagtctgtagcttgactcttattctcttaacaatgtattttaaaaggagagttgttaatcttaaggtcaaatttatcagatttttattttatatcttgctatttgctttctatttgtcccatttgttctttgtcctctttctcatcttttttgtctactttcaagcatttaaaaatttattctatttcatcgctgcattgtaatattattgtgtaatattgtaatattatcactgtttttgttactctagcatttgctttagggattacaccatacagatgttttaacttaaagataacttgtaatagccaacttttaataggcattatacgact

SEQ ID NO: 229619 - DNA, 612 bp, Homo sapiens
tcaacaacacgtggtactgacaatatttttaatcataaccattttagtgggaagaataactcactgtggttttaatttgcatttccttaatgacaaaacgatattgaacatttttgtgtgctttttgtccactggcctagcacttttcgtcattttttcttatattcattattttcattttatttttgctaattattgagttgttaagagttctttatgaactatattctgaaaaaaatttacagcattcaaataaagtgttgcaaatattttctcccagtctgtagcttgactcttattctcttaacaatgtattttaaaaggagagttgttaatcttaaggtcaaatttatcagatttttattttatatcttgctatttgctttctatttgtcccatttgttctttgtcctctttctcatcttttttgtctactttcaagcatttaaaaatttattctatttcatcgctgcattgtaatattattgtgtaatattgtaatattatcactgtttttgttactctagcatttgctttagggattacaccatacaratgttttaacttaaagataacttgtaatagccaacttttaataggcattatacgact

SEQ ID NO: 229620 - DNA, 514 bp, Homo sapiens
ggaggtatttttccaggaacgcccttgcacatctcacaggyagcacttagtcatgattatatgtacactcaggcaagagtacagtttgcaccttgattgtcactcactgtgaaattattattcaagtaagacaaggagcttctttcagcatgatgaatgcttccagagtttgtgacatgacacttatttgggaaaaagctctttctcctacttacctaaaacctttcccaatatgagagatttgacggcgttgaattctgtccctgaggacaagatgacttgtttctttgtgctctggttaacctattagatgtcccatgagaagcaaacatcaacagaaagtacaattttaatgataaggaagcaaaggaagatgaggaaaggaaagatgaaaataaatcacttttaagtaccattacaaaagctcaagaagccaccttcaaataattaatcatttagaaagagaagctattttataagcaattcctatgatgccatcagctaccactctatc

SEQ ID NO: 229621 - DNA, 514 bp, Homo sapiens
ggaggtatttttccaggaacgcccttgcacatctcacaggtagcacttastcatgattatatgtacactcaggcaagagtacagtttgcaccttgattgtcactcactgtgaaattattattcaagtaagacaaggagcttctttcagcatgatgaatgcttccagagtttgtgacatgacacttatttgggaaaaagctctttctcctacttacctaaaacctttcccaatatgagagatttgacggcgttgaattctgtccctgaggacaagatgacttgtttctttgtgctctggttaacctattagatgtcccatgagaagcaaacatcaacagaaagtacaattttaatgataaggaagcaaaggaagatgaggaaaggaaagatgaaaataaatcacttttaagtaccattacaaaagctcaagaagccaccttcaaataattaatcatttagaaagagaagctattttataagcaattcctatgatgccatcagctaccactctatc

SEQ ID NO: 229622 - DNA, 514 bp, Homo sapiens
ggaggtatttttccaggaacgcccttgcacatctcacaggtagcacttagtcatgattatatgtacactcaggcaagagtacagtttgcaccttgattgtcactcactgtgaaattattattcaagtaagacaaggagcttctttcagcatgatgaatgcttccagagtttgtgacatgacacttatttgggaaaaagctctttctcctacttacctaaaacctttcccaatatgagagatttgacggcgttgaattctgtccctgaggacaagatgacttgtttctttgygctctggttaacctattagatgtcccatgagaagcaaacatcaacagaaagtacaattttaatgataaggaagcaaaggaagatgaggaaaggaaagatgaaaataaatcacttttaagtaccattacaaaagctcaagaagccaccttcaaataattaatcatttagaaagagaagctattttataagcaattcctatgatgccatcagctaccactctatc

SEQ ID NO: 229623 - DNA, 514 bp, Homo sapiens
ggaggtatttttccaggaacgcccttgcacatctcacaggtagcacttagtcatgattatatgtacactcaggcaagagtacagtttgcaccttgattgtcactcactgtgaaattattattcaagtaagacaaggagcttctttcagcatgatgaatgcttccagagtttgtgacatgacacttatttgggaaaaagctctttctcctacttacctaaaacctttcccaatatgagagatttgacggcgttgaattctgtccctgaggacaagatgacttgtttctttgtgctctggttaacctattagatgtcccatgagaagcaaacatcaacasaaagtacaattttaatgataaggaagcaaaggaagatgaggaaaggaaagatgaaaataaatcacttttaagtaccattacaaaagctcaagaagccaccttcaaataattaatcatttagaaagagaagctattttataagcaattcctatgatgccatcagctaccactctatc

SEQ ID NO: 229624 - DNA, 567 bp, Homo sapiens
tttgttagactgaggaagttatcgtctataattagtttactgaatttaaacaaaaatacatgaaaggatgttggattttatcaaatgacttttctgcatcagtagagactatcatgtgtttctgtcctttattctaagatatagtatattatattaattgattttcagctgttaaaacaactttccatttctgggatcatttccactttgtcttgatgtatagtcatttttatatgtgactggatttgctttggtaatactctgttcagggttttcacatctatctacttaaatgatattggtctgtagatttaaaatatatatactkgtatatctatgtctggctttggtattagggaaatactgaccttacagaataagttggaaaatgctcctttctcttttattttttggaagagttttgaagaatacttcttatttaaatagttgatatatttttaaatagttgatatattctgatagttgatagcatcaattgtttgaaaccatctggacctgggctttactttgtgtggtattttaatattattaagacattccttttat

SEQ ID NO: 229625 - DNA, 567 bp, Homo sapiens
tttgttagactgaggaagttatcgtctataattagtttactgaatttaaacaaaaatacatgaaaggatgttggattttatcaaatgacttttctgcatcagtagagactatcatgtgtttctgtcctttattctaagatatagtatattatattaattgattttcagctgttaaaacaactttccatttctgggatcatttccactttgtcttgatgtatagtcatttttatatgtgactggatttgctttggtaatactctgttcagggttttcacatctatctacttaaatgatattggtctgtagatttaaaatatatatacttgtatatctatgtctggctttggtattagggaaatactgaccttacagaataagttgraaaatgctcctttctcttttattttttggaagagttttgaagaatacttcttatttaaatagttgatatatttttaaatagttgatatattctgatagttgatagcatcaattgtttgaaaccatctggacctgggctttactttgtgtggtattttaatattattaagacattccttttat

SEQ ID NO: 229626 - DNA, 523 bp, Homo sapiens
ttgttgttgcccgtgcttttggggtgatttttaaaaaaccactgccaaatccaagatcatgaagatctgcctatatatcttctaaaaattttatagttttatcttttagatttaaaactttgattcattttgagttaattttggtaagggtctaacttcaatctttgcatgtgaacatccacttttcctacctttatgttgaatagactgttacttccctaytgaatgatcttgacaaagactatgttaaacatcaattgactgtatgtacgtaggtttatttctggcctctcagctctattccattgatttataggtttatcctcattcagtgccacattgttttgaataatgtagtttatagtaagttttgaagtcaagaagggtgaatcctccaactttgttcttttgtaaaattgttttgcttattctgggctttttcaaattttatttaaatattgataggggctttttcatttgtataaaaagtgctttggggattctgataagaattagattgaat

SEQ ID NO: 229627 - DNA, 523 bp, Homo sapiens
ttgttgttgcccgtgcttttggggtgatttttaaaaaaccactgccaaatccaagatcatgaagatctgcctatatatcttctaaaaattttatagttttatcttttagatttaaaactttgattcattttgagttaattttggtaagggtctaacttcaatctttgcatgtgaacatccacttttcctacctttatgttgaatagactgttacttccctattgaatgatcttgacaaagactatgttaaacatcaattgactgtatgtacgtargtttatttctggcctctcagctctattccattgatttataggtttatcctcattcagtgccacattgttttgaataatgtagtttatagtaagttttgaagtcaagaagggtgaatcctccaactttgttcttttgtaaaattgttttgcttattctgggctttttcaaattttatttaaatattgataggggctttttcatttgtataaaaagtgctttggggattctgataagaattagattgaat

SEQ ID NO: 229628 - DNA, 523 bp, Homo sapiens
ttgttgttgcccgtgcttttggggtgatttttaaaaaaccactgccaaatccaagatcatgaagatctgcctatatatcttctaaaaattttatagttttatcttttagatttaaaactttgattcattttgagttaattttggtaagggtctaacttcaatctttgcatgtgaacatccacttttcctacctttatgttgaatagactgttacttccctattgaatgatcttgacaaagactatgttaaacatcaattgactgtatgtacgtaggtttatttctggcctctcagctctattccattgatttataggtttatcctcattcagtrccacattgttttgaataatgtagtttatagtaagttttgaagtcaagaagggtgaatcctccaactttgttcttttgtaaaattgttttgcttattctgggctttttcaaattttatttaaatattgataggggctttttcatttgtataaaaagtgctttggggattctgataagaattagattgaat

SEQ ID NO: 229629 - DNA, 356 bp, Homo sapiens
gatgtttctcaaatttactgtctggatagaaaggctaatccaaagtggtatctacagtattctgagagagaaaagttgaagggctttcagattctcttaaaacactttatgaaaggttgatattttaattttatatcaagttaattccaaaaatgtgtttagtacacacatacacatacacacaccccccaaatatatctgtaaataaaaagacaaygttgggtgatgatcattgtcttggaatactactccactctttccatttccataaaatataaagaatttactgaaaatccagatcattcttattagattaggtaatctaactataacatatgccccagccactggaggac

SEQ ID NO: 229630 - DNA, 565 bp, Homo sapiens
atctattatgtatattaaaatccatgagttcatgtggatacctccgtttttaacccagcaccacagggttcattacagtcttcctccttcccacatgtataactctttcctcagtgagaaggtcactcctaytctcctcactgtatttacatatttgctcattccccagtgtggaaccaagcttctaacccagtggtcattccttgaccctatccctgcagatcccctagtcccagctgccccaaaagaagggaaaagaatcaataagtgttatgttaaagaaaacagagatgaagataaggaaaggaaaagagaaaggaagaggaatctacaagttttacagaagagaatattttatttttctttctttcttcattaatcaatttatttatttattttagagatgaggtctcactttgtcacccaggctggagtgcagtggcatgatcatagttcactgccacctcacattcctgggctcaagagatcatctcacctaagccttcctagttgctaggactacaggccaccatgcccagctaatttttagtttttttgtaagaga

SEQ ID NO: 229631 - DNA, 565 bp, Homo sapiens
atctattatgtatattaaaatccatgagttcatgtggatacctccgtttttaacccagcaccacagggttcattacagtcttcctccttcccacatgtataactctttcctcagtgagaaggtcactcctackctcctcactgtatttacatatttgctcattccccagtgtggaaccaagcttctaacccagtggtcattccttgaccctatccctgcagatcccctagtcccagctgccccaaaagaagggaaaagaatcaataagtgttatgttaaagaaaacagagatgaagataaggaaaggaaaagagaaaggaagaggaatctacaagttttacagaagagaatattttatttttctttctttcttcattaatcaatttatttatttattttagagatgaggtctcactttgtcacccaggctggagtgcagtggcatgatcatagttcactgccacctcacattcctgggctcaagagatcatctcacctaagccttcctagttgctaggactacaggccaccatgcccagctaatttttagtttttttgtaagaga

SEQ ID NO: 229632 - DNA, 565 bp, Homo sapiens
atctattatgtatattaaaatccatgagttcatgtggatacctccgtttttaacccagcaccacagggttcattacagtcttcctccttcccacatgtataactctttcctcagtgagaaggtcactcctactctcctcactgtatttacatatttgctcattccccagtgtggaaccaagcttctaacccagtggtcattccttgaccctatccctgcagatcccctagtcccagctgccccaaaagaagggaaaagaatcaataagtgttatgttaaagaaaacagagatgaagataaggaaaggaaaagagaaaggaagaggaatctacaagttttacagaagagaatattttatttttctttctttcttcattaatcaatttatttatttattttagagatgaggtctcactttgtcacccaggctggagtgcagtggcatgatcatagttcactgccacctcacattcctgggctcaagagatcatctcacctaagccttcctagttgctrggactacaggccaccatgcccagctaatttttagtttttttgtaagaga

SEQ ID NO: 229633 - DNA, 450 bp, Homo sapiens
ttttgaattttgttaaaattacagactaatttgakgagaatgtcaactttaaaagagggtatctcaacagcagcgttactgatattttgggctaatttttttttgttatgggggggctgtcctgtgcactgtaggatgcttagcagcaccctgatttctaattaatagacactaatataaacaaccttcctctctgtgtgatgacaaaaatgtcttcagacaatgccaaatgtcccaagagtcgaaatcacccccgattgagaactactgctttaagatactgagtcatactatccacgacagtagtgagtcaatccatttatttggctgtccttaattctcttgaataagttttgtaattttgtaattttttccataaaagtactgcagttattccacagaactttacatttttgttaatattgcaaataaaatttttctaggtgtgta

SEQ ID NO: 229634 - DNA, 450 bp, Homo sapiens
ttttgaattttgttaaaattacagactaatttgatgagaatgtcaactttaaaagagggtatctcaacagcagcgttactgatattttgggctaatttttttttgttatgggggggctgtcctgtgcactgtaggatgctyagcagcaccctgatttctaattaatagacactaatataaacaaccttcctctctgtgtgatgacaaaaatgtcttcagacaatgccaaatgtcccaagagtcgaaatcacccccgattgagaactactgctttaagatactgagtcatactatccacgacagtagtgagtcaatccatttatttggctgtccttaattctcttgaataagttttgtaattttgtaattttttccataaaagtactgcagttattccacagaactttacatttttgttaatattgcaaataaaatttttctaggtgtgta

SEQ ID NO: 229635 - DNA, 450 bp, Homo sapiens
ttttgaattttgttaaaattacagactaatttgatgagaatgtcaactttaaaagagggtatctcaacagcagcgttactgatattttgggctaatttttttttgttatgggggggctgtcctgtgcactgtaggatgcttagcagcaccctgatttctaattaatagacactaatataaacaaccttcctctctgtgtgatgacaaaaatgtcttcagacaatgccaaatgtcccaagagtcgaaatcacccccgattgagaactaytgctttaagatactgagtcatactatccacgacagtagtgagtcaatccatttatttggctgtccttaattctcttgaataagttttgtaattttgtaattttttccataaaagtactgcagttattccacagaactttacatttttgttaatattgcaaataaaatttttctaggtgtgta

SEQ ID NO: 229636 - DNA, 552 bp, Homo sapiens
attccacagaactttacatttttgttaatattgcaaataaaatttttctaggtgtgtaatggtaattattttawgattttatagaaattcaagtaattcctcaatactgactgaccataaattcagcaaacttactgaactctcatttttcctgatatttctttatattattttggattttctatgtaggcaatcatattatctacaatatctgccaggtttgtttcttttccaaactttttatcacttacatctattttatttcctcttgtgtctttaactgacacacgcatgaacttttaaaaattatatattcattattgattacagttaagaatatagtttccatcatgacaattccataaaatttgttaagattccatccatttacaaaattttttatacttattcaacaataatgtataatacattctataaagaaataatttttccttactaaacgatatatggctgctatatcaagtttgttaattataatattaaaatattcttacctgcttcacttactcattcccaaaaatgttatgttaa

SEQ ID NO: 229637 - DNA, 552 bp, Homo sapiens
attccacagaactttacatttttgttaatattgcaaataaaatttttctaggtgtgtaatggtaattattttaagattttatagaaattcaagtaattcctcaatactgactgaccataaattcagcaaacttactgaactctcatttttcctgatatttctttatattattttggattttctatgtaggcaatcatattatctacaatatctgccaggtttgtttcttttccaaactttttatcacttacatctattttatttcctcttgtgtctttaactgacacaygcatgaacttttaaaaattatatattcattattgattacagttaagaatatagtttccatcatgacaattccataaaatttgttaagattccatccatttacaaaattttttatacttattcaacaataatgtataatacattctataaagaaataatttttccttactaaacgatatatggctgctatatcaagtttgttaattataatattaaaatattcttacctgcttcacttactcattcccaaaaatgttatgttaa

SEQ ID NO: 229638 - DNA, 552 bp, Homo sapiens
attccacagaactttacatttttgttaatattgcaaataaaatttttctaggtgtgtaatggtaattattttaagattttatagaaattcaagtaattcctcaatactgactgaccataaattcagcaaacttactgaactctcatttttcctgatatttctttatattattttggattttctatgtaggcaatcatattatctacaatatctgccaggtttgtttcttttccaaactttttatcacttacatctattttatttcctcttgtgtctttaactgacacacgcatgarcttttaaaaattatatattcattattgattacagttaagaatatagtttccatcatgacaattccataaaatttgttaagattccatccatttacaaaattttttatacttattcaacaataatgtataatacattctataaagaaataatttttccttactaaacgatatatggctgctatatcaagtttgttaattataatattaaaatattcttacctgcttcacttactcattcccaaaaatgttatgttaa

SEQ ID NO: 229639 - DNA, 552 bp, Homo sapiens
attccacagaactttacatttttgttaatattgcaaataaaatttttctaggtgtgtaatggtaattattttaagattttatagaaattcaagtaattcctcaatactgactgaccataaattcagcaaacttactgaactctcatttttcctgatatttctttatattattttggattttctatgtaggcaatcatattatctacaatatctgccaggtttgtttcttttccaaactttttatcacttacatctattttatttcctcttgtgtctttaactgacacacgcatgaacttttaaaaattatatattcattattgattacagttaagaatatagtttccatcatgacaattccrtaaaatttgttaagattccatccatttacaaaattttttatacttattcaacaataatgtataatacattctataaagaaataatttttccttactaaacgatatatggctgctatatcaagtttgttaattataatattaaaatattcttacctgcttcacttactcattcccaaaaatgttatgttaa

SEQ ID NO: 229640 - DNA, 536 bp, Homo sapiens
gcacttaatactaacagaaggttctgtaacaaaaaaacagttgaccagcctggccaatagtgaaacccagtctctactaaaaatacaaaaattagccrggtgtggcactcggctgtaatcccagttactcgggaggctgaggcaggagaatcgcttgaatccgggaggcgcaggttgcagtgagctgagatcgcaccactgcattccagcctgggcgacagagagagactctgtctcaaaacaaaaacaaaacaaaacggttaacattcttcgaactaagttataaagccactagcatatatgccattctggctttcttgtaataacctgccaatgctctcctctctgacctgtagagaatgggggtggggacagaccaatgagctggaggtcttctgaacagccaggagctggagggctggagccctcacaggcaggagccccttgtggaatggaggaaatgaaaacctctaggattgttaaagatgtccgtcaaaagatttgaaggtcgctgtttgtctcattagagcccaaag

SEQ ID NO: 229641 - DNA, 536 bp, Homo sapiens
gcacttaatactaacagaaggttctgtaacaaaaaaacagttgaccagcctggccaatagtgaaacccagtctctactaaaaatacaaaaattagccgggtgtggcactcggctgtaatcycagttactcgggaggctgaggcaggagaatcgcttgaatccgggaggcgcaggttgcagtgagctgagatcgcaccactgcattccagcctgggcgacagagagagactctgtctcaaaacaaaaacaaaacaaaacggttaacattcttcgaactaagttataaagccactagcatatatgccattctggctttcttgtaataacctgccaatgctctcctctctgacctgtagagaatgggggtggggacagaccaatgagctggaggtcttctgaacagccaggagctggagggctggagccctcacaggcaggagccccttgtggaatggaggaaatgaaaacctctaggattgttaaagatgtccgtcaaaagatttgaaggtcgctgtttgtctcattagagcccaaag

SEQ ID NO: 229642 - DNA, 536 bp, Homo sapiens
gcacttaatactaacagaaggttctgtaacaaaaaaacagttgaccagcctggccaatagtgaaacccagtctctactaaaaatacaaaaattagccgggtgtggcactcggctgtaatcccagttactcgggaggctgaggcaggagaatcrcttgaatccgggaggcgcaggttgcagtgagctgagatcgcaccactgcattccagcctgggcgacagagagagactctgtctcaaaacaaaaacaaaacaaaacggttaacattcttcgaactaagttataaagccactagcatatatgccattctggctttcttgtaataacctgccaatgctctcctctctgacctgtagagaatgggggtggggacagaccaatgagctggaggtcttctgaacagccaggagctggagggctggagccctcacaggcaggagccccttgtggaatggaggaaatgaaaacctctaggattgttaaagatgtccgtcaaaagatttgaaggtcgctgtttgtctcattagagcccaaag

SEQ ID NO: 229643 - DNA, 536 bp, Homo sapiens
gcacttaatactaacagaaggttctgtaacaaaaaaacagttgaccagcctggccaatagtgaaacccagtctctactaaaaatacaaaaattagccgggtgtggcactcggctgtaatcccagttactcgggaggctgaggcaggagaatcgcttgaatccgggaggcgcaggttgcagtgagctgagatcgcaccactgcattccagcctgggcgacagagagagactctgtctcaaaacaaaaacaaaacaaaacggttaacattcttcgaactaagttataaagccactagcatatatgccattctggctttcttgtaataacctgccaatgctctcctytctgacctgtagagaatgggggtggggacagaccaatgagctggaggtcttctgaacagccaggagctggagggctggagccctcacaggcaggagccccttgtggaatggaggaaatgaaaacctctaggattgttaaagatgtccgtcaaaagatttgaaggtcgctgtttgtctcattagagcccaaag

SEQ ID NO: 229644 - DNA, 574 bp, Homo sapiens
cattcaaaaaaattcaccattaaaataaataccagagtaatttgcacactaaagataaaatctatttgaaattatgaaatgttcattgagaaagtttaatattatacaaagacattgatttatctcatcccatctttttgctaactacctgtatattacacatttggaaagatatggtactctctgtcagtacttactaatttttggaggtatttgtttttattgcattggatgtcctgactctttatttggaggttaaggaatgacattgataggcttttctcatctctgaggttagagatttctcatgcraagaaacaaagtgccctgggtcaactacagctctgacgagtgcacctccttctcagcactgacaatgattaaatgatagagtcagacactaactcagatctatagaactgcatattaggacaagggatgctgccaggggttgggagtgaagattggggtgatggactgactgcacatcacagtaaagttaggataatttaaaaagcaggtgtcaggccacctatcttaaaaaaggaagggggtcaggggccacaagttgcag

SEQ ID NO: 229645 - DNA, 574 bp, Homo sapiens
cattcaaaaaaattcaccattaaaataaataccagagtaatttgcacactaaagataaaatctatttgaaattatgaaatgttcattgagaaagtttaatattatacaaagacattgatttatctcatcccatctttttgctaactacctgtatattacacatttggaaagatatggtactctctgtcagtacttactaatttttggaggtatttgtttttattgcattggatgtcctgactctttatttggaggttaaggaatgacattgataggcttttctcatctctgaggttagagatttctcatgcgaagaaacaaagtgccctgggtcaactacagctctgacgagtgcrcctccttctcagcactgacaatgattaaatgatagagtcagacactaactcagatctatagaactgcatattaggacaagggatgctgccaggggttgggagtgaagattggggtgatggactgactgcacatcacagtaaagttaggataatttaaaaagcaggtgtcaggccacctatcttaaaaaaggaagggggtcaggggccacaagttgcag

SEQ ID NO: 229646 - DNA, 574 bp, Homo sapiens
cattcaaaaaaattcaccattaaaataaataccagagtaatttgcacactaaagataaaatctatttgaaattatgaaatgttcattgagaaagtttaatattatacaaagacattgatttatctcatcccatctttttgctaactacctgtatattacacatttggaaagatatggtactctctgtcagtacttactaatttttggaggtatttgtttttattgcattggatgtcctgactctttatttggaggttaaggaatgacattgataggcttttctcatctctgaggttagagatttctcatgcgaagaaacaaagtgccctgggtcaactacagctctgacgagtgcacctccttctcagcactgacaatgattaaatgatagagtcagacactaactcagatctatagaactgcatattaggacaagggatgctgccaggggttgggagtgaagattggggtgatggactgacwgcacatcacagtaaagttaggataatttaaaaagcaggtgtcaggccacctatcttaaaaaaggaagggggtcaggggccacaagttgcag

SEQ ID NO: 229647 - DNA, 574 bp, Homo sapiens
cattcaaaaaaattcaccattaaaataaataccagagtaatttgcacactaaagataaaatctatttgaaattatgaaatgttcattgagaaagtttaatattatacaaagacattgatttatctcatcccatctttttgctaactacctgtatattacacatttggaaagatatggtactctctgtcagtacttactaatttttggaggtatttgtttttattgcattggatgtcctgactctttatttggaggttaaggaatgacattgataggcttttctcatctctgaggttagagatttctcatgcgaagaaacaaagtgccctgggtcaactacagctctgacgagtgcacctccttctcagcactgacaatgattaaatgatagagtcagacactaactcagatctatagaactgcatattaggacaagggatgctgccaggggttgggagtgaagattggggtgatggactgactgcacatcacagtaaagttaggataatttaaaaagcaggtgtcaggccacctatcttaaaaaaggaarggggtcaggggccacaagttgcag

SEQ ID NO: 229648 - DNA, 387 bp, Homo sapiens
ccttcctctggcttggttctgtcggctaacagaatcttatcctcattctctgaaaactggtagaaggatagagataacaaaagaaggasttcaccatcagttatgtgcctgctgtttgttaaacactgagttcctcttttacatttactattgcatttagtcttcatgccaaattttgaaagtaagtatgaacacgttgatcttacagataaggaaactgaagttcatctcagggagaaacttactcccaagcagagtactggccggtgttagagctgaagtccctaattacacccctctgattttcatcccactgaggggagtggaaatgcgaacagacgtggaatgagtgagctttcaaaagtctagctcttaattgctgcaaat

SEQ ID NO: 229649 - DNA, 580 bp, Homo sapiens
acttccaaacataactagtgttaaactccatctcagcttttcatttcatgaattagaatatagtatagtttccttactttataaaggcacttyggaaaattttattttctgtaacagttcttaaaacattcccttcacatctgaagggcttagtgaatatttgttgaacaagtgaatgaataaatgaaagaataatacgaattcattttgtattttgaattcatattagcccctaaactacctgttttttttagctcatccctttatcactatcattactaaattttctaattttgtttttatctaataatactgttttattagatttcccttgaatcagggtaatttagataaacaaagtttcagtgagtgttattacatttttactatggttctagatgtcgttggaacgcagagatgggacaaagaactcatttgccctccagggacttacagtctagccgggtgaatagaagtgaaaaacaaacaaacaaacaaacaaacaaaaacgcttaacaaaaagggagaccataatagaaattaaatggaggaagactatgtgtacatttgaaggaaccag

SEQ ID NO: 229650 - DNA, 556 bp, Homo sapiens
cattttaacatatttgttatgcaggaaaccttaaattattttaaaagacaagcatcttcttcaaattatctggaatgtctagcaagttgatgctaggaaatatgctatttttccattctttttagtatattctttctcatcataatgccatcctcaaaatacttagcacatggtaaatgagggaaaaatctatatgaaaaaaatgtggcaagaatattgaggaagtgattaagaacagatggatgttttgcaagcacaaaagaattctaaaataaatgagagttcacaagaggtttgtaggaatcagttaacgtcctatgcaaatattgagatacrtgtgcaaaagtcacatccaggtctcgcttcgtttatgagccacaagcaataataatacagaataagtctttttgcagaatggccaaacttaactatttctttataatcttcatgttacaatattttttagatgcaattcacccgatttcccatcccaaccttatcatttcccactcttatcaacttctggctaataaggctcacaagccaacagggaaag

SEQ ID NO: 229651 - DNA, 404 bp, Homo sapiens
ttaatgctgtttttcccataaaagatcagagtattttaaatagggcattgtgttcaggaaacctgtcatagatattatataaatgttctttagctattgacttttaaatgtaacatcaactgattaatgtacaaaagggatgtgcatcatggggatacaaacactgacctaactgyaataactaaatttcaaaatgtggtttaaaaaaacccagcaaaccctacattaagaatcaggattctagtcttggtttttctacttggtgacaaagttttggatcattggtaatatgactaggttgacgtagttttcaaatacgtctaaacagttgtatccattttccaaagaaatccttcaatagaacccattagattaaacaggtaaagtgaatgcgatctggctga

SEQ ID NO: 229652 - DNA, 582 bp, Homo sapiens
agtgttctcaacaatccacaaagtaggagctattaatagcctccttttatcaaatgtaactaaaattcaaagtacttaagtcatttctccaggtcataaaactgatatgttttgaaatgaggatttaaactattggttttgcaattacaaatcccatgctcgtaacttttaaatcatattgctttatacagctaattgtgtggctatatatgggggtttggtacaactggcatttatatctctatagaacatggtcttatgagagaaaaatactttgaacttgggaaagaactggggctgtgttccatgcttgttctcattttatttctactgccacacctcctgctgtttacctaattcttttcttcatcttyttactctttctttgcctcatattttcatcctcaaaagaactctcaacatgcaccatacagaatcatcttcattctagttagcttttacggagttagttaaagcactttacacctattaccatatttaatcctcatctatgcaatatgaactattattatcattaccattttatagatgaggaagttaaatctttgaccaggtaactgt

SEQ ID NO: 229653 - DNA, 582 bp, Homo sapiens
agtgttctcaacaatccacaaagtaggagctattaatagcctccttttatcaaatgtaactaaaattcaaagtacttaagtcatttctccaggtcataaaactgatatgttttgaaatgaggatttaaactattggttttgcaattacaaatcccatgctcgtaacttttaaatcatattgctttatacagctaattgtgtggctatatatgggggtttggtacaactggcatttatatctctatagaacatggtcttatgagagaaaaatactttgaacttgggaaagaactggggctgtgttccatgcttgttctcattttatttctactgccacacctcctgctgtttacctaattcttttcttcatcttcttactctttctttgcytcatattttcatcctcaaaagaactctcaacatgcaccatacagaatcatcttcattctagttagcttttacggagttagttaaagcactttacacctattaccatatttaatcctcatctatgcaatatgaactattattatcattaccattttatagatgaggaagttaaatctttgaccaggtaactgt

SEQ ID NO: 229654 - DNA, 595 bp, Homo sapiens
cttttacggagttagttaaagcactttacacctattaccatatttaatcctcatctatgcaatatgaactattattatcattaccattttatagatgaggaagttaaatctttgaccaggtaactgttgctcctcttcaaaacccacacacataagattattacactgtttaaaacagacagaattggggagaaaaagataaaatgttggtatcaagaagaaaaaaaaactgtaagaagttttatggtatttcagctaaactcatcttccctcaaattaaatagcacaactgagagccttctagcctcttcagcgtcaaacacatgtttgccagagcatctattgttcggttctggagtttctgcaggaattttacatagtttattgtattaaatttagctctcaaagaacttataatttaaccagacaattttagacataatattctaacatgaagtgccacccccaactacttgctaccaggttcctttgactataacctctctttcagaatttctcttgctttttactcttaawatactaccagaacatgaccccagggtctatgcattacctcagggttttttcagtctca

SEQ ID NO: 229655 - DNA, 467 bp, Homo sapiens
aaaatgataatgtagggagagagagtttgctttatctagggatataccagaggaatattttaacaaataaaaatttccattataaactaaaaattaagctcttcactgcacatacaaaaataaaaggtataattcctgtgttcttgggtgttaaaatgcctgaaaccagattccaactgagcatcctgagtcaccagtctggaatagattcctgtcctgmacatagaatatggctcacttaatgccagactttcgctgttactggtgtgttgaagtgcttaagctgtaacatgcgtcaaatttaattcaaatgtttactgccgtttgctaagtttctgatcctggacaacttaattttctgcctgttcattgttttcactgacaaaattcagataataatatatttcctatagcaccattgttcttactgaacatatataaagagttcagcaaagatagagaagata

SEQ ID NO: 229656 - DNA, 467 bp, Homo sapiens
aaaatgataatgtagggagagagagtttgctttatctagggatataccagaggaatattttaacaaataaaaatttccattataaactaaaaattaagctcttcactgcacatacaaaaataaaaggtataattcctgtgttcttgggtgttaaaatgcctgaaaccagattccaactgagcatcctgagtcaccagtctggaatagattcctgtcctgcacatagaatatggctcacttaatgccagactttcgctgttactggtgtgttgaagtgcttaagctgtaacatgcgtcaaatttaattcaaatgtttactgccrtttgctaagtttctgatcctggacaacttaattttctgcctgttcattgttttcactgacaaaattcagataataatatatttcctatagcaccattgttcttactgaacatatataaagagttcagcaaagatagagaagata

SEQ ID NO: 229657 - DNA, 454 bp, Homo sapiens
tcctatagcaccattgttcttactgaacatatataaagagttcagcaaagatagagaagatactcaacaaatatgagttctctttctaatgctaatgtctcgccctggttttctgtgtcccttcaattcctgtggcttcctggttccagatgtatctcagtcttttgacaaccctactggctttatcccttggtgataaaaagagcaagatcttattaactggttcattacrggtttttctgcactaacgtatgttacataaagcaacagagattaacatgtgtctaaaatataacaatggcaaaaacgttttaattgcttactatgcgttcaggccctatactaagagcttttacatgtattttctcattttatctttataattgttttaagaggtagattctatttctttttccagtttttaaatacagaaaaaataagactcaaagagctt

SEQ ID NO: 229658 - DNA, 402 bp, Homo sapiens
atcactcagtctggcttagtgaaacaatagggcaaaagaagcaatcagatatgcatttgtctcgtgtgcagagagatcactttgagttctgtctgtccttcacccacaaggaatttccttgtgggcaaattgtgagggaggtatgtagcagttttatctttgtagctatcttatttaggaatggaatgagaggcaggtttgcccaatgaagttcccagcttaacttttccctttggcttggtgattttkcagtcccaaggtttactctcctttcacaatccaaaaaaactaaaaccagcatctcaaaaagtttctacactcccattttcattgaagcatcattcacattaaccttaaatgtccttaaatgtccattgatagataaatggacaaagaaaatgt

SEQ ID NO: 229659 - DNA, 557 bp, Homo sapiens
tttgatcatgaacaaattactcaaactctctgtgtcagttctgtaaaatgaaatccatagtagtaccaaactcatgatattttactgmggattatgatacaataaatgaatgtatgatgcctataatagtgcctgaactacatagtaagtcaatatatggcattgttattattactaacattattattaactcaataatttttattgttcagccattctaatgatggtattgtaaccatatggatttctctaccttaacatgtacagaaattattacatcaattttcacctgtatcataatatttagatattcattatgatacgccaatgtaaaaattgtcacataaccaatatatttgtgtgtatctaattgtgcaaataaaaaaagatactttgccttatatgcgtatccaaaacatactgtacttatattttattgaacaataacaattatgtcttatctagttgtttaacgtgtttctatgactatataataaaagaagagtagttctaatatgtcacagtttgatttaaaggcacaatgacctttcatgttt

SEQ ID NO: 229660 - DNA, 607 bp, Homo sapiens
tgcataaaatcttttttttttcctgaatattttatttggtggctggctgagtccaaggatatgaaacccacgcatagggagggctgactgtattctgtarctgagtcagagggtgcaaaagtcatgaaacttgctcttgtacatttcttacgatgttaaattttcatatggaactctgtatccctctccctttaagacctgatatctattatgtttgcatcttagtaaataataaggtagaaaaaaaattgtaatgtcttgttaaccaaatattttccaaaattgttttattaccaaaactgtttttccccacataatattgactaattttcttgaatcagtgataatccaggtaacagagtttcagtgacgccaacatgtaacctgagttcaaacataatagccaagataactagtttttgtctgcccagaaacagctttccactctctttttttttcatccttttggagaatttttcttttttttttcatgtatcagtggcctgtcttctgtcagaaaataaaagtgggcaaaaaactccccaaatcaggccaaagcacttttttccacaggatatttttaatagaaccaatttttctcctccat

SEQ ID NO: 229661 - DNA, 415 bp, Homo sapiens
ttttatttgtggttagcaccttattttggtcttatttagacttttctgctactaagattctttctctcaaaactgtcaatgtcttctttggtaatattttaaaaccaaagtggatttaactttatttagggcataaggaacaagtcaaactttaaaatacattttctaactttttaacttacccatttcacgtatgtatcacttcttgggctctcaagtctcctgcttagatcaaatgatttatttcttcatattctacatgattttcattgctgttacatygtaaaaaaattcttgtatatggtagggcaatttccttctactacttctttttaagagttgtgacacaattcattccaaatgtattttaaaattaatttgtcatgctctataaattatcttgttggtttgtatt

SEQ ID NO: 229662 - DNA, 579 bp, Homo sapiens
tctaatttttggcccatctgaaattttgtaaataaaaaccggcacttttaaagtctattgtttgctcattaacaacactgatttataagtttacaaaaggttttagctactagacaagcagaatatatggttctttgtgagtatttttctctttttggcaattcctaagtacatgtttgggtcaaatatacctaaaaccaaaataaatatcaatggcaatgttaagggagtcaaaattaaagagagataattttttaaaattttgtacctatttgaagttcaatattcaggttcgatttctagtttacatactacaaacttaacacagaattttgtttcagcaaagctgagttttgaatgagctctagttttattcccgtaatgcaatagcctggaatgagccttcctctcccatgtatatttgtccagtgcaatttttgctttgaccytttccctggaccaaatctgccatatagatatatttagtttggcttatatagtatttttgaaattagaaatgtcatttaaaaaaatagaatatacgattttcttgaaaattgtgaaagtcctagcaataat

SEQ ID NO: 229663 - DNA, 579 bp, Homo sapiens
tctaatttttggcccatctgaaattttgtaaataaaaaccggcacttttaaagtctattgtttgctcattaacaacactgatttataagtttacaaaaggttttagctactagacaagcagaatatatggttctttgtgagtatttttctctttttggcaattcctaagtacatgtttgggtcaaatatacctaaaaccaaaataaatatcaatggcaatgttaagggagtcaaaattaaagagagataattttttaaaattttgtacctatttgaagttcaatattcaggttcgatttctagtttacatactacaaacttaacacagaattttgtttcagcaaagctgagttttgaatgagctctagttttattcccgtaatgcaatagcctggaatgagccttcctctcccatgtatatttgtccagtgcaatttttgctttgaccttttccctggaccaaatctgccatatagatatatttagtttggctyatatagtatttttgaaattagaaatgtcatttaaaaaaatagaatatacgattttcttgaaaattgtgaaagtcctagcaataat

SEQ ID NO: 229664 - DNA, 433 bp, Homo sapiens
gaattcatttaggagagatttttgtttttaaaaaaaggaaacagtatttttgtttctggtaacaattgtattttaaatgatcaaataaattggcatataaattggctacacatatctaaattctgtgaatgtgtgtaacagattagcatgctataaatttttgccttctcggcacacttaaaaagttatgttccttgtgcctattcacttaatctgattaattatattatttaagttatttatatcttttttgacatttattttttttctatgaaaggctgtaaagyacgttcagtgttatcactctaattttacttatgttcaattattttccttgttctaatcacttttctccaagtattttgctacaatacttggcgtgtacatttataaactatcatatactcattataatttatctcttatttatgat

SEQ ID NO: 229665 - DNA, 596 bp, Homo sapiens
catgccagtcgtgtcaccctctttttaagtaacatcttcactgttctttcatgtgcaatatgatctggttacccagagtgtctctccatttctctcaatgtcatcttctcrcacttctttgtttttgaatttttgcgtggagagccaacttcaatctctttttcttggtgaaatgccatgagacgtttaagaacaatttagtgtttctccctctctgaagacttctctagggctaaagaatatgttagtcacctagtttatgtgtaccattagtgttttataccaatttgtataatagcgtaatagcatctctcaaaacccttctgataatttctcacatgcttattagccccaatgcacggagaagatggagactatatcttgttcaattctacattctcagttcctagcccattacaaacagacaatctgtgagtgtcagatgcacaataaattggcttaataaagagctaacagtagaaagggtgaaaatttaagaatgaaaacagatgagtaagactaataaaaagactgagtgccaaaatacctcaaagggaatcatgatttaaaaacataaaaatgtgtcattagttgat

SEQ ID NO: 229666 - DNA, 596 bp, Homo sapiens
catgccagtcgtgtcaccctctttttaagtaacatcttcactgttctttcatgtgcaatatgatctggttacccagagtgtctctccatttctctcaatgtcatcttctcacacttctttgtttttgaatttttgcrtggagagccaacttcaatctctttttcttggtgaaatgccatgagacgtttaagaacaatttagtgtttctccctctctgaagacttctctagggctaaagaatatgttagtcacctagtttatgtgtaccattagtgttttataccaatttgtataatagcgtaatagcatctctcaaaacccttctgataatttctcacatgcttattagccccaatgcacggagaagatggagactatatcttgttcaattctacattctcagttcctagcccattacaaacagacaatctgtgagtgtcagatgcacaataaattggcttaataaagagctaacagtagaaagggtgaaaatttaagaatgaaaacagatgagtaagactaataaaaagactgagtgccaaaatacctcaaagggaatcatgatttaaaaacataaaaatgtgtcattagttgat

SEQ ID NO: 229667 - DNA, 511 bp, Homo sapiens
aaaacattcatttgtgcattgattcttgcaagaaatactggamaactattaagggacttctgctctactaagtgctggatttagcattagacatacagatttctactatgtgctaagtagtttattaggctctgtagataacataaaaattggatttaaaccatttttaaatatgtagaaataacaatgtcttaaaaattctggttttaaaaaatgaaaacaaatatatttaaataattggaaaatctaagaatgcacataggaaaagtatcttcagaatgacataataaagaccaccagaaatctccataaaaacaatgagaagacttgcaaacactgtcaaaatcaaccttttcatgactttgaaaattaataaaagtcttgcaacaatctgagaagcatttattcactaaaatgactacatctgcttaagaaaagcaaactttgtggcattataatttgcccttatatcagtccaaacttcctagctctgtggtaatcttgtaaacca

SEQ ID NO: 229668 - DNA, 317 bp, Homo sapiens
agacagaaataacattttaagtaatatgaaaaatatttatctacattgaaaaagcycaacaactctaggaagaaaaaactcagagatccacaccatggaaagacaaagagaaaatcttgaaagcactaagagagaggtgacaattcacatacatatgaccctcaataacgttaacagatgatcagatgatttatcattagaagccatggagatcagaaggaagtagaattacatatttaaagtgctgaaagaaaaataataccaaccaagaattttatgtctagcaaaatcatccttcaaaaatgaaagagaaatta

SEQ ID NO: 229669 - DNA, 600 bp, Homo sapiens
ttggaatacttctccttcgattaccatacttagattacatcttaaaatcctatcaaatcttcagtgatccaattcaagtcatattttattggtatggttaggcttggtgtccccacccaaatctcatcttgaattgtaatccccataatcctcatgtgtctagggagagaccaggtggaggtacttgaatcatgagggtggtttcttctatgctgttctcacaatagtgagtgagttctcacaagatctgatgattttgtaatgggctcttcctccttctctctgcacttctccttcctgctgccttgtgaagaaggtaccttgcttmcctttcaccttctgccatgattgtaagtttcctgaggcctccccagccatgctgaacttgagtcaattaaacctcattcctttacaaattatccagtctcaggcagttcattatagcagtataaaaacagactaatacagtaaattggtaccaaggtagtggggcagtgctctaaagatgcctgaagatgtgaaagcaactttggaactgggtaatggacagcggttggaacagtgtggagggctcagaagaagataggaagatgtgggaat

SEQ ID NO: 229670 - DNA, 630 bp, Homo sapiens
tagtgccactccccccctttttaattattgatgtcaaaaattacacttttaaatattatataccgattaacatagttttataccaggttttttaatttaatgtatatgcaccataattacagtaatccaagctactctagttgttcatgtatttacgtttactgaagaaccttatawttccatttatgttatacatttgtttcaacctggaagacttccttcagcatttcttgtacagaaggcttagtggtaatgaacttcctcaacttttgtttatctaggaaagtcttaatttctccttcatttttaaagaaaaattttcccaaatatagtgtcctggttgacggctcttcttttaggattttgcacatataattccactcttctggcctgcaagatttctgctgagaatagtcttatgaaacgttccttgtatgaaataacttgctttattctttcttctttcaagattctttgtctttgacttcagtcagttttgttaatatatcagtgtgattttttttagctttttcctagttcttttttgagcttcttgaatttgcatatctgtttctttcatcagatttgagaagtttggggtcattatttcctcaaataagctctcttctc

SEQ ID NO: 229671 - DNA, 630 bp, Homo sapiens
tagtgccactccccccctttttaattattgatgtcaaaaattacacttttaaatattatataccgattaacatagttttataccaggttttttaatttaatgtatatgcaccataattacagtaatccaagctactctagttgttcatgtatttacgtttactgaagaaccttatatttccatttatgttatacatttgtttcaacctggaagacttccttcagcatttcttgtacagaaggcttagtggtaatgaacttcctcaacttttgtttatctaggaaagtcttaatttctccttcatttttaaagaaaaattttcccaaatatagtgtcctggttgacggctcttcttttaggattttgcacatataattccactcttctggcctgcaagatttctgctgagaatagtcttatgaaacgttccttgtatgaaataacttgctttattcttkcttctttcaagattctttgtctttgacttcagtcagttttgttaatatatcagtgtgattttttttagctttttcctagttcttttttgagcttcttgaatttgcatatctgtttctttcatcagatttgagaagtttggggtcattatttcctcaaataagctctcttctc

SEQ ID NO: 229672 - DNA, 440 bp, Homo sapiens
tggcttcacagccaaattcaaagaagagatggtaacaattctagtgaaactatttcccaaaaataaataaataaataaataagaggagggactcctccctaattcattctgtgaagccaacatcaccctaataccaaaacctggcaaagacaatgaaaaacacaaacaacaggccaatatccctgaacaacataggtgcaaaaatcctctagaaaatactagcaaaccgaattcaacagtacatcarcaagttaattcagcatgatcaagtaggctttgctcctgggatgtaaatttggttcaacatacagaaattaataaatgttattcatcacataaatagaattaaaagcaaaaccacataatagcctcaatagacatggaaaaaattttcaattaaatccaccatcccttcatgctaaaaactctcaagaaactag

SEQ ID NO: 229673 - DNA, 440 bp, Homo sapiens
tggcttcacagccaaattcaaagaagagatggtaacaattctagtgaaactatttcccaaaaataaataaataaataaataagaggagggactcctccctaattcattctgtgaagccaacatcaccctaataccaaaacctggcaaagacaatgaaaaacacaaacaacaggccaatatccctgaacaacataggtgcaaaaatcctctagaaaatactagcaaaccgaattcaacagtacatcaacaagttaattcagcatgatcaagtaggctttgctcctgggatgtaaatttggttcaacatacagaaattaataaatgttattcatcacataaatagaattaaaagcaaaaccacataatagcctcratagacatggaaaaaattttcaattaaatccaccatcccttcatgctaaaaactctcaagaaactag

SEQ ID NO: 229674 - DNA, 580 bp, Homo sapiens
cttaattatcagttatggtaaatggtatgaagagaagaaggaacaaccgatgatttctctctgcagaaggtagattgaggcatgtgaggaaataaaaataagacagagacattctctttaaattgactagtatacatctattagaaaatgtccattgccagttagatatataagtttgcaatttgcaaggaatgcgattgctgggggtttatatgtgataagagaaagccaagaaatgaaggtcatggtgttgggagagagtgtagagagagaaaaagttttaaacatgattctgaggacctttcgcttttaaagggaggggagagaaaagccgcaaaggaaacatccacagccacaaaggaatggctgtacattagaaggcaacagcagagaaagataatgaaagtgtatttaggaagataaatgcttcagcccaggagttcaaggctgcagtgagccatgatcacaatactgyactcgagcctgggagacagagggagagtgaccccatctcaaaataacaaacaaacaaaaggaaataaatgtgccgagaagaggattcagtcgatttgcccaaggt

SEQ ID NO: 229675 - DNA, 551 bp, Homo sapiens
ctgtctcttaccccttaaggttctgacaatgactctgtcctttgccaaactttagtcagtctcctccaaactctctygttgactggctcgtgcctttgggtccattcttaggtctgccaagtccagttgtagcaggaatcttactaagttagttttatgagaatgcttccacgcttgatagctgatttacccttgatatatgatcaaattgttcatcccacacactcaatatgtaattaccctggcttgcctttagaaagaattatgttcagcttaggaaggatccccctgcctttgatgtctccttttactgattttctatctgacccctcattctgcttgttgggtataaaccccaggctctctttgctgatttttgagctgagcaccaattggtctctctcccctattgatatggtttgggtcagcatccccttccaaatctcacatggaattgtaatctccagtgttggaggcggggcctggtgggaggtgattggatcatagggcggttcctcacggtttaacaccatccccctggtggtgtcatg

SEQ ID NO: 229676 - DNA, 569 bp, Homo sapiens
gggtttttttagtaattgtatttaaatttatttcagtgttttattgttttatgttgtttttgtctaacttaaatgtgagaaaaaaagcagagttctggatagaaggcagataacctttgttctcatccaacctgaagcacttatttgctaaataattccagtcaaaaacagaagaaacgtggtattttagttttatcttgaggaaaggtcctgcttctcttactctatctaaaagcctagaaataaaatgataattattctatgactcatatacttgctttttatgtyattggcttattatgagactcaaatcaggtaaggtatataaaactgctttgagaatggtaagaagctgtacaaataaaagttctaagatatggcttataaattcttttcaaccctccgtttttcctttcactcctacaaaagtttgcttttgaaatgattaaaatttttaaaaaattaaaatattttattctaagcctggctatactgttttaatttgtaggattttaatcgtttaccattgtatttgtagcagctagactgataggagatttgtgttgttg

SEQ ID NO: 229677 - DNA, 569 bp, Homo sapiens
gggtttttttagtaattgtatttaaatttatttcagtgttttattgttttatgttgtttttgtctaacttaaatgtgagaaaaaaagcagagttctggatagaaggcagataacctttgttctcatccaacctgaagcacttatttgctaaataattccagtcaaaaacagaagaaacgtggtattttagttttatcttgaggaaaggtcctgcttctcttactctatctaaaagcctagaaataaaatgataattattctatgactcatatacttgctttttatgttattggcttattatgagactcaaatcaggtaaggtatataaaactgctttgagaatggtaagaagctgtacaaataaaagttctaagatatggcttataaattcttttcaaccctccgtttttcctttcactcctacaaaagtttgcttttgaaatgattaaaatttttaaaaaattaaaatattttmttctaagcctggctatactgttttaatttgtaggattttaatcgtttaccattgtatttgtagcagctagactgataggagatttgtgttgttg

SEQ ID NO: 229678 - DNA, 605 bp, Homo sapiens
gtgctccacaaatttgcaccaaaccatttttcctcttgcatctcccaggtacctgtgccctaaccaaagcagactgttctaaaaatctaacacacatttacatcgtcatgccattttgtgtatttttccatgtttctctttttactgaagaactgcccatcccataatgcccagtgaagattacatttctttgatgaaatcttccctgatcctcttaaataaaattgtttttttcctatgtgtcccraaagcattgtatgtgattcaatcatataaagcatttgtttctgtaaaacatcattgtgcacctgccgtgtttaaagggcagaatttattcttcagcttattcgtggttgtgagggagaaaaaagagatcctcctctaagtattgtttgaagatagagtgcatgtcttctctgtatatttttatcttcacagtatctagtacaaaaccttgcacatataacacatttgttgaatatctgtcatagcaattatcatttgttctgtttcatatacaaagtacttccaaggagtcagcttttaaggtgtaaacacacacacacacagacacacacgcacacacacacacacaatgctgcagt

SEQ ID NO: 229679 - DNA, 633 bp, Homo sapiens
tagaaataattaaaattccaattcctggaaattgatgtcctctttactatatggttttttcatagtcgtttatggatgagtaaagcacattcttatttttttctctagcaccattctagatcttggagctatgtttttgcacctcgtgatattgacttattttctctttaaagcaaaagtttgcactaagaaagcctcctttaacccaacagcttgctctaaacttatctttagctgatccagcaattgctgaataagttacaacagcaaggtctccacaaatctctattcagtaggaagtcacactcttggattaaattaaaatgaaggaaaaaactgcttgaatgtaccttatagaagaaagatattgagaaaaggtcctttggtacagagtcagaaaagatttcctacttgtagggattatgaacccaaaacagacctctaagaaggaggcattttggatgaataagaatggtcccatgacaataatctcraagcccattgtgatgttcttagactaacgaggtcaggaagctcagaaggtaaggaacttatttacgtctgtagcttatttgcatgttacttgaagtatttgcttgttttgtgtcatttttaagagtagacacaacttat

SEQ ID NO: 229680 - DNA, 368 bp, Homo sapiens
tatgctaagttgactctgcctgtgctctatcaatggaacaacaatgtgtctggatgacagcacatctgtttacagcatcatttactgagtattttaagcccactgttgagagctgctcagaaaaaaagatttcttttaaaatactactgctcattgataatgtacctgatcacccaagagctccgatggagatgtactaggagatgaatgttgttttcctggctgccaacacaacaccsttgctgtagcccatggatcaatgtttaattttgactttcaagtgttgctatttaagaactacattttataaggctatagatgccatagatagtgacttctctggtggatctgggttgcataaatagaaa

SEQ ID NO: 229681 - DNA, 655 bp, Homo sapiens
tcatgctgttaggaggtgggactgtgatcgggttcccccaagtagaccagggtctgcggggtttggaattctcacaagtatgaggggacagaagttgggtgtagcccagctctcttgttggtctcacagctggtagggtaggggaataggtgggatgggaccagagagcctgtcagaagtaaaaatcaaatatgagatctttctccttattacaaaaagactctcctgaggattccacctgtttgcttctggctttgttcttcacttgtggacagaatgttgtctatagagatgaggctatagaaamacaaggataggcatcagcccgcttctttatgtcctggccaatgaccactatatgaccaacattcaaagggcaaagaataagcttctcacagattgaagaagacaggatatacaatgttaatggattggaggtttcaatattgttaagatgttgatttctcaaaaaatctcaataaaattgtaacagatttttctatggaaattaacaagaaaattctgaaatttacactggagtacaaaagacctaggctagacaagttttaaagaaaagaacaaatccagaagagtaatactaagctagtctgtctgggacaaagataaaaaataagtggatcagtagaagagcata

SEQ ID NO: 229682 - DNA, 580 bp, Homo sapiens
tccagtgatgaatgctaaatgttattctgccctctactggttcaaactggactctcccatttagatgcattccaggaaaacagcttcaaggtagaatctttttttttcttttttttttttttaagacaggatcttgctgtgttgcccaggctggagtggagtggcacaatcacagctcactgcagcctcagcctccccaggctcagatgatcttcccatcttagcctctcaagtagctgggactacaggtgtacaccatgccttttctattttttgtagagaaggaatttggccatgttgcccaagcttatctcaaactcctaggctcaagggatcctcctgccttggcctcccaaagtactgggattacaggcatgagccaccacacccagctaaaggtagaatcttaatgaacatttccctttataagcaaaacaagtaaaacaccaggagaacagagcatgtgaccmcacccaccctggccactggcactcaggctgtcaacagctgccagagcttctgacccagtgttcctaattctgtgggaacttaaacagtgggtgcagcctcctgttttccc

SEQ ID NO: 229683 - DNA, 540 bp, Homo sapiens
tcccaaactcattttatgaagccagcattaccttgatacctaagccagagatggacattacaagaaaaaaaaaaattacagccaatattcctgatgaacacagatgcaaaatcatccacaaagtagttgcaaatgaaattcaaaagcactataaaaggatcatttattatgatcaagcttgatttattcctgggatgcaagaatattttaatatgttggaatcaataaatgccatactccttatttacacaataaaagattaaaaatcataactatttttatgcatgcctaaaattattttgacaaaatttaaaatccatctctaatacaatttataacaaattaggtakataaagaatatacctcagaataaagagacacattccttattagctataagataagccattagctaacactatagtcagtggtgaaatgttggaatcttttttctgagatttattataagataaggatgcccactctcactacttctttcaacacagtactggaaatcctactcagaatattagacaagaa

SEQ ID NO: 229684 - DNA, 593 bp, Homo sapiens
ggtgatattgatttagagctagaaaacctaaaacgaaacctaaaagaaattctggagctgaaaactataataatgaaaattttaaaaaaaggatatagagggcttcaagggaagatttgattaggtagaagaatcagcaaacttgaaataggacaaaaaatatcactgagtctttaaattagaaagggaaaagactgaagtgaacagaacctaatgtatctgtggagcaccatgaagtggaccaatatacacactgtagaataaaagaagaaggaagaaaaaagatgaaaaaatatttaatgaaatagagtctaaaatgtttccaaatttggtaaaagacatgaatataaacatcaaataagttcaatgaactttaagtaagttgaacaaagraactcgcatcaagacaggttgtcaacaaaatttcaaaagccagaaacaaagagaaaatcttaaaaggagcaacagaaaagcaacttgccacatataagagatcctccataagattatgtgcaaatttcttatcaaaaactatagatgccagaagctagtgggttaatatattcagagtgctaaaagaaagcaattgccaa

SEQ ID NO: 229685 - DNA, 543 bp, Homo sapiens
ctgattatagcaattagaattttagaaatatgaattaagacatggataaaaccaaagagaaaaaatrgtatagtagaagataaatttgtggaaattactcagaatgaaacacataaagataaagataaatatatgaaaacaaagaaattaagatacctgaagaatagaatgagtaacaccagccaaggtaaaaagttccagaagctgagactgtagatattggaggaagggctgtatccacacccagcccaggaagcccaacaatgttatggtgaacatcgggtaagggcttgagtgcttgaggcttcctggttaagggcatggatttagtggttgccttggtatcagataaaatcccaactcagacatttactaaaagagccagtgggcatctgtaaattgtgtgtcctttctaaggctgagtctccctatattcctaacgagcatcggaagagttactaatttatgacattatcatgggactcagataatagaagggtgttactttagcattgtgcctagcatgtaaagcactcatataat

SEQ ID NO: 229686 - DNA, 525 bp, Homo sapiens
tagaaatatgaattaagacatggataaaaccaaagagaaaaaatagtatagtagaagataaatttgtggaaattactcagaatgaaacacataaagataaagataaatatatgaaaacaaagaaattaagatacctgaagaatagaatgagtaacaccagccaaggtaaaaagttccagaagctgagactgtagatattggaggaagggctgtatccacacccagcccaggaagcccaacamtgttatggtgaacatcgggtaagggcttgagtgcttgaggcttcctggttaagggcatggatttagtggttgccttggtatcagataaaatcccaactcagacatttactaaaagagccagtgggcatctgtaaattgtgtgtcctttctaaggctgagtctccctatattcctaacgagcatcggaagagttactaatttatgacattatcatgggactcagataatagaagggtgttactttagcattgtgcctagcatgtaaagcactcatataatgtca

SEQ ID NO: 229687 - DNA, 521 bp, Homo sapiens
gcaattagaattttagaaatatgaattaagacatggataaaaccaaagagaaaaaatagtatagtagaagataaatttgtggaaattactcagaatgaaacacataaagataaagataaatatatgaaaacaaagaaattaagatacctgaagaatagaatgagtaacaccagccaaggtaaaaagttccagaagctgagactgtagatattggaggaagggctgtatccacacccagcccaggaagcccaacaatgttatggtgaacatcgggtaagggcttgagtgcttgaggcttcctggttaagggcatggatttagtggttgccttggtatcagataaaatcccaactcagacatttactaaaagagccagtgggcatctgtaaattgtgtgtcctttctaaggctgagtctccctatattcctaacgagcatcggaagagttactaatttatgacattatcatgggactcagataatagaagggtrttactttagcattgtgcctagcatgtaaa

SEQ ID NO: 229688 - DNA, 511 bp, Homo sapiens
tcaaactatactataaggccatagtcaccaaaacagcatggtactgttaaaataggcacacagaccaatgggacagaatacagaacccagaaataaacccaaatacttacagccaactgatctttgacaaagcaaacaaaaacataaattgggaaaggacaccctattcaacaaatggtgctgggataattggcaagccacatgtaggagaatgaaactggatcctcatctctcaccttatgcaaaaatcaactcaagattcatcaaggacttmaatctaagacctaaaactataaaaattctacaagctaacattggaaaaacccttctaagcgttggcttaggcaaggatttcatgaccaagaacccaaaagcaaatgccataagaacaaagataaatagtaataggaatattttaaattaactccattatatagcccatctatagaattggcatgtgtatcttaggaaagatatactctctcacatgtgtgtcctgggaaatgtgtag

SEQ ID NO: 229689 - DNA, 457 bp, Homo sapiens
gtttatacctattaatcaacctctctttatcctccaattcyaaccaccaacccatcccagtccctactatttaccattctattctctatgagatcaatttgtttagctcccacatatgagtaagaacatgcagtatttgtctttctgtgactagattatttcaacttaatgacctccagctccatccagatccccagaacagcagcatcaacatcacctgggaacttggtttaggaatgctaattttggatcccattccccagtgagggaattagtgagacccccagcctttatgatgtactctgaagtttgagaagcactgtagtatctcatacttagatagaaggaagcaaactggtcttttttgggctgccattgggaatcagttaccatagtgggcacttcaattaaattacctattaatagttctaacagcatataaatctgtgtcattagc

SEQ ID NO: 229690 - DNA, 457 bp, Homo sapiens
gtttatacctattaatcaacctctctttatcctccaattctaaccaccaacccatcccagtccctactatttaccattctattctctatgagatcaatttgtttagctcccacatatgagtaagaacatgcagtatttgtctttctgtgactagattatttcaacttaatgacctccagctccatccagatccccagaacagcagcatcaacatcacctgggaacttggtttagraatgctaattttggatcccattccccagtgagggaattagtgagacccccagcctttatgatgtactctgaagtttgagaagcactgtagtatctcatacttagatagaaggaagcaaactggtcttttttgggctgccattgggaatcagttaccatagtgggcacttcaattaaattacctattaatagttctaacagcatataaatctgtgtcattagc

SEQ ID NO: 229691 - DNA, 377 bp, Homo sapiens
ttactgttatgttttgttggtctcttgctcttcttcagacacacaagtaaagtacacatacaatcatatttccaaacttataaatgggatgtttttgtaaagataatttttaaatttgtggtttggaacactgtatctattttccttatacaagaagcgctccagtggcccctaccactaatgagcaatacacaggcacaaaagggaaagccaggaggtaacacaattctttcaacgcgttgtttcttctactttccattccccaaaaatgacctttcgtgagtagaaattacatggctattttttccataatgaaagtaaakacaattagatttatgtatattttacagaaaaacaatacaacccaacaacttaga

SEQ ID NO: 229692 - DNA, 377 bp, Homo sapiens
ttactgttatgttttgttggtctcttgctcttcttcagacacacaagtaaagtacacatacaatcatatttccaaacttataaatgggatgtttttgtaaagataatttttaaatttgtggtttggaacactgtatctattttccttatacaagaagcgctccagtggcccctaccactaatgagcaatacacaggcacaaaagggaaagccaggaggtaacacaattctttcaacgcgttgtttcttctactttccattccccaaaaatgacctttcgtgagtagaaattacatggctattttttccataatgaaagtaaagacaattagatttatgtatattttacagaaaaacaawacaacccaacaacttaga

SEQ ID NO: 229693 - DNA, 580 bp, Homo sapiens
tgagatggacatggtggttctgtttgttactctatcactttagggaacctatccccctgagactcagtgctttatccacagaatgctgattcattattttgagtgtgagagataacgtccatcaatggaagaaaagtagtatcctttcagcaaattgtctgggtttcattgccattgtaaaccaaaaacaaaattatagctcccgcaattgacttgtatgtaccctcctctcagccaaggcattccaaattaaacttgaaaaactagttcaggccatgatggaaggggggaagggtgtccagacatacctaaatgtagcctcctacctttggaattcaggcacaattgatcagcattaacattaaamcagagatcttaagaatgacaaagcagactctttgtaccaataagataccgaactccaacctaactctaacatagcattgcatagcagatagcaagccctggaagaaattgaagtattttatcccaaaataaaattttttgacatattttgaaatgcactgcaaagctctctctcgggagaaaaaaatctacatgctatagagaaaccccttcc

SEQ ID NO: 229694 - DNA, 545 bp, Homo sapiens
ttcacttgctgcattattttataactacatatttttgtatgtatctctctgcttaaggacagggaatcttatttgtgtttccattcccggcccgtacctcagtgcttggctaaagattagcacacaaacaatgtggactcaaaaatgggtatgcttactggcaggtcaggctcctctatgactcttcaagttgtaagattcyttctttaaaaacatttaaaatagaatttgcatattaaaggacaggaattaattattaattatttgcctaagaaacagcatttggatggcatgaatctaatggaatcagtaatatccatgcatctgttgaaaaccaatcaacccgtttaagatttcaaattacgatctgaaatgtgaaaatgattggtagattatcaaactcactgggctggacagagcaatatgtcagcacctttgcccacgtccacagcctgaaagcttttgaaggtaagcagcgccgtcatcattttggcattctattttagtctaagcctacatcagaagcctgccagggctcagtgctg

SEQ ID NO: 229695 - DNA, 474 bp, Homo sapiens
ctgtctaaattggactgatgtcactcttgctatcgattttgtagccaataacaattatttcagaaaaagtacgcagtcatcctcatcattccttacaaacctttgtgttcctttacctccctgaatgtgcagagcttactacagtgtgcatattccatttgaaatgctctacttccaaataaacatctttttcttttggaaatcctctctcyctttttatttaggttgccattcaaaatatagattcagtgaaatttttgtttggttctcagagccaggacttaattaggaatcaagctgcctagcctgttgaaatctcagaatgctcacttgtaaaacatcgataataatagggtctactttcaactgtttgaggactaaatgcatgtaaagtgtgtgattcagtgactgacactcatagtaaaggctgaataggtcatagttgctttagtcttgtgatgacatgccatagga

SEQ ID NO: 229696 - DNA, 616 bp, Homo sapiens
gcagaggccgcttagctgaaaaataggcaagtttttgaaggaaagacatttttttagaaaactgcccttgttacatgtactcttagataatgatcatcttaattttccctgtgtttcctataataatttcattttttctccttgactaattcatttatagaaatgtagtgatgacacactacttcaactgtattaattatcygacacacttatttataaatccatctgcctttttcccccataatcgtttatgcccacctttaggttacacccaaggttctgaggattagcagttatgcgtaacagtggatatgaaactgatccagtagtcccatagtttttttataaacataaaaattgactcatatgatcttaaaatttgaaacttaacatttgttttatctaaatttcttcctcagaaaaccaaccttcaggcctcttttaaaaaaagtgtcaaataactgaaactcacgagatcaccacatcagatgccgacccttcaatcgtcatgattgcttccttgcccttcaatagttcctgttttcttacacattgtcacatttcttccctgctatatgagcccctagttttagtccatcagggagatggatttgag

SEQ ID NO: 229697 - DNA, 604 bp, Homo sapiens
gagaattggcagttctaccggacaattagcactttgaaatattataccaccacatatgtaayaggttagcacagtgcctggacccagagagcactctgcaaatgttagtgcttcctttcctgtgggcatgggagtaagcaagatctacttaccctcctaccactgacacacaggaaaaggaaagtaggaaagttggtgtttggtgtcctaaaaaggaatagatacaaaagtaaaaatatatattaaaaaaagatgttactggacccttattttaaaacttacttttagatgtatagatcattaagcaaaacctgaaaaaatcagagagaaaaataaacaacaagaaatgaaatattaatattgaaatgcctgagggcaatcgcctttatctctggttggtaaaacaacccccaatgtaaaagctcacagtccacggcattacagaaaaaccaaagacctaaaagtggactgtctctattaataattagtgatggttttaagttttttttcctagcacttcagtacaacccaaaatgttatcacctagaagaaagaagcaatagcaggcctgttatttatacaatctgtgaaaataagcactaac

SEQ ID NO: 229698 - DNA, 499 bp, Homo sapiens
ccaacactcatctgcatttagaaaagaatatcatccctgtttgattcgttcttgtggaatgagctcataatctggattcagtttttttttcaacctttgcacccatttttaaggtwattttcatgacaccctctttacgtagccattttaggaattaccatctctattgtaaggaccaaaaaggagagtgttagcaacaagatcatctgactggccacctaatgccaaaggactatgtggaggattaaaactggtggcaaaacttattttgagtccatgtgtataaaaacatggtagctctttcttaggtagtcaactaaaatttccatacatcctctccatgatatttcctcaaagaaatgctctgatatgcaggaattttttgctactgaatctgtgctgtcttccttagtcttctgtaccccaaaatctctaaataagttactttaaagaaaagaaaaaactcaaaaaacagacatttcacattatatatttatac

SEQ ID NO: 229699 - DNA, 499 bp, Homo sapiens
ccaacactcatctgcatttagaaaagaatatcatccctgtttgattcgttcttgtggaatgagctcataatctggattcagtttttttttcaacctttgcacccatttttaaggtaattttcatgacaccctctttacgtagccattttaggaattaccrtctctattgtaaggaccaaaaaggagagtgttagcaacaagatcatctgactggccacctaatgccaaaggactatgtggaggattaaaactggtggcaaaacttattttgagtccatgtgtataaaaacatggtagctctttcttaggtagtcaactaaaatttccatacatcctctccatgatatttcctcaaagaaatgctctgatatgcaggaattttttgctactgaatctgtgctgtcttccttagtcttctgtaccccaaaatctctaaataagttactttaaagaaaagaaaaaactcaaaaaacagacatttcacattatatatttatac

SEQ ID NO: 229700 - DNA, 565 bp, Homo sapiens
tatttagactatctttccaaaggatacagactttccccattaagaggaactttgaagagaaatcaaattaagaacaattttatttcaatctaaaactcttgttcctgcaacttctctcattatacaactctttagagtagggtattcattaaaaaaagaaaaatttttaaagtaaacattttattaatcatcaaatttttcacttacataacctcaaratgattttaagttctctcattctattttgaatttcatgtttaaaaacaagtccaaatggtatggaacactgcatcctggggcatcattgcacctgcagtaggaatctgttaacttcaatgtagcttttaaaacttcagcaattacaatgtatctgcacatttactaaaataagtttttcaagggcagggctcacattcttttccttaacttatttatattgtatgaaatgggatggatgcttacattgttgcaggtactatattagtagttaaatatacatatgacaatatctatggtctcaaaggcaaatgaagagccatttatcaacatctgtgaaaaatctttt

SEQ ID NO: 229701 - DNA, 325 bp, Homo sapiens
cactgtctgtggaaatctgcctactaaagcctcagtaatggtggacgcccctcccccaccaagcttgatcatccctggttgacttcagactgctgtgctggtagtgasaatttcaagcgcgtggttcttagcttgctgggctccatgggaataggacctgctgagtgagaccacttgtctccctggcctcagctatttccaggggcgtgaacagttctgtctctctggggttccaggcaccaatggggtatgaaaaaaactccttcacgtagctccatgtctgcctaaacagccgcccaggtttgtgcttgaaagccagggccat

SEQ ID NO: 229702 - DNA, 564 bp, Homo sapiens
tgagaatttcaagcgcgtggttcttagcttgctgggctccatgggaataggacctgctgagtgagaccacttgtctccctggcctcagctatttccaggggcgtgaacagttctgtctctctggggttccaggcaccaatggggtatgaaaaaaactccttcasgtagctccatgtctgcctaaacagccgcccaggtttgtgcttgaaagccagggccatggttatgtaggcacatgagagaataccctgatttgccgattgcaaaaaccatgggaaaagcatagtaacctggcctggtagcgcagtccctcacggcttcccttggcagggggagggaggtcctccagctccttgcatttcctgggtgaaccaacacttcaccctgcttctgctcaccctccatgggttgcacccaatgcctaaccagtctcaatgagatgaacttggtatctcagttggaaatgcagaaatgacctgccttctgcattggtctctctgggagctgcagaccagagctgttcctattcagccatcttggccctgccccccaaaaggtaacctt

SEQ ID NO: 229703 - DNA, 564 bp, Homo sapiens
tgagaatttcaagcgcgtggttcttagcttgctgggctccatgggaataggacctgctgagtgagaccacttgtctccctggcctcagctatttccaggggcgtgaacagttctgtctctctggggttccaggcaccaatggggtatgaaaaaaactccttcacgtagctccatgtctgcctaaacagccgcccaggtttgtgcttgaaagccagggccatggttatgtaggcacatgagagaataccctgatytgccgattgcaaaaaccatgggaaaagcatagtaacctggcctggtagcgcagtccctcacggcttcccttggcagggggagggaggtcctccagctccttgcatttcctgggtgaaccaacacttcaccctgcttctgctcaccctccatgggttgcacccaatgcctaaccagtctcaatgagatgaacttggtatctcagttggaaatgcagaaatgacctgccttctgcattggtctctctgggagctgcagaccagagctgttcctattcagccatcttggccctgccccccaaaaggtaacctt

SEQ ID NO: 229704 - DNA, 417 bp, Homo sapiens
gaacagttctgtctctctggggttccaggcaccaatggggtatgaaaaaaactccttcacgtagctccatgtctgcctaaacagccgcccaggtttgtgcttgaaagccagggccatggttatgtaggcacatgagagaataccctgatttgccgattgcaaaaaccatgggaaaagcatagtaacctggcctggtagcgcagtccctcacrgcttcccttggcagggggagggaggtcctccagctccttgcatttcctgggtgaaccaacacttcaccctgcttctgctcaccctccatgggttgcacccaatgcctaaccagtctcaatgagatgaacttggtatctcagttggaaatgcagaaatgacctgccttctgcattggtctctctgggagctgcagaccagagctgt

SEQ ID NO: 229705 - DNA, 564 bp, Homo sapiens
tgagaatttcaagcgcgtggttcttagcttgctgggctccatgggaataggacctgctgagtgagaccacttgtctccctggcctcagctatttccaggggcgtgaacagttctgtctctctggggttccaggcaccaatggggtatgaaaaaaactccttcacgtagctccatgtctgcctaaacagccgcccaggtttgtgcttgaaagccagggccatggttatgtaggcacatgagagaataccctgatttgccgattgcaaaaaccatgggaaaagcatagtaacctggcctggtagcgcagtccctcacggcttcccttggcagggggagggaggtcctccagctccttgcatttcctgggtgaaccaacacytcaccctgcttctgctcaccctccatgggttgcacccaatgcctaaccagtctcaatgagatgaacttggtatctcagttggaaatgcagaaatgacctgccttctgcattggtctctctgggagctgcagaccagagctgttcctattcagccatcttggccctgccccccaaaaggtaacctt

SEQ ID NO: 229706 - DNA, 551 bp, Homo sapiens
tcaagtaaacgtccaacataacgtaactcctataaatataaaaagtaaagtttgggcccttgtcaataacctcatggtagtacaaattaacactaaagcaaaagctttcactgagttatcaagtttattttrcctattctcttgtctccagagactttcttttctctcttcgttcaactctttgccaaaacatttcacttttgaagacaacacaaatttatgttttagaactgaagtggtgttatattgcaggctgtattttgccatgacagagcaagatttttcttatgttagtaaaacagaacatcaattagttatttttcttatatgtaattttgtgaaaattatataaactctttcacttagttttattgtaaagactacctatattatttcttcagcatcccctacgtgactttctattctttcactattttaatattttctctccatagttttagatgttttgccttgagagtaggagttttctgataagctttggtttcatacatatttgctttctcttgtatttgacaaatacataatgtgaa

SEQ ID NO: 229707 - DNA, 551 bp, Homo sapiens
tcaagtaaacgtccaacataacgtaactcctataaatataaaaagtaaagtttgggcccttgtcaataacctcatggtagtacaaattaacactaaagcaaaagctttcactgagttatcaagtttattttacctattctcttgtctccagagactttcttttctctcttcgttcaactctttgccaaaacatttcacttttgaagacaacacaaatttatgttttagaactgaagtggtgttatattgcaggctgtattttgccatgayagagcaagatttttcttatgttagtaaaacagaacatcaattagttatttttcttatatgtaattttgtgaaaattatataaactctttcacttagttttattgtaaagactacctatattatttcttcagcatcccctacgtgactttctattctttcactattttaatattttctctccatagttttagatgttttgccttgagagtaggagttttctgataagctttggtttcatacatatttgctttctcttgtatttgacaaatacataatgtgaa

SEQ ID NO: 229708 - DNA, 546 bp, Homo sapiens
ctaaatgtctacatttgagagagagagagagagagagaaagactaatagatatatacttttgctgtttgttagcttttgttttttaaatagattttatttttagaccagatttaaggtcatagcaaagctgagcagaaggttcagagatttcccacataccccttacmcccacacatgcatagcctctccagttatcaacatccctcaccagagtggtgcatttgttacaattgataaacgtatattgacgcattattatcactgaatgtccatagtttacattagggtattttctttgtcatgtacattctatgggtttggacaaatgtataacatcatgtatccaccaatatagtattatactgtgaaattacactgccctaagaatcatctgtgctcctcctattcatctctccttcccctcaactcctggaaacctcgatcttttcacttctccatagtttaacatttaccaggatgtcacacagttataattatatagtatataacttttttttcccagactagcttctttcacttagtaa

SEQ ID NO: 229709 - DNA, 548 bp, Homo sapiens
tatcactttgacacacactttggatagagaagtaaacaaatggatgatgacacttatccttgctgtaacaaggatcatattttgcagagtaaatacaaacactgtgtgttgtgaagacagaatatttgcaaaggggcattgattatttattctgccatttagggaagagctcactgaaaaagttatggaataaaaacctgaacaacatgagggagtgagygatagaaatctatggtagaaatttcagccaaaaataagagtcagtttgaagagaataatgtcgcaacaatgtgaagaaggtcactacagctgtacctgagaaagtaagaggatgaatagtagatgcattcaaagaggtaaggggggaccagattgtctatgtcttacaaaatgaaaagtagcataatataccccgtggtttaaaagggtactattgttactggggtgaaaatggacatataaagattagaatagcattagggggatgagttagatgatcaacgaaataatccagacaagaacgatgaagattgtatcagggccgtggc

SEQ ID NO: 229710 - DNA, 485 bp, Homo sapiens
tatgtgtttttgtgtgtttgatgttgtttagatgttcacattttttactagtttttcttcttattaacctattttttatttccattcgctaaagaaactttgcataatagtgtgtcttcaaaaatgcccccaactttccctctcctccctatacacacattctgcttcccacatcaagaagtagaaattgttttcctttccataaatgtgggattagtcttggaacttgaattaaccaatataatatggcagaagtgacactgtcagttccwgacctcagccttaagaaggaccagtgccttcctactttgcgttcttggtgctttgagctgtcatgtaagaagttcacactactggacagaaacaatacatggataaagagaccaaatggtgaagcactgaggcagcaggcatgagaaggaagaaggcatcttagctttctacttgagttttcatctgacggcaaccccttgattgaccccagg

SEQ ID NO: 229711 - DNA, 406 bp, Homo sapiens
taccacatgagtgccagagaaggctctgcctgtgtcacagccttcagagctggtgggagccaattgcttgggaaagtgggcctgggaacagccatctgggttggtgggaggccctgcagatgtctcctgggcccccctcaacatcagagggactctcctgacaccgttgctcccaccttggcgtgtggggccgagatgctgcctcctggttttttcccaggatgaggaaccctgcgatgccaatccctctccctccctgtccccccgcaggcctcttgtctcctttcaggctcctggrgatttgtttacagtttatttttctttatttttataacagcttcattgagatacaagtcacatactgttcaaataacccatttaagctgtacaattccgtggtacgatt

SEQ ID NO: 229712 - DNA, 597 bp, Homo sapiens
ggaaaacctggtgagtatgatgggttagaaagccaaatcatgtaaatgtttcaagaatgagagagtaatcaaccatatcaaattgtactaataagtcaaaaccaaagtgaggactaagaaatgactattggatttagaaacacagtggtcactggtaagcttgacaagagcaatttgagtggactgatagcagtaaaagcatggttggagagggttcaaaaaccaaaggacaacaggcatcaaaaaccaaaagtataagcaactatttcaagtagtcttactccagaagagaatggggacatgagtcgagaatcaaagaagtgagatcaagggaaaagcatttttgtttgtttgttttgtttggatttgtttaagcagaaggawaaaagcagcccatctctgtgctagtctgaatgatccagtaaagagagtagaggaaattgcctgcatgaggttttgattaggtggaaaaagatgcaaactcatgtacaagaggaggaatcaaccttagacagaagtatgaacaattctcaatagtaacataggcaacacagttctgtgtacagttgaacacatgggagcttgagtaagtttctg

SEQ ID NO: 229713 - DNA, 597 bp, Homo sapiens
ggaaaacctggtgagtatgatgggttagaaagccaaatcatgtaaatgtttcaagaatgagagagtaatcaaccatatcaaattgtactaataagtcaaaaccaaagtgaggactaagaaatgactattggatttagaaacacagtggtcactggtaagcttgacaagagcaatttgagtggactgatagcagtaaaagcatggttggagagggttcaaaaaccaaaggacaacaggcatcaaaaaccaaaagtataagcaactatttcaagtagtcttactccagaagagaatggggacatgagtcgagaatcaaagaagtgagatcaagggaaaagcatttttgtttgtttgttttgtttggatttgtttaagcagaaggataaaagcagcccatctctgtgctagtctgaatgatccagtaaagagagtagaggaaattgcctgcatgaggttttgattaggtggaaaaagatgcaaactcatgtacaagaggaggaatcaaccttagacagaagtatgaacaattctcaatagtaacataggcaacacagttctgtgtasagttgaacacatgggagcttgagtaagtttctg

SEQ ID NO: 229714 - DNA, 609 bp, Homo sapiens
tttaatatctttaaaaattctataatagaagaaacaatatcattcatgttagagttagttatcactggcttttagaaaataagatgtgatgcttcagctatgtctagacatgatatatgtggagaatgacacaatttgggctgaaaatgacttttttttctgtcccactggataatttgagagtatgtttctgttttaatttattcagtctatactttttattttccatttcatattatctagagagatacagtttctgagacaagggaaagcagaaacacacatagttattcaacatacattaacaccaacaaaataattgtgttaagttttatggaagatggaaatataaaaaggacacagcctctttgtcaatttggcaggcagaacactgttagtgccataagggaaggaaaaaatgccatgggagcttattcattcactaaccaaatatttattgattatatgttgccccgcaggcactatgataggagatatgtgatgtctaagacccagtcactgctgtgaaagatgagagaaatgcaaaaarcagaaaaaaaagtgctgttaaagtatgaaaattcacagctgtttattttgtggtctctc

SEQ ID NO: 229715 - DNA, 436 bp, Homo sapiens
ggatgttttgatgtaggtatacactgttgaatgattatatcaagcaaattaacatacccatcacctcaaatacttatctttttttataccgagaacatttaaaatctattgttttagcaattttgaaatatgcaatatattattatgaactatggtgaccatactgtgcaacagatcttgaaaatgtattccttctgtttaactgaaattttgtagcttttggtcaacatctttccattctctaccttcacctctcccagccttcagcaaccaccgttctccactccacttctataaattcarctttttcagattccacatatagtgagattatgtggtatttatcgttgtatgcctggcatatttcactaagcataatatccttcaggttcatccatgttgtcacaaataacaaaatttctttcttttttaaggc

SEQ ID NO: 229716 - DNA, 547 bp, Homo sapiens
acacactgcctttaagagataaattccacaacagacaagtaattaatcttaacaaaaatatgtatacctttgtccttgaaactggttattcatatgtttttggcgttacatgccaaattaaacacattgaagcagactccccaaataaactttcatccaatataacattagtttatattgatagagcaatatgttagtctaatacttcaaattatatgaatagaatcttctttgatggccaaaaatgttcatatatcaataaaacaattttttgaatacaaaatataacaacagaggaaatgtgacatattactggcccatgatcyactagaacaaaaacaaccaaaattttactcctccttaaaggctattacagtactagaaaaattataaaaacaatttttccagggctctgaaaattaaccaaaggctttcaacaatctgagtaatcttttttcaagaaaaatacctgtctcatttttaacaaaatattttaagacacataaagaaacagaaaaatatgtcccatatatgtgaatgaaaacaa

SEQ ID NO: 229717 - DNA, 547 bp, Homo sapiens
acacactgcctttaagagataaattccacaacagacaagtaattaatcttaacaaaaatatgtatacctttgtccttgaaactggttattcatatgtttttggcgttacatgccaaattaaacacattgaagcagactccccaaataaactttcatccaatataacattagtttatattgatagagcaatatgttagtctaatacttcaaattatatgaatagaatcttctttgatggccaaaaatgttcatatatcaataaaacaattttttgaatacaaaatataacaacagaggaaatgtgacatattactggcccatgatctactagaacaaaaacaaccaaaattttactcctccttaaaggctattacagtactagaaaaattataaaaacaatttttccagggctctgaaaattaaccaaaggctttcaacaatctgagtaatcttttttcaagaaaaatacctgtctcatttttaacaaaatattttaagacacataaagaaacagraaaatatgtcccatatatgtgaatgaaaacaa

SEQ ID NO: 229718 - DNA, 508 bp, Homo sapiens
cctaattcccgagatcacagctttaaggctattagtttccaaaccctgaatcctcagagcaatgatttctcaacctcacaacaagtgggcagacaggcagctcaaaagaggactctgcaaatctccaaagaagaaagagaacaaaatgtttccccattctacatgtcagggtagtcaacagcaaagattccagatggatgttgcaagttaaataacagcaacagatgcaattctaaggttctttgggaaacgaactgaaaagaagagaaacgttaacgtattacttccttcatgccacctaaaagtagtcacatttcataattctcaaactatctacagttactagacccaygaacaaattctagctctgtttaacacacttcaagggcttacagtgctcttgagataaaatacagaatccttaacatgataaaccacagcccacctgatctggctcttgttcatctctccagcctcctttgggcttgtcctacctgcattctgtcca

SEQ ID NO: 229719 - DNA, 520 bp, Homo sapiens
aaatcatagcacagaaggcaaaatgaagtggtagggagaaggctatctcaaatgatatccttgacaatgtaggtgaaataaatattttaaaatatgcatattggtctctgcccccagtccctagcacagagttcttaatactcttgtggacatgaatgctaataggatcttatgttttaatatttgatctctactctgattcttggcaccgaggttctaagacctttgtaatttcctgggtgataggagcatcttttgttctaatgaggccacttttggtgggctcctggatggaagccgggcaccrgaaagaccactccaatgattagaagctcatggatttagcctcaaccctcaatctttggagaggggctggaaattaaattaataatcaatcatgcctacatgatgaagcctccattaaaatctctaaactatgggattcagagcgcttctggattggcaaccacatctgcatggctggaggttggcacctccaactccagggggacagaagctt

SEQ ID NO: 229720 - DNA, 469 bp, Homo sapiens
gttctaattttaaatttcctaatgataaacaatgttgagcatctcttcatatagttatttgccattttctgtcttttgtggtgaaatgattcttcagatcctttacccactttttggtatttttaaaattgagataaaaattcacataattaactccttcaaaatgtataatttagtggcatttagtacattcacaattctgtgcaaccatcacttttatctcgttctgaaacactctcattatctcaacaggaatctcctctctttctcctctccccacttcctagcaaccactrgtctgctttctgtgataaggatttacctgttttgtatatctcatatcagtggaatcatgcagtatgtactcttttgtttctggcttctttcacttaccataatattttaggttcatcaacatcgtagagtatatcaacacttaattacattttatgtctgaataatacttgtt

SEQ ID NO: 229721 - DNA, 383 bp, Homo sapiens
gtggtctgagaatcagtgttttttggtaaactccccagtaattctaatggcagcaaaagtgagcaaccggtgccataaaagacattgctacttgttgagaagtagacataaactctggctttctatcgttggaaatgtacatagctgaacgagcatattgaatatcttaacataattccattttaaggaaataaaagatactatcttaataccataagctatgcatagtttgtttacaytgataatagagaatggggacttgaaggagaaagttggaaggctcagaccaaagagagaataaagagggttttgaggatgtattagtctgtttccacactgctataaagaaccccctgagactgggtaatctataaaggaaagag

SEQ ID NO: 229722 - DNA, 562 bp, Homo sapiens
gcgcaggactcattaactcacatttgcatcctcattatctaaatgaacagtttagagcttctctctcagccctatccctgaaaggtgaacctcttctgccctcacatctctttctctctcttcaccctccctccctctctctctctctctcacacacacacacactaacctgctttcttgaacgccagtttttcggggcctgtcgagcatccacmggccaggtgtccttggcctagaccattctgtttaccaggaggggctgggaaagaggccaaggactcactttaataggaaggatgtattttctagtgatttatcacttcctccataaattcaggaaacgtgtctctgctgagctaatgatttattaagaagactttcaagcagtaaatcctctctcttcccattctctgggcagtaatggcaatgttcaagtctcagagaaataggagcctgaccttcgcagaggtgacaacctttctaaaaagcagttacacttgctaaagtcacagtgggaggccttgagaagagccagcaatccgtttcgaagtcgtgactctca

SEQ ID NO: 229723 - DNA, 562 bp, Homo sapiens
gcgcaggactcattaactcacatttgcatcctcattatctaaatgaacagtttagagcttctctctcagccctatccctgaaaggtgaacctcttctgccctcacatctctttctctctcttcaccctccctccctctctctctctctctcacacacacacacactaacctgctttcttgaacgccagtttttcggggcctgtcgagcatccacaggccaggtgtccttggcctagaccattctgtttaccaggaggggctgggaaagaggccaaggactcactttaataggaaggatgtattttctagtgatttatcacttcctccataaattcaggaaacrtgtctctgctgagctaatgatttattaagaagactttcaagcagtaaatcctctctcttcccattctctgggcagtaatggcaatgttcaagtctcagagaaataggagcctgaccttcgcagaggtgacaacctttctaaaaagcagttacacttgctaaagtcacagtgggaggccttgagaagagccagcaatccgtttcgaagtcgtgactctca

SEQ ID NO: 229724 - DNA, 600 bp, Homo sapiens
ttgaccaatacaacaactccattgtagagttactgtgagtattaaataaaataatatttgtaaaacatttagcccagtgcttgctatataatagagctcagtctaagtagctctattattgagtagttatacatgccaaacactagattatatatgtttaggaatgttttgcttaggaagatgctggttactatccactatttatgttaataaggccttacatggctgtgttagttagctttatatttttctgtgtttgtataatttatcttctatattatgctctcttctgttttcttccatgcctctacctttggcttgtttgtcaaaatagttataattacacatcatgaccaaygtaataatgccatttgctaactaaagaagaatatgcaattaattctatgttcagaatgtagatgttaggttatttataaatcttggcacatggaaacgcttatgactctcccttaagcaggctcagaatggaaattttttttgtatttgtttaagaaaatgatattatacaaagaaacgtttcctagaggaacatagtagttcctaaagccaaacagaaaggatttgagatcattctatgta

SEQ ID NO: 229725 - DNA, 600 bp, Homo sapiens
ttgaccaatacaacaactccattgtagagttactgtgagtattaaataaaataatatttgtaaaacatttagcccagtgcttgctatataatagagctcagtctaagtagctctattattgagtagttatacatgccaaacactagattatatatgtttaggaatgttttgcttaggaagatgctggttactatccactatttatgttaataaggccttacatggctgtgttagttagctttatatttttctgtgtttgtataatttatcttctatattatgctctcttctgttttcttccatgcctctacctttggcttgtttgtcaaaatagttataattacacatcatgaccaatgtaataatgccatttgctaactaaagaagaatatgcaattaattctatgttcagaatgtagatgttaggttatttataaatcttggcacatggaaacgcttatgactctcccttaagcaggctcagaatggaaatttttttkgtatttgtttaagaaaatgatattatacaaagaaacgtttcctagaggaacatagtagttcctaaagccaaacagaaaggatttgagatcattctatgta

SEQ ID NO: 229726 - DNA, 549 bp, Homo sapiens
ttgtttttttatcccacaaactgaggacttttaaaagtgaggttgtaacacacatagactgataagctttaaaataaggagtacttcagttataattttatatagactatggcatgtgcatgagtagaagaggaaaaatgacgtaataggaaaaaggaagttatgcttttataccatttgcctcgcttcatctatcaggtgcctattgccgtgcttgttaaaggttctggctgggtaaatacattagggtaacaataacaataataaaagctaacattccttaatatccttaatggataaygtcatttaaacttatggtggtagaggcccatctggagcaactgttgtggggatgccagctgcaggtggggaggcatggctggggctgcacactctgttgagctggttggggcggggaacaggcgggagccctgacccctactgagttggtggggcaggagccccatattcctgggtgcagctgccccatggctctagactcacgcatccttgtgctgttggggccctggtaagcaccctaccccctca

SEQ ID NO: 229727 - DNA, 580 bp, Homo sapiens
gaggagcaagtcacatcttacatgaaggcagggaagagagagcttgtgtaggggaacacccctttataaaaccatcagatcttgtgagacttattcactataatgagaacagcatggraaatacctgtcctccataattcaattacctcctaccaggtccctcccacaacatgtgggaattatggaaactacaattcaagatgagatttgggcagggacaaagccaaaccagtgtgcatattaaaatatttccactttctttcatggtttatgcttttgttgttgtgtctaaaaactcatcagcaagccaaaggccacataaaattttttcctacactttcctccagaagtcttgtagtcttgcatttaggtcttagatccattttaagttaatatttgtgaaaggtataagatccgtgcctgtgttgatttttcagcatatgaacgtcaagttggtccagcaccatttattgaagactattctttctttgttgaatgcctttactctgtcaaaaatcatttaactatatatttgactatttctgaactcagcttgtcccattgatctgtgtgtctattc

SEQ ID NO: 229728 - DNA, 580 bp, Homo sapiens
gaggagcaagtcacatcttacatgaaggcagggaagagagagcttgtgtaggggaacacccctttataaaaccatcagatcttgtgagacttattcactataatgagaacagcatggaaaatacctgtcctccataattcaattacctcctaccaggtccctcccacaacatgtgggaattatggaaactacaattcaagatgagatttgggcagggacaaagccaaaccagtgtgcatattaaaatatttccactttctttcrtggtttatgcttttgttgttgtgtctaaaaactcatcagcaagccaaaggccacataaaattttttcctacactttcctccagaagtcttgtagtcttgcatttaggtcttagatccattttaagttaatatttgtgaaaggtataagatccgtgcctgtgttgatttttcagcatatgaacgtcaagttggtccagcaccatttattgaagactattctttctttgttgaatgcctttactctgtcaaaaatcatttaactatatatttgactatttctgaactcagcttgtcccattgatctgtgtgtctattc

SEQ ID NO: 229729 - DNA, 580 bp, Homo sapiens
gaggagcaagtcacatcttacatgaaggcagggaagagagagcttgtgtaggggaacacccctttataaaaccatcagatcttgtgagacttattcactataatgagaacagcatggaaaatacctgtcctccataattcaattacctcctaccaggtccctcccacaacatgtgggaattatggaaactacaattcaagatgagatttgggcagggacaaagccaaaccagtgtgcatattaaaatatttccactttctttcatggtttatgcttttgttgttgtgtctaaaaactcatcagcaagccaaaggccacataaaattttttcctacactttcctccagaagtcttgtagtcttgcatttaggtcttagatccattttaagttaatatttgtgaaaggtataagatccgtgcctgtgttgatttttcagcatatgaacgtcaagttggtccagcaccatttattgaagactattctttctttgttgaatgyctttactctgtcaaaaatcatttaactatatatttgactatttctgaactcagcttgtcccattgatctgtgtgtctattc

SEQ ID NO: 229730 - DNA, 498 bp, Homo sapiens
tagttaccattcctctgaaacactagaggaagatggatttaaaaactttctaagagataagaaaatataactagtcattggtccactgtgaaataagatgaaaatcagataattaatctagtgyccagaagaacctgccttatcttgggaagacagaaatgtatccaaaaatgtatcctcagggagggccaaccttcctcttaaaaaaacaaagaagtggcaattccacaagaacctaaaactccaaagaactatagaaacttcacgtcctcatgcataaaatctaaataagttgacatatttttctagagtcaatgaatatttaaatggatatatggtattagttataatcatatttttatgtcagacattattctttacatttgaactagcttctttatatctcattatttcagctccagagaaatagaaatctgtgtccacctaattgagacaagctggttctctacaggaaggtgcaaattagctcagaagtca

SEQ ID NO: 229731 - DNA, 636 bp, Homo sapiens
ggtttttagtgttcagttgtgcatccatcaccactgtctaattcctgaaaattttcctcatctcaaaagaaacctatactcatgagcagtcattccccattctcacctcccctcagacactggtaaccactaacatactttctgtttgtcccgatttccctcttmtagacattttttaataagtcaaataatacaatgtgtggctttttgtatctggtttggaactatttctcttttgcattcatcttctagacaaagctttacaagatgttactgttgtgcccaggaacttttgaactctctgtttttttataaatttctacaccctgtgcttgaatcatccatgtcaactctgagtcctcccagcatttctctgtgggctgtactgctgatatttccagtctgggcccaacatgactgatgtgaccctacagagaaaaatcccaatcagatcgcagttccaccaactgtgctcagaaaggtcatgagaaggcttctatgtgctacttcctgtggttttccaattaatattaatatattaatattaattatatataattaatataattgtatataattatattaattataattaatatagtaataaatggtacataaaaattatttggaattaca

SEQ ID NO: 229732 - DNA, 636 bp, Homo sapiens
ggtttttagtgttcagttgtgcatccatcaccactgtctaattcctgaaaattttcctcatctcaaaagaaacctatactcatgagcagtcattccccattctcacctcccctcagacactggtaaccactaacatactttctgtttgtcccgatttccctcttctagacattttttaataagtcaaataatacaatgtgtggctttttgtatctggtttggaactatttctcttttgcattcatcttctagacaaagctttacaagatgttactgttgtgcccaggaacttttgaactctctgtttttttataaatttctacaccctgtgcttgaatcatccatgtcaactctgagtcctccyagcatttctctgtgggctgtactgctgatatttccagtctgggcccaacatgactgatgtgaccctacagagaaaaatcccaatcagatcgcagttccaccaactgtgctcagaaaggtcatgagaaggcttctatgtgctacttcctgtggttttccaattaatattaatatattaatattaattatatataattaatataattgtatataattatattaattataattaatatagtaataaatggtacataaaaattatttggaattaca

SEQ ID NO: 229733 - DNA, 636 bp, Homo sapiens
ggtttttagtgttcagttgtgcatccatcaccactgtctaattcctgaaaattttcctcatctcaaaagaaacctatactcatgagcagtcattccccattctcacctcccctcagacactggtaaccactaacatactttctgtttgtcccgatttccctcttctagacattttttaataagtcaaataatacaatgtgtggctttttgtatctggtttggaactatttctcttttgcattcatcttctagacaaagctttacaagatgttactgttgtgcccaggaacttttgaactctctgtttttttataaatttctacaccctgtgcttgaatcatccatgtcaactctgagtcctcccagcatttctctgtgggctgtactgctgatatttccagtctgggcccaacatgactgatgtgaccctacagagaaaaatcccaatcagatcgcagttccaccaactgtgctcagaaaggtcatgagaaggcttctatgtgctacttcctgtggttttccaattaatattaatatattaatattaattatatataattaatataattgyatataattatattaattataattaatatagtaataaatggtacataaaaattatttggaattaca

SEQ ID NO: 229734 - DNA, 485 bp, Homo sapiens
tcattcagccttaaataggaatgactttctggatgtatactataagatgaatgaaacttgaaaacattatgctaagtgaaataagccaaacacaaaaggacaaatattttatgattccacttayatgagtgtgttagtccatgtgcatttctataaaagaataccggagactgggtaatttataaagaaaagaggtttggttggctcactgttctgcaggctgtaaaggaagcatggcactggcatcttctcagcttctagtgagggcctcagacagcttacaatcatggcagaaggtgaagggggaaccagtgcatcagacagcaacagagggagcaaaagagcatgggaggaggtgccaggctcttgaaacaaccatctctcatgtgaacaaatagaacaagaactcactcattaacatgtggagggcaccaagccattcctgaaagatctactacccccatgacccaaacatctcgcaccag

SEQ ID NO: 229735 - DNA, 485 bp, Homo sapiens
tcattcagccttaaataggaatgactttctggatgtatactataagatgaatgaaacttgaaaacattatgctaagtgaaataagccaaacacaaaaggacaaatattttatgattccacttatatgagtgtgttagtccatgtgcatttctataaaagaataccggagactgggtaatttataaagaaaagaggtttggttggctcactgttctgcaggctgtaaaggaagcatggcactggcatcttctcagcttctagtgagggcctcagacagcttacaatcatggcagaaggtgaagggggaaccagtgcatcagacagcaacagagggagcaaragagcatgggaggaggtgccaggctcttgaaacaaccatctctcatgtgaacaaatagaacaagaactcactcattaacatgtggagggcaccaagccattcctgaaagatctactacccccatgacccaaacatctcgcaccag

SEQ ID NO: 229736 - DNA, 600 bp, Homo sapiens
tgctatatttgctaactggggccaatcagcataatgtcatcaatggaatgcaccagtattaaccctcgtagaagggaaaggtgatcaagttccctgagaactaaattatgacatagagctggagagttgatattcccctgagatagcacactgaaggcacatcgctggccttgccagctgagggcaaattgctctagtaggccttatggacaggtatgaagaaaaagctgtctgcaagatcaataactatatatgaagaagcaggagatgcgttaatttgctgaagcaatgaaaccacatctggtacagcagctgcaattggagtcatcacctggctgagattaygatatccattgacattcttcaagatctctctgtcttctgcacaggccaaataggagaggtgaatggggatgtggttggaattactatctgtccatgcttcaaggcttcacactaatctctgcaatttatccaggatgaaatattgcttttggtttactattttcctaagtagagctctcatggcctccaattggcctttccaccaaaatagctctcactctgtaggtcatggaaccaatatgaggattcttccag

SEQ ID NO: 229737 - DNA, 515 bp, Homo sapiens
tagcattctgtgtccttgacctttacatagtgggctgtactgtccctgtcacaatgcttgtgcattattcttctctcaaccagacctccttatttactcctaagtagctaactcttatattaatatactgtctctaaaccccattcactccacccagacctttgccccttcctttcctcctagaccacatggttagttatttctagtagatttgttctattaccacaactacctttcctcctatagtttcctccttgacagtgctagcttccagaaaacattttgctacacagccttgtaacattgtcacctgtcatattacaactgatatgggagtgctgagaagsgaagagcatcgtccctttaaatgacacggaagcggaagcggggaagggaagtgctgggtagagtagggcgtggtccctggctagggatccacccccaaggacctagcgaaggacaggcactcctgccttggagcctaaatgttgcatttcccaagaccaccctggcct

SEQ ID NO: 229738 - DNA, 508 bp, Homo sapiens
aactaaggtatttagatctctttggaaatctagacatctacagagatgttagtagatatgtacaaacacacgttgatttataatattatattaaaatacagttgacccatgaacagcacagatttgaattgtgcagatgcacttatacatggamatttttccataaaaattatataagtatgcctgcttccccttccacctcccccacctcttctgcctctgccatgcccgagagagcaagaccaacccctcctcttcctctgccttctcagtctactcaatgtgaagagaaagaggatgaagacctttatgatggtccagttttacttagagtaaatatattttctatcccttatgatttacttaataacaccttctttcctgcagtttattttattataaaaatacagcatacaatacatataatatacaaaagatgtcttaacctactgtttatgttatcagtaagccttccagacagcagtaggctattcgtagttaagttctg

SEQ ID NO: 229739 - DNA, 508 bp, Homo sapiens
aactaaggtatttagatctctttggaaatctagacatctacagagatgttagtagatatgtacaaacacacgttgatttataatattatattaaaatacagttgacccatgaacagcacagatttgaattgtgcagatgcacttatacatggaaatttttccataaaaattatataagtatgcctgcttccccttccacctcccccacctcttctgcctctgccatgcccgagagagcaagaccaacccctcctcttcctctgccttctcagtctactcaatgtgaagagaaagaggatgaagacctttatgatggtccagttttacttagagtaaatatattttctatcccttatgatttacttaataacaycttctttcctgcagtttattttattataaaaatacagcatacaatacatataatatacaaaagatgtcttaacctactgtttatgttatcagtaagccttccagacagcagtaggctattcgtagttaagttctg

SEQ ID NO: 229740 - DNA, 594 bp, Homo sapiens
aaatcaaaaaagcagtttggaaggttagtttccagaatttaagatacaagtattcaattgcaaaggctttatattctaaaatttctttagaacaggaaattaataaatgagatatgyggatgggatttctttgcagcccagaagaaattcagaaggggccattgggcaaaaacacctttaaatgtctgagcctccaggctctgacagagagaagaagattaatttcaaacctacttattatatcacaattgtgcaatccaatggatacttttcagtgcttgccttacttgtgtccctgtggtctttttgtcttggaattctttcctctgtcaacttccattaccccatcctactatttttccttctacttttgagactgctctttctcagcttcctttctgtatttttttacatagtaatatccctaaagagtccttcttactctggttcctcttatcattctctgtactctccttcaactgtactacttgtcctgataactcaactgcccaccaaatatctctgcaaaagccgcacattcactgtgaactcaatgtgtacaaacctaaactcaccactcaccccaaaccacta

SEQ ID NO: 229741 - DNA, 408 bp, Homo sapiens
cagcaatgcagaaaacactataaaagtcaaagccatcaggtagcaaagtcatgaataagcagaaaatcatgaataagttgaaacaatatcagstggtatgagttgtgtgataccttgatgatgatccatatctctttgaaacctgctgaaaatatgtagatagtttcacatttctcattttctcattcatctttataatgtaccacttaagatgatcttagtgggcctatgtaccttacaacttttaatagttattagcacaaatatttcccaaatctattacctcatattcgtgcccatttccctgcccagattaagccttcattgttattcatatagatgactagaaaaataattcatagcttcccagctttcacttttccatcacataacacagatcttatcatg

SEQ ID NO: 229742 - DNA, 425 bp, Homo sapiens
ccagtaatggaattgctgggtrgaatggtagttctaagtttttgagaaatctccaaactaatttacattcctacaaaaagtatataaacacttccttttctcttcagcctcaccagcatctgtttttttttgttgttgttgtgtttgttttttctttaaacaatagaatagctatttggactagtgtgagatggtgtctcattgttgttttgatttgtatttctctgatagttagcgatgtggagcattttttttatatgtttgttggccacctgtatctcttttcttgaaaagtgtctgagataatttctcttgctgtgcagaagctctttagtttaattaggtcccgcttaatcaatttttggttttgttacaattgcttttggagacttagccgtaaattatttaccaaagctgatgttgag

SEQ ID NO: 229743 - DNA, 425 bp, Homo sapiens
ccagtaatggaattgctgggtggaatggtagttctaagtttttgagaaatctccaaactaatttacatwcctacaaaaagtatataaacacttccttttctcttcagcctcaccagcatctgtttttttttgttgttgttgtgtttgttttttctttaaacaatagaatagctatttggactagtgtgagatggtgtctcattgttgttttgatttgtatttctctgatagttagcgatgtggagcattttttttatatgtttgttggccacctgtatctcttttcttgaaaagtgtctgagataatttctcttgctgtgcagaagctctttagtttaattaggtcccgcttaatcaatttttggttttgttacaattgcttttggagacttagccgtaaattatttaccaaagctgatgttgag

SEQ ID NO: 229744 - DNA, 425 bp, Homo sapiens
ccagtaatggaattgctgggtggaatggtagttctaagtttttgagaaatctccaaactaatttacattcctacaaaaagtatataaacacttccttttctcttcagcctcaccagcatckgtttttttttgttgttgttgtgtttgttttttctttaaacaatagaatagctatttggactagtgtgagatggtgtctcattgttgttttgatttgtatttctctgatagttagcgatgtggagcattttttttatatgtttgttggccacctgtatctcttttcttgaaaagtgtctgagataatttctcttgctgtgcagaagctctttagtttaattaggtcccgcttaatcaatttttggttttgttacaattgcttttggagacttagccgtaaattatttaccaaagctgatgttgag

SEQ ID NO: 229745 - DNA, 425 bp, Homo sapiens
ccagtaatggaattgctgggtggaatggtagttctaagtttttgagaaatctccaaactaatttacattcctacaaaaagtatataaacacttccttttctcttcagcctcaccagcatctgtttttttttgttgttgttgtgtttgttttttctttaaacaatagaatagctatttggactagtgtgagatggtgtctcattgttgttttgatttgtatttctctgatagttagcgatgtggagcattttttttatatgtttgttggccacctgtatctcttttcttgaaaagtgtctgagataatttctcttgctgtgcagaagctctttagtttaattaggtcccgcttaatcaatttttggttttgttacaattgcttttggagacttagccrtaaattatttaccaaagctgatgttgag

SEQ ID NO: 229746 - DNA, 528 bp, Homo sapiens
gtaatagtaaatcactctcagttattaattggtgttcaattagaaaggcagaatttctctaggcattcaaacagagagaataaaatccaaggaggggcaaaaagggccagtgatggtacccagaattcaaaagagctatgttgctgaggttgccagcatccttttgtkaatgctgctgctgctgctattgaaaccactgctgctgttacctttcaagaggctgagaatttgcacatttacagaagctgcaagaacttgggagcccatagtccccttgatgttactggactcactgccaagacgtctggatcctgtggctgcctgtggctactgccagatccagaaacagaaaatggaggataaaatagcttctcccttttgccttctggtctttctctgagacctgcctttgggaaaatctaactggaaactacctagttaggaaacttgggaatctagtttgtaaatttttagcaccttacaatatagagaatattgaagggcaggaattaagctaaaagtcagctt

SEQ ID NO: 229747 - DNA, 528 bp, Homo sapiens
gtaatagtaaatcactctcagttattaattggtgttcaattagaaaggcagaatttctctaggcattcaaacagagagaataaaatccaaggaggggcaaaaagggccagtgatggtacccagaattcaaaagagctatgttgctgaggttgccagcatccttttgttaatgctgctgctgctgctattgaaaccactgctgctgttacctttcaagaggctgagaatttgcacatttacagaagctgcaagaacktgggagcccatagtccccttgatgttactggactcactgccaagacgtctggatcctgtggctgcctgtggctactgccagatccagaaacagaaaatggaggataaaatagcttctcccttttgccttctggtctttctctgagacctgcctttgggaaaatctaactggaaactacctagttaggaaacttgggaatctagtttgtaaatttttagcaccttacaatatagagaatattgaagggcaggaattaagctaaaagtcagctt

SEQ ID NO: 229748 - DNA, 439 bp, Homo sapiens
ggcagtgttgaattctaaaaaattattttcccttaatttctacatcaaaaacatttcccccatattttaaaaaccttatgttagtgaatgttrctaatgatacagtcatattttctggatggagaataacttacttaataatttttaaattgtttggcatttcaaaattttcacatctataaatataaatgttgtgaccaacatcttagatacaaattttgttgagtttcaagttctcattttaggaaaaggaggagaatccacatctgtatttatagctacatatctatatatctatatctatatctatctctctatgtatatatatagctgtatgttcaactatataatctttaaagtctcaacagggagtttaaattcatacaacttctttggaaaactgtttggcagtgtctactaaattaaacacaagcttacc

SEQ ID NO: 229749 - DNA, 439 bp, Homo sapiens
ggcagtgttgaattctaaaaaattattttcccttaatttctacatcaaaaacatttcccccatattttaaaaaccttatgttagtgaatgttgctaatgatacagtcatattttctggatggagaataacttayttaataatttttaaattgtttggcatttcaaaattttcacatctataaatataaatgttgtgaccaacatcttagatacaaattttgttgagtttcaagttctcattttaggaaaaggaggagaatccacatctgtatttatagctacatatctatatatctatatctatatctatctctctatgtatatatatagctgtatgttcaactatataatctttaaagtctcaacagggagtttaaattcatacaacttctttggaaaactgtttggcagtgtctactaaattaaacacaagcttacc

SEQ ID NO: 229750 - DNA, 613 bp, Homo sapiens
gtaagtgccaaaatggaatgtaactccctagctctgagtctgaactttgcccacctgagggcaactttgtgtttgcacagcagatatgcttgcccaagttattgtctccttcccaygagtcctggtggccatgaagagagaaagagatctattctgacactaaagatatttgagaaaattagctccatttaactgagatcaatggctgtagtccaccaaaaaggtaacatgccccagcaccattaggtggagtgaggggtggggcaaggaccaagaatgctcttggggacctcacccaagaggagctggatgtgtcagccttgtccttgtcccctatgactgtcagaatcctgatgtagcagctttcactcccaacctgcaccctttacagacaggcaatgcacattctgaagctctttctgtcttggtattgccagcttagcactttcttatacctggtttcctcttcctcgtccagatcatattggtggttcagtctggttcttagtggggctttcaaacatttcttggctttacacttttgcagatgtactgttcccagtccatcccttcttacagccaaggactccagtgccgtttctggtccagaaga

SEQ ID NO: 229751 - DNA, 613 bp, Homo sapiens
gtaagtgccaaaatggaatgtaactccctagctctgagtctgaactttgcccacctgagggcaactttgtgtttgcacagcagatatgcttgcccaagttattgtctccttcccacgagtcctggtggccatgaagagagaaagagatctattctgacactaaagatatttgagaaaattarctccatttaactgagatcaatggctgtagtccaccaaaaaggtaacatgccccagcaccattaggtggagtgaggggtggggcaaggaccaagaatgctcttggggacctcacccaagaggagctggatgtgtcagccttgtccttgtcccctatgactgtcagaatcctgatgtagcagctttcactcccaacctgcaccctttacagacaggcaatgcacattctgaagctctttctgtcttggtattgccagcttagcactttcttatacctggtttcctcttcctcgtccagatcatattggtggttcagtctggttcttagtggggctttcaaacatttcttggctttacacttttgcagatgtactgttcccagtccatcccttcttacagccaaggactccagtgccgtttctggtccagaaga

SEQ ID NO: 229752 - DNA, 603 bp, Homo sapiens
catataccatgtaggtaccaagaatagagtcttttgtaaaggagggtgtagatgcatgtaaaaattatctgtcttattaaaaagataatatgtatgaaaatattggaaagaaaacacaatagaaaataaaacccacgcatcatctaccaacccaaaatatctctacttacattttgctgtrtttcattttcttttcttttatttttcttttctccttttctttctcccatttaaaaaaaatgtaatataactcgtttcttggattggacgagagcaactcttgggatacaatcacaaagcaaatttatttcatctcttccactgtctctttaaaattaatgagaagagacagttcttcccctgtccttaaaacactgggcatcccattacttttctgatcattcctaggagttccgagatcccatggtcctttttacaaaatatgcaactgaaattcagaaattacaattccaagccccttatgatcattgaaactttgattttgatgtaaaatggtcttttctacttcctcagctaggctgacagccacaagaaaagctgaaggccaatggagtgtggttagcttccactctcagtttttgc

SEQ ID NO: 229753 - DNA, 458 bp, Homo sapiens
gtgaactagtatgatttttacagggtgctaaacagccttgttttgtcattttaccasagttggttttctggttccttctcatttgggtaggctctgtcagaggcaaggtctagggctgaaggctgttgttcagattcttttgtcccaagcggtgttctttgatgtagtactcttccccattttcctgtagatgtggcttcctataagctgagctgcagtgattgttgcctgtcttctgtgtctaccaagcaagtctacccagctccagcctggtactgggggttgtctgcatagagtcctgtgatgtgaactgtctatgggtctttcagctgtggataccagcacagtatttgtggtgtctcctggatcccgcaggagcagtccggctcctttagaggatctgggggtcctcttgggattggtggtttgttcttgcagtcagtttggagctagaattc

SEQ ID NO: 229754 - DNA, 459 bp, Homo sapiens
tgaattctttttcaggtaaatcagggatttcttcttggtttggattcattgctggtgaactagtatgatttttacagggtgctaaacagccttgttttgtcattttaccagagttggttttctggttccttctcatttgggtaggctctgtcagaggcaaggtctagggctgaaggctgttgttcagattcttttgtcccaagcggtgttctttgatgtagtactcttccccattttcctgtagatgtggcttcctataagctgagctgcagtgattgttgcctgtcttctgtgtctaccaagcaagtctacccagctccagcctggtactgggggttgtctgcatakagtcctgtgatgtgaactgtctatgggtctttcagctgtggataccagcacagtatttgtggtgtctcctggatcccgcaggagcagtccggctcctttagaggatctggg

SEQ ID NO: 229755 - DNA, 567 bp, Homo sapiens
aagtcagaaacttcagataagctaaattcctgaccctcaaattgtgtcaaatgcgagtgtccattagcaagtcttcatcatctccatttctgcccagtcacattaactcttgactaaaccactgcagccgcttctctaataggtttctttgctttcaaatttctttcttttctgaaattcactttccctatgcggacctgagtgaaatgtcaaagtacgaatctgctgaaaatcctctgaagattttccagtgctcctaggagaaatcctaaacttcccaatgtggcctatgagggctgcttgatctgactgctgccgacctttccaaagtagttctcawgactcattcaattcaaaattcaggccttcaaatgtctttcattttctagaataagccttcctttttctcgttccttgacaagactttttgcacaaactactgtctgcccagaacactcctctgttctcttttctcccccagttattcttctccctttgaccccacatctctgagaagcctgtccagactttccttgtccaagtctgggaagcgaccctcttctgtgc

SEQ ID NO: 229756 - DNA, 475 bp, Homo sapiens
gaattctttggtgtctgttatttttgtctaggtttcaatattataattatgctattttataaagttgagttttatatctcttaggttttgargcatgttttctggtatttgttttttaaaagtttaaagtcctttgggtaaatacaaaggagcacaattgctaggtcatatataagaatatgcttagttttataagaaaccaccaaactgtcttcaaaagtggctgtgccattttgcattctcatctgcaatgaataagagttctggtatcttcaccttctagcatttggcattgtccgtgttctggatttgggccatcctaataggtgtgaagtggtatttcattgttgttttaagttgcatttccttgatgacatgagatagatcatcttttaatatgctaacttcccatttgtatatcttttttttttttttggtgagatatgtgtttaggtctttggcccattttttaatt

SEQ ID NO: 229757 - DNA, 518 bp, Homo sapiens
gtgaataatttacggttaaaataggtcttgagtcacattttgaaagcatatccacagcctaattatcacagtaatctggagaagatccagattcgtgcttagaagtgtcttccaaaaggtttctgaaaactgctttatyaatgatgccgcacaaatgcaaagcattatcctaactgttaagtcacagccttactttgtagatgttctattgtcctttctacaggaggcaaattaatcactcttttttcctcctcaaacatatttttcccatgtgttctctcttgctgccatgctaagaattttatgagaaagctgaataaatactctaggtcattataattttacttaaataatacattttcatttttagaataatatatgatcatttactataagctgggctttatgctaatgacttgtatttatttacttgaatttgcagtgtgctattacatatattttctcgtttaatccccacagcacctctatgtagtaggtaatgcttttatcatcatatt

SEQ ID NO: 229758 - DNA, 231 bp, Homo sapiens
gctgccatgctaagaattttatgagaaagctgaataaatactctaggtcattataattttacttaaataatacattttcatttttagaataatatatgatcatttactataagctgggctttmtgctaatgacttgtatttatttacttgaatttgcagtgtgctattacatatattttctcgtttaatccccacagcacctctatgtagtaggtaatgcttttatcatca

SEQ ID NO: 229759 - DNA, 573 bp, Homo sapiens
ctgacttaaccaactcctccaaacacaattgttttcttcccttctctacattctgatatgattttrtacagttcccccttcttatctaactctagcgtgtctggtttctgactgtctatggccccttggattgaacttctgtccttactcttaaatatgaccttgactctaggtactgttcctcacacacccatttcatccacacttgatggtagtgtgaccataaatatgctggttcatctccctttccccccatgataatttgattttggctctcagacccttcatttatatctgataccccagggtctcctaatctggaagtttagaaatgaaagataagtgtaattacaagctaagagagcatagggaaagcaattcctacatctgggagtggagagggttgggaagaagggaagggaaggggtctaaaatatgtttctggaaggcattgttttccaggtggaggtgtccaagtgtaaacttacgtaagctagacaaaacagccttggcaaggcagagagacatggagaaggttgctgtgacagccacatgaggagagttgatgtgtgg

SEQ ID NO: 229760 - DNA, 573 bp, Homo sapiens
ctgacttaaccaactcctccaaacacaattgttttcttcccttctctacattctgatatgattttgtacagttcccccttcttatctaactctagcgtgtctggtttctgactgtctatggccccttggattgaacttctgtccttactcttaaatatgaccttgactctaggtactgttcctcacacacccatttcatccacacttgatggtagtgtgaccataaatatgctggttcatctccctttccccccatgataatttgattttggctctcagacccttcatttatatctgataccccagggtctcctaatctggaagtttagaaatgaaagataagtgtaattasaagctaagagagcatagggaaagcaattcctacatctgggagtggagagggttgggaagaagggaagggaaggggtctaaaatatgtttctggaaggcattgttttccaggtggaggtgtccaagtgtaaacttacgtaagctagacaaaacagccttggcaaggcagagagacatggagaaggttgctgtgacagccacatgaggagagttgatgtgtgg

SEQ ID NO: 229761 - DNA, 573 bp, Homo sapiens
ctgacttaaccaactcctccaaacacaattgttttcttcccttctctacattctgatatgattttgtacagttcccccttcttatctaactctagcgtgtctggtttctgactgtctatggccccttggattgaacttctgtccttactcttaaatatgaccttgactctaggtactgttcctcacacacccatttcatccacacttgatggtagtgtgaccataaatatgctggttcatctccctttccccccatgataatttgattttggctctcagacccttcatttatatctgataccccagggtctcctaatctggaagtttagaaatgaaagataagtgtaattacaagctaagagagcatagggaaagcaattcctacatctgggagtggagagggttgggaagaagggaagggaaggggtctaaaatatgtttctggaaggcattgttttccaggtggaggtgtccaagtgtaaacttaygtaagctagacaaaacagccttggcaaggcagagagacatggagaaggttgctgtgacagccacatgaggagagttgatgtgtgg

SEQ ID NO: 229762 - DNA, 604 bp, Homo sapiens
tagtagcagggatcaagaatgataaaaaccctgcaacccaaggcagagtccagcacaacaaaaaagttattccacctgcaccattaaagaagaactgcctgctctaaatgatattgagagaatagaaaatgttttgaacaaaattgtagacacttctcctctggggaaattaaaagagaacaagagaatgttgtcctgatggcctctctcaaccctgcccagccctgacatactaaactcctggggaatgtaaaattcaggccaaatgatccagacacaggagacccacccctttggttcctgcaggggcagcctcagcgttccttgctcccatcagaaaggtcttagggccgaactgcgctccctctggccaggagagaggctgtccctctgcgtgtattttactctcagggtaacaactcagagaaaatgtggacatttgcattggcactcaggtgctgtcataaggcctgccgtcagcctgtcctagagtytttttctttttcttttctttgaactaagtaaacagcaggagtcagctataggaagcaagctatgaggggtggaggagatttgaggtggtgtcaaggataagggtgacaga

SEQ ID NO: 229763 - DNA, 424 bp, Homo sapiens
ccacaccactttcttttcttttgaaagtccagatgggcagataaatccaaagtggatcaaccacatctgccattcctccacacaaattacaccccctcccacaacttccctcttccctctccagcatgcaaagcactcagggcctgggctgaattgacattttatgccacactgtatgttttgaattcctcattgtattatgaggaactgcatcatgacccctctgaggcaaagagctggcagattctgaaatttgccttctccaaaggtgagaactgcatttgtggagggacggctttcttccaggcacaaartgagccaagagtagaacccagccccgttggctgccttctccagtgttctgaaccggtattcaaatcagcaaagtccaggtgggtgttttctattaataatgccccctttt

SEQ ID NO: 229764 - DNA, 504 bp, Homo sapiens
aggccaccagcctgaggcaccctggcaaagtagggttgggattgtgggggtctgcccactgatagcctggcttgctctgatactaaggtgctatctccttgagtcaatttcctctggcgataacactcgccccgtgtaaagggcctatgtgaaggagccattcttttccctgcccctttacacagcctggctcagtcagctcttttggcaaagcccgggctgctgacgtgacaaggtcacccgggacatgtgagctacacgtatgcagggcactaaatcaaaggaggctcagtgccatctggcccaacaccctcacttgacagatgagaaaactgaggcccagagagagggcgagactaaytcaaggtcccacataaagctaccaacgacaaggcaagaacccaagacttttgactccctcttcaagtgctcagtcaccaaagaaacaatgaaagaaacccaacatcattcagaaccacagttcatggagggaaacagtcaggt

SEQ ID NO: 229765 - DNA, 463 bp, Homo sapiens
atagcaatcctgctgttggaacccctcaccacactaaggcacctagagacgcagctatgtgtgactttgcacaaattgctttttctctctgaatctgtaatagagggacaaaaatgatcatggttgtcacattgtccctgattatgagacattcacttagaaagatatgcatcccaagccaattatagtacaggatgagtatactagagatgcatacaaggtacccagtttgttcatgggctgacagtttgtccaagggagaacctggaagggcttctcagagcaagtggcactttggcaaggtttttaagcagctcgtcccataggtgaagatagtggacagtcagaacagaagcagcagcgtgcacccaaaagcctgctgtgggaactctccatcttgtgttgtgatgagaatgtcaagtgcaaagaagtgcayaggggctgacacatgggactgaacagg

SEQ ID NO: 229766 - DNA, 673 bp, Homo sapiens
ttacctacggttatgtccttatcaccagacacaagggtgggtgcttgtgtttgctgaactgaaagatattctaggagtctattgccttagatatcatctattcagtgagtttggcatgattaccatttttcaacatttcttatcctgatatttacacatgagttacagatagcttggcatctcccttgtatagataaaatgcaagtcaattcaatcaacacttatagtgcatttactatgagctgggcactctggtactggctgagaaaatatacagttattgcctaagatttcagacctcaaagtgttatgggagaccacagaaaaagcagaatgactgttgtacccagacaatggcttatgaggtgacccgcattttgaaggatgagtaggagtttgccatgaagaaaaaggattgactattccagacaaatggagcaagatacacaagcccatatgtgtaaaagggaaggcatactgcattgaacaatgccaagtgctagagcatagactaaatcagaaggagtgaggaaagacgaccctgttcaggcagattaggaccgttatgtgcagggcctggtatgccacatatgccaatcaaacaaacatcaaacacartgctccgctctattcccactctcagtgtgcagttgttagcattggtaaatcagca

SEQ ID NO: 229767 - DNA, 577 bp, Homo sapiens
tcaaagcctttctttcctttcttggcctttgttccccttttggtgaaatggagaaagtagtgtcagtctttttgaactcataaaattgttataaagatcagataagacaatggacatgaaatcactttttaaattgtagtggcatgacaataaaaactcaagttagtactaagttaccagggcaggatttatattgcccagctttatctgacaaatgagtacgaatagaaacaaacattcaagagtcccctaaacastgtattcactcattgatttattcaacaattattcagtgagcatatactacatcagaatttttgctagcaggattcttttaaaaaattattctgatctggttaaaaagatagtcttatgtcaataattagagaaagatcgatttaaaaataggtaacagaagaaattggggttaaggaaaaataaagacagaaaaattaaaggaagccaaacataagagtaactcatgagcactaagatataattctatatactgataaagatgggctaaatttgcactcataggaaacaatgcaaagagaaagacaatcaattactgagt

SEQ ID NO: 229768 - DNA, 577 bp, Homo sapiens
tcaaagcctttctttcctttcttggcctttgttccccttttggtgaaatggagaaagtagtgtcagtctttttgaactcataaaattgttataaagatcagataagacaatggacatgaaatcactttttaaattgtagtggcatgacaataaaaactcaagttagtactaagttaccagggcaggatttatattgcccagctttatctgacaaatgagtacgaatagaaacaaacattcaagagtcccctaaacagtgtattcactcattgatttattcaacaattattcagtgagcatatactacatcagaatttttgctagcaggattcttttaaaaaattattctgatctggttaaaaagatagtcttatgtcaataattagagaaagatcgatttaaaaataggtaacagaagaaattggggttaaggaaaaataaagacagaaaaattaaaggaagccaaacataagagtaactcatgagmactaagatataattctatatactgataaagatgggctaaatttgcactcataggaaacaatgcaaagagaaagacaatcaattactgagt

SEQ ID NO: 229769 - DNA, 572 bp, Homo sapiens
aaggattgagagtgttcccaaagatcactgagcagtggttgataaaaagaagagaccaaatgtttcaagagggtgttcatttaaaaaattgtctgaggaattatcctgagctgtcagccataaaagacaaagaaagtttaacatgttcatacattcgttaaacaagcaaacaatattcttctaaaaggaaatcaatgtagaaagactgtcagcaatgttgctttgttgtttcaaagtatcatcatcccaaaatggtttggttgctattcaaagtgagtatggaatggtaaagtaacatgtagttatcccattggggattggaggggaaagcagtatagaaacagctgtggatatgcaagacacgtttttaaagctaggtgtttgcaactagagaaataattacaaaaatgggcaaaatatctgaatagaaactttgcaaaggaagacatacaaatgrcaaacaagtatatgaaaaggtgctgaacatcattaatcatcagagaaatgcatatcaaaactacaattagatgccatcttatccccgttaaaattacttttctccaaaagtcagg

SEQ ID NO: 229770 - DNA, 377 bp, Homo sapiens
aacacttagtacatgtgcattgattgtagaactagcattagtattgcaacaaagttaggcagagtcaggagctaatccctggtacaagctggaggtgagatccagggagacgrtttttacagccgggaggaggcactgtgtccagcagccaccttgcaggtggagcagaaagcacaggcttggggttcacgggctcagctgactggcagctctgccagaccagctgtgccaacaccagccaactaattcatctcatcaagcctcaatttctgcattaaaaaaatcaggaaatattcccaggtctggttctcaactgggggcaattattccccctgccttgaggacattcacaatgtctggagacatatttggttgtc

SEQ ID NO: 229771 - DNA, 377 bp, Homo sapiens
aacacttagtacatgtgcattgattgtagaactagcattagtattgcaacaaagttaggcagagtcaggagctaatccctggtacaagctggaggtgagatccagggagacggtttttacagccgggaggaggcactgtgtccagcagccaccttgcaggtggagcagaaagcacaggcttgggsttcacgggctcagctgactggcagctctgccagaccagctgtgccaacaccagccaactaattcatctcatcaagcctcaatttctgcattaaaaaaatcaggaaatattcccaggtctggttctcaactgggggcaattattccccctgccttgaggacattcacaatgtctggagacatatttggttgtc

SEQ ID NO: 229772 - DNA, 264 bp, Homo sapiens
tccagggagacggtttttacagccgggaggaggcactgtgtccagcagccaccttgcaggtggagcagaaagcacaggcttggggttcacgggctcrgctgactggcagctctgccagaccagctgtgccaacaccagccaactaattcatctcatcaagcctcaatttctgcattaaaaaaatcaggaaatattcccaggtctggttctcaactgggggcaattattccccctgccttgaggacattcacaatgtctggagac

SEQ ID NO: 229773 - DNA, 264 bp, Homo sapiens
tccagggagacggtttttacagccgggaggaggcactgtgtccagcagccaccttgcaggtggagcagaaagcacaggcttggggttcacgggctcagctgactggcagctctgccagaccagctgtgccaacaccagccaaytaattcatctcatcaagcctcaatttctgcattaaaaaaatcaggaaatattcccaggtctggttctcaactgggggcaattattccccctgccttgaggacattcacaatgtctggagac

SEQ ID NO: 229774 - DNA, 377 bp, Homo sapiens
aacacttagtacatgtgcattgattgtagaactagcattagtattgcaacaaagttaggcagagtcaggagctaatccctggtacaagctggaggtgagatccagggagacggtttttacagccgggaggaggcactgtgtccagcagccaccttgcaggtggagcagaaagcacaggcttggggttcacgggctcagctgactggcagctctgccagaccagctgtgccaacaccagccaactaattcatctcatcaagcctcaatttctgcattaaaaaaatcaggaaatattcccaggtctggttctcaactgggggcaattattccccctgccttgaggacattcrcaatgtctggagacatatttggttgtc

SEQ ID NO: 229775 - DNA, 294 bp, Homo sapiens
aggatataagttttttttatatgtgtcttcatatttgttttggaaaacattgttgaccattgtaactaaatttctgattctttcatttatgtagtaaatgtgaactgtgtgcaaatgctaacataataagcattattgatgatttggttgcagttatctgaggataaactatatgatgcattkaaataaatgtgaaaatagaaggaaatctcaaatgtttattatgaggttttgtactagaaatttacatttactttctattagtatggacttgcggagttgcaaggaggagtg

SEQ ID NO: 229776 - DNA, 600 bp, Homo sapiens
cagtgaacaactcagttctctaaaggaattgtgattttcctaagaactgcataggcgctttcctgatggtttgcatttccacattctaaaacagagcatggacagaggctctttactgtccttcactcctattcaagagcaaggttgttgccactggtgttatttccrgtgtttaaaggcaaatagataaaaagaatggagaaggcctttcacacccaaagtgaaacgcgtcctcttctcatgcatcccgcttcccctcctgacttcctcctctattattaatagcaccagcatcctcctaatgacctagcctggaatctgcagaatcattcttgaccacgggtcctctctaggccacccacgttaaattgcttcagttcatctttttcttctgtttccctgaccaccagcctacattaggctcttgttaccacttaactgggcgcctgaaataagctcagcagctgagagagtcttgagccatttccattttcaaggctcctcgtatactaacagaaagaaagaatttcaagacaggattatggaaattcagtttgcttatatagtttaagaaattaatgcttttaatacacacaaaaa

SEQ ID NO: 229777 - DNA, 600 bp, Homo sapiens
cagtgaacaactcagttctctaaaggaattgtgattttcctaagaactgcataggcgctttcctgatggtttgcatttccacattctaaaacagagcatggacagaggctctttactgtccttcactcctattcaagagcaaggttgttgccactggtgttatttccggtgtttaaaggcaaatagataaaaagaatggagaaggcctttcacacccaaagtgaaacgcgtcctcttctcatgcatcccgcttcccctcctgacttcctcctctattattaatagcaccarcatcctcctaatgacctagcctggaatctgcagaatcattcttgaccacgggtcctctctaggccacccacgttaaattgcttcagttcatctttttcttctgtttccctgaccaccagcctacattaggctcttgttaccacttaactgggcgcctgaaataagctcagcagctgagagagtcttgagccatttccattttcaaggctcctcgtatactaacagaaagaaagaatttcaagacaggattatggaaattcagtttgcttatatagtttaagaaattaatgcttttaatacacacaaaaa

SEQ ID NO: 229778 - DNA, 544 bp, Homo sapiens
agcaagctaccgtctggacaactggccaccatctcagaacgccattgaccctctgaggcaagccattcggctgaatcctgacaaccagtaccttaaagtcctcctggctctgaagcttcataagatgcgtgaagaaggtgaagaggaaggtgaaggagagaagttagttgaagaagccttggagaaagccccaggtgtaacagatgttcttcgcagtgcagccaagttttatcgaagaaaagatgagccagacaaagcgattgaactgcttaaaaaggctttagaatacataccaaacaatgcctacctgcattgccaaattgggtgctgctatagggcaaaagtcttccaagtaatgaatctaagagagaatggaatgtatgggaaaagaaagttactggaactaataggacacgctgtggctcatctgaagaaagctgatgaggccaatgataatctcttccgtgtctgttccattcttgccagcctccatgctctagcagatcagtatgaagamgcagagtattacttccaaaaggaattc

SEQ ID NO: 229779 - DNA, 417 bp, Homo sapiens
tttcttcctgcagcaacaaaaccaagatactttagagtcagagagccatggtccaagtccaagggacaagaaatgctttcccaggccctttttattttgtcaggcttagagtcttaattgacccactcaaaaaatacgcscatcaccctggaacatcatcagccttaaagattcagacatctgacatcacaagggctctctagcaactaaaaattgatttttcaaactcagtgtgtctccatctggagacaacgtctgagaaataaaaataaaatcctaagccccacaagcaactgaacataatataccccctcttggccacggggaccccagggaaaccttaaaaactgagtgcccggccacgatggaatgtaaagtcagacacaccccttccttattaatctttaaccagaattc

SEQ ID NO: 229780 - DNA, 408 bp, Homo sapiens
gaattctggatttcaaaggagacagcttcttttcttcctgcagcaacaaaaccaagatactttagagtcagagagccatggtccaagtccaagggacaagaaatgctttcccaggccctttttattttgtcaggcttagagtcttaattgacccactcaaaaaatacgcgcatcaccctggaacatcatcagccttaaagattcagacatctgacatcacaagggctctctagcaactaaaaattgatttttcaaactcagtgtgtctccatctggagacaacgtctgagaaataaaaayaaaatcctaagccccacaagcaactgaacataatataccccctcttggccacggggaccccagggaaaccttaaaaactgagtgcccggccacgatggaatgtaaagt

SEQ ID NO: 229781 - DNA, 555 bp, Homo sapiens
tcctgtgtggttcatggctgtatttatccaaggacacactgggccagatcctgaatacctaatcagttgagccagagcctcacagaaccaggactgctgccaaattcagtgaccacatgacaaacactcactctgtttctctgacacgctgttactagcaataattttatgcatgaaaattccaaagtcatactactctcagtgtaagcagctctcctaatgttcatttcagtatttgcttatgtttctatcccttttagagttgaktcagggctagtgccttacagaagatatttgtatctgaaaacacaattggcctcctagaagcttcccatctgatacagaactggagagagagagctgagaggaaatgagtcccattccaaaatctcttctccccctacacaggtccatcctcactagggagaggttgaatgcctgctgcccaagaggtactgctgggctctatgtgtagatatggccagggctccctgacctgagcctgagatgggaatatgtagattgccctggcctgaagctcagaacaggacaccc

SEQ ID NO: 229782 - DNA, 555 bp, Homo sapiens
tcctgtgtggttcatggctgtatttatccaaggacacactgggccagatcctgaatacctaatcagttgagccagagcctcacagaaccaggactgctgccaaattcagtgaccacatgacaaacactcactctgtttctctgacacgctgttactagcaataattttatgcatgaaaattccaaagtcatactactctcagtgtaagcagctctcctaatgttcatttcagtatttgcttatgtttctatcccttttagagttgattcagggctagtgccttacagaagatatttgtatctgaaaacacaattggcctcctagaagcttcccatctgatacagaactggagagagagagctgagaggaaatgagtcccattccaaaatctcttctcccsctacacaggtccatcctcactagggagaggttgaatgcctgctgcccaagaggtactgctgggctctatgtgtagatatggccagggctccctgacctgagcctgagatgggaatatgtagattgccctggcctgaagctcagaacaggacaccc

SEQ ID NO: 229783 - DNA, 612 bp, Homo sapiens
agactgaagcttggctaatggtgacagtgatgtagaggcagaatcttcttactctgtgcctgatattttatgttcattacccttacaacaaccttaagagatatacacattttttccattttccatgggagctagaatagaaagaaactaagtaatttgctaaatttcatacaatagtacgtggagaatttttattcagatcagtctccaaattccaattttttacctgtatgactttttcgtcttcctgcgtagggmaatgcttggcacaaagctgtagctaaataaaaccttagcaggttatctaccttaacacttgatgtgttatcaggaagtaatttaagcaagctcaaaatgaacttgctgcttcactttgaattgtggcttagaacaaaaaaatggtaattgctcaatgcaacccaacacctggaaacagtatcagagtcaccataatacaaatgcaagacaactcattaatttgatcataacaaggagcatatgtgttcaaactgaataaatccatgggatttattttaacttatttacatgttctagctcctttgggtgcatatgcataaccattgtacaaaaacaaattagtgattcagagac

SEQ ID NO: 229784 - DNA, 516 bp, Homo sapiens
catccaccctatgcaatgctctgttctcagtgtttggagagacagaaaatcttgtcttatttcaggagtggaaaagcttgtgattcaactgagtatatagcaagggctagatgaagaatttagaagaaagaaaaagatgtcgatcattgaaagaagcatttgaaatagggaatattttacgggaagcataagaacgggggttggaaaaaagtacagggcaaagaaatagaggcaggagtgggcaatcctcctgcatggaacagggcatgggtcaaccttatctggaatgggagccagtcagaatcatgctttgtgagtatcttacaggtcatgggaaccagaggaacacaattaattgcatgcaatacagaagtacttttatcttttgaaaaagtgtaagaaaaaatggtaaaagttttttcgtttcaaaaaaatctttttttwaaaaaaatttggttttccacctaagaggtagtcagtattctggtagttcctcatgttcagcatatgatgtaa

SEQ ID NO: 229785 - DNA, 547 bp, Homo sapiens
cacaagtaaagttcaagaaagattgtttctccatagatcccaggaacaaacagaagaatctctgaagatctcctaccaagaatatattagaaaagaataacaagatcccccaaaatgtattgggtagccaaatgatgaagtcagtctaagtgaagccaattgattaaaactctgaacttggcaatgcatcatggaaaccawctcatgtgaagaatgttgaatatcatgaggctcagccttgtgcctaattttgctctccaacagggtgagtcctgagcaggtctcaatgctcctacccatgtttccctcacccctagagaacatcagggggctaaagaagagctgcatgcctgcctcagtttcttgatggtaattttccacaggtgtttcttgatcaatgggacaagttaaacatctcttaacctaggtcttaattctcttttgacagaaccattctaaaggtcaaaaaaattcccagggtgaaactttaggaactctgttctaaaaaatatttctataggaaggattctgtgaactttaaagtatt

SEQ ID NO: 229786 - DNA, 553 bp, Homo sapiens
ttctttaagttgtcaaaagttcttttaagaaagttttctagatgatttgtagaatgtgagaagtgacttttaaatcatattctgttgataaaatgtgactctttagtgtaagtttaggccagaaactayataatatcttttcagtgtgcacatactgcaagtgactcccagtaaacatcttattagtgttgtaggatgctttttcacatttatcactcaaattggcataactcatatggttatgatgacagcttactgtctatatttgttaaagctgcattgttttgaatgtaagcttctttcctcaagttctgtgctcttttaggaatatttttgcatataataacttcactgcaaaacaaggggaagggatgtaggtgactagaaagatgaattaggaaaggcaaaatgaaataaagggcagaagtgatgagtcatacactgaagacacagaggctatccctcttgggtgagagactatcaaccacaatcttaaagactacactaggcttgtcctgtgctatttgacctatattcactgctatttctccta

SEQ ID NO: 229787 - DNA, 553 bp, Homo sapiens
ttctttaagttgtcaaaagttcttttaagaaagttttctagatgatttgtagaatgtgagaagtgacttttaaatcatattctgttgataaaatgtgactctttagtgtaagtttaggccagaaactacataatatcttttcagtgtgcacatactgcaagtgactcccagtaaacatcttattagtgttgtaggatgctttttcacatttatcactcaaattggcataactcatatggttatgatgacagcttactgtctatatttgttaaagctgcattgttttgaatgtaagcttctttcctyaagttctgtgctcttttaggaatatttttgcatataataacttcactgcaaaacaaggggaagggatgtaggtgactagaaagatgaattaggaaaggcaaaatgaaataaagggcagaagtgatgagtcatacactgaagacacagaggctatccctcttgggtgagagactatcaaccacaatcttaaagactacactaggcttgtcctgtgctatttgacctatattcactgctatttctccta

SEQ ID NO: 229788 - DNA, 547 bp, Homo sapiens
cacaagtaaagttcaagaaagattgtttctccatagatcccaggaacaaacagaagaatctctgaagatctcctaccaagaatatattagaaaagaataacaagatcccccaaaatgtattgggtagccaaatgatgaagtcagtctaagtgaagccaattgattaaaactctgaacttggcaatgcatcatggaaaccatctcatgtgaagaatgttgaatatcatgaggctcagccttgtgcctaattttgctctccaacagggtgagtcctgagcaggtctcaatgctcctacccatgtttycctcacccctagagaacatcagggggctaaagaagagctgcatgcctgcctcagtttcttgatggtaattttccacaggtgtttcttgatcaatgggacaagttaaacatctcttaacctaggtcttaattctcttttgacagaaccattctaaaggtcaaaaaaattcccagggtgaaactttaggaactctgttctaaaaaatatttctataggaaggattctgtgaactttaaagtatt

SEQ ID NO: 229789 - DNA, 567 bp, Homo sapiens
agacaactttgtttaatctttaagattatcagtcttacagattgatcaatatttcactatgtttggattttgctgtgctagatattcttaactgaagacataaytgaaataaatttatggacagagcaaagggaaaataacttgggaatttaaaaattgtaattattttaaaacaattataaagtttttaaaattgaatttagtgatccagtgttttcacttagggaaagaaaaaaaaagagaaaagaaatcaaaactgcagataaaacataatgaggctgattctaacaatcatatgcgactgagatgtttactttttggagggccattaactctttcaatcgttagagtctcatttagtgcattgaggctgacagataataaacacaatttgaacacaggagtggtgatggttttcccagtgattggtgggccccagctggtttccaagactgcgagagctcagagaagaggggcaagccagtctgattccagctctgcgaagagattctccctgtctgactgtggttgggcagatgtaacccactcaagcaagagcatatttgc

SEQ ID NO: 229790 - DNA, 510 bp, Homo sapiens
ccaaagtaggggtagaactcatagaactgctaaaaagggaagcattgataagaagcagaagcacctgtatttctgatcaagataaaaagatgggacttgctgagaaatgtcagttgaaattatagagcaaagaaaatacaactttctcttttccctttaggtaactattatatctcaggggctaatatcaaaataaccccaaaaccaaatagttttctgaggattagttatatatgtaatattatttctagaagaataggaggtgatggcctcagcttagacctctgaaatgagtgacagaagaagaaatacagcccctgcagccatattataggagtgaaaacaatctacaaatagggaatttgatacaatgtgttattttttaaactctgtgaaaattctgggtcatcatttttgcatgttatttcaaaacattaattttttattctagaaacatttcgtatttacaaaatctccaaggggtagcaaaraaggtaattaagccaagat

SEQ ID NO: 229791 - DNA, 396 bp, Homo sapiens
ctccaattaaagcagtcaagatcaaattctcttgattaagtagcgatagaaatcacaagaatggaattgaacatagttcctgattgtgtcagacacaactctgactgatgccactggggcttaccattcaaccacactaaaatttcaagaataaattaagtttcatgtttctgtcttcatagcacaaagacaatcctgaaagtaaagaaattataagtaccgtgtttgcaggttactaccttgtctttttaacttaagatgtctagacaagccagaaaatgaaygaatgtgccttgaaagggatagcaggccatttttgtttcagaatgggataactcttttggcatttgaaaaatatatacagtcgtggctctcagttttctgataaagacaatt

SEQ ID NO: 229792 - DNA, 565 bp, Homo sapiens
tatcactggggataatgaactttttttcccagagcaactgtaaaagtcagtcaacttaactctcttgccttgcttttattaagcttttaaagcacttatcaaaaataaggtgatatatttcttgtaacaaccctgccagcctttgttattcactctccactgacaaggaaaggtgaagacaaaaagttaaatgcttttgctgaggttacaaggcaaaattgggaagggcgagcaagggtacagccaaatccctaaattgttttccagtaatccttccaagagagcacaaaatcatattactttttccacaaaaatatctgactaatcgtcagactgtgtagacttacccaaagacacaagatagagtctgaaaaagacagggataayagataattgcctgcctgaagtcacttttatttggttctaaagatttcagtgagaccacaaaccatgccaaagacaatacttcagcacaatcagtaggaatgggaggcagtttgatttccagattaagatcagttaggattgttcagccgtggcagatagcacaaaggttttcaatgta

SEQ ID NO: 229793 - DNA, 469 bp, Homo sapiens
attctttttctgctaattatctgttactctttattgtcatctatttagtccataccatttggaagagtgatgattaagtagaagacttaatcatcaatcgacaattgacaatcgtcagtcaacaaattgacgagataaattcttagcctttgaatttcaaaatatgagtttgaaatacatgacagagacaaatttttgaaggaaaaaagctcttaatttgtaagaaacttagctttgaataaaaagaccagaatcctgacagattcaaagcataaagtctatacaaaarcgatagacatggaagaataagtgatcagtctgatagtgttttttgcatgaactcgtgctaaatgaagaattagaatttagacagagccaaagggaagaaattagatctttgtgtatgcccaaagaaaagtacttgcactgtgtctttttattcatgtcttccctaaactgattcccagtg

SEQ ID NO: 229794 - DNA, 618 bp, Homo sapiens
ctttattagaatatgatatattgacatatttatgaataaaacagtaagaacctggatttgcttcctagtaatgttggtggtggggaagcaattaaggataacatgaaacatgatttgcagtgagctgataattgtttaaggtaagtgaatgatatatacagattcataataccagtctacttactttagcatttgcttaaaatgtctcacaacaaagtgttttaaaatatgtgtctttagctcatgtcaaatctagtacrttaaacgaaataggcatttaagtagaatttttatcaaataattaatggctccctttcagttatttctccaactagtttgttcaaccattgctttaataactccagtcccttatttctgttcctattaatagtatatctgtagtcccaggggttttttttttaatttttatttttctgtagtgaataacctttcttagggccagggtctaatagacgttaaagggtcagtcttccttggtctaaaccctggctcaaccattttctggctatattatcttgagccaagtacttaatttttctaagcccgaaattcttcacctataaatcgaccagtactagcctcactaagtttttgtaa

SEQ ID NO: 229795 - DNA, 618 bp, Homo sapiens
ctttattagaatatgatatattgacatatttatgaataaaacagtaagaacctggatttgcttcctagtaatgttggtggtggggaagcaattaaggataacatgaaacatgatttgcagtgagctgataattgtttaaggtaagtgaatgatatatacagattcataataccagtctacttactttagcatttgcttaaaatgtctcacaacaaagtgttttaaaatatgtgtctttagctcatgtcaaatctagtacattaaacgaaataggcatttaagtagaatttttatcaaataattaatggctccctttcagttatttctccaactagtttgttcaaccattgctttaataactccagtcccttatttctgttcctattaatagtatatctgtagtcccaggggttttwtttttaatttttatttttctgtagtgaataacctttcttagggccagggtctaatagacgttaaagggtcagtcttccttggtctaaaccctggctcaaccattttctggctatattatcttgagccaagtacttaatttttctaagcccgaaattcttcacctataaatcgaccagtactagcctcactaagtttttgtaa

SEQ ID NO: 229796 - DNA, 564 bp, Homo sapiens
tgcagtgggctctgcctagttcgagcttcccagccacttcatttacctactcaagcttcagcaatggcagatgcctctcccccagtcaggctgctgccttgtggttcaatctcaggttgctccactagcagtgagcaaggcttcataggcatgggacctgctgattcaggcatgggagggaatctccttgtctgccagttgctaagaccttgggaaaagcacattatttgggtggaagtgtcccgtttttccaggtagtctgtcatggcttcccttggctaggaaagggaaatccccagaycccttgtgcttccggtgaggcaatgccctgccctgcttcagcttgccatgccccgcctcagcttgccatgccccgccctgcttcagcttgccctgcatggactgcccccactgtccaaccattgccaatgagataaagcaggtaccttagttggttgcagaaatcactcatcttctgcgtccttcacgctaggagctgcagaccagagctgttcctattcagccatcttggaatgccccccaagattattatgatttctaagt

SEQ ID NO: 229797 - DNA, 564 bp, Homo sapiens
tgcagtgggctctgcctagttcgagcttcccagccacttcatttacctactcaagcttcagcaatggcagatgcctctcccccagtcaggctgctgccttgtggttcaatctcaggttgctccactagcagtgagcaaggcttcataggcatgggacctgctgattcaggcatgggagggaatctccttgtctgccagttgctaagaccttgggaaaagcacattatttgggtggaagtgtcccgtttttccaggtagtctgtcatggcttcccttggctaggaaagggaaatccccagatcccttgtgcttccggtgaggcaatgccctgccctgcttcagcttgccatgccccgcctcagcttgccatgccccgccctgcttcagcttgccctgcatggactgcycccactgtccaaccattgccaatgagataaagcaggtaccttagttggttgcagaaatcactcatcttctgcgtccttcacgctaggagctgcagaccagagctgttcctattcagccatcttggaatgccccccaagattattatgatttctaagt

SEQ ID NO: 229798 - DNA, 603 bp, Homo sapiens
atttacagtcttgcacattctgcttcttctttcatcctggccctctcattcatagtgatgcaggatgttttcttgacctcttcatgggactcgcaaaagggatgtccagtttactcagcctgccagactcaacccttcatgggatgcaatgcaggaacaggagcaaacaagtgcaagaccaagttggccatttcagtgccaacaggagcaaatttagttcacctgagttcactgtgctccagcccttgtaggaggaagcaggtaggtgagcaagtgcaggaatctgccagccgctttggcactggctggagcaaactccgtgcaggtcccatagcagcatccaggtgggggtgcctgtgaccccaagggcccagaaggtgtgttacaatgctctcttagctccactgtccacagacagcagtgtgttatcagctcattgggccctttgcctcatcatgtggggtggctaccttccaccagcaagggcaaagggccagggtgacagcctttttkgttacttgtacattgtgcatcctgaattcttgtctggtgcccaagaggaatgaggtcacatggatgaattgaaggatggtgaatgcatag

SEQ ID NO: 229799 - DNA, 517 bp, Homo sapiens
atggtgtttcaaggtcaacagcaccacctagtggaataggaatcctctccatgaggcacattatcagtccttcagcaaaataccttagcctcccaattctcttccctttttgcacctctctgctagaaatcaggcttcacgctgcttctgtaagtgagaaaatcctgccttcaacttttaggggtataatatcctataaaaccaaattttagtctcaatactgtctcatcaacagaaaaatagccattcggtccctatgttcttttaagtcacctattctaccaccagttagagtggcaattaattagtaaggggattttaactttagtagttaaccagaaccattctctaagggtaaacaattcagcatgggccataatagcaggatatakggttcagtctagcatgcgccctccattaaagtggctttggccaactattatatagtgtgtgtgtgtgtgtgtgtgtgtgtgtgtgtgtgtggcttttttttttttttagatacattttttggggg

SEQ ID NO: 229800 - DNA, 627 bp, Homo sapiens
ttctatgacctcacatgataaaaaatatagtcttttcaataatagtttggaaaaaatactaaacaaacagactactataaccttcaacaataaaaaaaatcacaaggcatacaggaaacaggaaattgtagcccattcaaaggaacaaaataaactgaaagaaactgtacctgtgggagcccatacctcagacttacttgacaaaaactttaaaacaactgtcttaagtatgcttacagagcaaagagaaaacacagatacagaacaaaagaaaatcaggataataatatatgggcaaaataagaatatcaatgaataggtagaaattatataaaggaaccaaacagaatatttggactgaaaagtacaagaacaaaaaattttaaaattcactagagaggttcaaaagcagatttgagtargcagaaaaaagaatggccaaatttgaaaataggacaattgaaaatactgagtctgagtaaaagaaaaaaaaaagtgaacagagtctaagggacctgtgggataccatcaagaagactaatatatacaacagaagagtttgaaaaggaggagctagagaaaggggcaaaataatatttgaacaatattattgttcaaataatggct

SEQ ID NO: 229801 - DNA, 555 bp, Homo sapiens
caaagaagggcattatatgaaaaagagtttatcaagaagatataacagttataagcatatatacaacagacaacagaaatattgacagaattaaagggagaaataggcagttcaacaataatagttggagacttcaatacattttcaataatggatagagcatctagacagaaaatgaataaggagaaagagaacttgaacaacataaactaacaagatataacagacttatatacaacacttcatccaacaacagcagaatatacattattctcaagtgcacaaggaacatactccaggatagagcatatgttatgccacaaaacaaatttctataaattttaaaagatggagattatacagtgtatctttttcagtcrcaacgatgagatgagataaagctagaaataaataataaaagaaaaacatttttaaattcacaaatatattcagtatggatctaaggggaaaaattcacaaatatatggaaattaaattacacattcttaaataaccaaaagatcaaagaagaaatcacaagggaattttaaaaat

SEQ ID NO: 229802 - DNA, 603 bp, Homo sapiens
tccatgagaaaatttagaaagattatcttgtcaatagtgtgcagaaaggtgtctcagtctgttttctgttgctcacaacagaatacctgracctgggtaatttacaaagaaaaggaatttgttttttaaagttatggaatttggccgggcgcagtgactcacgtctgtaaccccagcactttgggaggctgaggcaggtggatcacttgaggtcaggagttcgagaccagcctggccaatatggtaaaaccctgtctctactaaaaacacaaaaatttagctgggcgtggtggcatgcacctgtaatcccagctacttgggaggctgaggcaggagaattgcctgagcctgtgaggcagaggttgcaccaagccgagatcacgccattgcactgcagcctgggcaagaagagcaaaacttcgtctcaaaaataaataaaataaaatagttatggacctaataagtctagcttcaaggggcctcatttggagaaagccttcttgctggtgggaactctctgcagagaactgaggtggcatggggcatcacatgtaagggggcttagcatgctggctcaggtctttctcttcttttgaagccacc

SEQ ID NO: 229803 - DNA, 603 bp, Homo sapiens
tccatgagaaaatttagaaagattatcttgtcaatagtgtgcagaaaggtgtctcagtctgttttctgttgctcacaacagaatacctggacctgggtaatttacaaagaaaaggaatttgttttttaaagttatggaatttggccgggcgcagtgactcacgtctgtaaccccagcactttgggaggctgaggcaggtggatcacttgaggtcaggagttcgagaccagcctggccaatatggtaaaaccctgtctctactaaaaacacaaaaatttagctgggcgtggtggcatgcacctgtaatcccagctacttgggaggctgaggcaggagaattgcctgagcctgtgaggcagaggttgcascaagccgagatcacgccattgcactgcagcctgggcaagaagagcaaaacttcgtctcaaaaataaataaaataaaatagttatggacctaataagtctagcttcaaggggcctcatttggagaaagccttcttgctggtgggaactctctgcagagaactgaggtggcatggggcatcacatgtaagggggcttagcatgctggctcaggtctttctcttcttttgaagccacc

SEQ ID NO: 229804 - DNA, 347 bp, Homo sapiens
ttgtccagtgcaaaaagttacactatgaacatttgttgaataaatgttgaaagacaaccactttggacaaacatttacatttatttccaaaagaattctaaccacacttttttttcttaatgctacaaaatagagataataattcagttttatatgagtatgaatccatctgtgtctacactcaaacccaccatgctcaggagatcttcagtattgtctattgcttcctgyatccactgtctgcctggatattgcctatccatttgtggtaagcagcctctaagaagatccccagtggtttttgtctccggtattcataccattgtacagttcccgcccacaatgag

SEQ ID NO: 229805 - DNA, 318 bp, Homo sapiens
ggtaatagtcatcccaataaaactgttctggaaatgactaatgaatcrtctcaacttaatagtaattctgtcatactaggaaagcaacagaaatggagccaagctgcacattagaagctacttgaagtccctgtgaactgatgccttcttaggttatggcagacaagttcacccaacaaatatttactgcatgtctgctaagtgccagacacagaggtgagatcctctgtgtcactattcatgaaatggtaagaatttttatttctttgccctgcttcaatcagttcccccacctcagagaggccctcattttagatc

SEQ ID NO: 229806 - DNA, 521 bp, Homo sapiens
atatacccaaaggaatgtaaatcgtgattacaaagatacatgcatgcatatgttctctgtagcactattcacaatagcaaagacataaaattaacccaaatgcccatcaatgataggctggataaagaaaatatggcacatatacaccatggaatactatgcagccataaayaggaatgagatcatgtcctttgcaggtacatggatggagctggaagctattatccacagcaaagtaacaggaacagaacaccaagcaccatgtgttctcacttttaagtaggagctgaacaatgagaacacatggacacatgggggggaaaaacacactaggacctgtcaggggcaatggggagggagagcatcaggaagaatagctaatggatgctaggcttaatacctaggtgatgagttgatctgtacagcaaaccaacatggcacacatttacctatgtaacatgcttgctcatcctgcacctgtaccccaaaacttaaaataaaagttgaagaaaaaaaaaaag

SEQ ID NO: 229807 - DNA, 521 bp, Homo sapiens
atatacccaaaggaatgtaaatcgtgattacaaagatacatgcatgcatatgttctctgtagcactattcacaatagcaaagacataaaattaacccaaatgcccatcaatgataggctggataaagaaaatatggcacatatacaccatggaatactatgcagccataaataggaatgagatcatgtcctttgcaggtacatggatggagctggaagctattatccacagcaaagtaacaggaacagaacaccaagcaccrtgtgttctcacttttaagtaggagctgaacaatgagaacacatggacacatgggggggaaaaacacactaggacctgtcaggggcaatggggagggagagcatcaggaagaatagctaatggatgctaggcttaatacctaggtgatgagttgatctgtacagcaaaccaacatggcacacatttacctatgtaacatgcttgctcatcctgcacctgtaccccaaaacttaaaataaaagttgaagaaaaaaaaaaag

SEQ ID NO: 229808 - DNA, 507 bp, Homo sapiens
aagcttggttgggggatgggcatctgccattactgaggcttgagtaggcagctttccccggacagtgctaaggaagcctggaagttcagactgggcagaactcacyacagcatggcaaaacagctgtggccagactgtcttctctagactcctcctcactgggcagggcatctctgagacaaaggcagcagtcccagtcaggggcttatagataaaactcccatctccctgggacagagcacccagtggaagaagcagctgtgggcacagcttcagtggacttaaacattcctgcctgctggttctgaagagagcagctgatcctgacaaggaggattctcccagcacagcttgagctctgctaagaaacagactgcctcctcaagtgggtccctgacccccatgcttcctgactgggagagatcacaggaatggctaactagaataaccagtttagagaagaacataaatgacctgatggagctgaaaaacacaggacaagaactt

SEQ ID NO: 229809 - DNA, 542 bp, Homo sapiens
gtttggaacaatcttgttttttctttataagcttgcttttcacttaagtttacctagtgagccatgagataaatcaagyacggctgagtgtctgactagaactactgatataaatacttgcccaaaatttgaaataagaaattctgtttctcaaaaagttaaacatagaattactatacaacccagcaattccacttatacatatatacccagaagaattgaaaagagctactcaaacaagtgcatgtacaggtatgtttatagtagcattattcacaatagccaaaaggtggaaacaatccatatatgtatcaatggatgaattgacagacaagttatggtatatacagacaatggaatattattcaaccattaaagggaataaggtactgatacaggctacaacatgaatgaacctcaaaaacatcatgtaagcaaaagaagccagacacaaaaggacaaatattgtatgattccatttatatgaaacatccagaataagtaaatctatagaggcaatgcagcttgatggttgccacagg

SEQ ID NO: 229810 - DNA, 378 bp, Homo sapiens
taaacactgtcaggctcacagtaaaaatctcatttcactattwtttgataacgaatcctgtagtgttcatacgaaagcagctgccattatgtaaatgtggaacacaggtaaaaacataatatatgccataacacttttttgtcaccatgagcctgtttctcccacatttaaaaaacatactagcttgcctctgactaaatttagcatgtaactttcttagagcgtgtttggtgtttttcttgggggaaaatacttattaatagttggtctctcttcttcaagcccatttggccactgtttttctactatttagccatgctaaccatcacttgccacgatcacctccctcctctgctgatcactgttatccattcatca

SEQ ID NO: 229811 - DNA, 578 bp, Homo sapiens
cactgggactacaagcacaaaccaccaagtccaggaagagggattgctttcagatccttccccagagcctagtctgaagcttctgttatctaagaagtcagcaccaaaagagccatctttccaaggaaacacaaaccaacctgttgctttgttaatgttatttattgttgtcttcccttctttagatattcactcctttaggaaygaaatcttacctctatgattcacccttataactcagctagggcatgccttgaatacaagaggtcaataaatattgttgaatgaatgaatgtatatatgacttaacactagaatgtacagtaaatgatgaatacagcactgttcaagttgaatatacattgaattcaattttatataaagttgtacactaaatgctgagaaaaacacaactatgaagattaaccacagctcttactctttaggcatagatggtctaattgaaaagtcaaacttgcacttagtgacatcagcaaaatggtgaagttggcagctgcagttctcatttcccacagaaactctaaaaaacaagaataaactatcagaatcaacttttt

SEQ ID NO: 229812 - DNA, 560 bp, Homo sapiens
tttccttgtgtgttttgattttcaattaagtgctgcaattacttgaattttttttctgttaaatattgataacttacatgaaagttttttctccagtaatgatttacaattattcctggtaggcgcctaaggtactttcaattcatgaccactttcaataaaattattaactctaagttcttttctaacaatactggtggcaaactgagggaactcatacctatggctacaaatttccaggacagatcacctcaagctcagctttaaagtcttactggggaatttttctaaaaccttamatgtggatagttgggggtctaggattatatgtaattcacctttacactgagggtgtaaaattgtgggttcccagaaatatctctgcagcttcctgcttgtctgtctaccttggatgtcagtgggcttttctccaggcatcagtttccttaaagcctatgaaaaccatagctgatttgttttgttgattagtaaagtccctctcaatatgtaaataagctttcatgctctaaaagtattttccaaaatatgacttctacttc

SEQ ID NO: 229813 - DNA, 560 bp, Homo sapiens
tttccttgtgtgttttgattttcaattaagtgctgcaattacttgaattttttttctgttaaatattgataacttacatgaaagttttttctccagtaatgatttacaattattcctggtaggcgcctaaggtactttcaattcatgaccactttcaataaaattattaactctaagttcttttctaacaatactggtggcaaactgagggaactcatacctatggctacaaatttccaggacagatcacctcaagctcagctttaaagtcttactggggaatttttctaaaaccttacatgtggatagttgggggtctaggattatatstaattcacctttacactgagggtgtaaaattgtgggttcccagaaatatctctgcagcttcctgcttgtctgtctaccttggatgtcagtgggcttttctccaggcatcagtttccttaaagcctatgaaaaccatagctgatttgttttgttgattagtaaagtccctctcaatatgtaaataagctttcatgctctaaaagtattttccaaaatatgacttctacttc

SEQ ID NO: 229814 - DNA, 560 bp, Homo sapiens
tttccttgtgtgttttgattttcaattaagtgctgcaattacttgaattttttttctgttaaatattgataacttacatgaaagttttttctccagtaatgatttacaattattcctggtaggcgcctaaggtactttcaattcatgaccactttcaataaaattattaactctaagttcttttctaacaatactggtggcaaactgagggaactcatacctatggctacaaatttccaggacagatcacctcaagctcagctttaaagtcttactggggaatttttctaaaaccttacatgtggatagttgggggtctaggattatatgtaattcacctttacactgagggtgtaaaattgtgggttcccagaaatatctctgcagcttcctrcttgtctgtctaccttggatgtcagtgggcttttctccaggcatcagtttccttaaagcctatgaaaaccatagctgatttgttttgttgattagtaaagtccctctcaatatgtaaataagctttcatgctctaaaagtattttccaaaatatgacttctacttc

SEQ ID NO: 229815 - DNA, 560 bp, Homo sapiens
tttccttgtgtgttttgattttcaattaagtgctgcaattacttgaattttttttctgttaaatattgataacttacatgaaagttttttctccagtaatgatttacaattattcctggtaggcgcctaaggtactttcaattcatgaccactttcaataaaattattaactctaagttcttttctaacaatactggtggcaaactgagggaactcatacctatggctacaaatttccaggacagatcacctcaagctcagctttaaagtcttactggggaatttttctaaaaccttacatgtggatagttgggggtctaggattatatgtaattcacctttacactgagggtgtaaaattgtgggttcccagaaatatctctgcagcttcctgcttgtctgtctaccttggatgtcartgggcttttctccaggcatcagtttccttaaagcctatgaaaaccatagctgatttgttttgttgattagtaaagtccctctcaatatgtaaataagctttcatgctctaaaagtattttccaaaatatgacttctacttc

SEQ ID NO: 229816 - DNA, 586 bp, Homo sapiens
atggttattcagtgacttgtctggtattccctgtcagactgcacacccatccacacaggaattctttggagcatgccacagggggctatggaaggaataggttcatgcaggatgtgtgtagggccttttggtgatctaccctggaggccgtcttgctgtagctcaggggttataggagaacccaccctgttgagaamaactgtggaattctctagagccaaatccaaagaggacttatctctcaatgtgtgtcccccaccctaccccattgagagtggcacaacaatttaaggcctttattaagaaaaggtctaccagggtgagtgggggaagaagctgactttgggggaaatgcagtttgtcaagtggcaatggtatcttcttcctctttttgccttggggaagagaaggtatttgttttgttccttctactttctacaagattgaggggtttagtcttttctctccatagttagaaacacagtttattctctgaaagttactatgctcctaaacctgaaaccatcagaatgtgcagcactgcccatgaggggaaggagctagagagagatggcggaagaaagag

SEQ ID NO: 229817 - DNA, 608 bp, Homo sapiens
gaaaaccaaataccacatgttctcacttataagtgggagctaaacgctaagtacatatggacacaaagatgggaacaatagacactggggagtactggagggggaagggagggaagggggattggttgaaaaactacctattggttactatgctcactacctggatgagggkatccatacctgaagcctcagcatcatgcaatatactcgtgtaacaaacctgcacatgtacaccctaaatctaaactaaaagttaaagaaaaaaatgtaaaaaaataaaaataaacaaagttgggtagtgttattcttctgtcttggctcttctccttcaatattgtgttggctattctgtcttttgcctctccgtatacactttagaatcagtttgttggtatccacaaaataacttgctgatattttggctgtactgcattgaatctatagaccaatttgggaagaactgacaccttaacaatattgatcttgattattatttaagtcctgctttgttcagcgaggcacaatctcatttatgccttataatatccctatgaggtgagcaaactgcaaacacaggctcagataaagtaggtaattagttcaaagtc

SEQ ID NO: 229818 - DNA, 608 bp, Homo sapiens
gaaaaccaaataccacatgttctcacttataagtgggagctaaacgctaagtacatatggacacaaagatgggaacaatagacactggggagtactggagggggaagggagggaagggggattggttgaaaaactacctattggttactatgctcactacctggatgaggggatccatacctgaagcctcagcatcatgcaatatactcgtgtaacaaacctgcacatgtacaccctaaatctaaactaaaagttaaagaaaaaaatgtaaaaaaataaaaataaacaaagttgggtagtgttattcttctgtcttggctcttctccttcaatattgtgttggctattctgtcttttgcctctccgtatacactttagaatcagtttgttggtatccacaaaataacttgctgatattttggctgtactgcattgaatctatagaycaatttgggaagaactgacaccttaacaatattgatcttgattattatttaagtcctgctttgttcagcgaggcacaatctcatttatgccttataatatccctatgaggtgagcaaactgcaaacacaggctcagataaagtaggtaattagttcaaagtc

SEQ ID NO: 229819 - DNA, 522 bp, Homo sapiens
aagtaatgtccagaagtttctaactcaatttaaattgagctttttctcatccacctgcatccctgtggtgcctgagtctgaaagcatgctggaatttcatttgggaagctaccattgacacaatttgggctgaaagcttagctcttcatggaaaatgaatgaaagaatgcttaagcatgactttcctcagaagaataaattaaggattaatgttgcatttcaactaaagttggctaatgattattctctgcaccgtggtttctgaaataacatgattgttggatgaatcacagaaacaaaaggaaggaaggaaagaactagatcaactcagggggacaagttgcttgggaaaatagctgaaccacctaaagcatattttaattagccacagtggagcaaacactaaattatgctttgggctcarcacaccttgaagcagctagagggattctggggatgaaagctttaattttgtccaaaggaaaccactgtataatacatctgttggtggttaacagatct

SEQ ID NO: 229820 - DNA, 534 bp, Homo sapiens
acatcaaactgataaaatttcagtggggaggatttacagctcttcaaacattgtgaaatctttacatctcctgagttcaccacattgccttgcactacataggcactcaataatgagaataaataaatctaaaayttaacttaatttattaattgaaatagttttctgtttcctggggttaggcatggggtcaggtgggtgccaaggaagtggtgtcaggggagggaagaatttcctacagcatcctctgcaaatatcactggctgtcttcagagtcctccctcactattgcctaattttccctcagcaggtatccagagctgcctcttcagtcaaactgagtcctttggcacaaacttcctcaatttcctatgtccactctgcaaacttcctttctctgccctcagcctcctctgatcttatcactaatcctggaagacaaggcatctcttctccccagactgattttcccacctatgcacttgatccaatcctcttggcccttttcaggactgtgttcaaactgttgaatct

SEQ ID NO: 229821 - DNA, 534 bp, Homo sapiens
acatcaaactgataaaatttcagtggggaggatttacagctcttcaaacattgtgaaatctttacatctcctgagttcaccacattgccttgcactacataggcactcaataatgagaataaataaatctaaaacttaacttaatttattaattgaaatagttttctgtttcmtggggttaggcatggggtcaggtgggtgccaaggaagtggtgtcaggggagggaagaatttcctacagcatcctctgcaaatatcactggctgtcttcagagtcctccctcactattgcctaattttccctcagcaggtatccagagctgcctcttcagtcaaactgagtcctttggcacaaacttcctcaatttcctatgtccactctgcaaacttcctttctctgccctcagcctcctctgatcttatcactaatcctggaagacaaggcatctcttctccccagactgattttcccacctatgcacttgatccaatcctcttggcccttttcaggactgtgttcaaactgttgaatct

SEQ ID NO: 229822 - DNA, 534 bp, Homo sapiens
acatcaaactgataaaatttcagtggggaggatttacagctcttcaaacattgtgaaatctttacatctcctgagttcaccacattgccttgcactacataggcactcaataatgagaataaataaatctaaaacttaacttaatttattaattgaaatagttttctgtttcctggggttaggcatggggtcaggtgggtgccaaggaagtggtgtcaggggagggaagaatttcctacagcatcctctgcaaatatcactggctgtcttcagagtcctccctcactattgcctaattttccctcagcaggtatccagagctgcctcttcagtcaaactgagtccwttggcacaaacttcctcaatttcctatgtccactctgcaaacttcctttctctgccctcagcctcctctgatcttatcactaatcctggaagacaaggcatctcttctccccagactgattttcccacctatgcacttgatccaatcctcttggcccttttcaggactgtgttcaaactgttgaatct

SEQ ID NO: 229823 - DNA, 609 bp, Homo sapiens
tcagcagggtgtccaagaattaccaatgcattaaggcagatataagcagccggctcacccttgtactgggtgaagrtaattttctagaacatgggcaatacacccttagttctgctcttagctgaacatgtaggggggtgaggctgggtttggaaaaaatgtactaaattggttcttttatggcttcaagactggccatctatgagacacaatgaaaattaatttgtaaccctggagaactgtttttttaggatgtatttttggattgcagcttgtctagctctgaatggaaaacacaaaattacattaagataacataaatgtacaggatatagaaccacccctgttaggaatttgtgatcaacattcagattttcctctgagacattttaaacatctttatgctgcaagacatagttctacaaagggacatgcgtagtcagagaaacaagtcccacagagtctttcactgaaggaactaaaactccatcgttcttttcaagaaatttgaccttggttcttctttttgctgaggcagagtaggacactaacttgaaaagaatcacatgtcttacgctgctgttgatagcctctctgtccaagagcaaa

SEQ ID NO: 229824 - DNA, 609 bp, Homo sapiens
tcagcagggtgtccaagaattaccaatgcattaaggcagatataagcagccggctcacccttgtactgggtgaagataattttctagaacatgggcaatacacccttagttctgctcttagctgaacatgtaggggggtgaggctgggtttggaaaaaatgtactaaattggttcttttatggcttcaagactggccatctatgagacacaatgaaaattaatttgtaaccctggagaactgtttttttaggatgtatttttggattgcagcttgtctagctctgaatggaaaacacaaaattacattaagataacataaatgtacaggatatagaaccacccctgttaggaatttgtgatcaacattcagattttcctctgagacattttaaacatctttatgctgcaagacatagttctacaaagggacatgcgtagtcagagawacaagtcccacagagtctttcactgaaggaactaaaactccatcgttcttttcaagaaatttgaccttggttcttctttttgctgaggcagagtaggacactaacttgaaaagaatcacatgtcttacgctgctgttgatagcctctctgtccaagagcaaa

SEQ ID NO: 229825 - DNA, 590 bp, Homo sapiens
agatctgtccccggcgggtaagggatgaatccatgatgtcatctgccaccaggaagaaagcttgcagctagaaagagtggaataagacctgcagggctcctcattactgttccttctatcagcaacagagctgctactttatatctgtatatagttttgcttttttttggtaggggacagagtctcactattatccagtgcagtggtgcartcacagctcactgtagcctctaactcccaggctcaagtgatcctcccacttcagcttcctgagttcctgagaccataggcacataccccatgcctggctattttttttttttaatttattttttgtagagacagggtcccactatgttgctcaggctggttttgaacccctgggttcaaatgatcctcctgcctcagcctcccaaattactgggattacaggcatgaggcatcacagccggccagagctgctgcctttgacagtccctatgagctgggaaagtcaggatggggagacagaagacttctgtgctatggagacttggaaagtgacataacatgtttggctcagactccccgcctataaaatggaactaaaa

SEQ ID NO: 229826 - DNA, 569 bp, Homo sapiens
atcctctgctatgtgtggattattccgccaaatgcatacctctttgaggggtccaaaaagtggggtaaacacatgcgaccaggcatggtgactcatgcctgtaatcccatcactttgggaggccgaggctggtggatcactgaaggtcatgattttgaaaccagcctggccaatatggtgaaaccccgtctctgctaaaattacaaaaaattagctgggtgtggtggtgggcacctgaaaccccagctactccagaggytggagaatcgcttgaacccaggagatggaggttgcattgagccaagattgcgccattgtattccaggctgagagacaatagcgaaactctgtctcaaaaaaacaaaaacaaaaaaacacatgtattctctgctgtggtttgcgtagccaatcaaagaaagggatagacacaggagaactagagaaccctgctctggtgggatttgcagttttgattctccctagcctggcctccatcaacaaagataccttgagtcattcatttttccacttccaatcactgaatcccaagtggagacctcaagcaaatt

SEQ ID NO: 229827 - DNA, 569 bp, Homo sapiens
atcctctgctatgtgtggattattccgccaaatgcatacctctttgaggggtccaaaaagtggggtaaacacatgcgaccaggcatggtgactcatgcctgtaatcccatcactttgggaggccgaggctggtggatcactgaaggtcatgattttgaaaccagcctggccaatatggtgaaaccccgtctctgctaaaattacaaaaaattagctgggtgtggtggtgggcacctgaaaccccagctactccagaggttggagaatcrcttgaacccaggagatggaggttgcattgagccaagattgcgccattgtattccaggctgagagacaatagcgaaactctgtctcaaaaaaacaaaaacaaaaaaacacatgtattctctgctgtggtttgcgtagccaatcaaagaaagggatagacacaggagaactagagaaccctgctctggtgggatttgcagttttgattctccctagcctggcctccatcaacaaagataccttgagtcattcatttttccacttccaatcactgaatcccaagtggagacctcaagcaaatt

SEQ ID NO: 229828 - DNA, 569 bp, Homo sapiens
atcctctgctatgtgtggattattccgccaaatgcatacctctttgaggggtccaaaaagtggggtaaacacatgcgaccaggcatggtgactcatgcctgtaatcccatcactttgggaggccgaggctggtggatcactgaaggtcatgattttgaaaccagcctggccaatatggtgaaaccccgtctctgctaaaattacaaaaaattagctgggtgtggtggtgggcacctgaaaccccagctactccagaggttggagaatcgcttgaacccaggagatggaggttgcattgagccaagattgcgccattgtattccaggctgagagacaatagcgaaactctgtctcaaaaaaacaaaaacaaaaaaacacatgtattctctgctgtggtttgcgtagccaatcaaagaaagggatagacacaggagaactagagaaccctgctcyggtgggatttgcagttttgattctccctagcctggcctccatcaacaaagataccttgagtcattcatttttccacttccaatcactgaatcccaagtggagacctcaagcaaatt

SEQ ID NO: 229829 - DNA, 277 bp, Homo sapiens
acccactaaggcgaaacataccagagtgcgggtgactcaaggcttaatcagttgaagggctggccaggagacactgggcccactgagtacagatttatactcccagttccggaaccagagcaagctcaggaaaggcctagcatggctagcataatcattatgcagggcagtgggtggctgtgggggtcagtaggtggkcagcagatgccaaaggcaaggaaatgttccctagaggtggagagagaaagcctttccctccattaggcttcagtctttg

SEQ ID NO: 229830 - DNA, 570 bp, Homo sapiens
gcctggcacttggtaggtgagcaataaatatttgttgactgaaagaatgattcggtgataaccaacataagtgatttcatactttctttttcaccagttaatctgcccagtgcactgtcttcaaatatgtctatttgaattttctcacccattctttttctccacctacgatcacacttgcccctcacctactagttcatacttcaaagcctcattttacatgaggctttcctgaagccatagacawggggctgtcctccacgcacctattgctctcacctgcaggtggcccatgtctgcactgcccaaatttgttaggcgttttgtttgttctctgatttcttttaaagcacgcatccaggctggatgaagtagctcacacctgtaatctcagcgctttgggaggctgaggtgggaggatcacttgaggccagggcaacacagcaggaccctatctctacaaaaaattttaaaattagttggtcttggtggtgtgtgcctatagtcccagctactccagaggctgaggcaggaggattgcctgagggaagagttcaaggttgcagtgag

SEQ ID NO: 229831 - DNA, 599 bp, Homo sapiens
cagtgttccctacttcctaaaggagggaaaagcgccgtcgaacagttgtcaaattttcttcacaaacagcttggttttccttaatggatgaaatcacccttcgttgatggatccatttgcacaggaatttctagatcatctcagggctcacactctgggtcccacctcctgctctgctacaaacggttaggtatctttatgcatcagtatccagctggmcatagcggccctgtgtcagaaattatatttcctctaattggctaaagggaccattttcttaatagtttctttcttttatagggccatgtgctatattccatttatatacacattctggaacacagtattccagagcatgttaattgttcagagataatggacctaacaaatagaatggtgcggttaaggagaaatccagttgcatggaggtccttggtcttttgtgtggcttgaagaggttgaggatgctgatgtgttctttgggaagagattcacagttgacaggaaacatctgctttaatttgctccaacatcaacaagatcgatgtggtaggaaacctgttgttactgtgtgagttccatttatcaaggcagggctt

SEQ ID NO: 229832 - DNA, 624 bp, Homo sapiens
tggctcttcaattcttgaaccacttgcctaaatacatttggtatttacaataggtaacacacagtaccaaacaaatgtgaaaaaygagggaacaagaagtcagtaaaaattgaaagttcacatcatatagttcatgctcttgacactttaaagtgaaatgcaaaggaattatttgttcctaattaactcaagctttgctcaacacttgaaccagcaagaatacagcacataaattatcccaaacgattatctccaaattcttggaagccagggaatccctctacctatctcctggtatcagtaacatttttagaaaactcattcaactagcaatgtggctgcagcaatgagcctgaatgagagcccacgaagattcgggtctcttggacaactataaaaattgtgaagatgccaaaaataagcctagtccttccaaccatatgtaatcagcgtattgaaatcattttgcttaatataatgtaccccttgcctttaattgtccagccatcccatgcgtgtgcacacatatgcctatgcattctcccagctagattagcaaaagcaggccctgttgcttccagtgagtatcatggctctctgtaaatttctgctcattacctaagc

SEQ ID NO: 229833 - DNA, 596 bp, Homo sapiens
ggacacaaaccaggtatttcctcttttgggctaagttaaattacttmtaaaatgaggataccatcttaacacaaactgcattcaagcttatagaagcactaaaaaagtaaaacatattagatctattgctattctatgccttctaggaaaaagcaatatgataaaatatagggggaaaatgttgtatacatacatgttattaatgttgttgtcatatggtctaaaattaatctataaaacaaaaagctatcttctgaatactgtagaagttatatttgctttacaatataagataatatttttgacaatctcattttggttctttaatttttgaatcacttgcctaaatatatttggtagttactgaattcctttgtaaaatctcctaacacggtgcttggtatagggcaagtgatcaataattatgcattcaataagctgatgcgtaattattccaagcttggttatggcttggaaaagaaactcctacctttcatgagaaatttaataacccattgacttgttaggtttcttcttaactaaggcattccagcatcttcaccttaattgcttagacaagttttggcaattcacag

SEQ ID NO: 229834 - DNA, 596 bp, Homo sapiens
ggacacaaaccaggtatttcctcttttgggctaagttaaattacttataaaatgaggataccatcttaacacaaactgcattcaagcttatagaagcactaaaaaagtaaaacatattagatctattgctattctatgccttctaggaaaaagcaatatgataaaatatagggggaaaatgttgtatacatacatgttattaatgttgttgtcatatggtctaaaattaatctataaaacaaaaagctatcttctgaatactgtagaagttatatttgctttacaatataagataatatttttgacaatctcattttggttctttaatttttgaatcacttgcctaaatatatttgrtagttactgaattcctttgtaaaatctcctaacacggtgcttggtatagggcaagtgatcaataattatgcattcaataagctgatgcgtaattattccaagcttggttatggcttggaaaagaaactcctacctttcatgagaaatttaataacccattgacttgttaggtttcttcttaactaaggcattccagcatcttcaccttaattgcttagacaagttttggcaattcacag

SEQ ID NO: 229835 - DNA, 596 bp, Homo sapiens
ggacacaaaccaggtatttcctcttttgggctaagttaaattacttataaaatgaggataccatcttaacacaaactgcattcaagcttatagaagcactaaaaaagtaaaacatattagatctattgctattctatgccttctaggaaaaagcaatatgataaaatatagggggaaaatgttgtatacatacatgttattaatgttgttgtcatatggtctaaaattaatctataaaacaaaaagctatcttctgaatactgtagaagttatatttgctttacaatataagataatatttttgacaatctcattttggttctttaatttttgaatcacttgcctaaatatatttggtagttactgaattcctttgtaaaatctcctaacacggtgcttggtatagggcaagtgatcaataattatgcattcaataagctgatgcrtaattattccaagcttggttatggcttggaaaagaaactcctacctttcatgagaaatttaataacccattgacttgttaggtttcttcttaactaaggcattccagcatcttcaccttaattgcttagacaagttttggcaattcacag

SEQ ID NO: 229836 - DNA, 582 bp, Homo sapiens
tgaggtgtgctgcaattgtaaatgcacaccaaattttgaagagttagtagaaaatgcaatcgattgcattaataatttttatatygatgacatggtataataatattttagatatagtagtttaaataaaacacaatgtgaatttcacttgtttcttttcacttttttaatgtggctactaaaaatgtaaagtatgtatgtgactcacaatatttttctgttggacaatgctgccttagagtgtagcaccatcactgtattccaataaatgctcataaaaaagaatagcaatagtcctattctagtaagtgggagagaagacagcccagaagattttaccaacaattttcttgttgtgtgggaaaagtgaagacctcaaagaaataaaaatagccctttgcttcactccttaccattttttacccttcacaaaacttaaagaataggtagtcttgtttcatttttgcattattttatgcttgccagattacagaatgcatgaatatctccctccactccctacaccccaggcaccatactatattctttggctgtgtccatcattttcaagtccctgagttt

SEQ ID NO: 229837 - DNA, 517 bp, Homo sapiens
aatatttttctgttggacaaygctgccttagagtgtagcaccatcactgtattccaataaatgctcataaaaaagaatagcaatagtcctattctagtaagtgggagagaagacagcccagaagattttaccaacaattttcttgttgtgtgggaaaagtgaagacctcaaagaaataaaaatagccctttgcttcactccttaccattttttacccttcacaaaacttaaagaataggtagtcttgtttcatttttgcattattttatgcttgccagattacagaatgcatgaatatctccctccactccctacaccccaggcaccatactatattctttggctgtgtccatcattttcaagtccctgagttttaatgccagcacactgatttccaaaagtaaagcaagtactgtctctctagatagttgtctatgatgccattcaaccatccatgctgataacttcagagttcatcaacaacttctgaattccttttcaatttccaagctccttg

SEQ ID NO: 229838 - DNA, 517 bp, Homo sapiens
aatatttttctgttggacaatgctgccttagagtgtagcaccatcactgtattccaataaatgctcataaaaaagaatagcaatagtcctattctagtaagtgggagagaagacagcccagaagattttaccaacaattttcttgttgtgtgggaaaagtgaagacctcaaagaaataaaaatagccctttgcttcactccttaccattttttacccttcacaaaacttaaagaataggtagtcttgtttcrtttttgcattattttatgcttgccagattacagaatgcatgaatatctccctccactccctacaccccaggcaccatactatattctttggctgtgtccatcattttcaagtccctgagttttaatgccagcacactgatttccaaaagtaaagcaagtactgtctctctagatagttgtctatgatgccattcaaccatccatgctgataacttcagagttcatcaacaacttctgaattccttttcaatttccaagctccttg

SEQ ID NO: 229839 - DNA, 517 bp, Homo sapiens
aatatttttctgttggacaatgctgccttagagtgtagcaccatcactgtattccaataaatgctcataaaaaagaatagcaatagtcctattctagtaagtgggagagaagacagcccagaagattttaccaacaattttcttgttgtgtgggaaaagtgaagacctcaaagaaataaaaatagccctttgcttcactccttaccattttttacccttcacaaaacttaaagaataggtagtcttgtttcatttttgcattattttatgcttgccagattayagaatgcatgaatatctccctccactccctacaccccaggcaccatactatattctttggctgtgtccatcattttcaagtccctgagttttaatgccagcacactgatttccaaaagtaaagcaagtactgtctctctagatagttgtctatgatgccattcaaccatccatgctgataacttcagagttcatcaacaacttctgaattccttttcaatttccaagctccttg

SEQ ID NO: 229840 - DNA, 551 bp, Homo sapiens
tgcttttctatttccatgaagaatgttattgaaattttgataggggttgtgttaaatcagtatattgtttttggtagtatgaatgttttaataatattaatgtttttgatccatgatcagtgagcacaggatatctatttatttgtgtcttattcaatcaatgttttatagttttcagtatactttcaccycttggttaaatttattcctaagtatttttttgatgctatcataaatggcattgttttcttgattattttcagctgggtcattatttatgtatagaaatgctactgatgtttgtatgttgattttgtatcctgcaacttattgaattcatttattagttctaaaaatttgtgtgtgtgtttgtgtgtgtgtgtgtgtgtgtgtgtgtgcatgtgtagaatctttagaattttctatatataggatcatatcatctgtaaatagagattattttactttctcctttccaatttggatgacttttatttatttttcttgtctgattgctcttgctagtacttccaaaactatgttgaatagaa

SEQ ID NO: 229841 - DNA, 551 bp, Homo sapiens
tgcttttctatttccatgaagaatgttattgaaattttgataggggttgtgttaaatcagtatattgtttttggtagtatgaatgttttaataatattaatgtttttgatccatgatcagtgagcacaggatatctatttatttgtgtcttattcaatcaatgttttatagttttcagtatactttcaccccttggttaaatttattcctaagtatttttttgatgctatcataaatggcattgttttmttgattattttcagctgggtcattatttatgtatagaaatgctactgatgtttgtatgttgattttgtatcctgcaacttattgaattcatttattagttctaaaaatttgtgtgtgtgtttgtgtgtgtgtgtgtgtgtgtgtgtgtgcatgtgtagaatctttagaattttctatatataggatcatatcatctgtaaatagagattattttactttctcctttccaatttggatgacttttatttatttttcttgtctgattgctcttgctagtacttccaaaactatgttgaatagaa

SEQ ID NO: 229842 - DNA, 551 bp, Homo sapiens
tgcttttctatttccatgaagaatgttattgaaattttgataggggttgtgttaaatcagtatattgtttttggtagtatgaatgttttaataatattaatgtttttgatccatgatcagtgagcacaggatatctatttatttgtgtcttattcaatcaatgttttatagttttcagtatactttcaccccttggttaaatttattcctaagtatttttttgatgctatcataaatggcattgttttcttgattattttcagctgggtcattatttatgtatagaaatgctactgatgtttgtatgttgattttgtatcctgcaacttattgaattcatttattagttctaaaaatttgtktgtgtgtttgtgtgtgtgtgtgtgtgtgtgtgtgtgcatgtgtagaatctttagaattttctatatataggatcatatcatctgtaaatagagattattttactttctcctttccaatttggatgacttttatttatttttcttgtctgattgctcttgctagtacttccaaaactatgttgaatagaa

SEQ ID NO: 229843 - DNA, 409 bp, Homo sapiens
ggtcctccaatttgttggcataaaattgttcataataatcccttatgagcatttttatttctgaggtatctattgcaatgtctccacttycatttctgattttatttatttgagtctgctttttttagtgaatctagctaggagtttgtagattttattttttcaaagaaccaacttttgattttatttatattttctatagttttactatactacattttatttgcttctgttctgatcttcattatttccttccttttgctcactttgggtttagtttgttctttagctccttggggcataatgttagtctacttatttatatctttttccttttttaatctaggcatttattgctataaacttctctcttagaactgactttgctgcatactgtaggttttgatac

SEQ ID NO: 229844 - DNA, 409 bp, Homo sapiens
ggtcctccaatttgttggcataaaattgttcataataatcccttatgagcatttttatttctgaggtatctattgcaatgtctccactttcatttytgattttatttatttgagtctgctttttttagtgaatctagctaggagtttgtagattttattttttcaaagaaccaacttttgattttatttatattttctatagttttactatactacattttatttgcttctgttctgatcttcattatttccttccttttgctcactttgggtttagtttgttctttagctccttggggcataatgttagtctacttatttatatctttttccttttttaatctaggcatttattgctataaacttctctcttagaactgactttgctgcatactgtaggttttgatac

SEQ ID NO: 229845 - DNA, 409 bp, Homo sapiens
ggtcctccaatttgttggcataaaattgttcataataatcccttatgagcatttttatttctgaggtatctattgcaatgtctccactttcatttctgattttatttatttgagtctgctttttttagtgaatctagctaggagtttgtagrttttattttttcaaagaaccaacttttgattttatttatattttctatagttttactatactacattttatttgcttctgttctgatcttcattatttccttccttttgctcactttgggtttagtttgttctttagctccttggggcataatgttagtctacttatttatatctttttccttttttaatctaggcatttattgctataaacttctctcttagaactgactttgctgcatactgtaggttttgatac

SEQ ID NO: 229846 - DNA, 565 bp, Homo sapiens
gactggcatagaagatgtaagtgtaccaacaagcaacctccaaagagcaaatgaaacagaaaattcaaacgagtgcctggtaggagttgtaacttcarcaaagtgcctctcatttctgcctcataaacccgtactcatttttcacaactaactcacatagcacctcctcagtgacacctttcctgttctgcccaccagatatacctgcagacctagtgtatcctctcgcccagaacacagggcatcttagacagggggctgtatctacaggggggtctatgctttgacaggaactgtgaacctatgggcagcggattttcaattcatgtttgtggctctcattacaaatgtcctgcctcaggcacccagcaggtggtaataaatgctgattgaacactaaaaccttggaatgctacatcattattcttaaggataatcattttttaaaacattttggaagttcttttgaaactgactttttagattatgaaaatatctcagtgataggttttggttttccaagttagacattattttaatttagaaactttcaaagttatacaaa

SEQ ID NO: 229847 - DNA, 565 bp, Homo sapiens
gactggcatagaagatgtaagtgtaccaacaagcaacctccaaagagcaaatgaaacagaaaattcaaacgagtgcctggtaggagttgtaacttcagcaaagtgcctctcatttctgcctcataaacccgtactcatttttcacaactaactcacatagcacctcctcagtgacacctttcctgttctgcccaccagmtatacctgcagacctagtgtatcctctcgcccagaacacagggcatcttagacagggggctgtatctacaggggggtctatgctttgacaggaactgtgaacctatgggcagcggattttcaattcatgtttgtggctctcattacaaatgtcctgcctcaggcacccagcaggtggtaataaatgctgattgaacactaaaaccttggaatgctacatcattattcttaaggataatcattttttaaaacattttggaagttcttttgaaactgactttttagattatgaaaatatctcagtgataggttttggttttccaagttagacattattttaatttagaaactttcaaagttatacaaa

SEQ ID NO: 229848 - DNA, 565 bp, Homo sapiens
gactggcatagaagatgtaagtgtaccaacaagcaacctccaaagagcaaatgaaacagaaaattcaaacgagtgcctggtaggagttgtaacttcagcaaagtgcctctcatttctgcctcataaacccgtactcatttttcacaactaactcacatagcacctcctcagtgacacctttcctgttctgcccaccagatatacctgcagacctagtgtatcctctcgcccagaacacagggcatcttagacagggggctgtatctacaggggggtctatgctttgacaggaactgtgaacctatgggcagcggattttcaattcatgtttgtggctctcattacaaatgtcctgcctcaggcacccagcaggtggtaataaatgctgattgaacactaaaaccttggaatgctacatcattattcttaaggataatcattttttaaaacattttggaagttcttttgaaactgactttttagattatgaaaatatctcagtgataggttttggttttccaagttagacattattttawtttagaaactttcaaagttatacaaa

SEQ ID NO: 229849 - DNA, 411 bp, Homo sapiens
tataaactataatattctggtctgaacactcttcctatcttatctgtatatactcaaagggagcaatttctcatgtttagcaaattgttcttcaggtaatttgttctttaggttttttgtacaaaagtacaaaatagttatcacagcaaactttccagtgttttttattttgaagctatatattttggagkgaacttggttttctttttatttttattttttgccatgtcaggcttgagcaggatagcaaatatataaattgagctctctaattataatctcaatatatgaattcttgctaattaaaatactttgcaccagcaaaaacaatttccacatatgtgtttaggtggtagttaagtaactccatataaaaataagtgcactttcccctcctttcttcagtgacta

SEQ ID NO: 229850 - DNA, 411 bp, Homo sapiens
tataaactataatattctggtctgaacactcttcctatcttatctgtatatactcaaagggagcaatttctcatgtttagcaaattgttcttcaggtaatttgttctttaggttttttgtacaaaagtacaaaatagttatcacagcaaactttccagtgttttttattttgaagctatatattttggagggaacttggttttcttttwatttttattttttgccatgtcaggcttgagcaggatagcaaatatataaattgagctctctaattataatctcaatatatgaattcttgctaattaaaatactttgcaccagcaaaaacaatttccacatatgtgtttaggtggtagttaagtaactccatataaaaataagtgcactttcccctcctttcttcagtgacta

SEQ ID NO: 229851 - DNA, 564 bp, Homo sapiens
caaccaaataaacaaccaaaaaatcgtgcaacaaaacacaaatagcattccaacagcttggcaagtgatgcattcacctgagattaagtggttttaggctgtcagtaacaaaattctgctttactgtcttattagaaaggcaacaaattcttcaaagaaaccaagaagtttacaaccttgacaaagtctctcattaccttcctcctcttatgtcttttctyttcacattatctgttgtgtatctactatagaaggctgcaaaacatacagcagaaatgatggcttgaaggcaattgatgtttgtaaataaatacacaacaggatccaagctgaagaggtgaacacatcagccgggtgggacaattctcagcatgggcaaacatagaaaaattctagcctatgttacattaaaaacaatgtcagtgcattttttcatgttaaagagttgttcaaagctaaagcatgttccttgctatgctgaccacaaacaagttttaagagtttcggaagtctggcaaaaatagaaacaaacaaacaaaaaaaaaaaaactgaagcaacattaa

SEQ ID NO: 229852 - DNA, 513 bp, Homo sapiens
gggggtaactgcctccatgattcaattacctctccctgggtccccatcatgatatgtgaggattatgagaactacaattcaagatgagatttggttggagacacagccaaaccatatcatggggtctcactttattgccccggctgatttcaaactcctgggctcaagtgatcctcctgayttggcctcccaaagtgctgggaatacaggcatgagccaccatgcccagtcctaaagtctaaattcttaacatctaaaatccagaaaatcacaatcacaggagagttgtaccacgttagttgcatcatgttaggtacaactgttgctttgttttctttttatttggaaattatgtatggtttaaggaggtccatatgggtgccacatctacaaggggtggacttgcagacttaatttcaggtgtcaacttgactggattaaggaatccctggaaagctgggaaagcattattttgggtatgactgtgatggttttctcagaagagatcagtgt

SEQ ID NO: 229853 - DNA, 591 bp, Homo sapiens
aacctgcactctgtcatttactaattttgtaatttgtggcaaattggttaatatgtctgaacttccatttactcattaagagatcaagtatctttgaacctccgtttacacatttatactttcagaccattttttatacctttagaagactgtgaggattaaatgagagawcatacatgcagtaaataaattgagccaaatgtgaggaggaggttgtagtggtaatttattagctctttaggagaaaaatacctgtgcattcatatccccgcttcttttttaactggcagatttgcctgaggttgactgtacatgcaaatattgagctttcctcctggcctccgtgataaacagaagttttgatattgttaggcgagatggaaagaaagtatcaaggagtgagctgaagccactgcccttgagaaccctctcgaggagtctggcctcatgaagatgccagaataaatggcaggtatatcctgaatgaatgtgagatttttactctgtgaatttcctgtgaggagtggtgagttatcttctgaaaactttatgatgaaaatgcagacaagagtatcttaagattatcgtaat

SEQ ID NO: 229854 - DNA, 591 bp, Homo sapiens
aacctgcactctgtcatttactaattttgtaatttgtggcaaattggttaatatgtctgaacttccatttactcattaagagatcaagtatctttgaacctccgtttacacatttatactttcagaccattttttatacctttagaagactgtgaggattaaatgagagaacatacatgcagtaaataaattgagccaaatgtgaggaggaggttgtagtgrtaatttattagctctttaggagaaaaatacctgtgcattcatatccccgcttcttttttaactggcagatttgcctgaggttgactgtacatgcaaatattgagctttcctcctggcctccgtgataaacagaagttttgatattgttaggcgagatggaaagaaagtatcaaggagtgagctgaagccactgcccttgagaaccctctcgaggagtctggcctcatgaagatgccagaataaatggcaggtatatcctgaatgaatgtgagatttttactctgtgaatttcctgtgaggagtggtgagttatcttctgaaaactttatgatgaaaatgcagacaagagtatcttaagattatcgtaat

SEQ ID NO: 229855 - DNA, 591 bp, Homo sapiens
aacctgcactctgtcatttactaattttgtaatttgtggcaaattggttaatatgtctgaacttccatttactcattaagagatcaagtatctttgaacctccgtttacacatttatactttcagaccattttttatacctttagaagactgtgaggattaaatgagagaacatacatgcagtaaataaattgagccaaatgtgaggaggaggttgtagtggtaatttattagctctttaggagaaaaatacctgtgcattcatatccccgcttcttttttaactggcagatttgcctgaggttgactgtacatrcaaatattgagctttcctcctggcctccgtgataaacagaagttttgatattgttaggcgagatggaaagaaagtatcaaggagtgagctgaagccactgcccttgagaaccctctcgaggagtctggcctcatgaagatgccagaataaatggcaggtatatcctgaatgaatgtgagatttttactctgtgaatttcctgtgaggagtggtgagttatcttctgaaaactttatgatgaaaatgcagacaagagtatcttaagattatcgtaat

SEQ ID NO: 229856 - DNA, 467 bp, Homo sapiens
atgtgaaattgcctattctgaatatttcctaagaaatcatgtaacatgtggccttttgtatctggcttctttcacttayaacattcttgaggtccatcattgttgtagcacttgttcctttttatggctgcgtagtgtagtccattgtatggatgtaatattttgttcatccattcatcagttgatgaacatttagattgtttcccctttttgactattgtgactaatgctagtgtgaatattcttatgtaagtatttttgtgggtgtacgttttcatttcccttgggtatacatacttaggagtaaaattgctgggtcatatggtaactctttaactttttgaggaaccccaaactgtttcctgtagatgctgcaccattttacatttccaccagcaatgtgtgaagatacatattacctcttaatcctcacaatagacttaagagttaagttgttatcctaattt

SEQ ID NO: 229857 - DNA, 467 bp, Homo sapiens
atgtgaaattgcctattctgaatatttcctaagaaatcatgtaacatgtggccttttgtatctggcttctttcacttacaacattcttgaggtccatcattgttgtagcacttgttcctttttatggctgcgtagtgtagtccattgtatggatgtaayattttgttcatccattcatcagttgatgaacatttagattgtttcccctttttgactattgtgactaatgctagtgtgaatattcttatgtaagtatttttgtgggtgtacgttttcatttcccttgggtatacatacttaggagtaaaattgctgggtcatatggtaactctttaactttttgaggaaccccaaactgtttcctgtagatgctgcaccattttacatttccaccagcaatgtgtgaagatacatattacctcttaatcctcacaatagacttaagagttaagttgttatcctaattt

SEQ ID NO: 229858 - DNA, 500 bp, Homo sapiens
cttttgtatctggcttctttcacttacaacattcttgaggtccatcattgttgtagcacttgttcctttttatggctgcgtagtgtagtccattgtatggatgtaatattttgttcatccattcatcagttgatgaacatttagattgtttcccctttttgactattgtgactaatgctagtgtgaatattcttatgtaagtatttttgtgggtgtacgttttcatttcccttgggtatacatacttaggagtaaaattgctgggtcatatggtaactctttaactttttgaggaaccccaaactgtttcctgtagatgctgcaccattttacatttccaccagcaatgtgtgaagatacatattacctcttaatcctcacaatagmcttaagagttaagttgttatcctaattttttaagtggggaaactgactcacagagagattcagtaccttttccaaaaattgcagagctaagaagtgacagaatcgggatttaa

SEQ ID NO: 229859 - DNA, 593 bp, Homo sapiens
agtctggaattttagatatgtacacacccacacacatacacatgtcctgttttgatgtcctataattaattttctcttagtttttaacttttatctatcttattaatgtacagaatcgccctgaaacctggctatggaaaatatcttagtataaattcagatgaacttgttgttggcgttcagatgcaattggaccaagagaacaatgggaaccagtctttcaaaatgtgagtgctgttattgtttataaaaacttcctgtcagtttaacacaaagtctgtagcagtcaataataatatatttaaaaagaaaaagtaggatgcaatagtacaatacattaaattggaataaatcagtaagaacacagagccttaaagagatctcaaaatatagtgcaacaaaaatagctttagtacttttgcccacaattatttctgtatacccttagtgcccgatatggatctcatttccattgaagaaccagtcaattttaggtcacagagtaggaaaacagaatcgttcctaagtatcttctttgtrgcagaaatcatggatgctttcagaaactttagagactgtaagcgaacagtaga

SEQ ID NO: 229860 - DNA, 293 bp, Homo sapiens
gagaaaattaataaagataggcttctcaagccaattaccacagtaggcaactgaaacttaatcccgcatgagcacgctaggggcccgtgaaaaacacatgcttcagggtcccccgagggttaaaggagctgacgtatttatacaacaacatcatcatgcactactgcygggatcccaacagagccatccatcacttcttatatggactccctttggctcaaagcacttcacctagtatttacttttctcttactatttcatctttttttgtggatgacaggaaatcactggct

SEQ ID NO: 229861 - DNA, 396 bp, Homo sapiens
aagaattcaaactcacagagtttattttgtagggaggaagggaatgaagagaacacaggtaggggagaagagaaataagacaaggaagaggagaaaattaataaagataggcttctcaagccaattaccacagtaggcaactgaaacttaatcccgcatgagcacgctaggggcccgtgaaaaacacatgcttcagggtcccccgagggttaaaggagctgacgtatttatacaacaacatcatcatgcactactgctgggatcccaacagagccatccatcacttcttatatggactcyctttggctcaaagcacttcacctagtatttacttttctcttactatttcatctttttttgtggatgacaggaaatcactggctaaccaataatcag

SEQ ID NO: 229862 - DNA, 325 bp, Homo sapiens
gtaggggagaagagaaataagacaaggaagaggagaaaattaataaagataggcttctcaagccaattaccacagtaggcaactgaaacttaatcccgcatgagcacgctaggggcccgtgaaaaacacatgcttcagggtcccccgagggttaaaggagctgacgtatttatacaacaacatcatcatgcactactgctgggatcccaacagagccatccatcacttcttatatggactccctttggctcaaagcacttcacctagtatttacttttctcttactatttcmtctttttttgtggatgacaggaaatcactggct

SEQ ID NO: 229863 - DNA, 421 bp, Homo sapiens
gtaggaatgagaaaatctttagaggaaatattcaagtatgtttgatttctagcaaatccagatagatagttttggcaacaaccaagtcataatttgaagwcttgttataggagctaaaattttattcaagggacaactgacttgattagataagatgctgtgcactgcatgtttgcatcaacaaatgcacatgttgaaactctaacaatagaatggcattagaaggaggacctttgggaagtaatttggttttgatgaggatggagttcccacaatggggttagcatcctaataagaagagtaggagactagagccctcttctctcagccatgtgaacatacaacaagaacacctgcaaaccagtaagagggccttcaccagacactggttctgctggcccagattttaatctttgaattc

SEQ ID NO: 229864 - DNA, 322 bp, Homo sapiens
aatattcaagtatgtttgatttctagcaaatccagatagatagttttggcaacaaccaagtcataatttgaagtyttgttataggagctaaaattttattcaagggacaactgacttgattagataagatgctgtgcactgcatgtttgcatcaacaaatgcacatgttgaaactctaacaatagaatggcattagaaggaggacctttgggaagtaatttggttttgatgaggatggagttcccacaatggggttagcatcctaataagaagagtaggagactagagccctcttctctcagccatgtgaacatacaacaag

SEQ ID NO: 229865 - DNA, 417 bp, Homo sapiens
agaattctgtaaatatacacaatagggtaggaatgagaaaatctttagaggaaatattcaagtatgtttgatttctagcaaatccagatagatagttttggcaacaaccaagtcataatttgaagtcttkttataggagctaaaattttattcaagggacaactgacttgattagataagatgctgtgcactgcatgtttgcatcaacaaatgcacatgttgaaactctaacaatagaatggcattagaaggaggacctttgggaagtaatttggttttgatgaggatggagttcccacaatggggttagcatcctaataagaagagtaggagactagagccctcttctctcagccatgtgaacatacaacaagaacacctgcaaaccagtaagagggccttcaccagacactggtt

SEQ ID NO: 229866 - DNA, 365 bp, Homo sapiens
gtaggaatgagaaaatctttagaggaaatattcaagtatgtttgatttctagcaaatccagatagatagttttggcaacaaccaagtcataatttgaagtcttgttataggagctaaaattttattcaagggacaactgacttgattagataagatgctgtgcactgcatgtttgcatcaacaaatgcacatgttgaaactctaacaatagaatggcattagaaggagsacctttgggaagtaatttggttttgatgaggatggagttcccacaatggggttagcatcctaataagaagagtaggagactagagccctcttctctcagccatgtgaacatacaacaagaacacctgcaaaccagt

SEQ ID NO: 229867 - DNA, 322 bp, Homo sapiens
aatattcaagtatgtttgatttctagcaaatccagatagatagttttggcaacaaccaagtcataatttgaagtcttgttataggagctaaaattttattcaagggacaactgacttgattagataagatgctgtgcactgcatgtttgcatcaacaaatgcacatgttgaaactctaacaatagaatggcattagaaggaggacctttgggaagtaatttggttttgatgaggatggagttcccacaatggggttagcatcctaataagaagagtagragactagagccctcttctctcagccatgtgaacatacaacaag

SEQ ID NO: 229868 - DNA, 421 bp, Homo sapiens
gtaggaatgagaaaatctttagaggaaatattcaagtatgtttgatttctagcaaatccagatagatagttttggcaacaaccaagtcataatttgaagtcttgttataggagctaaaattttattcaagggacaactgacttgattagataagatgctgtgcactgcatgtttgcatcaacaaatgcacatgttgaaactctaacaatagaatggcattagaaggaggacctttgggaagtaatttggttttgatgaggatggagttcccacaatggggttagcatcctaataagaagagtaggagactagagccctcttcwctcagccatgtgaacatacaacaagaacacctgcaaaccagtaagagggccttcaccagacactggttctgctggcccagattttaatctttgaattc

SEQ ID NO: 229869 - DNA, 416 bp, Homo sapiens
gaattctgtaaatatacacaatagggtaggaatgagaaaatctttagaggaaatattcaagtatgtttgatttctagcaaatccagatagatagttttggcaacaaccaagtcataatttgaagtcttgttataggagctaaaattttattcaagggacaactgacttgattagataagatgctgtgcactgcatgtttgcatcaacaaatgcacatgttgaaactctaacaatagaatggcattagaaggaggacctttgggaagtaatttggttttgatgaggatggagttcccacaatggggttagcatcctaataagaagagtaggagactagagccctcttctctcagccatgtgaacatacaacaagaacacctgcaaacmagtaagagggccttcaccagacactggtt

SEQ ID NO: 229870 - DNA, 390 bp, Homo sapiens
taacatgacatatacaaattgtataaatttaaggtaacttaatgttttgatatttctatacttttygaaatgatcaccacaatcaagcaaattagcatattatctctacatatttaccattgtgtgtgttgacagtaattaatttatgatctagtcctttagcagaacacaagaatatgatacagtgttgttccatgttgtacattatatctccagaaattattataacttgaacattgcacaatttaattaacatcaccccgtttcccctccctgagcccctggcaaccactgtcctattctctgtttttatgaatttgactgttgtagattcctcatgtaagtgtgatcatgaagtagttgtctctgtgccttgcatttttgcttggc

SEQ ID NO: 229871 - DNA, 390 bp, Homo sapiens
taacatgacatatacaaattgtataaatttaaggtaacttaatgttttgatatttctatactttttgaaatgatcaccacaatcaagcaaattagcatattatctctacatatttaccattgtgtgtgttgacagtaattaatttatgatctagtcctttagcagaacacaagaatatgatacagtgttgttccrtgttgtacattatatctccagaaattattataacttgaacattgcacaatttaattaacatcaccccgtttcccctccctgagcccctggcaaccactgtcctattctctgtttttatgaatttgactgttgtagattcctcatgtaagtgtgatcatgaagtagttgtctctgtgccttgcatttttgcttggc

SEQ ID NO: 229872 - DNA, 390 bp, Homo sapiens
taacatgacatatacaaattgtataaatttaaggtaacttaatgttttgatatttctatactttttgaaatgatcaccacaatcaagcaaattagcatattatctctacatatttaccattgtgtgtgttgacagtaattaatttatgatctagtcctttagcagaacacaagaatatgatacagtgttgttccatgttgtacattatatctccagaaattattataacttgaacattgcacartttaattaacatcaccccgtttcccctccctgagcccctggcaaccactgtcctattctctgtttttatgaatttgactgttgtagattcctcatgtaagtgtgatcatgaagtagttgtctctgtgccttgcatttttgcttggc

SEQ ID NO: 229873 - DNA, 390 bp, Homo sapiens
taacatgacatatacaaattgtataaatttaaggtaacttaatgttttgatatttctatactttttgaaatgatcaccacaatcaagcaaattagcatattatctctacatatttaccattgtgtgtgttgacagtaattaatttatgatctagtcctttagcagaacacaagaatatgatacagtgttgttccatgttgtacattatatctccagaaattattataacttgaacattgcacaatttaattaacatcaccccrtttcccctccctgagcccctggcaaccactgtcctattctctgtttttatgaatttgactgttgtagattcctcatgtaagtgtgatcatgaagtagttgtctctgtgccttgcatttttgcttggc

SEQ ID NO: 229874 - DNA, 515 bp, Homo sapiens
atatacagcctttacagtgttgargtaagtttcttgtatacttattttgttgagagttttatcatgaaagtataatgaattttgtcaaatgtgttttctgcatccattggaatgttatttttatctttcattctgttaatgtggtatatcacattattaatttttacacattgaaacatccttgtatcacatagataagttacaattggtcatggtgtatgaccttttcaatgtgcttttgaattcagtttgctagttagtattttactgagaatttttgcatctatattcgttaaggatactggtctgtaattattttttcttgtgttgtcttcgtctagcttttaagtcatggtaacatcggcctcatgaaatgagtttgagagtattctctcttctattttttctgaagagtttaagaagttttggtgttagttcttctttgaatgtttggtagaagttgcccatgaaagcatctgcacctgggcttttctttgttgggaaattattgatta

SEQ ID NO: 229875 - DNA, 515 bp, Homo sapiens
atatacagcctttacagtgttgaagtaagtttcttgtatacttattttgttgagagttttatcatgaaagtatawtgaattttgtcaaatgtgttttctgcatccattggaatgttatttttatctttcattctgttaatgtggtatatcacattattaatttttacacattgaaacatccttgtatcacatagataagttacaattggtcatggtgtatgaccttttcaatgtgcttttgaattcagtttgctagttagtattttactgagaatttttgcatctatattcgttaaggatactggtctgtaattattttttcttgtgttgtcttcgtctagcttttaagtcatggtaacatcggcctcatgaaatgagtttgagagtattctctcttctattttttctgaagagtttaagaagttttggtgttagttcttctttgaatgtttggtagaagttgcccatgaaagcatctgcacctgggcttttctttgttgggaaattattgatta

SEQ ID NO: 229876 - DNA, 309 bp, Homo sapiens
tcatggtaacatcggcctcatgaaatgagtttgagagtattctctcttctattttttctgaagagtttaagaagttttggtgttagttcttctttgaatgtttggtagaagttgcccatgaaagcatctgcacctgggcttttctttgttgggaaattwttgattactgattaaatctctttgcttgcttttggtctgttctatttcttttttgttccattttggtagattgcatctttctaagaatttatccatttattctaggttatccaatttattggcatataatcgcttaattgtcctttataa

SEQ ID NO: 229877 - DNA, 309 bp, Homo sapiens
tcatggtaacatcggcctcatgaaatgagtttgagagtattctctcttctattttttctgaagagtttaagaagttttggtgttagttcttctttgaatgtttggtagaagttgcccatgaaagcatctgcacctgggcttttctttgttgggaaattattgattactgattaaatctctttgcttgcttttggwctgttctatttcttttttgttccattttggtagattgcatctttctaagaatttatccatttattctaggttatccaatttattggcatataatcgcttaattgtcctttataa

SEQ ID NO: 229878 - DNA, 309 bp, Homo sapiens
tcatggtaacatcggcctcatgaaatgagtttgagagtattctctcttctattttttctgaagagtttaagaagttttggtgttagttcttctttgaatgtttggtagaagttgcccatgaaagcatctgcacctgggcttttctttgttgggaaattattgattactgattaaatctctttgcttgcttttggtctgttctatttcttttttgttccattttggtagattgcatctttctaagaatttatccatttmttctaggttatccaatttattggcatataatcgcttaattgtcctttataa

SEQ ID NO: 229879 - DNA, 417 bp, Homo sapiens
cttatcatccacagtagtcaaggaagctkcagaagcatcaagcaaaagcagcagaagttagctttgtactcccacaaaccctgctctgaagtactccgcctagtggcccacagcagaagctgcatttctaaaatctttaaaaagacagaaaaggaatcgccacttaccctgggaaccctaacaggggagcaggccacatgggaatatgtcccattggtttgaggtcgataagtccattttcaaagctttagtaattccagaaacaagaacatatttattttactttgatcacacaatgcctagttatattaaaaggagatattcaataaataccttttatggaaataaaaacagacaatttaggagaaaattaactatcgatgcattgttttcaaaggtaaagaaaaaagaaattat

SEQ ID NO: 229880 - DNA, 417 bp, Homo sapiens
cttatcatccacagtagtcaaggaagcttcagaagcatcaagcaaaagcagcagaagttagctttgtactcccacaaaccctgctctgaagtactccgcctagtggcccacagmagaagctgcatttctaaaatctttaaaaagacagaaaaggaatcgccacttaccctgggaaccctaacaggggagcaggccacatgggaatatgtcccattggtttgaggtcgataagtccattttcaaagctttagtaattccagaaacaagaacatatttattttactttgatcacacaatgcctagttatattaaaaggagatattcaataaataccttttatggaaataaaaacagacaatttaggagaaaattaactatcgatgcattgttttcaaaggtaaagaaaaaagaaattat

SEQ ID NO: 229881 - DNA, 417 bp, Homo sapiens
cttatcatccacagtagtcaaggaagcttcagaagcatcaagcaaaagcagcagaagttagctttgtactcccacaaaccctgctctgaagtactccgcctagtggcccacagcagaarctgcatttctaaaatctttaaaaagacagaaaaggaatcgccacttaccctgggaaccctaacaggggagcaggccacatgggaatatgtcccattggtttgaggtcgataagtccattttcaaagctttagtaattccagaaacaagaacatatttattttactttgatcacacaatgcctagttatattaaaaggagatattcaataaataccttttatggaaataaaaacagacaatttaggagaaaattaactatcgatgcattgttttcaaaggtaaagaaaaaagaaattat

SEQ ID NO: 229882 - DNA, 383 bp, Homo sapiens
aagaaagaagtggaagaaaatagttacttatcatccacagtagtcaaggaagcttcagaagcatcaagcaaaagcagcagaagttagctttgtactcccacaaaccctgctctgaagtactccgcctagtggcccacagcagaagctgcatttctaaaatctttaaaaagacagaaaaggaatcgccacttaccctgggaaccctaacaggggagcaggccayatgggaatatgtcccattggtttgaggtcgataagtccattttcaaagctttagtaattccagaaacaagaacatatttattttactttgatcacacaatgcctagttatattaaaaggagatattcaataaataccttttatggaaataaaaacagaca

SEQ ID NO: 229883 - DNA, 417 bp, Homo sapiens
cttatcatccacagtagtcaaggaagcttcagaagcatcaagcaaaagcagcagaagttagctttgtactcccacaaaccctgctctgaagtactccgcctagtggcccacagcagaagctgcatttctaaaatctttaaaaagacagaaaaggaatcgccacttaccctgggaaccctaacaggggagcaggccacatrggaatatgtcccattggtttgaggtcgataagtccattttcaaagctttagtaattccagaaacaagaacatatttattttactttgatcacacaatgcctagttatattaaaaggagatattcaataaataccttttatggaaataaaaacagacaatttaggagaaaattaactatcgatgcattgttttcaaaggtaaagaaaaaagaaattat

SEQ ID NO: 229884 - DNA, 566 bp, Homo sapiens
aaagctttagtaattccagaaacaagaacatrtttattttactttgatcacacaatgcctagttatattaaaaggagatattcaataaataccttttatggaaataaaaacagacaatttaggagaaaattaactatcgatgcattgttttcaaaggtaaagaaaaaagaaattattctgaacacacaaaactattttatcaagtatcatggtaaattatcattatatactaggtcacttaataaatttccagagatgattggaaagagtttccacaatagattttgtttcaccccaggaagaagtttcacaaaaagttagttacttatctccattgttactagtaccaaactaatcctatcattctgagtcaaattacaaataacgtccacacttttctccagtgagatcacaggagatgcctaagtggagtgtgttttaatgtgaggggataactggtttatatttttcactgaaaataacaaattctagacaacttaagcaaaataggaattcgatgaaaggatattgaatagttcacaaaatcactgaagatgctggagaag

SEQ ID NO: 229885 - DNA, 566 bp, Homo sapiens
aaagctttagtaattccagaaacaagaacatatttattttactttgatcacacaatgcctagttatattaaaaggagayattcaataaataccttttatggaaataaaaacagacaatttaggagaaaattaactatcgatgcattgttttcaaaggtaaagaaaaaagaaattattctgaacacacaaaactattttatcaagtatcatggtaaattatcattatatactaggtcacttaataaatttccagagatgattggaaagagtttccacaatagattttgtttcaccccaggaagaagtttcacaaaaagttagttacttatctccattgttactagtaccaaactaatcctatcattctgagtcaaattacaaataacgtccacacttttctccagtgagatcacaggagatgcctaagtggagtgtgttttaatgtgaggggataactggtttatatttttcactgaaaataacaaattctagacaacttaagcaaaataggaattcgatgaaaggatattgaatagttcacaaaatcactgaagatgctggagaag

SEQ ID NO: 229886 - DNA, 566 bp, Homo sapiens
aaagctttagtaattccagaaacaagaacatatttattttactttgatcacacaatgcctagttatattaaaaggagatattcaataaataccttttatggaaataaaaacagacaatttaggagaaaattaactatcgatgcattgttttcaaaggtaaagaaaaaagaaattattctgaacacacaaaactattttatcaagtatcatggtaaattakcattatatactaggtcacttaataaatttccagagatgattggaaagagtttccacaatagattttgtttcaccccaggaagaagtttcacaaaaagttagttacttatctccattgttactagtaccaaactaatcctatcattctgagtcaaattacaaataacgtccacacttttctccagtgagatcacaggagatgcctaagtggagtgtgttttaatgtgaggggataactggtttatatttttcactgaaaataacaaattctagacaacttaagcaaaataggaattcgatgaaaggatattgaatagttcacaaaatcactgaagatgctggagaag

SEQ ID NO: 229887 - DNA, 566 bp, Homo sapiens
aaagctttagtaattccagaaacaagaacatatttattttactttgatcacacaatgcctagttatattaaaaggagatattcaataaataccttttatggaaataaaaacagacaatttaggagaaaattaactatcgatgcattgttttcaaaggtaaagaaaaaagaaattattctgaacacacaaaactattttatcaagtatcatggtaaattatcattatatactaggtcacttaataaatttccagagatgattggaaagagtttccacaatagattttgtttcaccccaggaagaagtttcacaaaaagttagttacttatctccattgttactagtaccaaactaatcctatcattctgagtcwaattacaaataacgtccacacttttctccagtgagatcacaggagatgcctaagtggagtgtgttttaatgtgaggggataactggtttatatttttcactgaaaataacaaattctagacaacttaagcaaaataggaattcgatgaaaggatattgaatagttcacaaaatcactgaagatgctggagaag

SEQ ID NO: 229888 - DNA, 464 bp, Homo sapiens
tctgtactaagttgatgaccagttgtttggatgaaaagaaaagaggtgaaacatatagatctaacaggaaaaaaatggaccagtttttatgatagcaaaaagaagaatggaggaaataggactgaggttatagtgattgatagatattaatagamgactaagtcaaaagccattggctgcagaaaatattgattaattttgttttattgcagtcagacaaaaaaatcctataacctgcctctagagaaaacccttttagccctataattatctttattccaagcaccattccattcattaagtagtgtatagggtgattaataagtgaattattcatagaattaagacaaaatttttgagtattacaggatattaatagtatagccaatgaactaaaataaaatttgactagaggtatgatcaccatgaatgccatgttggtctcttgttagatttggcaacct

SEQ ID NO: 229889 - DNA, 464 bp, Homo sapiens
tctgtactaagttgatgaccagttgtttggatgaaaagaaaagaggtgaaacatatagatctaacaggaaaaaaatggaccagtttttatgatagcaaaaagaagaatggaggaaataggactgaggttatagtgattgatagatattaatagacgactaagtcaaaagccattggytgcagaaaatattgattaattttgttttattgcagtcagacaaaaaaatcctataacctgcctctagagaaaacccttttagccctataattatctttattccaagcaccattccattcattaagtagtgtatagggtgattaataagtgaattattcatagaattaagacaaaatttttgagtattacaggatattaatagtatagccaatgaactaaaataaaatttgactagaggtatgatcaccatgaatgccatgttggtctcttgttagatttggcaacct

SEQ ID NO: 229890 - DNA, 464 bp, Homo sapiens
tctgtactaagttgatgaccagttgtttggatgaaaagaaaagaggtgaaacatatagatctaacaggaaaaaaatggaccagtttttatgatagcaaaaagaagaatggaggaaataggactgaggttatagtgattgatagatattaatagacgactaagtcaaaagccattggctgcagaaaatattgattaattttgttttattscagtcagacaaaaaaatcctataacctgcctctagagaaaacccttttagccctataattatctttattccaagcaccattccattcattaagtagtgtatagggtgattaataagtgaattattcatagaattaagacaaaatttttgagtattacaggatattaatagtatagccaatgaactaaaataaaatttgactagaggtatgatcaccatgaatgccatgttggtctcttgttagatttggcaacct

SEQ ID NO: 229891 - DNA, 464 bp, Homo sapiens
tctgtactaagttgatgaccagttgtttggatgaaaagaaaagaggtgaaacatatagatctaacaggaaaaaaatggaccagtttttatgatagcaaaaagaagaatggaggaaataggactgaggttatagtgattgatagatattaatagacgactaagtcaaaagccattggctgcagaaaatattgattaattttgttttattgcagtcagacaaaaaaatcctataacctgcctctagagaaaacccttttagccctataattatctttattccaagcaccattccattcattaagtagtgtatagggtgattaataagtgaattattcayagaattaagacaaaatttttgagtattacaggatattaatagtatagccaatgaactaaaataaaatttgactagaggtatgatcaccatgaatgccatgttggtctcttgttagatttggcaacct

SEQ ID NO: 229892 - DNA, 303 bp, Homo sapiens
gcttaaaatagggtaaattatracttacaaatataaaatgaacacttgtctaagatttttgtttaactcgtttgtttaatgagggagccagtaagatgttatactgagttttatggaaaattaaaagagccacacatatctaggcactaaggaacactgaaataaatttgcttgataggttcaaaactgaattcttgatggaaggtgggaaaaggaaaattaattatacttccaccaaaatcaatcatttgcctgtctataaacatgaatatttgcattactatcagtaatctacaactaaca

SEQ ID NO: 229893 - DNA, 398 bp, Homo sapiens
gaatatttgtccataacataggattccagaacactcctgcagttgtttgaatttttgtccctcccataggattccagaacactactgctggggtgtgagtgtatgtccctcacttaggattccagaacactgcaaagattctcttaaagattgtccctcacataggtttccggaacaytgctatgagagtctgaatgtttgtccctcacacaggattccataatactcctgctgtgttctgaatatttgtacgtcacataggattcctgaacactactacgagattctgaatgtttgttgctcacataggattccaaaatgtccctgctgtgttctgagtgtttgtccctcacatagggtcactgctgctgggttctcagtgtttctcactcacatag

SEQ ID NO: 229894 - DNA, 398 bp, Homo sapiens
gaatatttgtccataacataggattccagaacactcctgcagttgtttgaatttttgtccctcccataggattccagaacactactgctggggtgtgagtgtatgtccctcacttaggattccagaacactgcaaagattctcttaaagattgtccctcacataggtttccggaacactgctatgagagtctgaatgtttgtccctcacacaggattccataatactcctgctgtgttctgaatatttgtacgtcacataggattmctgaacactactacgagattctgaatgtttgttgctcacataggattccaaaatgtccctgctgtgttctgagtgtttgtccctcacatagggtcactgctgctgggttctcagtgtttctcactcacatag

SEQ ID NO: 229895 - DNA, 408 bp, Homo sapiens
catagaattccagataattgagacaatattctgaatgtttgwccataacataggattccagaacattcccgctcttgtttgaatgtttgtccctcacatagcattgcagaacactgctgctggggtctgaatgtttgtctctcacataggattccagtacactgctacgattgtcagaatgtttatccctcacctaggattacagaacactgctatgatgctctgaaagtttgtccctcacataggattccagaacactgctgctgaggtataaatgtttgtccatcacatgggattccagaacaaagctacgagtgtctgaatgttcctcacagcagattccataacactcctgctgtggtctcaatgtgtgtccctcacaaaggatttcagaacacggctaagagg

SEQ ID NO: 229896 - DNA, 412 bp, Homo sapiens
tattctgaatgtttgaccataacataggattccagaacaytcccgctcttgtttgaatgtttgtccctcacatagcattgcagaacactgctgctggggtctgaatgtttgtctctcacataggattccagtacactgctacgattgtcagaatgtttatccctcacctaggattacagaacactgctatgatgctctgaaagtttgtccctcacataggattccagaacactgctgctgaggtataaatgtttgtccatcacatgggattccagaacaaagctacgagtgtctgaatgttcctcacagcagattccataacactcctgctgtggtctcaatgtgtgtccctcacaaaggatttcagaacacggctaagagggtatgaatgtttgtccctcatacagaattc

SEQ ID NO: 229897 - DNA, 348 bp, Homo sapiens
gaacattcccgctcttgtttgawtgtttgtccctcacatagcattgcagaacactgctgctggggtctgaatgtttgtctctcacataggattccagtacactgctacgattgtcagaatgtttatccctcacctaggattacagaacactgctatgatgctctgaaagtttgtccctcacataggattccagaacactgctgctgaggtataaatgtttgtccatcacatgggattccagaacaaagctacgagtgtctgaatgttcctcacagcagattccataacactcctgctgtggtctcaatgtgtgtccctcacaaaggatttcagaacacggctaagagg

SEQ ID NO: 229898 - DNA, 431 bp, Homo sapiens
gaattccagaacactgctacgagggtctgaatgctggtccctcacataggacaccagaacactgctacrgttgtctgaatgtttgtcccttccataggattcctgaacactgcttcgagggtctgaatgtttgtccctcacattgcattccaaaacactcctgttgtgttctgtgagtttgaccctcacataggattccagaacaatcctgctgtggtgtgaatgcttgtccctcacatatggttccagaacactgttgctgggttctgagtgtttgtccctcacaagggattccagaacactgctacgagggtgtgaatgtttgtcccacacaaaggattccagaacactgctactggggtctaaatgtttgtccgtcacatagcattcctgaacaatgttacaagaatctgaatgtttgtacctcacat

SEQ ID NO: 229899 - DNA, 444 bp, Homo sapiens
gaattccagaacactgctacgagggtctgaatgctggtccctcacataggacaccagaacactgctacggttgtctgaatgtttgtcccttccataggattcctgaacactrcttcgagggtctgaatgtttgtccctcacattgcattccaaaacactcctgttgtgttctgtgagtttgaccctcacataggattccagaacaatcctgctgtggtgtgaatgcttgtccctcacatatggttccagaacactgttgctgggttctgagtgtttgtccctcacaagggattccagaacactgctacgagggtgtgaatgtttgtcccacacaaaggattccagaacactgctactggggtctaaatgtttgtccgtcacatagcattcctgaacaatgttacaagaatctgaatgtttgtacctcacataggattcctgaac

SEQ ID NO: 229900 - DNA, 447 bp, Homo sapiens
ctcacataggacaccagaacactgctacggttgtctgaatgtttgtcccttccataggattcctgaacactgcttmgagggtctgaatgtttgtccctcacattgcattccaaaacactcctgttgtgttctgtgagtttgaccctcacataggattccagaacaatcctgctgtggtgtgaatgcttgtccctcacatatggttccagaacactgttgctgggttctgagtgtttgtccctcacaagggattccagaacactgctacgagggtgtgaatgtttgtcccacacaaaggattccagaacactgctactggggtctaaatgtttgtccgtcacatagcattcctgaacaatgttacaagaatctgaatgtttgtacctcacataggattcctgaaccactgctacgagggtctgaatgtttgtccctcacatagaattc

SEQ ID NO: 229901 - DNA, 460 bp, Homo sapiens
tgaatgctggtccctcacataggacaccagaacactgctacggttgtctgaatgtttgtcccttccataggattcctgaacactgcttcgagggtctgaatgtttgtccctcacattgcattccaaaacactcctgttgtgttctgtgagtttgacyctcacataggattccagaacaatcctgctgtggtgtgaatgcttgtccctcacatatggttccagaacactgttgctgggttctgagtgtttgtccctcacaagggattccagaacactgctacgagggtgtgaatgtttgtcccacacaaaggattccagaacactgctactggggtctaaatgtttgtccgtcacatagcattcctgaacaatgttacaagaatctgaatgtttgtacctcacataggattcctgaaccactgctacgagggtctgaatgtttgtccctcacatagaattc

SEQ ID NO: 229902 - DNA, 444 bp, Homo sapiens
gaattccagaacactgctacgagggtctgaatgctggtccctcacataggacaccagaacactgctacggttgtctgaatgtttgtcccttccataggattcctgaacactgcttcgagggtctgaatgtttgtccctcacattgcattccaaaacactcctgttgtgttctgtgagtttgaccctcacataggattccagaacaatcctgctgtggtgtraatgcttgtccctcacatatggttccagaacactgttgctgggttctgagtgtttgtccctcacaagggattccagaacactgctacgagggtgtgaatgtttgtcccacacaaaggattccagaacactgctactggggtctaaatgtttgtccgtcacatagcattcctgaacaatgttacaagaatctgaatgtttgtacctcacataggattcctgaac

SEQ ID NO: 229903 - DNA, 431 bp, Homo sapiens
gaattccagaacactgctacgagggtctgaatgctggtccctcacataggacaccagaacactgctacggttgtctgaatgtttgtcccttccataggattcctgaacactgcttcgagggtctgaatgtttgtccctcacattgcattccaaaacactcctgttgtgttctgtgagtttgaccctcacataggattccagaacaatcctgctgtggtgtgaatgcttgtccctcacatayggttccagaacactgttgctgggttctgagtgtttgtccctcacaagggattccagaacactgctacgagggtgtgaatgtttgtcccacacaaaggattccagaacactgctactggggtctaaatgtttgtccgtcacatagcattcctgaacaatgttacaagaatctgaatgtttgtacctcacat

SEQ ID NO: 229904 - DNA, 431 bp, Homo sapiens
gaattccagaacactgctacgagggtctgaatgctggtccctcacataggacaccagaacactgctacggttgtctgaatgtttgtcccttccataggattcctgaacactgcttcgagggtctgaatgtttgtccctcacattgcattccaaaacactcctgttgtgttctgtgagtttgaccctcacataggattccagaacaatcctgctgtggtgtgaatgcttgtccctcacatatggttccagaacactgttgctgggttctgagtgtttgtccctcacaarggattccagaacactgctacgagggtgtgaatgtttgtcccacacaaaggattccagaacactgctactggggtctaaatgtttgtccgtcacatagcattcctgaacaatgttacaagaatctgaatgtttgtacctcacat

SEQ ID NO: 229905 - DNA, 444 bp, Homo sapiens
gaattccagaacactgctacgagggtctgaatgctggtccctcacataggacaccagaacactgctacggttgtctgaatgtttgtcccttccataggattcctgaacactgcttcgagggtctgaatgtttgtccctcacattgcattccaaaacactcctgttgtgttctgtgagtttgaccctcacataggattccagaacaatcctgctgtggtgtgaatgcttgtccctcacatatggttccagaacactgttgctgggttctgagtgtttgtccctcacaagggattccagaacactgctacgagggtgtgaatgtttgtcccacacaaaggattccagaacactgctactggggtctaaatgtttgtmcgtcacatagcattcctgaacaatgttacaagaatctgaatgtttgtacctcacataggattcctgaac

SEQ ID NO: 229906 - DNA, 431 bp, Homo sapiens
gaattccagaacactgctacgagggtctgaatgctggtccctcacataggacaccagaacactgctacggttgtctgaatgtttgtcccttccataggattcctgaacactgcttcgagggtctgaatgtttgtccctcacattgcattccaaaacactcctgttgtgttctgtgagtttgaccctcacataggattccagaacaatcctgctgtggtgtgaatgcttgtccctcacatatggttccagaacactgttgctgggttctgagtgtttgtccctcacaagggattccagaacactgctacgagggtgtgaatgtttgtcccacacaaaggattccagaacactgctactggggtctaaatgtttgtccgtcacatagcattcctgaacaatgttacaagartctgaatgtttgtacctcacat

SEQ ID NO: 229907 - DNA, 460 bp, Homo sapiens
tgaatgctggtccctcacataggacaccagaacactgctacggttgtctgaatgtttgtcccttccataggattcctgaacactgcttcgagggtctgaatgtttgtccctcacattgcattccaaaacactcctgttgtgttctgtgagtttgaccctcacataggattccagaacaatcctgctgtggtgtgaatgcttgtccctcacatatggttccagaacactgttgctgggttctgagtgtttgtccctcacaagggattccagaacactgctacgagggtgtgaatgtttgtcccacacaaaggattccagaacactgctactggggtctaaatgtttgtccgtcacatagcattcctgaacaatgttacaagaatctgaatgtttgtacctcacataggattcytgaaccactgctacgagggtctgaatgtttgtccctcacatagaattc

SEQ ID NO: 229908 - DNA, 460 bp, Homo sapiens
tgaatgctggtccctcacataggacaccagaacactgctacggttgtctgaatgtttgtcccttccataggattcctgaacactgcttcgagggtctgaatgtttgtccctcacattgcattccaaaacactcctgttgtgttctgtgagtttgaccctcacataggattccagaacaatcctgctgtggtgtgaatgcttgtccctcacatatggttccagaacactgttgctgggttctgagtgtttgtccctcacaagggattccagaacactgctacgagggtgtgaatgtttgtcccacacaaaggattccagaacactgctactggggtctaaatgtttgtccgtcacatagcattcctgaacaatgttacaagaatctgaatgtttgtacctcacataggattcctgaaccactgctacgaggktctgaatgtttgtccctcacatagaattc

SEQ ID NO: 229909 - DNA, 572 bp, Homo sapiens
gacactgctacgagggtctgaatgtttgtccctcacacagaattccagaacactgctacgtgggtctgaatgattgtccctcacgtaggattccagaacactgccatgagggtcttaatgtttgctcctcacttaggactccagaacattcctgctgtggtctgaatgtttctcccccacataggattcctgaacactgctatgagggtctggatgtttgtccctcacataggattccaaaacattcctgctgtgttccgagtgtttgtccctcacatacgattccagaacaatcctgctgtggtccgaatgtttgtccctcacatgyggttccagagcacagctgctgggttctgagtgtttctccctcacatagaattccagaacactgcgacgagtttctgaacgtttgtccataacattggattccaaaacactcttgctgttgtttgaatgtttgtccgtcacacaggattccagaatactgctgctggggtctgaatgtttgtcccttacgaaagattctagaacactgctatgattgtctgaatgtttgtctctaatacagggtc

SEQ ID NO: 229910 - DNA, 303 bp, Homo sapiens
gcttaaaatagggtaaattataacttacaaatataaaatgaacacttgtctaagatttttgtttaactcgtttgtttaatgagggagccagtaagatgttatactgagttttatggaaaattaaaagagccacacatatctaggcactaaggaacactgaaataaatttgcttgataggttcaaaactgamttcttgatggaaggtgggaaaaggaaaattaattatacttccaccaaaatcaatcatttgcctgtctataaacatgaatatttgcattactatcagtaatctacaactaaca

SEQ ID NO: 229911 - DNA, 439 bp, Homo sapiens
atgtaaactcagagcgagaacacayttatcatcaagggcatggtgctaaaccattcatgagggactcgcccccatgatccaaacacctctcactgggccccaccgctaacactgaagattacatttcaatatgagatttggaggagacaaacatctaaaccatatcagccacttggctcatgagcccattggacaatgacaggaatggctgggggaaagccactcattgacatccacagaactggtcatcctattattaaaatcctcctctgcctaggtcaccatttggtgagtgtccataagggacacaaatatcttcacaattttccatgtcttaccttagaagccccatcaccctctctttcacatctcctccagtacttatcccccagatgataggaccatgtccagcaatacctcttctctctggtattgatgg

SEQ ID NO: 229912 - DNA, 439 bp, Homo sapiens
atgtaaactcagagcgagaacacatttatcrtcaagggcatggtgctaaaccattcatgagggactcgcccccatgatccaaacacctctcactgggccccaccgctaacactgaagattacatttcaatatgagatttggaggagacaaacatctaaaccatatcagccacttggctcatgagcccattggacaatgacaggaatggctgggggaaagccactcattgacatccacagaactggtcatcctattattaaaatcctcctctgcctaggtcaccatttggtgagtgtccataagggacacaaatatcttcacaattttccatgtcttaccttagaagccccatcaccctctctttcacatctcctccagtacttatcccccagatgataggaccatgtccagcaatacctcttctctctggtattgatgg

SEQ ID NO: 229913 - DNA, 439 bp, Homo sapiens
atgtaaactcagagcgagaacacatttatcatcaagggcatggtgctaraccattcatgagggactcgcccccatgatccaaacacctctcactgggccccaccgctaacactgaagattacatttcaatatgagatttggaggagacaaacatctaaaccatatcagccacttggctcatgagcccattggacaatgacaggaatggctgggggaaagccactcattgacatccacagaactggtcatcctattattaaaatcctcctctgcctaggtcaccatttggtgagtgtccataagggacacaaatatcttcacaattttccatgtcttaccttagaagccccatcaccctctctttcacatctcctccagtacttatcccccagatgataggaccatgtccagcaatacctcttctctctggtattgatgg

SEQ ID NO: 229914 - DNA, 433 bp, Homo sapiens
catttatcatcaagggcatggtgctaaaccattcatgagggactcgcccccatgatccaaacacctctcactgggccccaccgctaacactgragattacatttcaatatgagatttggaggagacaaacatctaaaccatatcagccacttggctcatgagcccattggacaatgacaggaatggctgggggaaagccactcattgacatccacagaactggtcatcctattattaaaatcctcctctgcctaggtcaccatttggtgagtgtccataagggacacaaatatcttcacaattttccatgtcttaccttagaagccccatcaccctctctttcacatctcctccagtacttatcccccagatgataggaccatgtccagcaatacctcttctctctggtattgatgggttaatgagcagatct

SEQ ID NO: 229915 - DNA, 439 bp, Homo sapiens
atgtaaactcagagcgagaacacatttatcatcaagggcatggtgctaaaccattcatgagggactcgcccccatgatccaaacacctctcactgggccccaccgctaacactgargattacatttcaatatgagatttggaggagacaaacatctaaaccatatcagccacttggctcatgagcccattggacaatgacaggaatggctgggggaaagccactcattgacatccacagaactggtcatcctattattaaaatcctcctctgcctaggtcaccatttggtgagtgtccataagggacacaaatatcttcacaattttccatgtcttaccttagaagccccatcaccctctctttcacatctcctccagtacttatcccccagatgataggaccatgtccagcaatacctcttctctctggtattgatgg

SEQ ID NO: 229916 - DNA, 433 bp, Homo sapiens
catttatcatcaagggcatggtgctaaaccattcatgagggactcgcccccatgatccaaacacctctcactgggccccaccgctaacactgaagattacatttcaatatgagatttggaggagacaaacatctaaaccatatcagccacttggctcatgagcccattggacaatgacaggaatggctgggggaaagccactcattgacatccacagaactggtcatcctattattaaaatcctcctctgcctaggtcaccatttggtgagtgtccataagggacacaaatatcttcacaattttccatgtcttaccttagaagccccatcacccwctctttcacatctcctccagtacttatcccccagatgataggaccatgtccagcaatacctcttctctctggtattgatgggttaatgagcagatct

SEQ ID NO: 229917 - DNA, 470 bp, Homo sapiens
tataatcattcctacttaataactttacatgtttatttctgcatttttctaagtccttgccccaaagtggacataattttatactgtratagcataaaataattttgcatttgacatttttgatttggcattaaactattgtttatgtttctttcgctactgcttaagaaaatgtgggtgattgtaataaataaacctgaaatgtaggcaatttttattgccttaaaaacaatagaatgttatttctcactcacacaatagtccaatgaggatgtccctggtgggcaaagactcttgtctaccaaatgggatggggactcagtttccttccctcttgtgactctggcattgcctagagccacatgattacctgtactgaatctgtagaaagagaaataagcagtgtagagatgatatgtctgttttctgatatcctcagcctagaagaaacacacattacttctgttctt

SEQ ID NO: 229918 - DNA, 470 bp, Homo sapiens
tataatcattcctacttaataactttacatgtttatttctgcatttttctaagtccttgccccaaagtggacataattttatactgtaatagcataaaataattttgcatttgacatttttgatttggcattaaactattgtttatgtttctttcgctactgcttaagaaaatgtgggtgrttgtaataaataaacctgaaatgtaggcaatttttattgccttaaaaacaatagaatgttatttctcactcacacaatagtccaatgaggatgtccctggtgggcaaagactcttgtctaccaaatgggatggggactcagtttccttccctcttgtgactctggcattgcctagagccacatgattacctgtactgaatctgtagaaagagaaataagcagtgtagagatgatatgtctgttttctgatatcctcagcctagaagaaacacacattacttctgttctt

SEQ ID NO: 229919 - DNA, 470 bp, Homo sapiens
tataatcattcctacttaataactttacatgtttatttctgcatttttctaagtccttgccccaaagtggacataattttatactgtaatagcataaaataattttgcatttgacatttttgatttggcattaaactattgtttatgtttctttcgctactgcttaagaaaatgtgggtgattgtaataaataaacctgaaatgtaggcaatttttattgccttaaaaacaatagaatgttatttctcactcacacaatagtccaatgaggatgtccctggtgggcaaagactcttgtctaccaaatgggatggggactcagtttccttccctcttgtgactcyggcattgcctagagccacatgattacctgtactgaatctgtagaaagagaaataagcagtgtagagatgatatgtctgttttctgatatcctcagcctagaagaaacacacattacttctgttctt

SEQ ID NO: 229920 - DNA, 533 bp, Homo sapiens
aaaggcaaggaccattggggccattttggaggctatttaccacagcccctctcttcaatattccagtccacctgcatattctgttcatcctccttccaaaaatgtatctcaaaccaaatgactaattttcatttctgttggctctagcctagtccaagactctatcaacactcgacttgaagartgtcccgtctgatattcctctttctgctcttgccccccttcaaggtatttctcccagagaagccattcatcatgcattcattattctccattcattaattcaacaaatatttattgtacgcttaccacatgccagatttattttaggttcttgggatatagcagtgaaaaaaagtccttgggctttacatacagtgggaaaataaataatatggaaaatgttaaaggcaacatatgtgatccagaaaattatagcagggtgaaggaaataggaaacaatagaaaagttagggacttctggctatagtattatatagggctgtcaagggtgctatctctcattagcttac

SEQ ID NO: 229921 - DNA, 514 bp, Homo sapiens
tccttgggctttacatacagtgggaaaataaataatatggaaaatgttaaaggcaacatatgtgatccagaaaattatagcagggtgaaggaaataggaaacaatagaaaagttagggacttctggctatagtattatatagggctgtcaagggtgctatctctsattagcttacattgaaacagaaacccaaaagacagtagagggcaggtatgttaatatctgggcaagtattctaagcagaggaaaaagaaaatgcaagggccctgaggcaggatcatgtttggtatgtttgaggaatagctgttctgttccgttgtggctggaacagaacaaggagggcgggagggcgagggagaatggtacatgatggaggtcagattatgtagggccttgtagactacaatgaagactctggctttgttctgggttggtgggggacaaggaacgctattggaatgttttagtgacttgatgtgacttactttttaataggaccatttgggctgctcag

SEQ ID NO: 229922 - DNA, 514 bp, Homo sapiens
tccttgggctttacatacagtgggaaaataaataatatggaaaatgttaaaggcaacatatgtgatccagaaaattatagcagggtgaaggaaataggaaacaatagaaaagttagggacttctggctatagtattatatagggctgtcaagggtgctatctctcattagcttacattgaaacagaaacccaaaagacagtagagggcaggtatgttaatatctgggcaagtattctaagcagaggaaaaagaaaatgcragggccctgaggcaggatcatgtttggtatgtttgaggaatagctgttctgttccgttgtggctggaacagaacaaggagggcgggagggcgagggagaatggtacatgatggaggtcagattatgtagggccttgtagactacaatgaagactctggctttgttctgggttggtgggggacaaggaacgctattggaatgttttagtgacttgatgtgacttactttttaataggaccatttgggctgctcag

SEQ ID NO: 229923 - DNA, 514 bp, Homo sapiens
tccttgggctttacatacagtgggaaaataaataatatggaaaatgttaaaggcaacatatgtgatccagaaaattatagcagggtgaaggaaataggaaacaatagaaaagttagggacttctggctatagtattatatagggctgtcaagggtgctatctctcattagcttacattgaaacagaaacccaaaagacagtagagggcaggtatgttaatatctgggcaagtattctaagcagaggaaaaagaaaatgcaagggccctgaggcaggatcatgtttggtatgtttgaggaatagctgttctgttccgttgtggctggaacagaacaaggagggcgggagggcgagggagaatggtacatgatggaggtcagattatgtagggccttgtagactacaatgaagactctggctttgttctgggttggtgggggacaaggaacgctattggaatgttttagtgacttgatgtgacttamtttttaataggaccatttgggctgctcag

SEQ ID NO: 229924 - DNA, 576 bp, Homo sapiens
cattagaaaacttgaacgagcccttctatgattctctcttccctctttctgcttccctttctgaatcaccatccccaggttgtggaattagcaaatctattatgtgagcaatagcaaacttacaggagccctcggctccatctatctccctgtttgtgtcagttcattctggatgcttttagtctgtggtcttcattcactctttttatggggaagtaaaaggagtgggacagattatgagaacagctgggtcctcccagttgctggggtggttattttaagctttgtttaatgtgtccagagacccagatggcatttttaactaagctgctttattaaatcttgtgataaagcatagtgatgtttattgaaaaggcagacacacatcagcaacattatgcrtgaaacttgctctaagaattttctataaaacatctgttctctttgagcctttgtgaactctggaagtttgctagtttctatacagacttgaggacaagaagttggaacccacttttggagatgtccaagcataggtattggaatcattaatcctaaccctctcagttttaaggc

SEQ ID NO: 229925 - DNA, 533 bp, Homo sapiens
gtagcaagccggttcggcagtgccagtcggagacacagatggggacaatcaaagaagatgcaggtcaggacaaggatgcagacatgtacctgtcactaccatggacttcagcacttcttagtgagcaggtttatgattaaagaagaaagacatcgttgatatgtaagcatgttacaattaatttgctgtttagttattagcaaactacatccagtttttagtttttaggttttttttttcttttttcttttttgaaacaggttcttgttctgtcatccaggctggagtgcagtcgttatccaagctcacygcagccttaaactcctaggcttagtggatcctcccacctcagcctcccaagaagctgggactacaggtgcacgccaccatggccagctaatttttcttatttttttgtagagatgaggtcttgctgtattgcccaggctgctcttgagctcctggcttcaagccatcctcctgtcttggtttcccaaagtgctgggactataggtgtgactcaccatgcctgg

SEQ ID NO: 229926 - DNA, 533 bp, Homo sapiens
gtagcaagccggttcggcagtgccagtcggagacacagatggggacaatcaaagaagatgcaggtcaggacaaggatgcagacatgtacctgtcactaccatggacttcagcacttcttagtgagcaggtttatgattaaagaagaaagacatcgttgatatgtaagcatgttacaattaatttgctgtttagttattagcaaactacatccagtttttagtttttaggttttttttttcttttttcttttttgaaacaggttcttgttctgtcatccaggctggagtgcagtcgttatccaagctcactrcagccttaaactcctaggcttagtggatcctcccacctcagcctcccaagaagctgggactacaggtgcacgccaccatggccagctaatttttcttatttttttgtagagatgaggtcttgctgtattgcccaggctgctcttgagctcctggcttcaagccatcctcctgtcttggtttcccaaagtgctgggactataggtgtgactcaccatgcctgg

SEQ ID NO: 229927 - DNA, 533 bp, Homo sapiens
gtagcaagccggttcggcagtgccagtcggagacacagatggggacaatcaaagaagatgcaggtcaggacaaggatgcagacatgtacctgtcactaccatggacttcagcacttcttagtgagcaggtttatgattaaagaagaaagacatcgttgatatgtaagcatgttacaattaatttgctgtttagttattagcaaactacatccagtttttagtttttaggttttttttttcttttttcttttttgaaacaggttcttgttctgtcatccaggctggagtgcagtcgttatccaagctcactgcagccttaaactcctrggcttagtggatcctcccacctcagcctcccaagaagctgggactacaggtgcacgccaccatggccagctaatttttcttatttttttgtagagatgaggtcttgctgtattgcccaggctgctcttgagctcctggcttcaagccatcctcctgtcttggtttcccaaagtgctgggactataggtgtgactcaccatgcctgg

SEQ ID NO: 229928 - DNA, 533 bp, Homo sapiens
gtagcaagccggttcggcagtgccagtcggagacacagatggggacaatcaaagaagatgcaggtcaggacaaggatgcagacatgtacctgtcactaccatggacttcagcacttcttagtgagcaggtttatgattaaagaagaaagacatcgttgatatgtaagcatgttacaattaatttgctgtttagttattagcaaactacatccagtttttagtttttaggttttttttttcttttttcttttttgaaacaggttcttgttctgtcatccaggctggagtgcagtcgttatccaagctcactgcagccttaaactcctaggctyagtggatcctcccacctcagcctcccaagaagctgggactacaggtgcacgccaccatggccagctaatttttcttatttttttgtagagatgaggtcttgctgtattgcccaggctgctcttgagctcctggcttcaagccatcctcctgtcttggtttcccaaagtgctgggactataggtgtgactcaccatgcctgg

SEQ ID NO: 229929 - DNA, 559 bp, Homo sapiens
ccatccaaggtccaccacccataaacagggtggtgaatggattagtgctcatctaccctctatttgctcttatgccacccctatggttcaccatktatccactcaagaaatatttattaaggacctcctatgtcctagacacggtccccgtggcggtgctttcagtctaatggggaagacaaagaataacaagtaagggaaacatacagaaacacaaattgtaacacaggctagtggaaatgaacttggtgcagtactcattggtgggcatcgagcatcttgcttagataggagatccagggaaggactcttggaggagattaggcataggaccaaagatcagaaacaggtatctggacctgactgtgatgctgggattagaaatgacacccacacatgtgaaaacacttattcctcagaaggtagtctacagctatttgttgccaattcccaatctaaaatatgtactatagctttatcttgaacatactcagctgatcgttggaatccagacagtgttaatcctccaagtatgcaagtatctactgatctctggtga

SEQ ID NO: 229930 - DNA, 578 bp, Homo sapiens
gttttgactatgaaaaaggccatccaaggtccaccacccataaacagggtggtgaatggattagtgctcatctaccctctatttgctcttatgccacccctatggttcaccatttatccactcaagaaatatttattaaggacctcctatgtcctagacacggtccccgtggcrgtgctttcagtctaatggggaagacaaagaataacaagtaagggaaacatacagaaacacaaattgtaacacaggctagtggaaatgaacttggtgcagtactcattggtgggcatcgagcatcttgcttagataggagatccagggaaggactcttggaggagattaggcataggaccaaagatcagaaacaggtatctggacctgactgtgatgctgggattagaaatgacacccacacatgtgaaaacacttattcctcagaaggtagtctacagctatttgttgccaattcccaatctaaaatatgtactatagctttatcttgaacatactcagctgatcgttggaatccagacagtgttaatcctccaagtatgcaagtatctactgatctctggtga

SEQ ID NO: 229931 - DNA, 578 bp, Homo sapiens
gttttgactatgaaaaaggccatccaaggtccaccacccataaacagggtggtgaatggattagtgctcatctaccctctatttgctcttatgccacccctatggttcaccatttatccactcaagaaatatttattaaggacctcctatgtcctagacacggtccccgtggcggtgctttcagtctaatgsggaagacaaagaataacaagtaagggaaacatacagaaacacaaattgtaacacaggctagtggaaatgaacttggtgcagtactcattggtgggcatcgagcatcttgcttagataggagatccagggaaggactcttggaggagattaggcataggaccaaagatcagaaacaggtatctggacctgactgtgatgctgggattagaaatgacacccacacatgtgaaaacacttattcctcagaaggtagtctacagctatttgttgccaattcccaatctaaaatatgtactatagctttatcttgaacatactcagctgatcgttggaatccagacagtgttaatcctccaagtatgcaagtatctactgatctctggtga

SEQ ID NO: 229932 - DNA, 566 bp, Homo sapiens
aaaaaggccatccaaggtccaccacccataaacagggtggtgaatggattagtgctcatctaccctctatttgctcttatgccacccctatggttcaccatttatccactcaagaaatatttattaaggacctcctatgtcctagacacggtccccgtggcggtgctttcagtctaatggggaagacaaagaataacaagtaagggaaacatacagaaacacaaattgtaacacaggctagtggaaatkaacttggtgcagtactcattggtgggcatcgagcatcttgcttagataggagatccagggaaggactcttggaggagattaggcataggaccaaagatcagaaacaggtatctggacctgactgtgatgctgggattagaaatgacacccacacatgtgaaaacacttattcctcagaaggtagtctacagctatttgttgccaattcccaatctaaaatatgtactatagctttatcttgaacatactcagctgatcgttggaatccagacagtgttaatcctccaagtatgcaagtatctactgatctctggtga

SEQ ID NO: 229933 - DNA, 590 bp, Homo sapiens
ggccatccaaggtccaccacccataaacagggtggtgaatggattagtgctcatctaccctctatttgctcttatgccacccctatggttcaccatttatccactcaagaaatatttattaaggacctcctatgtcctagacacggtccccgtggcggtgctttcagtctaatggggaagacaaagaataacaagtaagggaaacatacagaaacacaaattgtaacacaggctagtggaaatgaacttggtgcagtactcattggtgggcatcgagcatcttgcttagataggagatccagggaaggactcttggaggagattaggcataggaccaaagatcagaaacaggtatctggacctgactgkgatgctgggattagaaatgacacccacacatgtgaaaacacttattcctcagaaggtagtctacagctatttgttgccaattcccaatctaaaatatgtactatagctttatcttgaacatactcagctgatcgttggaatccagacagtgttaatcctccaagtatgcaagtatctactgatctctggtgatctcgattcttaccacgtcctttagatct

SEQ ID NO: 229934 - DNA, 578 bp, Homo sapiens
gttttgactatgaaaaaggccatccaaggtccaccacccataaacagggtggtgaatggattagtgctcatctaccctctatttgctcttatgccacccctatggttcaccatttatccactcaagaaatatttattaaggacctcctatgtcctagacacggtccccgtggcggtgctttcagtctaatggggaagacaaagaataacaagtaagggaaacatacagaaacacaaattgtaacacaggctagtggaaatgaacttggtgcagtactcattggtgggcatcgagcatcttgcttagataggagatccagggaaggactcttggaggagattaggcataggaccaaagatcagaaacaggtatctggacctgactgtgatgctgggattagaaatgacacccacacatgtgaaaacacttattcctcagaaggtagtctacagctatttgttgccaatycccaatctaaaatatgtactatagctttatcttgaacatactcagctgatcgttggaatccagacagtgttaatcctccaagtatgcaagtatctactgatctctggtga

SEQ ID NO: 229935 - DNA, 578 bp, Homo sapiens
gttttgactatgaaaaaggccatccaaggtccaccacccataaacagggtggtgaatggattagtgctcatctaccctctatttgctcttatgccacccctatggttcaccatttatccactcaagaaatatttattaaggacctcctatgtcctagacacggtccccgtggcggtgctttcagtctaatggggaagacaaagaataacaagtaagggaaacatacagaaacacaaattgtaacacaggctagtggaaatgaacttggtgcagtactcattggtgggcatcgagcatcttgcttagataggagatccagggaaggactcttggaggagattaggcataggaccaaagatcagaaacaggtatctggacctgactgtgatgctgggattagaaatgacacccacacatgtgaaaacacttattcctcagaaggtagtctacagctatttgttgccaattcccaatctaaaatatgtactatagctttatcttgaacatactcagctgatcgttggaatccagacagtgttaatcctscaagtatgcaagtatctactgatctctggtga

SEQ ID NO: 229936 - DNA, 453 bp, Homo sapiens
tgtgctgtttcatctcccagatcagtcatgatggatgacagtggtggaagagatagtgatgtgagctcatatgtaattactcagtctcccatacattgcttctgctatagaatgatgggaawcatttcgctttagcagataaatatgttcaaatgtaacctatattaacataaaagaaaaaaagaagaaagcccttcatcctgtaagttattgccctgaaactctgtatagctgattcagttaggatcaaggcaggaaagagatggcaccctcaaaaaggtcttactaaagagaatttagtaattgtaacttaataacctggtctaaggaacggatgaggttaaggaaaccaaaaaacacaagaaggaatggggaggtaccttagcaacagcaatagcaggaagctgttaacacccctaggactaagaagggtccaggggagaggtcagggtg

SEQ ID NO: 229937 - DNA, 451 bp, Homo sapiens
tgctgtttcatctcccagatcagtcatgatggatgacagtggtggaagagatagtgatgtgagctcatatgtaattactcagtctcccatacattgcttctgctatagaatgatgggaaayatttcgctttagcagataaatatgttcaaatgtaacctatattaacataaaagaaaaaaagaagaaagcccttcatcctgtaagttattgccctgaaactctgtatagctgattcagttaggatcaaggcaggaaagagatggcaccctcaaaaaggtcttactaaagagaatttagtaattgtaacttaataacctggtctaaggaacggatgaggttaaggaaaccaaaaaacacaagaaggaatggggaggtaccttagcaacagcaatagcaggaagctgttaacacccctaggactaagaagggtccaggggagaggtcagggtg

SEQ ID NO: 229938 - DNA, 453 bp, Homo sapiens
tgtgctgtttcatctcccagatcagtcatgatggatgacagtggtggaagagatagtgatgtgagctcatatgtaattactcagtctcccatacattgcttctgctatagaatgatgggaaacatttcgctttagcagataaatatgttcaaatgtaacctayattaacataaaagaaaaaaagaagaaagcccttcatcctgtaagttattgccctgaaactctgtatagctgattcagttaggatcaaggcaggaaagagatggcaccctcaaaaaggtcttactaaagagaatttagtaattgtaacttaataacctggtctaaggaacggatgaggttaaggaaaccaaaaaacacaagaaggaatggggaggtaccttagcaacagcaatagcaggaagctgttaacacccctaggactaagaagggtccaggggagaggtcagggtg

SEQ ID NO: 229939 - DNA, 453 bp, Homo sapiens
tgtgctgtttcatctcccagatcagtcatgatggatgacagtggtggaagagatagtgatgtgagctcatatgtaattactcagtctcccatacattgcttctgctatagaatgatgggaaacatttcgctttagcagataaatatgttcaaatgtaacctatattaacataaaagaaaaaaagaagaaagcccttyatcctgtaagttattgccctgaaactctgtatagctgattcagttaggatcaaggcaggaaagagatggcaccctcaaaaaggtcttactaaagagaatttagtaattgtaacttaataacctggtctaaggaacggatgaggttaaggaaaccaaaaaacacaagaaggaatggggaggtaccttagcaacagcaatagcaggaagctgttaacacccctaggactaagaagggtccaggggagaggtcagggtg

SEQ ID NO: 229940 - DNA, 619 bp, Homo sapiens
ctcagtttgctcatctataaaagatgggattgttatgagacttgcataaggtaagtgtttaaaaatctgggaataayccctgtaatttaaaagacggggttgtgatgaggcttcaataaggtaagtgtgtaatatctggacacaatgttactaattttgtaggttttcaatatatagagaaggaggattatttttctctcatttaatttttagaacaagtttataaaattggtattattcatatttttgagataatcaaaggatcactaagtttaaataaatcaccatagtaacaaagcagttcacaatatattgactggataattgctagtgaaaagtagcaatgatgatcacattgaaaatcttgtgttaggtggtggttttctcttgcataagcctcttcatttgttgaaaccatagattctaagtttgctctatcaaagtgatcattagaaaaatataatgtacttagtgtataaattttagaaaatttcctttttagtcctgttattttgattgaatatgtgcattttgaattatgaatataaatatgaatatgtatggcataagaaatatgacttgacatcacagagtaaccttagatcgtggcaatgttttt

SEQ ID NO: 229941 - DNA, 488 bp, Homo sapiens
attggggtgcagttctggagggggaattcaggaccttcttcttacctcctcctacccctgcaaatagtctgagactcactaataactgacagtggtattcaaattggaacagtggttcttgcctctgacctttgcatrtgctcaagtagtcatctgtccttctttctcatcctctcctctttattcctttcttccttcttcccctttccctccatctctattcctccctccttcccttcgcttctccttcccttctccctccttccttccttcttttcttatcttcccttcctccccaccttgcctacctctcacatttccattttccaaaaaaccttttttagccccttttgtgtgccaagcacactgcatggtactggatattcctgatggagctcatcttcccttccatgttcccttttcctttagcaaacttcactgccaacaaaatgtgttaatattctctgtgtaaggtgttctgctagatt

SEQ ID NO: 229942 - DNA, 488 bp, Homo sapiens
attggggtgcagttctggagggggaattcaggaccttcttcttacctcctcctacccctgcaaatagtctgagactcactaataactgacagtggtattcaaattggaacagtggttcttgcctctgacctttgcatatgctcaagtagtcatctgtccttctttctcatcctctcctctttattcctttcttccttcttcccctttccctccatctctattcctccctccttcccttcgcttctccttcccttctccctccttccttccttcttttcttatcttcccttcctccccaccttgcctacctctcacatttccattttccaaaaaaccttttttagccccttttgtgtgccaagcacactgcatggtactggatattcctgatggagctcatcttcccttccatgttcccttttcctttagcaaacttcastgccaacaaaatgtgttaatattctctgtgtaaggtgttctgctagatt

SEQ ID NO: 229943 - DNA, 499 bp, Homo sapiens
cccttgggacacaagaaatgcatgcacttgtgcgctctctctctttttcatttttattyttctaatttatatggctggctttctatgggtcactttgtatcagtataccttagttgttagccagtgatggtcaggggttatgatcaaacaccttaaatgagtaaggcttcctttctttgccaataggtctgtctgtgggctagggaactcatttcaagttctgctcatttacaaatttgtcctggctcttactttccacccaaccctctcatgtcccttcttgagtgtaatggaactccctagaaagagaggagagagagaaaggggaagaaaaaatatttgaagaaagaccaaaaaaattccaaaattggaatttaaaaagtataatctacagattcaagaagctcaactccaagtagaatgaacacaaagagactcatacctaaatatttcatggtcagactattgaaagacccaaaaatgtcttgaaagcaacaag

SEQ ID NO: 229944 - DNA, 499 bp, Homo sapiens
cccttgggacacaagaaatgcatgcacttgtgcgctctctctctttttcatttttattcttctaatttatatggctggctttctatgggtcactttgtatcagtataccttagttgttagccagtgayggtcaggggttatgatcaaacaccttaaatgagtaaggcttcctttctttgccaataggtctgtctgtgggctagggaactcatttcaagttctgctcatttacaaatttgtcctggctcttactttccacccaaccctctcatgtcccttcttgagtgtaatggaactccctagaaagagaggagagagagaaaggggaagaaaaaatatttgaagaaagaccaaaaaaattccaaaattggaatttaaaaagtataatctacagattcaagaagctcaactccaagtagaatgaacacaaagagactcatacctaaatatttcatggtcagactattgaaagacccaaaaatgtcttgaaagcaacaag

SEQ ID NO: 229945 - DNA, 499 bp, Homo sapiens
cccttgggacacaagaaatgcatgcacttgtgcgctctctctctttttcatttttattcttctaatttatatggctggctttctatgggtcactttgtatcagtataccttagttgttagccagtgatggtcaggggttatgatcaaacaccttaaatgagtaaggcttcctttctttgccaataggtctgtctgtgggctrgggaactcatttcaagttctgctcatttacaaatttgtcctggctcttactttccacccaaccctctcatgtcccttcttgagtgtaatggaactccctagaaagagaggagagagagaaaggggaagaaaaaatatttgaagaaagaccaaaaaaattccaaaattggaatttaaaaagtataatctacagattcaagaagctcaactccaagtagaatgaacacaaagagactcatacctaaatatttcatggtcagactattgaaagacccaaaaatgtcttgaaagcaacaag

SEQ ID NO: 229946 - DNA, 512 bp, Homo sapiens
aaataaacggtgccatgggaagacagccacactcgctagctgtgatgaggagsgtaaggaccaggtcctgacttcctgcaggctctcacttggcccttgtctgagtccttgggctggtgtccactgctggggaagaaggcagagtaggggaaagaaggaagctcagaaacaaggtacagggggctgcctgcagactacttaagagcatcagtttgcttcttaaactgatacactggctctgaagtcagtgccagaagagctccagaatggtttctagtggtggtatcctaaacacacacacttccagggggcagttttgatgcagaaccctcatttggactttttcttttttttttttttttttttttaagcaaacctctctttgctttataccagattgcatagacagccttttagaaatcactcagaaaatgtgtcttcctccagtcactgtagttcaccataataatgtgaaatgtaggacctgtggattgactttatgagtccaggac

SEQ ID NO: 229947 - DNA, 533 bp, Homo sapiens
ttcaaactcacatggaacattcaccaagacaggtcatgtgccgggccattcttagactgcaatggaactaaactagtaaaccataacataaagatagctggataatccctggatatttggaaattaaacaacattcttctatatattacatttgtcaaagaagtctcaagataaaatatttaataaataaatatcttatttaataaaataataaataatgaaataaataaaattacaacctatcaacagttgtggaatgcagcaaaagtagaagttagaaggaagtttatagcatgaaatgtgcatgttggcaaagaagaaatatctaaaatcaataacctaagcttccaccttatgaaactayggaaagaagaacaatttaagcctagagcaaactgaataaaagaaataataaaaatcagaaaagaaatcaatgaaattgaaaataagaaactatgtaggatatcaacaaaaccaaaagctggttctttgaaaatatcaataagatcgataaaccattacacaggttaacc

SEQ ID NO: 229948 - DNA, 545 bp, Homo sapiens
gggtgtaatgaggtatgcccaaacaacccttcccatcacagcctaaactagttttccaggttaactttggaatgcccttagtcaagaggaggcttccattcagatggttgaggggcttcaaattttatttttggtttacatagctaaaaaatacttcttgaactttcaagaattgtgaggggtctaggattttactctacttgcaagctaacaatttagactattactgtttctcagatgctagcagaagacatgagattcctgggtcagagayaaaggacttccttactcatggcaacagcaggtcatgtgcgtggatatcctgttttccctgaatcccgcagggccaatttaaacagtccatgatgaatgcccatgtgtacagtggttgtgttacaagacaagaacccacacatcttagatgagtcatcactaatatgctaagtagaaagagtcctgctttttgtctgagagacattacttcattatctctcaggtgtgctctctgcaaatacaatcctgaggaatgggtccagataaagagt

SEQ ID NO: 229949 - DNA, 525 bp, Homo sapiens
gggtgtaatgaggtatgcccaaacaacccttcccatcacagcctaaactagttttccaggttaactttggaatgcccttagtcaagaggaggcttccattcagatggttgaggggcttcaaattttatttttggtttacatagctaaaaaatacttcttgaactttcaagaattgtgaggggtctaggattttactctacttgcaagctaacaatttagactattactgtttctcagatgctagcagaagacatgagattcctgggtcagagacaaaggacttccttactcatggcaacagcaggtcatgtgcgtggatatcctgttttccctgaatcccgcagggccaatttaaacagtccatgatgaatgcccatgtgtacagtggttgtgttacargacaagaacccacacatcttagatgagtcatcactaatatgctaagtagaaagagtcctgctttttgtctgagagacattacttcattatctctcaggtgtgctctctgcaaatacaatcctgagg

SEQ ID NO: 229950 - DNA, 620 bp, Homo sapiens
ctctgtcagcaggctgtgtgtttgtccacttgtcttattttttaaatgtagatttaagggtccaagtgcagttgtgttacatggatatattacacattggcraagtcttggtttttagtgtactgatcacctaaatagtgtacattgtaccaaactggacctatttcatcccttatcccccctcccacccttccacattaaaaaaggcattattttcacagctatctcaatcctgtcacttgcactcaactcctactcattaactcaattcttctttattaacaagaaggatcatgcaggatacttaccctccccacatgtgtaggagcgtttgctactggatcccagagagtcatcccttatctgaatctggtcttcctccagaaagctatgtctctatcaccatacaatcttcgtcattaaaactgacaaaaattgtgaagggtacattctggtatggtttgaatatttgtcttcctcaaaactcatgtgaaatttaatttctattttgatagtatttggcgatgagacctttaagaggtgtttaggtcaggctacacccttgtgagtggacttataccattatcgtgggagtgtgctctcctctcttgctctttctc

SEQ ID NO: 229951 - DNA, 620 bp, Homo sapiens
ctctgtcagcaggctgtgtgtttgtccacttgtcttattttttaaatgtagatttaagggtccaagtgcagttgtgttacatggatatattacacattggcaaagtcttggtttttagtgtactgatcacctaaatagtgtacattgtaccaaactggacctatttcatcccttatcccccctcccacccttccacattaaaaaaggcattattttyacagctatctcaatcctgtcacttgcactcaactcctactcattaactcaattcttctttattaacaagaaggatcatgcaggatacttaccctccccacatgtgtaggagcgtttgctactggatcccagagagtcatcccttatctgaatctggtcttcctccagaaagctatgtctctatcaccatacaatcttcgtcattaaaactgacaaaaattgtgaagggtacattctggtatggtttgaatatttgtcttcctcaaaactcatgtgaaatttaatttctattttgatagtatttggcgatgagacctttaagaggtgtttaggtcaggctacacccttgtgagtggacttataccattatcgtgggagtgtgctctcctctcttgctctttctc

SEQ ID NO: 229952 - DNA, 620 bp, Homo sapiens
ctctgtcagcaggctgtgtgtttgtccacttgtcttattttttaaatgtagatttaagggtccaagtgcagttgtgttacatggatatattacacattggcaaagtcttggtttttagtgtactgatcacctaaatagtgtacattgtaccaaactggacctatttcatcccttatcccccctcccacccttccacattaaaaaaggcattattttcrcagctatctcaatcctgtcacttgcactcaactcctactcattaactcaattcttctttattaacaagaaggatcatgcaggatacttaccctccccacatgtgtaggagcgtttgctactggatcccagagagtcatcccttatctgaatctggtcttcctccagaaagctatgtctctatcaccatacaatcttcgtcattaaaactgacaaaaattgtgaagggtacattctggtatggtttgaatatttgtcttcctcaaaactcatgtgaaatttaatttctattttgatagtatttggcgatgagacctttaagaggtgtttaggtcaggctacacccttgtgagtggacttataccattatcgtgggagtgtgctctcctctcttgctctttctc

SEQ ID NO: 229953 - DNA, 533 bp, Homo sapiens
agaacaacaataatgatagatatttcaggtcaggaattggggaaaacaaattaaaaattcatagtaatgccaaattcataaaattttaaatctcttgaacacttatttcaaccaaagcactatttttgacattgcacatatataatcttattttgtatccataatcatatttactatatgatactattggatagatgaaggaactatcycaaagacatgcaaagtcaactcccagtgttagatagctagtaaaggattttaggaaaggtgttcttagttaaggttttccctctcgaacatacactattaactgggaaggagctagtccttaaacaactggcctggaaagtaacagtataaatgagaagctttgagctttgaacttaaccagcctggcagcttggtccttagtgcctacagcagcatccagagtggcccaggtgcagatcattaagtatgtggtagtgggaaccggagttttaggtaaaacttgcctgctggtcaattacacaccaatgtattttgtgtagaat

SEQ ID NO: 229954 - DNA, 533 bp, Homo sapiens
agaacaacaataatgatagatatttcaggtcaggaattggggaaaacaaattaaaaattcatagtaatgccaaattcataaaattttaaatctcttgaacacttatttcaaccaaagcactatttttgacattgcacatatataatcttattttgtatccataatcatatttactatatgatactattggatagatgaaggaactatcccaaagasatgcaaagtcaactcccagtgttagatagctagtaaaggattttaggaaaggtgttcttagttaaggttttccctctcgaacatacactattaactgggaaggagctagtccttaaacaactggcctggaaagtaacagtataaatgagaagctttgagctttgaacttaaccagcctggcagcttggtccttagtgcctacagcagcatccagagtggcccaggtgcagatcattaagtatgtggtagtgggaaccggagttttaggtaaaacttgcctgctggtcaattacacaccaatgtattttgtgtagaat

SEQ ID NO: 229955 - DNA, 449 bp, Homo sapiens
actctttgtttttattgccaaatagaacttcattatataacgaataaatagtatttcactaattgaaggacatttgggttgtttaccctttatgactgttataaataatgttctatcaactttcatgcaagtctcatctcttctgattagatatctcagactgaaattgctgggacatatggtaaatttamgtttagcaatttaagaaactgacaaactgttatctaaaatggatgtatatttacattcctataaaaatatgaggttacatttcccagcatgttaaccaacacttgtttttgtctagcttttttgtcatagccattcttgtgggtatgagaaggtgtctcataattttaatttgtattttattagaaactcattatataggatttttaatttgtttattgatcacttgtgttaccttcctactctggagaaatgttaat

SEQ ID NO: 229956 - DNA, 594 bp, Homo sapiens
ggctgagggatgagaaattacttaatgaatacagtgtacattattcaggtgataggtacactaaaagcctaaacttcatcattatataatatatttctgtaacaaaaatgcacttgtacctcttatgtttacactaattgttttaaaagtatattaacatttctgaagtatatcttcttattgtttgttctgggtcaatattcacagatatgctgtgtactcttatgtagcttcaagtccttttttgtttaaacttcaagagagtttttatgaatgataatttttagtaattgttcagtttatttgcttttttgccccaggaattcatattatctataagttagttatttgctattttagtcrccaccttcttaaatattttatcttatttatatttctcgatagtctctttcttaaaaagtcaatttgtcttcagaagttaaggattgtgttatttttgcatttagtcatttgtaggatattctttcattttttatagttcatttgtcatttttgaaatcatttttcttttatctctagttccatcacattctgtaaccacatttctgaatttctaaagtttaacttataata

SEQ ID NO: 229957 - DNA, 587 bp, Homo sapiens
gcaaattccgaagaaaataaataaaaacaataaaagcaacactcagtgtcattgtaaatcactggaacactgagagccaagacaagattgtaaacgcccccaaaaatgtttttaagcatatgaagaaccaagtattataagaatatcaaatctcttaccataaatattagatactagaaaacgagaagaaaaattacagggaaagaattccaagctatagctaccctaatgaagcataaaaatggaagaaaaaaaagctaaacagtgtcagacttgtaagttcttcaaaaatttacttcacttgtactttacttgtactttyactgagaaatgactgattaacatttaattagaaaaaaggtggaaattgaattaagaaagcataatacatgggattcaagtcacaatgtcacatacagaagaggaataattgtcactcccagcttgatggtgaaaagagagccccagatgaaaagctgtgtatattagctactatcgattctacagggaaacagcatagagtgttcaaggaggaatagctccaagaatgaatacagatataattggtagattatgagtgtgagtaa

SEQ ID NO: 229958 - DNA, 579 bp, Homo sapiens
aaggctcttactcttgagaggtatgtaactagaagtcaccaaagtaaagccacagaaaaattggtgccatttaggttgtaaattaaaatgtttaaaaaaattgcactaggaaaaaagtttttaaaaaatcaaatgtgtaactgatcataaaatagtatgtgacagaagatctcatacagcataattatataagattaaaacaataaaatatttaggatatatggggtgtgtatgataaattactcttggtagaggaagagagagggtatggaaagcatataggcaaagtccaagatatgaatagtttttcttgtcattttatacagataaaatatttaatttatttcttttataatttaaacatcagttttgaatataacttgatayagatgacatgctgcatagtaaaaacaatggcatttggaatacctcaagtaagaaatcaacaactttttgaattttcacatggtagcatgcttatttttcctttggtaaagacagagaccaagatggacatcagtaactagacagctaggagaatgggcagaataacaagtaatatttctaagaaaaaaaatg

SEQ ID NO: 229959 - DNA, 230 bp, Homo sapiens
atcttacatatctgcagtttggtatcctttgacctacatctccctattttctgcccccaccacttgtggtaaccactgtttcaaactctgtatcagtgtttttaggctcttttaaaaaaatattccacagataagtgagatcacgcaatatttttctttctgtgtctggcttactttacttascctaatgtccttcaggtgcattcatgatatggcaaacggcaagatct

SEQ ID NO: 229960 - DNA, 612 bp, Homo sapiens
attaactcctgcattttttttacctcaattccagtgttgcaagctgttctaatactcctattcaaaaagcacctactttttgtgacaagaaaaatgaaatatgagaacaatattttcaactgacaaaggagcatagaacttgaggtattctattgacctcccttgaaataacaatatatgtgactgtgattctatatccccaattctgctgcgtgaaatcccagtcctgtttgccatgcagcataataagtcatcacaaaatatgaagcaaatatcaggaagaacataccttgctgtcactggatttgtaacatcacattttacccgccgggrcggctagatattgcagagagaacatgagttttgggaatgtatagagctatgcttgaacagtgttcttccactaacaagctctgtgaccctaaccacattggacactcaataattcttaactgataaaatgaaaatattaacaaacttgtatcctgaatccatgtgagcattaagatagagtatatattgtgtttaatgaagtgtctggcccaggacttagcattttcatcttattttaaataaaaacatggttatgcttttacattcaggtgcatacat

SEQ ID NO: 229961 - DNA, 648 bp, Homo sapiens
gttggtaaagacaggatctcgatatgttgtccaggctggtctcaaatttctagccttcagcaatcctctcacctcagcctccctcccaaagcattgggattaaacatgtgagccactgcatctgtcctttataatttcttatcatttcacaggttgcttaaagttaggcctatagttagtacatattaaaaggcaaaacttaaaagactgtggaaaaaataagaaaaaattgaagattcgatgaagtatattcacataaaagaacccttaaaatgtagatgaaattctaggccaatctcaaatgtgtatttctagccaaagttctgaggaacataagttcccaatcaaaattcataaaacacataaggaaataaactttcatgaacaaaattcagcagaaaaacaaactgaaaaatagcttcacaaagctgcatgtattgggatgttcagatataacataaaaataatatagttaaatgaataaaatgaaatatatattaaaaactacccagtgtactrcttaaagtaatataatttctagtaatgaaaacctaagattttaaattaaaacctatataatgctcaaaaataaagattaaaaactgtatacacactaaatatattaagcacaaataaagagagattaac

SEQ ID NO: 229962 - DNA, 648 bp, Homo sapiens
gttggtaaagacaggatctcgatatgttgtccaggctggtctcaaatttctagccttcagcaatcctctcacctcagcctccctcccaaagcattgggattaaacatgtgagccactgcatctgtcctttataatttcttatcatttcacaggttgcttaaagttaggcctatagttagtacatattaaaaggcaaaacttaaaagactgtggaaaaaataagaaaaaattgaagattcgatgaagtatattcacataaaagaacccttaaaatgtagatgaaattctaggccaatctcaaatgtgtatttctagccaaagttctgaggaacataagttcccaatcaaaattcataaaacacataaggaaataaactttcatgaacaaaattcagcagaaaaacaaactgaaaaatagcttcacaaagctgcatgtattgggatgttcagatataacataaaaataatatagttaaatgaataaaatgaaatatatattaaaaactacccagtgtactgcttaaagtaatataatttctagtaatgaaaacckaagattttaaattaaaacctatataatgctcaaaaataaagattaaaaactgtatacacactaaatatattaagcacaaataaagagagattaac

SEQ ID NO: 229963 - DNA, 596 bp, Homo sapiens
gacagcaacaaacaaaattttaaagtcattgcaggacaataagttcagctaggatttgagkgaccaaattctagagaaatggcaggacactgttgtgacacctatatttactttaattttgcacttgtccattgtgttaaattttagcacagcagaaccactcctgaacttctcagtgatgctggtgtttctctcaccagacctcctttttggctttctaacatggtgtatgctctggaccttacttggaacataatcatctggtgggtttttgtgtcttagttatgatatccattctggttctcccactttcttgtgtcctttactccaatcattatctgcttccagataatttctgacactttgacactccatagtgtggagatcaatattttttctatgtttcatggagtcatcctgacagcaagtttggattattccctaagattattgctaggtgttaattcatcaatcatgggacagtgctccaaataatttactcacacattcaagtaaagtgataattaaagttcttttatttttttccttaattgagacaggttctcactctgtcacccaggcatgagtgcagtgga

SEQ ID NO: 229964 - DNA, 596 bp, Homo sapiens
gacagcaacaaacaaaattttaaagtcattgcaggacaataagttcagctaggatttgagggaccaaattctagagaaatggcaggacactgttgtgacrcctatatttactttaattttgcacttgtccattgtgttaaattttagcacagcagaaccactcctgaacttctcagtgatgctggtgtttctctcaccagacctcctttttggctttctaacatggtgtatgctctggaccttacttggaacataatcatctggtgggtttttgtgtcttagttatgatatccattctggttctcccactttcttgtgtcctttactccaatcattatctgcttccagataatttctgacactttgacactccatagtgtggagatcaatattttttctatgtttcatggagtcatcctgacagcaagtttggattattccctaagattattgctaggtgttaattcatcaatcatgggacagtgctccaaataatttactcacacattcaagtaaagtgataattaaagttcttttatttttttccttaattgagacaggttctcactctgtcacccaggcatgagtgcagtgga

SEQ ID NO: 229965 - DNA, 565 bp, Homo sapiens
tgagttgaggtgataaaacttcctgaacctaagttaatccctcctgatactgaaaacttagattgtctgctttcttctaaaagcattctaagtaactgcaacaacaatttcttcctcgaaggaaaatttgggtctaaattccccaactgcttcctgttcagaatgaagaaaatatttctactatgtattgggtatattggcttctgacaactctacaagtaaatccctcttcaggggttgttctagcctaaaggcaattgccattctcaagtttatgccctctscctgagggcagcctgtaacaaatatctgatcaatgttacttaaggaaagaaaaagatggtcccatcacctcaactgagataactttgtgaatccattccagttccaaatttccttgtgagattgcctaaggtctctgttgccactgtgttgcaggaatcgggaggacaagagaaacctcatggtaaagtaggaggatctttattgagtgcactcagacccagtggacataacatccaaaaaactgggcccagaacaaagacagcacttgacatttatacac

SEQ ID NO: 229966 - DNA, 565 bp, Homo sapiens
tgagttgaggtgataaaacttcctgaacctaagttaatccctcctgatactgaaaacttagattgtctgctttcttctaaaagcattctaagtaactgcaacaacaatttcttcctcgaaggaaaatttgggtctaaattccccaactgcttcctgttcagaatgaagaaaatatttctactatgtattgggtatattggcttctgacaactctacaagtaaatccctcttcaggggttgttctagcctaaaggcaattgccattctcaagtttatgccctctgcctgagggcagcctgtaacaaatatctgatcaatgttacttaaggaaagaaaaagatggtcccatcacctcaactgagataactttgtgaatccattccagttccaaatttccttgtgagattgcctraggtctctgttgccactgtgttgcaggaatcgggaggacaagagaaacctcatggtaaagtaggaggatctttattgagtgcactcagacccagtggacataacatccaaaaaactgggcccagaacaaagacagcacttgacatttatacac

SEQ ID NO: 229967 - DNA, 459 bp, Homo sapiens
taaagatcatgtattgggtctctagaaagtcccagttggagagctgcaggacagatccttggagttctgtgtcttttgcagcatagacatactccccatttgaggagtatgtcaaaattcctaaaaattttgaatgttaatagaaactaaacacttaacctggaatagtgaatgtgcagcttgagatgcctgttatgagctggaaattttcagaacgagcaacttaaaaaattaggcaggtgcagcataaatctctcatatgacagaaatattatagatagaattaggkccacaataggctagagttaacaatttagataacataattaagctaaatgcacaggagctcagattcccttgttatttatctcttttgaactgacacttcttcctcagctcacatctatgtacagacttcaagtatagtttcttatcttcagctgtggctaagggagtaag

SEQ ID NO: 229968 - DNA, 437 bp, Homo sapiens
aatttattataggacattacatagctcatggagccactgggaggaccagggaattaggcttggagggtttgcacctaggaatggtggccactgtccagtggagatgcctctactactgccatggacacagcatctcaaatgacacctttgctgcccaaaccccactactgctgccttccaaaacaggctgcttctacagccacttttgctggaaaatggaatctgtgtgatacttgcttcctctcttttctctacttagaattaaaattatctttattttgtgtcggattggtggagcccagctcatgtgtctgtactgcagctacaagaaagaatggaaagtgagttttctggtttgtgccttgaaaaggaggaacccmtgataaggaaaattcctcatacatagggaaggtgttcaaaggggctgggaaacgtgg

SEQ ID NO: 229969 - DNA, 592 bp, Homo sapiens
agcctcactctgtcgcccatgctagagtgcaatcatgcaatcttggctcactgcaacctctgcctcctgggttgaagcgattctcctgcctcagcctcttgagtagctgggattacaggtactcaccaccatgcctggctaattttgtatttttagtagagatggggttttgccatggctggtcttgaactcctgacctcatgtgatccacccaccttggcctcccaaagtgctggggttacaggcatgagccactgtgcccrgcccataatttctaatcttgtggctaatttgttagccctaaaaaggcagtttagtccccacacaaggagggaatttgcctttggaaaagcctgttctcattctttgttttaaactataaacaaagttcctcccaaagttagttgtgcctatccccaggaatgaacaaggacagcttggaagttaaaaacaagatggagttggttaggtcacatctctttcactgtctcagttacaattttgcaatggtggtttcaatctctccttttgggttttataacaccttaatcttaaggtgttggctaaagaagatggaaaaagggtgaagatc

SEQ ID NO: 229970 - DNA, 215 bp, Homo sapiens
aggatagatacacatctataaaggggagtttattaagtactaactcacatgatcacagggtcccacaatagkccgtctgcaagctgaggagcaaagagccaaaccgagtcccaaaactgaagaacttggagtctgatgttcggggacaggaagcatccagcacaggaaaaagatgtgggctgggaggccaggccaatctagttttttcactgggc

SEQ ID NO: 229971 - DNA, 476 bp, Homo sapiens
tactcagtcttttggatctgcttctttcattgtaaagtttgagctccagtggtgttgcatgtatcactagttcctttttattttaaagtagttttgcattgtatggatatactacattttgttgatccacttactggttatgagatgtttggaatgttttttgcagtttttggctattatgaataacscatctgtggacactggtataactgtctttgtgtagacatatgttttcatttctcttgggtgggtacctaggcattgaatggcttggctatatggcaggtatatgtttaactttttaagaagttgctagactgttttccaaagtacctgtaccattttacatttccaccagcagtgtttaaggtttttagtttctctgcctccttgtcagctcctggtattgtcagacttctttattttagccactccggtgggtgttcaaacgtgcttttttatacttaacattttat

SEQ ID NO: 229972 - DNA, 559 bp, Homo sapiens
aatatggaaacccctacactttaatgggatttatctcccatctcctgcatgcatgtatcttactaggccatctaaaatacttgccacttcttgttcaccaggtccaattaacacaatgtcaccagtgaaatagtgatgttctgtaagagatcaagatttcaagttcttgtggactatatcacaatagaaagcagatcattgatacagccctgatataaagcctagggtgaatgtgtactcttgtccttgccatgtgaagacaaccagcttcactggtggaattggaaaaaaatcattttctaggactatagctgtgtcccaggtgccaggggcatttttgatttgctgtagtaaaaatactcatttgaaactgcaattacaattggcatcaccaatgtgactaaattttctataatctacagtaattctctatgatctagctggcttttgtgccagccaaacatatgagttaaatattaatgtggtaagaatcaccactcctgcatcttttaagcatttgatgactgcaytaatctttgtaattccaccatggttatga

SEQ ID NO: 229973 - DNA, 559 bp, Homo sapiens
gtggcagtgcttaagaaatcagacaaaatatagatgtgaattgtgaacccagaagtatctgagactagtctcaatcaatttagaaagcttattttgccaaagctaaggacacaccagtcacatagcctcaggaggtcctgatgacatgtgcccaaggtggtcagggcacagcttggttttatacatgttagagatacatgagacatcaatcagtatgtgtaagatgtacattggttcagcayggaaaggcgggacaactcaaagcagggtcttccagtcataggtggatgagagacaaatgattgcattcttttgagtctttgatcggcctttccctgaatatacaatttacatgtgaggggaggtagaggaatagtcacgtatgccttagtcttgctcagtgaagctgcatttttacataaacagtagggcagaggaagaaatcagataggcatttgtgaccagaaggatgactttgagttctgtcctttgtcctgcacctgtgaagaaaagctatcaatttacatcgccaaggtgaaattcaacagaactgttttag

SEQ ID NO: 229974 - DNA, 559 bp, Homo sapiens
gtggcagtgcttaagaaatcagacaaaatatagatgtgaattgtgaacccagaagtatctgagactagtctcaatcaatttagaaagcttattttgccaaagctaaggacacaccagtcacatagcctcaggaggtcctgatgacatgtgcccaaggtggtcagggcacagcttggttttatacatgttagagatacatgagacatcaatcagtatgtgtaagatgtacattggttcagcatggaaaggcgggacaactcaaagcagggtcttccagtcataggtggatgagagacaaawgattgcattcttttgagtctttgatcggcctttccctgaatatacaatttacatgtgaggggaggtagaggaatagtcacgtatgccttagtcttgctcagtgaagctgcatttttacataaacagtagggcagaggaagaaatcagataggcatttgtgaccagaaggatgactttgagttctgtcctttgtcctgcacctgtgaagaaaagctatcaatttacatcgccaaggtgaaattcaacagaactgttttag

SEQ ID NO: 229975 - DNA, 559 bp, Homo sapiens
gtggcagtgcttaagaaatcagacaaaatatagatgtgaattgtgaacccagaagtatctgagactagtctcaatcaatttagaaagcttattttgccaaagctaaggacacaccagtcacatagcctcaggaggtcctgatgacatgtgcccaaggtggtcagggcacagcttggttttatacatgttagagatacatgagacatcaatcagtatgtgtaagatgtacattggttcagcatggaaaggcgggacaactcaaagcagggtcttccagtcataggtggatgagagacaaatgattgcattcttttgagtctttgatcggcctttccctgaatatacaatttacatgtgaggggaggtagaggaatagtcacgtatgccttagtcytgctcagtgaagctgcatttttacataaacagtagggcagaggaagaaatcagataggcatttgtgaccagaaggatgactttgagttctgtcctttgtcctgcacctgtgaagaaaagctatcaatttacatcgccaaggtgaaattcaacagaactgttttag

SEQ ID NO: 229976 - DNA, 502 bp, Homo sapiens
tctgggcacttggaccattagctagggagcctgtgattgttcagtgctgaccatgcagaatgaatagtgtcatatcatgttgccagcaaagaggacactacccatttgtgccatgtgaaaagatgccccaagctctcccagagctcctgctacattttgstgttgatggaaaatgtttagagataactatcttcaagtttgggttgatttttacatttttcttctttgggctaacaacaatttctttatgctctggaatgcctgggaaagttggtccccatctgaagttgctccttgatacgtgtgattctgtcagtgcctagggagtgtgtggggtacattgtttcctacggggaaaaaatgacctggagcagcaagttgggaactgaagagtgttccagggcttcttccgagaactgagaatgagaggggagatagaggaagagggcctggggatggaaagggggaggtgagagccatgagcctggagagacaggtggga

SEQ ID NO: 229977 - DNA, 502 bp, Homo sapiens
tctgggcacttggaccattagctagggagcctgtgattgttcagtgctgaccatgcagaatgaatagtgtcatatcatgttgccagcaaagaggacactacccatttgtgccatgtgaaaagatgccccaagctctcccagagctcctgctacattttggtgttgatggaaaatgtttagagataactatcttcaagtttgggttgatttttacatttttcttctttgggctaacaacaatttctttatgctctggaatgcctgggaaagttggtccccatctgaagttgctccttgatacgtgtgrttctgtcagtgcctagggagtgtgtggggtacattgtttcctacggggaaaaaatgacctggagcagcaagttgggaactgaagagtgttccagggcttcttccgagaactgagaatgagaggggagatagaggaagagggcctggggatggaaagggggaggtgagagccatgagcctggagagacaggtggga

SEQ ID NO: 229978 - DNA, 492 bp, Homo sapiens
cctccccaccacaactacccttgggatgaaggtgggacacacagctcccaataactctcaaaaatcctccttacaaaattctctctctcttttttttttttttttttttttgagaccgagttttgctcttgttgccsaggctggtgtgcaatggcacgatctcggctcaccacaacctcctcctcccaggttcaagcaattctcctgcctcagcctcccaagtagttgggattacaggaatgtgcgaccaccccggctaattttgtatttttagtagagacggggtttctccatgttggccaggctggtcttgaactcccaacctgaggtgatccacccacctcagcctcccaaagtgctgggattacaggtgtgagccaccgcacccggccttacaaaattctctctttatctttactctctctcgactcttttttccttgatgtgaatgagggattcaaggttgtgtaattttcagctatctgctttgaa

SEQ ID NO: 229979 - DNA, 476 bp, Homo sapiens
acacagctcccaataactctcaaaaatcctccttacaaaattctctctctcttttttttttttttttttttttgagaccgagttttgctcttgttgccgaggctggtgtgcaatggcacgatctcggctcaccacaacctcctcctcccaggttcaagcaattctcctgcctcagcctcccaagtagttgggattacaggmatgtgcgaccaccccggctaattttgtatttttagtagagacggggtttctccatgttggccaggctggtcttgaactcccaacctgaggtgatccacccacctcagcctcccaaagtgctgggattacaggtgtgagccaccgcacccggccttacaaaattctctctttatctttactctctctcgactcttttttccttgatgtgaatgagggattcaaggttgtgtaattttcagctatctgctttgaaattctgcaaataatctaagatc

SEQ ID NO: 229980 - DNA, 476 bp, Homo sapiens
acacagctcccaataactctcaaaaatcctccttacaaaattctctctctcttttttttttttttttttttttgagaccgagttttgctcttgttgccgaggctggtgtgcaatggcacgatctcggctcaccacaacctcctcctcccaggttcaagcaattctcctgcctcagcctcccaagtagttgggattacaggaatgtgygaccaccccggctaattttgtatttttagtagagacggggtttctccatgttggccaggctggtcttgaactcccaacctgaggtgatccacccacctcagcctcccaaagtgctgggattacaggtgtgagccaccgcacccggccttacaaaattctctctttatctttactctctctcgactcttttttccttgatgtgaatgagggattcaaggttgtgtaattttcagctatctgctttgaaattctgcaaataatctaagatc

SEQ ID NO: 229981 - DNA, 522 bp, Homo sapiens
atgcatcaccttagggaaaataagtattacttctctttttaaaatgcaaactgttaggtttataataccatttgaagaattttccctstctcttattttctcttttaacaacttctttttttcccttcagagttatagaaaatggagagaaaaatcgaatgacctatcagagtatagcaattgtttttggtcccactctattaaaaccagaaaaagagactggtaatatagcagttcatactgtgtaccagaatcagattgtagaattaattcttctggaactgagttccatcttcggacgttgattcttactgaagacaacctgtggaatagaagctggattccatcagatttcaaatgtttatacacaatgtattttattttttggaccaagcagtgactctttgattttgcactttttttttgagggatcacaagggaaggggagagtcgagatgtgtgttaagccctcatatttgctgctttgttgcaagttgatataactgcgtgtaattatgaatt

SEQ ID NO: 229982 - DNA, 387 bp, Homo sapiens
tttgtcataggcaattcaaatacagcaactgagaagagtttttaaaacatttaattctgttttttagagacaaggtcttgctctgttgctcaggctggagtgcagtggtgtgatcatagctcattgcacccctcaaactcctggactcaagagatcctcctgcctcagcctcccaagtagctgggactccaggtgtgtaccaccatgcccagmtaatttttaagttttttggtagagaaggggtcttgctgcattgcccaggctggtcttgaactccttacctcaagtgatccatctagctcggcctcccaaagtgctgggattacaggcatgaaccaccatgcctggcccagcagagtttaataaagaaattattgacaagagttt

SEQ ID NO: 229983 - DNA, 590 bp, Homo sapiens
aataagtcaaggaactacaagttatatatttcctggaaaaatatactattatayatatatattatatattcaaaactccgtaaagcatataaagtataagcatatactgagttataaggcataactcaacatgttattttaacctaaaattttcttagggcctcaattgcaaatgctttaattgccaatggttcataaacacatctgtgaattagaagcaagtaatatcctctgtttttatactctcaaaaaatgtgattatacttaatcaaaagtaattcaaaccacagcccaggcaatacatactagaccacgtcttcttggtaatttaattcttagcaataattttaattgctgccttattaagtaggtatgctacttaaattacaatcctgtagttataaggttaaaactattttaaaatctcgaatgtttttagatttcaatcactcttcgtattattacaacaaaaatgttcattaactggaacacatgcagtatcattttttagcccccactttatgatattttttaatttttattaccagagtagtcatttcattataaaattttaaccaagctaagcatat

SEQ ID NO: 229984 - DNA, 590 bp, Homo sapiens
aataagtcaaggaactacaagttatatatttcctggaaaaatatactattatacatatatattatatattcaaaactccgtaaagcatataaagtataagcatatactgagttataaggcataactcaacatgttattttaacctaaaattttcttagggcctcaattgcaaatgctttaattgccaatggttcataaacacatctgtgaattagaagcaagtaatatcctctgtttttatactctcaaaaaatgtgattatacttaatcaaaagtaattcaaaccacagcccaggcaatacatactagaccaygtcttcttggtaatttaattcttagcaataattttaattgctgccttattaagtaggtatgctacttaaattacaatcctgtagttataaggttaaaactattttaaaatctcgaatgtttttagatttcaatcactcttcgtattattacaacaaaaatgttcattaactggaacacatgcagtatcattttttagcccccactttatgatattttttaatttttattaccagagtagtcatttcattataaaattttaaccaagctaagcatat

SEQ ID NO: 229985 - DNA, 590 bp, Homo sapiens
aataagtcaaggaactacaagttatatatttcctggaaaaatatactattatacatatatattatatattcaaaactccgtaaagcatataaagtataagcatatactgagttataaggcataactcaacatgttattttaacctaaaattttcttagggcctcaattgcaaatgctttaattgccaatggttcataaacacatctgtgaattagaagcaagtaatatcctctgtttttatactctcaaaaaatgtgattatacttaatcaaaagtaattcaaaccacagcccaggcaatacatactagaccacgtcttcttggtaatttaattcttagcaataattttaattgctgccttattaagtaggtatgctacttaaattacaatcctgtagttataaggttaaaactattttaaaatctcraatgtttttagatttcaatcactcttcgtattattacaacaaaaatgttcattaactggaacacatgcagtatcattttttagcccccactttatgatattttttaatttttattaccagagtagtcatttcattataaaattttaaccaagctaagcatat

SEQ ID NO: 229986 - DNA, 551 bp, Homo sapiens
taggaattctgacttgtagagaaccaagctgggaaaccgggccaggagcagggagaggccggtgagcctgggttgtgcgagtgcaagcctttatttaaagttttaatattttgtctatcatgggttttttttctttgcgattacattcaattttaaaactatttcattcattcaggattagcgttacttaacagttgctcctgagactagtgcgttagtcccttcaccctagtcctggccttggtggawgtctaaaatttatgttttattccagctttctgtccaaaagagcaacccctgcaagtgtaggatgaggagctcagtccagcagcagctaacactgcactccttgcgcgcctgctgtgtgctagagagaggggcagaggcgggaggcgggaggcagggggcgggggggtctttctctttttctcttcctctgcttctcaaattcacagtaggggcaaagattgacaaactcactcacattaccaccaccgcgagtttccaaaaaagaaaaaagaaagaaagatactaacttttttagatggtat

SEQ ID NO: 229987 - DNA, 575 bp, Homo sapiens
aggaattctgacttgtagagaaccaagctgggaaaccgggccaggagcagggagaggccggtgagcctgggttgtgcgagtgcaagcctttatttaaagttttaatattttgtctatcatgggttttttttctttgcgattacattcaattttaaaactatttcattcattcaggattagcgttacttaacagttgctcctgagactagtgcgttagtcccttcaccctagtcctggccttggtggaagtctaaaatttaygttttattccagctttctgtccaaaagagcaacccctgcaagtgtaggatgaggagctcagtccagcagcagctaacactgcactccttgcgcgcctgctgtgtgctagagagaggggcagaggcgggaggcgggaggcagggggcgggggggtctttctctttttctcttcctctgcttctcaaattcacagtaggggcaaagattgacaaactcactcacattaccaccaccgcgagtttccaaaaaagaaaaaagaaagaaagatactaacttttttagatggtatctctaagaaatagtgtattaatctt

SEQ ID NO: 229988 - DNA, 588 bp, Homo sapiens
ggaattctgacttgtagagaaccaagctgggaaaccgggccaggagcagggagaggccggtgagcctgggttgtgcgagtgcaagcctttatttaaagttttaatattttgtctatcatgggttttttttctttgcgattacattcaattttaaaactatttcattcattcaggattagcgttacttaacagttgctcctgagactagtgcgttagtcccttcaccctagtcctggccttggtggaagtctaaaatttatrttttattccagctttctgtccaaaagagcaacccctgcaagtgtaggatgaggagctcagtccagcagcagctaacactgcactccttgcgcgcctgctgtgtgctagagagaggggcagaggcgggaggcgggaggcagggggcgggggggtctttctctttttctcttcctctgcttctcaaattcacagtaggggcaaagattgacaaactcactcacattaccaccaccgcgagtttccaaaaaagaaaaaagaaagaaagatactaacttttttagatggtatctctaagaaatagtgtattaatcttccctttggaaagac

SEQ ID NO: 229989 - DNA, 588 bp, Homo sapiens
ggaattctgacttgtagagaaccaagctgggaaaccgggccaggagcagggagaggccggtgagcctgggttgtgcgagtgcaagcctttatttaaagttttaatattttgtctatcatgggttttttttctttgcgattacattcaattttaaaactatttcattcattcaggattagcgttacttaacagttgctcctgagactagtgcgttagtcccttcaccctagtcctggccttggtggaagtctaaaatttatgttttattccagctttctgtccaaaagagcaacccctgcaagtgtaggatgaggagctcagtccagcagcagctaacactgcactccttgcgcrcctgctgtgtgctagagagaggggcagaggcgggaggcgggaggcagggggcgggggggtctttctctttttctcttcctctgcttctcaaattcacagtaggggcaaagattgacaaactcactcacattaccaccaccgcgagtttccaaaaaagaaaaaagaaagaaagatactaacttttttagatggtatctctaagaaatagtgtattaatcttccctttggaaagac

SEQ ID NO: 229990 - DNA, 573 bp, Homo sapiens
aggaattctgacttgtagagaaccaagctgggaaaccgggccaggagcagggagaggccggtgagcctgggttgtgcgagtgcaagcctttatttaaagttttaatattttgtctatcatgggttttttttctttgcgattacattcaattttaaaactatttcattcattcaggattagcgttacttaacagttgctcctgagactagtgcgttagtcccttcaccctagtcctggccttggtggaagtctaaaatttatgttttattccagctttctgtccaaaagagcaacccctgcaagtgtaggatgaggagctcagtccagcagcagctaacactgcactccttgcgcgcctrctgtgtgctagagagaggggcagaggcgggaggcgggaggcagggggcgggggggtctttctctttttctcttcctctgcttctcaaattcacagtaggggcaaagattgacaaactcactcacattaccaccaccgcgagtttccaaaaaagaaaaaagaaagaaagatactaacttttttagatggtatctctaagaaatagtgtattaatc

SEQ ID NO: 229991 - DNA, 575 bp, Homo sapiens
aggaattctgacttgtagagaaccaagctgggaaaccgggccaggagcagggagaggccggtgagcctgggttgtgcgagtgcaagcctttatttaaagttttaatattttgtctatcatgggttttttttctttgcgattacattcaattttaaaactatttcattcattcaggattagcgttacttaacagttgctcctgagactagtgcgttagtcccttcaccctagtcctggccttggtggaagtctaaaatttatgttttattccagctttctgtccaaaagagcaacccctgcaagtgtaggatgaggagctcagtccagcagcagctaacactgcactccttgcgcgcctgctgtgtgctagagrgaggggcagaggcgggaggcgggaggcagggggcgggggggtctttctctttttctcttcctctgcttctcaaattcacagtaggggcaaagattgacaaactcactcacattaccaccaccgcgagtttccaaaaaagaaaaaagaaagaaagatactaacttttttagatggtatctctaagaaatagtgtattaatctt

SEQ ID NO: 229992 - DNA, 551 bp, Homo sapiens
taggaattctgacttgtagagaaccaagctgggaaaccgggccaggagcagggagaggccggtgagcctgggttgtgcgagtgcaagcctttatttaaagttttaatattttgtctatcatgggttttttttctttgcgattacattcaattttaaaactatttcattcattcaggattagcgttacttaacagttgctcctgagactagtgcgttagtcccttcaccctagtcctggccttggtggaagtctaaaatttatgttttattccagctttctgtccaaaagagcaacccctgcaagtgtaggatgaggagctcagtccagcagcagctaacactgcactccttgcgcgcctgctgtgtgctagagagaggggcrgaggcgggaggcgggaggcagggggcgggggggtctttctctttttctcttcctctgcttctcaaattcacagtaggggcaaagattgacaaactcactcacattaccaccaccgcgagtttccaaaaaagaaaaaagaaagaaagatactaacttttttagatggtat

SEQ ID NO: 229993 - DNA, 514 bp, Homo sapiens
tggagctcaatgtgaacaactctgaaagttaaaaacttcaagtgggtacactcattgaaggtctccatactwttgtgaattatgcctccagaaactctactaggttctcagtgaatgttggaaaaaatgtcctcatgcttctggcaggaggaaggggaaaggaaccatttggaaacatgctggagtattcagttctttttcacaagacctgcaccagaagaaactattttactagggcctaatctgctggggttttatcagagcctactatatgtgacagaaggaaaatactcaactggctgtagccttccacatgcacaaaagggaataaataactccatctccttctggcctttcatgtgggggaagagaaacactcaactacaatcccttttagatttccacatggaaaaagggaaatatacaacttcatcctcccttcagccattatgtctcatctaaagtcggggaggaactgagaagcactgatgaagttcacagtcaaggggcacag

SEQ ID NO: 229994 - DNA, 514 bp, Homo sapiens
tggagctcaatgtgaacaactctgaaagttaaaaacttcaagtgggtacactcattgaaggtctccatactattgtgaattatgcctccagaaactctactaggttctcagtgaatgttggaaaaaatgtcctcatgcttctggcaggaggaaggggaaaggaaccatttggaaacatgctggagtattcagttctttttcacaagacctgcaccagragaaactattttactagggcctaatctgctggggttttatcagagcctactatatgtgacagaaggaaaatactcaactggctgtagccttccacatgcacaaaagggaataaataactccatctccttctggcctttcatgtgggggaagagaaacactcaactacaatcccttttagatttccacatggaaaaagggaaatatacaacttcatcctcccttcagccattatgtctcatctaaagtcggggaggaactgagaagcactgatgaagttcacagtcaaggggcacag

SEQ ID NO: 229995 - DNA, 506 bp, Homo sapiens
taatcatcttaactgtcaatggtctaaaacacaccaattaaaatacagagactgtcatagtaaatcaaaaaacaagacccagctgtctacaagaagctcattttaaatttgaagactcatagagataaaaattaaggggatggaaaagatactgaggtaaattataaagggtggtcatagcctcccttaaaggagaacaaacttgctaaatagatggagagaataaactacccgacagtgcacaaaccacatcatgggctcagggttagaacatmctgcagcaaggaggtagaaaaatagaagagagaattcccaaattcacacaagcacagaaacccatgattagtgtccttggactgacctatattcactataatagtaaaagaaaaacacccctgggtggagatttaagatgctaatgatacatgcaatgttaagtcctagcatgtacaaccacagcacctgtgcagccaggggactacccataacatactcatcagaacacc

SEQ ID NO: 229996 - DNA, 506 bp, Homo sapiens
taatcatcttaactgtcaatggtctaaaacacaccaattaaaatacagagactgtcatagtaaatcaaaaaacaagacccagctgtctacaagaagctcattttaaatttgaagactcatagagataaaaattaaggggatggaaaagatactgaggtaaattataaagggtggtcatagcctcccttaaaggagaacaaacttgctaaatagatggagagaataaactacccgacagtgcacaaaccacatcatgggctcagggttagaacatactgcagcaaggaggtagaaaaatagaagrgagaattcccaaattcacacaagcacagaaacccatgattagtgtccttggactgacctatattcactataatagtaaaagaaaaacacccctgggtggagatttaagatgctaatgatacatgcaatgttaagtcctagcatgtacaaccacagcacctgtgcagccaggggactacccataacatactcatcagaacacc

SEQ ID NO: 229997 - DNA, 601 bp, Homo sapiens
aataaactacccgacagtgcacaaaccacatcatgggctcagggttagaacatactgcagcaaggaggtagaaaaatagaagagagaattcccaaattcacacaagcacagaaacccatgattagtgtccttggactgacctatattcactataatagtaaaagaaaaacacccctgggtggagatttaagatgctaatgatacatgcaatgttaagtcctagcatgtacaaccacagcacctgtgcagccaggggactacccataacatactcatcagaacaccccttcccacccctccatgaataatcatgtaaatctcccataaagggcgatccccctgcatcagacagggctgtctcacctttgagcagcctgctctgatcagctgtcagagtgtacttttgctttgcaataaactcttttgcttactgttactttggactcgttctcaaagttttttgtgcagcaaagtcaagaacctgaaacagcccactggcaamaatagcatgctaacagtaatccaaagaaagcaggagtagctctattaatgacacatcccacttcagaacaagaagaattatcagaaataaagagagtaa

SEQ ID NO: 229998 - DNA, 585 bp, Homo sapiens
ttctaagtgcattgttcctggagccattgtagttatgggtgatgttcataagagaactgttgaaggtcattgtggctaaaggcattattactattgctagtgtttctcatgatgctgtttctaccagcactgatcctaaatctcgtgttgctaagagtattgttactgagggtattactgctaagtatrttgttgcttagggtactattgcttagaatgtttttgtatattattgttaaggacactgtttctaagatcattgttcctagggtgttaatgttggcaagggacatttttgctgaaggcattgtgactaaaggcattgttgttacaggtattttcttcaaagggcattgttgcaaggctacatttctagagtcactcttgataaaggctgctgctaagaccattttactaaggtcaatgctaacagcattattaccaaggctttatatttatggctcactgttggttgctaaagtcattgctcctaaggaccaagagggctgttgtcaagaatgctggtcttaggggatttttgataatagtaatattgttaggacattgttgcatagagtgtggttg

SEQ ID NO: 229999 - DNA, 579 bp, Homo sapiens
cagtgagtccagaagcccagccatatcagratgacatctaccatgcatcagtcctcgtgtgtcttcagcgcctctttcacatgtctgtgttcttagagcttgctggaaccatctttgcttgtctctgtgtattctgagtctgtgactatttggctctaggagtcttctcaacaaagtacaatttctgttgtctttttccaaaaaactttatgaataaaatgaaaatatgagtaatataaaatcaaaatatattttgatttctcatttcaaaattatctacctctgtagtttaatagaactcaattattggccccagaagataatttttttccctaaagtattttctaaataataaccagtagttgacctacgtcctttatatatatcacatagaagatctccacagtacattcttcaaattcagctcagataatccatggaatgctcaagttccctgtaacaaattgagctcctatatctctgtggacttataattgactaataaaagtaagacttgtttgctaatgataaagataatttgtaaaaaatacctcattttagtttgaccatgagacgcac

SEQ ID NO: 230000 - DNA, 554 bp, Homo sapiens
aaggagattaatctgttaataagggatttggtcatatgacccaaacacttcccattaggccccatctccaacattggggatcaaatttcaacatgaggtttagaggggacaaacatccaaaccatagcaatacccttaagaacaataaccttaccaatagtacccttatcaaaaatgcccttaacaacagctttcttagcaacagtacagttactaacagcactcatagcaaaaccttaatcttcaataacmcttttaatatcaatgcctttaagaatgacaatcttgaccagatatggtgactaatgtctgtaatcccagcactttgaaaggttgaggcaggaagtttgcttgaggccggcagtttgaggtcagtctgggcaatatagtgagatgctgtctctacaaaaaattttttaaaaaagtcaggtatggtgacctgtgctcgtagtcctagctacttgggaggctgaggtgagaaaattgctggagcccaagagtttgaggttagtgaaccatgatcataacactgcactccagcttgggcgacaggg

SEQ ID NO: 230001 - DNA, 554 bp, Homo sapiens
aaggagattaatctgttaataagggatttggtcatatgacccaaacacttcccattaggccccatctccaacattggggatcaaatttcaacatgaggtttagaggggacaaacatccaaaccatagcaatacccttaagaacaataaccttaccaatagtacccttatcaaaaatgcccttaacaacagctttcttagcaacagtacagttactaacagcactcatagcaaaaccttaatcttcaataacccttttaatatcaatgcctttaagaatgacaatcttgaccagatatggtgactaatgtctgtaatcccagcactttgaaaggttgaggcaggaagtttgcttgaggccggcagtttgaggtcagtctgggcaatatagtgagatgctgtctctacaaaaaattttttaaaaaagtcaggtatggtgacctgtgctcgtagtcctagctacttgggaggctgaggtgagaaaattgctggagcccaagagtttgaggttagtgaaccatgatcatamcactgcactccagcttgggcgacaggg

SEQ ID NO: 230002 - DNA, 594 bp, Homo sapiens
ctgggtgctgaagaaacctacaatcctgcactgacaggcacagacaaaaagagyacaaagaaaagcctgcttcttccagccagaggtctgagaaaatggtggtctaacagaacaggaaacacttttgatgttttctcatgctcaggccaaaccaaaatgatacaatcctgtggttccatggaggctgagcagggagctaatgttccctgccgtagatacacaggatctgcatgctcttatatgttttcttccatgagccatgaagaatcctgagaaagttccattcttaggatatgctgggagatggtcacagcagccactaccaaaattctgcctagaaccaaattattatctaatttatggaacaaatgtcttaatctgcaagggcaagaatataataagttgttttagggcactgacaggaactcatagcagctatgggaaggaaacaagaaaaaaagaagcacagaagtaagaggagaggcaggaatacacagtagacccaatactcaagcagaagagataagataaagtagcacttgcaataaccatggcttcaaacctgaagacacaatgcattcaacagctgaattc

SEQ ID NO: 230003 - DNA, 594 bp, Homo sapiens
ctgggtgctgaagaaacctacaatcctgcactgacaggcacagacaaaaagagtacaaagaaaagcctgcttcttccagccagaggtctgagaaaatggtggtctaacagaacaggaaacacttttgatgttttctcatgctcaggccaaaccaaaatgatacaatcctgtggttccatggaggctgagcagggagctaatgttccctgccgtagatacacaggatctgcatgctcttatatgttttcttccatgagccatgaagaatcctgagaaagttccattcttaggatatgctgggagayggtcacagcagccactaccaaaattctgcctagaaccaaattattatctaatttatggaacaaatgtcttaatctgcaagggcaagaatataataagttgttttagggcactgacaggaactcatagcagctatgggaaggaaacaagaaaaaaagaagcacagaagtaagaggagaggcaggaatacacagtagacccaatactcaagcagaagagataagataaagtagcacttgcaataaccatggcttcaaacctgaagacacaatgcattcaacagctgaattc

SEQ ID NO: 230004 - DNA, 579 bp, Homo sapiens
cagtgagtccagaagcccagccatatcaggatgacatctaccatgcatcagtcctcgtgtgtcttcagcgcctctttcacatgtctgtgttcttagagcttgctggaaccatctttgcttgtctctgtgtrttctgagtctgtgactatttggctctaggagtcttctcaacaaagtacaatttctgttgtctttttccaaaaaactttatgaataaaatgaaaatatgagtaatataaaatcaaaatatattttgatttctcatttcaaaattatctacctctgtagtttaatagaactcaattattggccccagaagataatttttttccctaaagtattttctaaataataaccagtagttgacctacgtcctttatatatatcacatagaagatctccacagtacattcttcaaattcagctcagataatccatggaatgctcaagttccctgtaacaaattgagctcctatatctctgtggacttataattgactaataaaagtaagacttgtttgctaatgataaagataatttgtaaaaaatacctcattttagtttgaccatgagacgcac

SEQ ID NO: 230005 - DNA, 590 bp, Homo sapiens
gtccagaagcccagccatatcaggatgacatctaccatgcatcagtcctcgtgtgtcttcagcgcctctttcacatgtctgtgttcttagagcttgctggaaccatctttgcttgtctctgtgtattctgagtctgtgactatttggctctaggagtcttctcaacaaagtacaatttctgttgtctttttccaaaaractttatgaataaaatgaaaatatgagtaatataaaatcaaaatatattttgatttctcatttcaaaattatctacctctgtagtttaatagaactcaattattggccccagaagataatttttttccctaaagtattttctaaataataaccagtagttgacctacgtcctttatatatatcacatagaagatctccacagtacattcttcaaattcagctcagataatccatggaatgctcaagttccctgtaacaaattgagctcctatatctctgtggacttataattgactaataaaagtaagacttgtttgctaatgataaagataatttgtaaaaaatacctcattttagtttgaccatgagacgcacacatccattatcattaa

SEQ ID NO: 230006 - DNA, 590 bp, Homo sapiens
gtccagaagcccagccatatcaggatgacatctaccatgcatcagtcctcgtgtgtcttcagcgcctctttcacatgtctgtgttcttagagcttgctggaaccatctttgcttgtctctgtgtattctgagtctgtgactatttggctctaggagtcttctcaacaaagtacaatttctgttgtctttttccaaaaaactttatgaataaaatgaaaatatgagtaatataaaatcaaaatatattttgatttctcatttcaaaattatctacctctgtagtttaatagaactcaattattggccccagaagataatttttttccctaaagtattttctaaataataaccagtagttgacctacgtcctttatatatrtcacatagaagatctccacagtacattcttcaaattcagctcagataatccatggaatgctcaagttccctgtaacaaattgagctcctatatctctgtggacttataattgactaataaaagtaagacttgtttgctaatgataaagataatttgtaaaaaatacctcattttagtttgaccatgagacgcacacatccattatcattaa

SEQ ID NO: 230007 - DNA, 596 bp, Homo sapiens
acagctttcttggggtgcaagatttggggatgtcgcaggccccattgctcattgttgcaccgcacacttttcaagggctgttgatttctgatttgtctgtctctgttgggacaaccctggctcttgagagtggcttgttgactgctggctgcatagctcagtattctgccgtgttctgagtagaagaggtgcctgtggttgcagggaaacccacagactggggcttgaaacttctgtttgtgctgatttaccttcgaggcatggcgcgcatggcaaagtgacattttctcgtccagcatttgtccaactgccgtcatgagaccctgagcttcagcactgctgctgtacacacatgatctgtttttyactgttttttggctctcagcagtgactggtgctggcttgctttttttctttgaaaaaatccactgaaaaatttgcttgatgttttctccaaaggggcttactgaaggaggctgtttctttgatggcagtagctggacgccttcatcctgatgggtgtcttctgttttcctgactggggtaagttgaggagtcctcaatccttcaagcctttcttcatgtttttctaagtt

SEQ ID NO: 230008 - DNA, 596 bp, Homo sapiens
acagctttcttggggtgcaagatttggggatgtcgcaggccccattgctcattgttgcaccgcacacttttcaagggctgttgatttctgatttgtctgtctctgttgggacaaccctggctcttgagagtggcttgttgactgctggctgcatagctcagtattctgccgtgttctgagtagaagaggtgcctgtggttgcagggaaacccacagactggggcttgaaacttctgtttgtgctgatttaccttcgaggcatggcgcgcatggcaaagtgacattttctcgtccagcatttgtccaactgccgtcatgagaccctgagcttcagcactgctgctgtacacacatgatctgttttttactgttttttggctctcagcagtgactggtgctggcttgctttttttctttgaaaaaatccactgaaaaawttgcttgatgttttctccaaaggggcttactgaaggaggctgtttctttgatggcagtagctggacgccttcatcctgatgggtgtcttctgttttcctgactggggtaagttgaggagtcctcaatccttcaagcctttcttcatgtttttctaagtt

SEQ ID NO: 230009 - DNA, 596 bp, Homo sapiens
acagctttcttggggtgcaagatttggggatgtcgcaggccccattgctcattgttgcaccgcacacttttcaagggctgttgatttctgatttgtctgtctctgttgggacaaccctggctcttgagagtggcttgttgactgctggctgcatagctcagtattctgccgtgttctgagtagaagaggtgcctgtggttgcagggaaacccacagactggggcttgaaacttctgtttgtgctgatttaccttcgaggcatggcgcgcatggcaaagtgacattttctcgtccagcatttgtccaactgccgtcatgagaccctgagcttcagcactgctgctgtacacacatgatctgttttttactgttttttggctctcagcagtgactggtgctggcttgctttttttctttgaaaaaatccactgaaaaatttgcttgatgtttyctccaaaggggcttactgaaggaggctgtttctttgatggcagtagctggacgccttcatcctgatgggtgtcttctgttttcctgactggggtaagttgaggagtcctcaatccttcaagcctttcttcatgtttttctaagtt

SEQ ID NO: 230010 - DNA, 596 bp, Homo sapiens
acagctttcttggggtgcaagatttggggatgtcgcaggccccattgctcattgttgcaccgcacacttttcaagggctgttgatttctgatttgtctgtctctgttgggacaaccctggctcttgagagtggcttgttgactgctggctgcatagctcagtattctgccgtgttctgagtagaagaggtgcctgtggttgcagggaaacccacagactggggcttgaaacttctgtttgtgctgatttaccttcgaggcatggcgcgcatggcaaagtgacattttctcgtccagcatttgtccaactgccgtcatgagaccctgagcttcagcactgctgctgtacacacatgatctgttttttactgttttttggctctcagcagtgactggtgctggcttgctttttttctttgaaaaaatccactgaaaaatttgcttgatgttttctccaaagkggcttactgaaggaggctgtttctttgatggcagtagctggacgccttcatcctgatgggtgtcttctgttttcctgactggggtaagttgaggagtcctcaatccttcaagcctttcttcatgtttttctaagtt

SEQ ID NO: 230011 - DNA, 563 bp, Homo sapiens
catagatggtaatatcaacaacattgtgccaacagatttgacaacttagatgaagtggacaaatgtctccaaagacacaattatctagtcttactcaaaaacaaacagacagaatagcccggtatctattaaagaaattgaagctgtaatttaaaacctttccacaaagactccaatgctaggtctaaatggcttcagtgaagaattctaccaaacatttaagaaaaacatgataccaattctgctagttcttaccaattattctaattaaagagaaaattgaaaaaggaaggaatacttccgaataacctcttgcacttttctcagacttgtaagtgtgacactgggatgaccagttcatggggagaattttatattctttacaggtgaattggctacaaccacaggcaatttcaatttctttccaaatttcttyaggggaatatctgaggaaaaataaagtgcttttgaaatataaacactttctaggaatacaggaatgttgcttatatatgattttaccaatggtctcatgaaaattgtgtggaggactgtggctataa

SEQ ID NO: 230012 - DNA, 563 bp, Homo sapiens
catagatggtaatatcaacaacattgtgccaacagatttgacaacttagatgaagtggacaaatgtctccaaagacacaattatctagtcttactcaaaaacaaacagacagaatagcccggtatctattaaagaaattgaagctgtaatttaaaacctttccacaaagactccaatgctaggtctaaatggcttcagtgaagaattctaccaaacatttaagaaaaacatgataccaattctgctagttcttaccaattattctaattaaagagaaaattgaaaaaggaaggaatacttccgaataacctcttgcacttttctcagacttgtaagtgtgacactgggatgaccagttcatggggagaattttatattctttacaggtgaattggctacaaccacaggcaatttcaatttctttccaaatttcttcaggggaatatctgaggaaaaataaagtgcttttgaaatataaacactttctaggaatamaggaatgttgcttatatatgattttaccaatggtctcatgaaaattgtgtggaggactgtggctataa

SEQ ID NO: 230013 - DNA, 657 bp, Homo sapiens
atagtaattaaaatagtatgttaacagcataaagatagacatataagaccaatgggttagaatagggagccaagaaatagatctgtgtatatacagtcaattgatctttgacatgggtgccaagaatgcacaatcaggaaaggacagtctcttcaacaaatgctgctgggaaaactggatatctccatgcaagagtagaactggatccttgtcttataccatrcacaaaaattaaatcaaaatggattaaaaacttaaatgcaaggtgagactgtaaagcttctataagaaaacactgggaaaaagattaatttccaaaatacgtcaggaactcaaacaactcagtagataaaactaacaatctgattttttaaatgagcaaaggacttgaatagacatttttccaaagaagagaaatacccacaggtatatgaaaagatgctcagtgttactaatcatcagaaaaatgtaaatcaaaaccacaatgaaatatttcctcacacctgtcaggatgatgattatttaaaaaaaagacaagtgttggaagggatgtggagaaagggaacccttgtacattgtttgtgggaatacacgatggtgcatttactatgggaaaaaagaatgaacgttcttcaaaaagttaaaaacagagccatt

SEQ ID NO: 230014 - DNA, 657 bp, Homo sapiens
atagtaattaaaatagtatgttaacagcataaagatagacatataagaccaatgggttagaatagggagccaagaaatagatctgtgtatatacagtcaattgatctttgacatgggtgccaagaatgcacaatcaggaaaggacagtctcttcaacaaatgctgctgggaaaactggatatctccatgcaagagtagaactggatccttgtcttataccatacacaaaaattaaatcaaaatggattaaaaacttaaatgcaaggtgagactgtaaagcttctataagaaaacactgggaaaaagattaatttccaaaatacgtyaggaactcaaacaactcagtagataaaactaacaatctgattttttaaatgagcaaaggacttgaatagacatttttccaaagaagagaaatacccacaggtatatgaaaagatgctcagtgttactaatcatcagaaaaatgtaaatcaaaaccacaatgaaatatttcctcacacctgtcaggatgatgattatttaaaaaaaagacaagtgttggaagggatgtggagaaagggaacccttgtacattgtttgtgggaatacacgatggtgcatttactatgggaaaaaagaatgaacgttcttcaaaaagttaaaaacagagccatt

SEQ ID NO: 230015 - DNA, 657 bp, Homo sapiens
atagtaattaaaatagtatgttaacagcataaagatagacatataagaccaatgggttagaatagggagccaagaaatagatctgtgtatatacagtcaattgatctttgacatgggtgccaagaatgcacaatcaggaaaggacagtctcttcaacaaatgctgctgggaaaactggatatctccatgcaagagtagaactggatccttgtcttataccatacacaaaaattaaatcaaaatggattaaaaacttaaatgcaaggtgagactgtaaagcttctataagaaaacactgggaaaaagattaatttccaaaatacgtcaggaactcaaacaactcagtagataaaactaacaatctgattttttaaatgagcaaaggacttgaatagacatttttccaaagaagagaaatacccacaggtatatgaaaagatgctcagtgttactaatcatcagaaaaatgtaaatcaaaaccacaatgaaatatttcctcacacctgtcaggatgatgattatttaaaaaaaagacaagtgttggaagggatgtggagaaagggaacccttgtacattgtttgtgggaatacacgatrgtgcatttactatgggaaaaaagaatgaacgttcttcaaaaagttaaaaacagagccatt

SEQ ID NO: 230016 - DNA, 657 bp, Homo sapiens
atagtaattaaaatagtatgttaacagcataaagatagacatataagaccaatgggttagaatagggagccaagaaatagatctgtgtatatacagtcaattgatctttgacatgggtgccaagaatgcacaatcaggaaaggacagtctcttcaacaaatgctgctgggaaaactggatatctccatgcaagagtagaactggatccttgtcttataccatacacaaaaattaaatcaaaatggattaaaaacttaaatgcaaggtgagactgtaaagcttctataagaaaacactgggaaaaagattaatttccaaaatacgtcaggaactcaaacaactcagtagataaaactaacaatctgattttttaaatgagcaaaggacttgaatagacatttttccaaagaagagaaatacccacaggtatatgaaaagatgctcagtgttactaatcatcagaaaaatgtaaatcaaaaccacaatgaaatatttcctcacacctgtcaggatgatgattatttaaaaaaaagacaagtgttggaagggatgtggagaaagggaacccttgtacattgtttgtgggaatacacgatggtgcatttactatgggaaaaaagwatgaacgttcttcaaaaagttaaaaacagagccatt

SEQ ID NO: 230017 - DNA, 311 bp, Homo sapiens
aaaaccaactttataaatactgtcattccaaaaccacacaattcaaatataaataatctttatgaggtaaaacaaaaatgtacataatactttacataaacatttttagaataastttattataactcgataagcaaaataatccaaacctttatacatttctacaaggatagtcacgtatgtcaatttttcggtttcctctcgtgcctattttgtctcctgagccggcccctttccagctgacacgtgtgctccgtgttctcccacaatagcctgacctggcctgagtccgcgcccctgtgagcctcctt

SEQ ID NO: 230018 - DNA, 311 bp, Homo sapiens
aaaaccaactttataaatactgtcattccaaaaccacacaattcaaatataaataatctttatgaggtaaaacaaaaatgtacataatactttacataaacatttttagaataagtttattataactcgataagcaaaataatccaaacctttatacatttctacaaggatagtcacgtatgtcaatttttsggtttcctctcgtgcctattttgtctcctgagccggcccctttccagctgacacgtgtgctccgtgttctcccacaatagcctgacctggcctgagtccgcgcccctgtgagcctcctt

SEQ ID NO: 230019 - DNA, 311 bp, Homo sapiens
aaaaccaactttataaatactgtcattccaaaaccacacaattcaaatataaataatctttatgaggtaaaacaaaaatgtacataatactttacataaacatttttagaataagtttattataactcgataagcaaaataatccaaacctttatacatttctacaaggatagtcacgtatgtcaatttttcggtttcctctcgtgcctattttgtctcctgagccggcccctttccagctgacacrtgtgctccgtgttctcccacaatagcctgacctggcctgagtccgcgcccctgtgagcctcctt

SEQ ID NO: 230020 - DNA, 480 bp, Homo sapiens
ttactcagtgaggtccaaaggagccaaagacaaatctctcctgtttttcttcgaaatgtaaagatgttgcatctgtaaccacaggctgcttttaatcctaaaagtcagcgtgataatgaaatccagtgattaatttctgtcttctaatcaataagtagacatatcaatttatagtatgttagaaagcctcaactccactgaaacaaaaagcaagaggctctgcaaatgttggagtgtgctaaaggaaaagcatggactgatgtttggggaaaggttggtcaatgtgatgaggccatctgtgtttgctaatagtgcttatcaaagttaggttcctacrcagagacagagaccaggagacaatcctgtatccttcttgatccttatagtccaaagggatagctcctaagtctttgagaaagacattctgtgttataggagatttaaagggacagagaaaaggtttataactacaggttttct

SEQ ID NO: 230021 - DNA, 590 bp, Homo sapiens
ttcttgaactaggtgatttgacaacttagaaaactgttcactgggtgtccaggccttctctgcaaccagtcagaagctgtaaaygtggctagtggagaacagactatttcccccaggaaaactcccctcccccgaccttgtcatctagtgtaaagacactgacttgggccggttttcttaagggtagtatttaaggtagtattcttaaaggtagtattgctgtttaagagtcaatagtctaatttagacgctcctcagcccaaggctaatgcaaatgttttgtcatttatgtcattttgcagaggcaatttgaataacacctacagtaaggcaggcgtgggtttgctagccagtgaaagagctcctctcgcattgttggtcccccagtgctctgtgtcagtggggaatctctccagaaggtgactttatgggggatgtcatgggctgcagtgggtggccagaatttgagaactagcagataacgtcacatacgtgccccatccccatcacttcagccagcatcagatctgctgtccaggatagctatacattacttgtggttaaatgtatttgtcttaatacattaagtt

SEQ ID NO: 230022 - DNA, 444 bp, Homo sapiens
aaatgatcattcctctaaataaaaatatcttacaataaactaccattttaaatgtaaacttaggacaaatgtgaaaactctaccaagaagctactgttagtgtccagttaattgatctctgacaaacatatggctaaggtaacttayagagaagatacagcaattgaacccagtttgatcatgctgactgaaatcattaggttaccaccctatggttttagcaggctgaatgctgaaatcctttaaattgaatgaagcaagtttattctgaataatccaaatagaaatcgtctatttttacaaacactaaaagtagagttgatctcagaagttttgttaaaagaggctgaattcatcttgagtgtacagcatttatattccaaatcataccctcatttaaaattgtcttcttctataaagtaaagccattcttaattatagtat

SEQ ID NO: 230023 - DNA, 476 bp, Homo sapiens
actcacgctactgctctccaacctaggtacagtatgagacagtgtgaaaaaaaagcaaaacagaacaaaagacaaatattagtggtgtttggaatttggaaarttaaggtagaaattcgtaacttgattattgaaacttgccattaatataatatcataacttcattcataattcataacttgattatgaattcataacttgatattggagacttgccattactgtaatatctccagctacttcattctctgcatttgcaagatttcaagcataattttgatttttctttgaaagtatagaagaaaattctgttttctttactgtatggcttcaagatcattctgattactgtagtttctgatcaaggttacaattgccacccaatcttggccagtccttgctagcgccgtaatcttaggtaaattatttgaaagctgtaacacacagcttataccttcatttatatactcttgtc

SEQ ID NO: 230024 - DNA, 518 bp, Homo sapiens
actgtagtttctgatcaaggttacaattgccacccaatcttggccagtccttgctagcrccgtaatcttaggtaaattatttgaaagctgtaacacacagcttataccttcatttatatactcttgtctaaagagtatttcattattatgtactcttgtctaaggagtatataaataaaggtataagctgtgtgttacagctttcatcaaagctcatcaaagaagatggtcccctttcactaggtttgaaacttcagaaagttaaaatacagaaaggtaagtggggacacagaaattgaaaccacactgatgagcaacgtggtgaagaatattacagcaagctagtggggtctccattttcttcatttggaaagtggaggttaataattttacctaagagaattactatgcgttttaaactaaataaatgtgaaaatacctgtcaagtgcttatagagtgggagtccaataagttaattttctcccattctcagtaaagcagattgtttcatatagat

SEQ ID NO: 230025 - DNA, 518 bp, Homo sapiens
actgtagtttctgatcaaggttacaattgccacccaatcttggccagtccttgctagcgccgtaatcttaggtaaattatttgaaagctgtaacacacagcttataccttcatttatatactcttgtctaaagmgtatttcattattatgtactcttgtctaaggagtatataaataaaggtataagctgtgtgttacagctttcatcaaagctcatcaaagaagatggtcccctttcactaggtttgaaacttcagaaagttaaaatacagaaaggtaagtggggacacagaaattgaaaccacactgatgagcaacgtggtgaagaatattacagcaagctagtggggtctccattttcttcatttggaaagtggaggttaataattttacctaagagaattactatgcgttttaaactaaataaatgtgaaaatacctgtcaagtgcttatagagtgggagtccaataagttaattttctcccattctcagtaaagcagattgtttcatatagat

SEQ ID NO: 230026 - DNA, 432 bp, Homo sapiens
tcactagtagtcatgatataaaccaggcaccacagtgctctattaaaatctttcctttacacaatctttccctatggatagcagagacaactcatgtgtaggaagtggcaaaactgtgaattattwggttaatgattgtgaatttctcaacatgtcatttgtactgacagaaatcaaatatttgaaattgtattattttagttttttaaaaatttttcctgtatgtattctaataacatgaaaggataataaaactgaataggaaaatataatctgtgtgcatgtctagcaaaaagttggtgcgcagtaaatacgttttgaataaattttcaaattctttagaaccattatcatgaataaccatgagtataaacactgatgacttcagaaaatttattattttcctacaattaattcatatatgtattaatt

SEQ ID NO: 230027 - DNA, 578 bp, Homo sapiens
tcataaaatttacacaccatattttattcaaaactgagtaactgaaattaattcagagttgtttcaggaagcgaagaggctttgagtctgggattactgcttacctgtccagattcactagagaatttccacccaccacttaaccttgcatcaacagagcattcttaaaaagcagctatgtcctatctaatcagtctggcattaacagttcaacttgatcagttgtagaatggtgataaaagtgttctactaggaaaggggtgaaggaaatcccaccactgtctgatggcatcatctgttagataaaagccccagtttgaaaagaaacctagtagtctgcctttgcacatctacaaagtagagacaatttacaaaaccttacaacttgcagagatgaaaggtatgtcaatgctcagaatactttgttgttatcattgctttattgttgtttctgtgttgttgtgacactaagaattatgatyatcaagggagctgacctaatcaggaggagagacctcagcttgctagagtgaagtagataccagctgtcaaagcctgagtggtggagaaacgcacat

SEQ ID NO: 230028 - DNA, 556 bp, Homo sapiens
tccatctgtgacgtctagctactgagaaatgggattaccgacactactcttcatcagactgctcctcttgctctgccctgtcctctccctctacccccttcttcacttccccttccctttctctctttccacacttctttctcttcctttctttcctttccccttcctcctaatcttccttatctcawtatcttccactgtcagtctagcaccaattatattcaaaaactcaattcagcaattcagcaaatacatgtatgtacgtgtatacacacacacataggaattatattatatataattcctatgcccatggcactacattaaatattacgaaatgtaaaattggcaaggaaaaatctttgcctttaaagaggcctatactctaatctaatagaaaagatagaaaactaaacataaatgaatatgttgcaaggtgagtaaaataaaaaaaaaaatcatactgtaaatgaggggtaatcaaagagttataatgggatgagaggagggacattttaatccagtcctgtgtatgtgcatgtgtgcatgcaagata

SEQ ID NO: 230029 - DNA, 582 bp, Homo sapiens
gaatttgggaccccacgaatgtggggaaaccatggagtgatttcaggcaagcgtcagtcctaataggctatgacttgggaagattaatacaaaggggtgaactgatgtatattgaataaagatccattgagaaaaatattaattacttgattgattcataaataaactgatcaaactgagattatctttgaagttgccaagtacactttttatgtatatgtatttggtttaatcccctagactgtgatcctccactttgactaacacagtggttgttcttaatatttggcacaccataaatacttgctgtggtttttgtggaaggatttgctgagttcctgactatgtaagraacactgcatttattcattcagcatatatttaatgagcacttgatattggccaagcacatatgccatggaggatgcaaatataaataaagcaaatattttgcaagtaacacattgatagaggtggtaaaaataatacctaactttttttaatgcttaatctaagccagacataatgtatattcttacatgcataatacaacaaccataggaagtaagttagtaatagagg

SEQ ID NO: 230030 - DNA, 582 bp, Homo sapiens
gaatttgggaccccacgaatgtggggaaaccatggagtgatttcaggcaagcgtcagtcctaataggctatgacttgggaagattaatacaaaggggtgaactgatgtatattgaataaagatccattgagaaaaatattaattacttgattgattcataaataaactgatcaaactgagattatctttgaagttgccaagtacactttttatgtatatgtatttggtttaatcccctagactgtgatcctccactttgactaacacagtggttgttcttaatatttggcacaccataaatacttgctgtggtttttgtggaaggatttgctgagttcctgactatgtaaggaacactgcatttattcattcagcatrtatttaatgagcacttgatattggccaagcacatatgccatggaggatgcaaatataaataaagcaaatattttgcaagtaacacattgatagaggtggtaaaaataatacctaactttttttaatgcttaatctaagccagacataatgtatattcttacatgcataatacaacaaccataggaagtaagttagtaatagagg

SEQ ID NO: 230031 - DNA, 613 bp, Homo sapiens
cagggaggatgaaatggaatgaaattagagtgggtaggatagagacaaagagatgcagccaaggcatcatctgtgttaactcactcacagatttgggaaagagcccaggckggggttcctaattcaactattggatgggccatttaagggtgggctagttgtccattctcctccctttctagagaggccaactgcagagacagtgggggcagagaggtaaagcaatgttaccagtgagtcctgatcccccaggtcaacaaactttcttttgcttttccatatttcattttgagattagaaccacaaaaagctcatttcattgtttgtgtgtgtgtgtcttttgaatacaagcaaattgcaataatgaggaaaaaccctcaatcaaatcaatctcctatacctcccctatctccagccagttctctcagtagttatcatggatagtcataaactctacaaggttcaattgtaggcagtgtcctaaaccagctgagagcatcagtgacttacaactattgagttctcactgtataccaggcatagtgctggaggttcttcacactgtctccctgaacagcacatgaaaccacctccatgttacaggcaaagaaaa

SEQ ID NO: 230032 - DNA, 611 bp, Homo sapiens
ggcaatcagggatgttgcttagcaaccccaccaggaacagtggagtgagttctgtcctagtagcattaagggttgctactgcagtcctgaaaaggaccaaactttcctttaaaacccctcctccaacacaagggacaccagcaaattggaggcaactgggaagagagtcctctgaggggtaaggatgaacagaaggcaggtaaaggggaaaataatccatctaagttagtggaaaaatatagagaaaaatattattcttattttcttcaagcactgcaaamacttggtgggttaagagagatttgccaagccaagaacttggtgagtctgcttcactgaattttgatgtggcaattgaggccagcaggacatgcccagtgtattagtcaattttcacgctgctgataaagacatacccaagactgggaagaaaaagacgtttaattggacttgcagttccacatggctgggagtcctcagaatcatgatgggaggttaaaggcacttcttacatggcagtggcaagagaaaaatgaggaaggagcaaaagtggaaacccctgataaacccatcagatctcatgagacttattcactatcacgagaatagca

SEQ ID NO: 230033 - DNA, 572 bp, Homo sapiens
tagctatgtattaaatgttaatctatattttgaggctgcaagaacaatgaagtccttgcctcaaagggtttaccctcagttttaagaagtagagcatgctgatgaaacatagaaacatggactcccaaaacaaagacagacttatttgcaggatacagtcaagatatagatgagagagtggtacatcttatttgcactctaaaaacacctacttctgccctgtcattcacatcagytccccattttctccccaacttccaattacctctttttgccccattcttcagttattcccaacacccactcatgatttgactaagtgccctcagtacctatatccctcaccaaccatgatggtttggaccagatgctctactgagcctagtgctcagtctgtaccagttcaattgccattcagatttgggccttgcagcctgccttggcaacttctgcaaggcttttgccggcagagctcaaattgcacctccagagacctagaggttgtgttgtactttctatggcaagcgtatggcctggaattgcttatccaagctgaaacacaatccactcac

SEQ ID NO: 230034 - DNA, 660 bp, Homo sapiens
ttagctctcacttacaagtgagaacatgtggtattcgactttccgtttctggatttttatacttaagacaatggcctccagttccaaccatgtggctgcaaaagacatgatttcattcttttttatggcagaatgctattccattatattggctaaagaaaatgtagtgtgtacacacaaacacatatatatggcagaatgtatatatataatagcagaataatatgttatatatattatccatatataaatacrtattatatatggaatatataccatatatatagaatatatagaagtgttatatatatatggaatgtatggtatattattctgccatcatatataattttatatatatatatacatatatatattctgccacacacacacacagacacacacacacaaacactacattttgtttatccaattatttgttgatggacagttagactgattccatatttttgctattgtgctgtgataaacatatgagtgcaggtatctttttgatacaataatttttcttcctttgggtacacacccagaagtgggattgctggatcgaatggtggttccatttttagtttctttggaagtctccatactgttttccatagaggttgcactaatttacattcccaccaacagtgtata

SEQ ID NO: 230035 - DNA, 446 bp, Homo sapiens
tattttcagccaactgatcttcaacaaactgacagtaacttgcactgggtggggaaaagacaccctcttcaataaatgatcctgggaaaagtggctatgcagaaaataaaactgaaccctacatctctccactatatacaaaaataaactcaaagtggattaaagacttaaacataaatacccaaaactataacaatactaraaaaaaatgctagagaaaactcttctggatatgggtctaggcaaaaaatttgtgacaaaaacctcaaaagcacagacaacaaaacaaaaaaatggacaaatgaaaatatattaaactaaaaagcttctgtgtagcagcaaagggaataattttcagagtgaagagacaacctgttgaaagagagaaaatattagcaaactaatcatatgatacgaaactaatatccagaatgtagaaggaattc

SEQ ID NO: 230036 - DNA, 546 bp, Homo sapiens
aataaaaactgaattgaagatattttaggttgcagaatttttacacttttttcctgtgtaaaataagatttttgtaggcattagaagtctcagatcatttttggaagtgggtaggggtttaaaatataaacagattaaattagtaatatgatgacaacctggattcaaaagtktctatgaagtttgaattatagataacattacctcagaatttttcccttagaggaaaacagttctgagatggaaatgaaactgtggcagacatattccatcaggtgaaggacaactggctcctggcttataaatacccaggtggaaagtcatttggagaaacccaactctagagacttgaatatgcctgaagtttccaggaatagatgtcaaaataggacaagcttccggagacaaggaaactcagactggccctttatgccactgccctcccactgcactgagtaggatagtccatcttaaagagcatcgagagttacaatattctgcaagttatttctttgaactcccccgcttgccagatggtattttctt

SEQ ID NO: 230037 - DNA, 546 bp, Homo sapiens
aataaaaactgaattgaagatattttaggttgcagaatttttacacttttttcctgtgtaaaataagatttttgtaggcattagaagtctcagatcatttttggaagtgggtaggggtttaaaatataaacagattaaattagtaatatgatgacaacctggattcaaaagtttctatgaagtttgaattatagataacattacctcagaatttttcccttagaggaaaacagttctgagatggaaatgaaactgtggcagacatattccatcaggtgaaggacaactggctcctggcttataaatacccaggtggaaagtcatytggagaaacccaactctagagacttgaatatgcctgaagtttccaggaatagatgtcaaaataggacaagcttccggagacaaggaaactcagactggccctttatgccactgccctcccactgcactgagtaggatagtccatcttaaagagcatcgagagttacaatattctgcaagttatttctttgaactcccccgcttgccagatggtattttctt

SEQ ID NO: 230038 - DNA, 501 bp, Homo sapiens
tccactgacagcttgcaccatatgcctggaaaagccacagacaatgccaacctgtgaaagcagctgggaggggcactacaccctgcaaaaccagaggggcagacttgctcaaggccatgggggcccacctcttgcttagcatgacctggctatgagacatggagtcaaagatcattttggaactttaaggtttaatgactggcctattggatttcgacacgcatggagcctgtagcccctttgttttggccagtttctcccatttggaacaggtgtayttacccaatgcctgcacccccattttatctaggaagtaactaatatgcttttgattttacaggttcataggcagaagggacttgccttgtctcagatgtgactttggacatggacttttaagttaatgttggaatgagttaagactctgggggactgttgggaaggcatgattgtgtttagaaatgtgaggccaactcggggccagtggcgcaatggataacg

SEQ ID NO: 230039 - DNA, 516 bp, Homo sapiens
tattcaacattcgctatcatgaagaaagaattaaaatgcaacagrttgctaagcttattggaataggcataatagctttacccactaaagagtcaatggggctaagatttctgcataatgaatatctttaacaattaagctggtgaaaaagaaatgaattaagtgttatcatttaataatacataaatgtcacaatgaggtttctagttcctatttctaaccattgaaatctggggagtgggggaggagaggcccttgaagtgaatgaatttaaagtgggtactgttctgatgactagggcagtcaatattcaagtttgtctttttgtgttaccaattatctttataatttgtctcattgtttttattttaacacatgatcacaaattactacttatttttcctgagtatatatttatggagactgacatcctagattatttagaggattcagccataaacaattgggttagtttggtggaaattatgaggataattctgctacctgtaagaattc

SEQ ID NO: 230040 - DNA, 541 bp, Homo sapiens
tgaatgagtgaaaggatggacaggtggatacatagatggatggatggatgaatgaatttcatataagtgaatttcatgtaaatgtaagtaaatcccaatacagtcagactatgaatatttatatctaagtttcaattatttttaggctacagttgcatttctgtactggataaaatagtgcttctcaaagtttagcatacataagaatcacctggaagcccgttaatagatttccaaaccccactgcaaattcttgaatttgcctttcaaacaarctcccaggtgatgctaatgctgctgatttgtggaacatactttgagtagcattaattaagccagattttctcaccatcttcatcagaattattgggaaacttttaaaatattcaaattcctaggactcccctgtcacctactgaatcataatttctgagagtgagtctgaaaaagtgaatttaaggagtcattcctacatacactcaagtttcacagtggcctagatgatgctgcccactagaactctctgcagtgatgaatgtgt

SEQ ID NO: 230041 - DNA, 404 bp, Homo sapiens
gccctctatactgactccattctgacttgcagaatgtgagcccttgtgctcgcacaagacatttatatgtagcaaactccattaaacagttgagaagatgagggggttttacatatctgggtagctttgtaaactcgagctttatatgatcccttacgtcaccctctcacttaagttatctgagccctcaagcttgattcctctgggaaaacaccttagcttagcttattctgtttctctccattagactaaaggcctatcaaaaatttacctaacaggtttgaaagccttcagaatggctgactagaggcatctggtactcacctcctccacracgatgaaccaaaataatgagtagataatcatacttttaatagatcccgtaaaagagaatgctggaattc

SEQ ID NO: 230042 - DNA, 541 bp, Homo sapiens
ggtaagtccatgcatggcttccatccctgtcatgatggccactttgttcatggacccttgtggaagcactgggtggctattacaagaggctgactgatatttaccagcatgtcattttatccactcggttattaaaagcttcctctgcattgactgtcatttggtagacattcttatggagtacaaatacagaccacagtctgtaaaaactgtattttgtaatccattttgtaaaatcataactgtttattggagcaactcaagtcaggtttttgacaaccagagctagaatttgtcctgctaaatggattcagcaatactctagtaggctgcccatctagtttctcaattatccactgccaaatatggytaagaaagcctgattgctgatgtgttcctgctgtccctatgatagatgtgccaccttgtctttggtgattaagtactgctgcttggcctctgctactgtgggttcccctcagccccactgaaatcaaggagcccatagtgacagtcatacttaccctacaaaagatagcag

SEQ ID NO: 230043 - DNA, 433 bp, Homo sapiens
tgatgtgttcctgctgtccctatgatagatgtgccaccttgtctttggtgattaagtactgctgcttggcctctgctactgtgggttcccctcagccccactgaaatcaaggagcccatagtgacagtcatacttaccctacaaaagatagcagcgagagaacttttcaaggatacaattgctcccsctactaagacatttttaaattctgaagggaagggcatactttctgggctctctcatgaaacacagttggggagtaaatgtgcaggccacacataacaaatccagtccatcaattcaattatctccgcagtcttttgagttctcttctccacaacatttcagggaagctctggaatctcaatcttattaaatgtagcctaccattgcattggagtttcggttaatctgttaaagctacccacaaccg

SEQ ID NO: 230044 - DNA, 568 bp, Homo sapiens
gtggctaaacttacaataatttgttatgcagcaatagaaaataatatagtgttctattttttcactttacattacaacttgaactttgtctcctattaatgttaactaaaaatttaatgtctatgtctaatatatgtgtttggattataatcaatgtaatgagtctgaatgattgggcatttaaatgtagccattatttgtgttagggatttgttatttggaagttgtgttgttttgttatttgtgtttgttttgactcctgtggtcacatgaaagaaagatgaaacatctttctcaacaactgctgtgctataacccctgagagagagagaaratgtacttctgaaaggttattttgcttatttaaaggagattatggtactttgtgagagagctttgtgtttcaaaaacagaggcccttgacacctatagactacatcgtccaaggaagaggatgaatgatgtgggctgcagacgtttaacagatgggctcctccctggctaaatgactccccaagactggggaaagaaataagacttgaactgtgacctatggtggagatatggc

SEQ ID NO: 230045 - DNA, 508 bp, Homo sapiens
ttatagcagcatgagaacagactaattatgatgacttaggaaggcattttccattctggctggcccatagaaccacccagagagctctggaagggtacagcttctctgggcccatcccagacatcctaaattggaatcttccaggggcagcctgggaatctgtacttgttaccaaacctctccaggtgactgtgatgcacaactgcattcattgtcaccttcccccacctgctttgtgcccaaggaatgggaaccttatagaccacactcagatgtgctccactgctctctggcttctgattaggttcagccacaatgaggcactagcagatcagaagctggaagaagagtggagtggggtgttcatgccccaacttcctccgagcaaggytcttctccaagaaggtgaccatggctggttcttctcccagaaggtgaccatggctggttcttctcccagagctcctcgggtggccctccctcagccaccgctgcctctccaggttca

SEQ ID NO: 230046 - DNA, 561 bp, Homo sapiens
catcagcttttaacatacaaataaattaggaagtggaagtcattctgctcctgaaatcccaaaccctcattagtatgacagttgggaggcctccggcaaatggaagagaacacacggagcttctgttgatataggcaataggacattgattattttacataatgggaagtcccaaagcagcatggttccagtgttggttaactcagtaactcacatcaatgagaacacaggtttcttttatctttcctctctgttattctcaatgtatggacttggtccctgggttagctctcctcatggttcccaaatggtcatagtgattccaagtgtcacattcaaacaagacaacttcagcagaaggcatgactccatttttttaagacagggaaacctttcccagaagccccacagtagaaccccatcgcctttcattggccawgaccaagtcacatgcccgttcctaaccaatcatcaggaaggaaatgggaccactagaattggtgtagactcatcaggattcaccccagagctgggaatactatctctttccttgtggggtgg

SEQ ID NO: 230047 - DNA, 561 bp, Homo sapiens
catcagcttttaacatacaaataaattaggaagtggaagtcattctgctcctgaaatcccaaaccctcattagtatgacagttgggaggcctccggcaaatggaagagaacacacggagcttctgttgatataggcaataggacattgattattttacataatgggaagtcccaaagcagcatggttccagtgttggttaactcagtaactcacatcaatgagaacacaggtttcttttatctttcctctctgttattctcaatgtatggacttggtccctgggttagctctcctcatggttcccaaatggtcatagtgattccaagtgtcacattcaaacaagacaacttcagcagaaggcatgactccatttttttaagacagggaaacctttcccagaagccccacagtagaaccccatcgcctttcattggccaagaccaagtcacatgcccgttcctaaccaatcatcaggaaggaaatgggaccactagaattggtgtagactcatcaggattcaccccaragctgggaatactatctctttccttgtggggtgg

SEQ ID NO: 230048 - DNA, 561 bp, Homo sapiens
catcagcttttaacatacaaataaattaggaagtggaagtcattctgctcctgaaatcccaaaccctcattagtatgacagttgggaggcctccggcaaatggaagagaacacacggagcttctgttgatataggcaataggacattgattattttacataatgggaagtcccaaagcagcatggttccagtgttggttaactcagtaactcacatcaatgagaacacaggtttcttttatctttcctctctgttattctcaatgtatggacttggtccctgggttagctctcctcatggttcccaaatggtcatagtgattccaagtgtcacattcaaacaagacaacttcagcagaaggcatgactccatttttttaagacagggaaacctttcccagaagccccacagtagaaccccatcgcctttcattggccaagaccaagtcacatgcccgttcctaaccaatcatcaggaaggaaatgggaccactagaattggtgtagactcatcaggattcaccccagagctgggaatrctatctctttccttgtggggtgg

SEQ ID NO: 230049 - DNA, 621 bp, Homo sapiens
agtgggacagtcagactaaacaagtaaataactgcataatatattttcagatagcaaaagaatgctataaagaaaaataatgcaggcaaagggatggaaaattgtcgagggaggtattttagatggtgtattcattttctattgttgcctaacaaatgaccacaaacttagtggctgacaaggagatacatttgttatctcactccatgggtcaggaatcaaggcttaggttccttgggttccctggttaggtctcccagggttgtaatcacaggatcagtcagagctggggtctcatccaaggcttggggttctcttccaaactcatgggcttgttggaagaacttatttccttgcagctggaggactcatggaggctgtgccgccaagggcaggaggagaatgtctsttactgcttctttctcatccaagggctcacctgatcgggtcaggcccactcaggatagtctttcttttcaacgacataaagtcaagtgaatagtaacctcatgacaggggttatatccccttgaatcatcgtttccacttgcacgaggacattacaccagtgggcaggtatcataaaggccatctaagaatattgcccaccacagccagggt

SEQ ID NO: 230050 - DNA, 578 bp, Homo sapiens
tgcagtttgacatggtggcaactttccttaaaagaaggagaagctgggagagagatggtggtgaatagagggaagagagtatgtttgggttgtgtgtgtgtgtgtgtgtgtgtgtgtgtgtgtgtgtgtgtggtgtagagagagagagaaagacattccttgagtcygcctcagttaaaagtgatggaatagaggaggtcacctagaaacaaagtgcagaggtagcacagagccccagggaagaaggcgtggccgtggaggaggtgagattaatcagcttcgcctaaggcagccaccattaaataaaggatgcagggggaggaggggaggcattctggaaaggcaagggtcaacagtggtttcagtgacagctattcaggggcaagggaacaaaggtgggaagacagtgggaggagcccagtttgcaagaacgaggaaacaaacaccaaccaggaaatcagtggagggacacaggcaggagaagggctgtattcctccctagcgggtgtttaggggctggaagttgcaggtgggagggtggcagttaaggcctatatgaccacaggagggagaggaaa

SEQ ID NO: 230051 - DNA, 578 bp, Homo sapiens
tgcagtttgacatggtggcaactttccttaaaagaaggagaagctgggagagagatggtggtgaatagagggaagagagtatgtttgggttgtgtgtgtgtgtgtgtgtgtgtgtgtgtgtgtgtgtgtgtggtgtagagagagagagaaagacattccttgagtccgcctcagttaaaagtgatggaatagaggaggtcacctagaaacaaagtgcagaggtagcacagagccccagggaagaargcgtggccgtggaggaggtgagattaatcagcttcgcctaaggcagccaccattaaataaaggatgcagggggaggaggggaggcattctggaaaggcaagggtcaacagtggtttcagtgacagctattcaggggcaagggaacaaaggtgggaagacagtgggaggagcccagtttgcaagaacgaggaaacaaacaccaaccaggaaatcagtggagggacacaggcaggagaagggctgtattcctccctagcgggtgtttaggggctggaagttgcaggtgggagggtggcagttaaggcctatatgaccacaggagggagaggaaa

SEQ ID NO: 230052 - DNA, 578 bp, Homo sapiens
tgcactgtcacttagagagggtgtcacttaaacagatctgtctagatctgcactttctgtagcagagaaagtatagtgccttatcctctagccagtaatatgttcacggttgggtcccttagaatcctccctggttttgatatgcctgtgctgagagatagatagaatttctctattggagctaccaagttgagagtaggatggtaattcgaaagagtagagaattaggctattagacaaaatatggatatggagagagaaagagagccagccaagcagctagccctaccagcatcatatgactttgtgtattcagccccrcctggagttctaacccagaatgtcttggttatatgaaccaataaattactgatttatttatttgctagaggtaatatagaagaaggttttcatcactgaaaactaaaagcagtctgactgacagccttgtttcatactatccctgtctacttttaaagctgttcatttgctccatgctaacagctaatcttctctttacatttaatgcgtgcggatctcctgaatgtctattttcacatggtggttattttgcccag

SEQ ID NO: 230053 - DNA, 573 bp, Homo sapiens
taaatttagcaaaatatgcacctgaccaatgcacagcaatgcagaacattgcagagaatagtttttaaagacttaaataaatgaggagatataacatgtaaattggattgggagacccatagttgtaaaaatgttaacgctcttcaaattggcctrtgcttccatgcgatactagtcaaaatcccagcagattttctttctctgtccttcctcctttttcccttgcttcctctctcccatgcactctcccttcctctctcccttccttcttaaaattggtaagctaattctaaaatttacgtagaaatacaaagtgtcaaaaatagtcaagacaaaattgaaaaagaagaaagctgaaggacttgtactaccagagatatcaaaacttacacagccacagtaattaaggcagtgtgatactagtgtaaatagagacaaatggacccatggaacagagttttgagggtccagaaacagagctgcatagaaatcacctaatttacaacacgggcaccactgcaatgtagtgtgtgaaaacaaatgtctgggttaattggatttccaaaagaaaaa

SEQ ID NO: 230054 - DNA, 573 bp, Homo sapiens
taaatttagcaaaatatgcacctgaccaatgcacagcaatgcagaacattgcagagaatagtttttaaagacttaaataaatgaggagatataacatgtaaattggattgggagacccatagttgtaaaaatgttaacgctcttcaaattggcctatgcttccatgcgatactagtcaaaatcccagcagrttttctttctctgtccttcctcctttttcccttgcttcctctctcccatgcactctcccttcctctctcccttccttcttaaaattggtaagctaattctaaaatttacgtagaaatacaaagtgtcaaaaatagtcaagacaaaattgaaaaagaagaaagctgaaggacttgtactaccagagatatcaaaacttacacagccacagtaattaaggcagtgtgatactagtgtaaatagagacaaatggacccatggaacagagttttgagggtccagaaacagagctgcatagaaatcacctaatttacaacacgggcaccactgcaatgtagtgtgtgaaaacaaatgtctgggttaattggatttccaaaagaaaaa

SEQ ID NO: 230055 - DNA, 573 bp, Homo sapiens
taaatttagcaaaatatgcacctgaccaatgcacagcaatgcagaacattgcagagaatagtttttaaagacttaaataaatgaggagatataacatgtaaattggattgggagacccatagttgtaaaaatgttaacgctcttcaaattggcctatgcttccatgcgatactagtcaaaatcccagcagattttctttctctgtccttcctcctttttcccttgcttcctctctcccatgcactctcccttcctctctcccttccttcttaaaattggtaagctaattctaaaatttacgtagaaatacaaagtgtcaaaamtagtcaagacaaaattgaaaaagaagaaagctgaaggacttgtactaccagagatatcaaaacttacacagccacagtaattaaggcagtgtgatactagtgtaaatagagacaaatggacccatggaacagagttttgagggtccagaaacagagctgcatagaaatcacctaatttacaacacgggcaccactgcaatgtagtgtgtgaaaacaaatgtctgggttaattggatttccaaaagaaaaa

SEQ ID NO: 230056 - DNA, 525 bp, Homo sapiens
gctttgcaactttctatcaagattttactattcataacaatcaagaaatggataagaaaagcctaaatatgtttgtctgtttttacttacattccaaaggcaaaggcaaaaacacactcagacgtcaatgctaatatagatacatttaaagtagtcaagacaacagaaaaaggaagaagctgcaacttctatcttgcaattcccaagacggtgcttacttgatcttttacagagtttttttttttttttaaccttcaaaaacctctaaaaagtagtcagttttcaattatctactgctggtgatgtgktttataggcaacaacatagctatgtcccagaaagctctctccctgtgacccaaagcacatccaaagtcccctctcctcattgcacagcttttacagactcacaagatcttagagatgccctagaacctgacatttgtctaatctatttttcccagtctgacaatgaagctggagctatctgtgtggagccagaagttcaaccaatacctctgggcca

SEQ ID NO: 230057 - DNA, 516 bp, Homo sapiens
tgagacatccaccttctcctgccattggacatctcgggccttctgacttggaccaggacagatgctgttggctcccttggtcctcaggctttcagattcgtactggaaccgcatcaccagctttctcgggcctccagcttgcagatggcagayagtgggacttctccgcctccataatcctatgaatcaatccctgtaataaatctcttcctgttcataactatctatctatttatctgtctatctatctatctatctacctacctacctacctattatctgtctacctatcgctgatttttttttttgagatggagtctcactctattgctcaggctggagtgcagtggtgtgatcttgcctcactgcaacctctgccttctgggttcaagcgattctcctgcctcagcctcccaagtagctgggactacaggcatgtgccaccacgcccagctaatttttgtatttttagtagacatgaggtttcaccatgttgcccaggctgttttcgaattc

SEQ ID NO: 230058 - DNA, 611 bp, Homo sapiens
gaattctgctttaaaaagcctttttcccttattacttttgcacacaactcagttctctccaacaaggcctgaactgccattgtttgcttcaaacttccttgcatccaatccttcctcttttcaagataaggcctgtttttcccagggctctggggaaccacacctagaagaggctgttccagacaagtctagcattgcttccctttttctgataaggttccattgttgagaacactccctttgtttcttacctgtctccaaaacattctggaatttacttctattttagtttgctgatgtggccattactgttaagtggtggttaattatctttgtattctacattctttttttttttttttttgagacgagtctcrctctgttgtccaggctggagtgcagtggtgcgatctcggctcactgcaacctctggctcctgggttcaagtaatgctcctgcctcagcctcccaagtagctgggactacagacgtgtgccaccatgcccagctaatgttttgtatttttagtagagacggggtttcaccatgttagccaggatggtcttgatctcctgaccttgtgatccacccgcctcccaaaatgctgggat

SEQ ID NO: 230059 - DNA, 644 bp, Homo sapiens
atccaaaccatatcaattatctttacaaaatcttacaaatcatataaatgattggaagatactacatttataccacatctaaactcgaatttctcaaaagaatgataaaccaacattaattataaacaaatacatgaaagtcacaaactaatgctaagtaattagatcagcagtatgaaaaaatatattttgtccaattactgattaagctaagaatgtaagatttatcattagaaaatctatttctttatattaacatattaagagagtggagcaatgaccaaaactgattaaatctcagctttcatggarccttcattctatttgaaaaggacgactacaaatagataaattgcaatgtgttgacaggtatgaagtaaataagcagagtagagatggagaataatggtgtttatgttttgttttctattgtagtcaaggtgggttgagaggtggcatttaagcagagggctcagtgaaatgagagagtggacgaatttactatttagataaagagaattcttccaggtagctggaagaataagtgtaaaggctgtgagtaacaagtacgctcggtatattagaagattagcaagtggggcagagctgccagagcctagtggttgagataaagtgaattaggc

SEQ ID NO: 230060 - DNA, 644 bp, Homo sapiens
atccaaaccatatcaattatctttacaaaatcttacaaatcatataaatgattggaagatactacatttataccacatctaaactcgaatttctcaaaagaatgataaaccaacattaattataaacaaatacatgaaagtcacaaactaatgctaagtaattagatcagcagtatgaaaaaatatattttgtccaattactgattaagctaagaatgtaagatttatcattagaaaatctatttctttatattaacatattaagagagtggagcaatgaccaaaactgattaaatctcagctttcatggagccttcattctatttgaaaaggacgactacaaatagataaattgcaatgtgttgacaggtatgaagtaaataagcagagtagagatggagaataatggtgtttatgttttgttttctattgtagtcaaggtgggttgagaggtggcatttaagcagagggctcagtgaaatgagagagtggacgaatttactatttagataaagagaattcttccaggtagctggaagaayaagtgtaaaggctgtgagtaacaagtacgctcggtatattagaagattagcaagtggggcagagctgccagagcctagtggttgagataaagtgaattaggc

SEQ ID NO: 230061 - DNA, 482 bp, Homo sapiens
gtttagaaaaagcaaaggtatccttattctaggtttacacatgtggtctactgctgaattcactctcagcttaactcatgttgagatatcctgaaaactgagccagcagcaggcttcctcccaagagcctggcaatatgctcatccctcagtctcaagtttttcttagcactggagatactgttcttcctactctgggagcagctgctcctggagttagcatgggcaccacagagccrgctgactttaactgcagagctgctgcagcagcagcgacagagcctggggagtctgtgagagagcagcgccgcagctctcgggcactgctatgaaatctcagagggtccgagttgagataaccacacactcaagaatccatcctggcccaaaactccttttctactcttccctcttcctgggatgaccctttggggacacaagagagtgaccaggtagaattttcactcgatgtggaggtgaaag

SEQ ID NO: 230062 - DNA, 482 bp, Homo sapiens
gtttagaaaaagcaaaggtatccttattctaggtttacacatgtggtctactgctgaattcactctcagcttaactcatgttgagatatcctgaaaactgagccagcagcaggcttcctcccaagagcctggcaatatgctcatccctcagtctcaagtttttcttagcactggagatactgttcttcctactctgggagcagctgctcctggagttagcatgggcaccacagagccagctgactttaactgcagagctgctgcagcagcagcgacagagcctggggagtctgtgagagagcagcgccgcagctctcgggcacygctatgaaatctcagagggtccgagttgagataaccacacactcaagaatccatcctggcccaaaactccttttctactcttccctcttcctgggatgaccctttggggacacaagagagtgaccaggtagaattttcactcgatgtggaggtgaaag

SEQ ID NO: 230063 - DNA, 576 bp, Homo sapiens
gttccttatttaccatcttatgtcatcatctgatgtcacttcagcagtgaacactcttaaatatctattttttattattatattttgcctcatttgcctaatactagaaatccaataagtattggtaaatgaataaattaatcaccaaataaatctkttgcatgaattgttatgccagttagcattctaaattacaaagagtaagtgatcatttccacatagcttcaacaacaatgttttgtaagctaaaatgctcacagaaagcttgtgaaccaataatgagttctcatccccaaaagatgagctatgctctttttattaatgagattaaattgcttttaaaatctaatttcagaagttattggttttcttcattaattatttgtgaatgaaatatgaattctgccaaaacttttataggaacatttatttactcagtttttatgaactctatgtttcttaccaatatgagtcatctccctatcacatatattataattttcccaagttaattttttacccttccttgcttttagtggtactatctgatacttagaatttcattttaatgtggtt

SEQ ID NO: 230064 - DNA, 576 bp, Homo sapiens
gttccttatttaccatcttatgtcatcatctgatgtcacttcagcagtgaacactcttaaatatctattttttattattatattttgcctcatttgcctaatactagaaatccaataagtattggtaaatgaataaattaatcaccaaataaatctgttgcatgaattgttatgccagttagcattctaaattacaaagagtaagtgatcatttccacatagcttcaacaacaatgtttygtaagctaaaatgctcacagaaagcttgtgaaccaataatgagttctcatccccaaaagatgagctatgctctttttattaatgagattaaattgcttttaaaatctaatttcagaagttattggttttcttcattaattatttgtgaatgaaatatgaattctgccaaaacttttataggaacatttatttactcagtttttatgaactctatgtttcttaccaatatgagtcatctccctatcacatatattataattttcccaagttaattttttacccttccttgcttttagtggtactatctgatacttagaatttcattttaatgtggtt

SEQ ID NO: 230065 - DNA, 544 bp, Homo sapiens
tacaaacatcatccttgaataatacagaggcatctttccaaaggatatggccagcacttatcattgggcatgtcttagggtcaatcccatatgggatgatctcgagtcagatggaagagctatttacaagctctcaggtgctatgatatgctgatgaaatgactacatgcatatccttgctctaagcactgataaaagatacaaacatcacatccagacaaaatattcaatctcgtttcagagatacatcacataaagcaaaacacaggtaaagcaaggagtagtctgttcaaagtagagttaactgaccaagtcagctgtacaggatttattctctgaaaaagcaaagcagttggatgggcacagtggttcacgcttgtaattctagcactytgggaggcctagacaggaggatcacttgaggccaggagtttaagaagaccctggccaacataatgagactccaactttacaaaaaaatttaaaattacctgggcatgatggtgtgtgcctgtagttctagcaggagttgaaagctgcagta

SEQ ID NO: 230066 - DNA, 577 bp, Homo sapiens
ataatgagactccaactttacaaaaaaatttaaaattacctgggcatgatggtgtgtgcctgtagttctagcaggagttgaaagctgcagtaagccctgatttgcaccacagcactccagtctggatgacagagcaggaccttgtctcaaaaaaaggaggaggtgggggaagaaaagaaaaacttgtagaaatagaatarggtcacatcacacaggtccttgaatgcgaagggtaagagttttggctttatcatgaatcagtgaaagcctttgagaagacttcttcaatggtagcatgactatttacattttcatccaaactgggacacaattgagatcgaaaagaaggtttatgataatatatgtcgagacaaaaggtataatcccaaactgttgctggcaaactgggatgtttggtcactctattaaggtcacgggcaattatttctagaacagttctaatgaagaagagctagagagagaaactaagaaggtgaaaggcagagaaacagctaagaaaatatgtacacacagagtcactataaaatatatgatgtgtgtgtatgtttatataaac

SEQ ID NO: 230067 - DNA, 577 bp, Homo sapiens
ataatgagactccaactttacaaaaaaatttaaaattacctgggcatgatggtgtgtgcctgtagttctagcaggagttgaaagctgcagtaagccctgatttgcaccacagcactccagtctggatgacagagcaggaccttgtctcaaaaaaaggaggaggtgggggaagaaaagaaaaacttgtagaaatagaatagggtcacatyacacaggtccttgaatgcgaagggtaagagttttggctttatcatgaatcagtgaaagcctttgagaagacttcttcaatggtagcatgactatttacattttcatccaaactgggacacaattgagatcgaaaagaaggtttatgataatatatgtcgagacaaaaggtataatcccaaactgttgctggcaaactgggatgtttggtcactctattaaggtcacgggcaattatttctagaacagttctaatgaagaagagctagagagagaaactaagaaggtgaaaggcagagaaacagctaagaaaatatgtacacacagagtcactataaaatatatgatgtgtgtgtatgtttatataaac

SEQ ID NO: 230068 - DNA, 577 bp, Homo sapiens
ataatgagactccaactttacaaaaaaatttaaaattacctgggcatgatggtgtgtgcctgtagttctagcaggagttgaaagctgcagtaagccctgatttgcaccacagcactccagtctggatgacagagcaggaccttgtctcaaaaaaaggaggaggtgggggaagaaaagaaaaacttgtagaaatagaatagggtcacatcacacaggtccttgaatgcgaagggtaagagttttggctttatcatgaatcagtgaaagcctttgagaagacttcttcaatggtagcatgactatttacattttcatccaaactgggacacaattgagatcgaaaagaaggtttatgataatatatgtcgagacaaaaggtataatcccaaactgttgctggcaaactgggatgtttggtcactctattaaggtcacgggcaattatttctagaacagttctaaygaagaagagctagagagagaaactaagaaggtgaaaggcagagaaacagctaagaaaatatgtacacacagagtcactataaaatatatgatgtgtgtgtatgtttatataaac

SEQ ID NO: 230069 - DNA, 577 bp, Homo sapiens
ataatgagactccaactttacaaaaaaatttaaaattacctgggcatgatggtgtgtgcctgtagttctagcaggagttgaaagctgcagtaagccctgatttgcaccacagcactccagtctggatgacagagcaggaccttgtctcaaaaaaaggaggaggtgggggaagaaaagaaaaacttgtagaaatagaatagggtcacatcacacaggtccttgaatgcgaagggtaagagttttggctttatcatgaatcagtgaaagcctttgagaagacttcttcaatggtagcatgactatttacattttcatccaaactgggacacaattgagatcgaaaagaaggtttatgataatatatgtcgagacaaaaggtataatcccaaactgttgctggcaaactgggatgtttggtcactctattaaggtcacgggcaattatttctagaacagttctaatgaagaagagctagagagagaaactaagaaggygaaaggcagagaaacagctaagaaaatatgtacacacagagtcactataaaatatatgatgtgtgtgtatgtttatataaac

SEQ ID NO: 230070 - DNA, 387 bp, Homo sapiens
ctagcccttgtttcccctgctgtgtccctgcttccctccccttcctctagtaatacttaagatgccccacccatcctggcgcttctcccccctcacattctgagggtggcttggcaaaaaagataagtattgaaggaggaaaggtctattctttcatacagcgttttgtattctttgtattcttatgttccttatattctttgtatyttctaagcaacacttccatgttttttcacttaatatctccatcactcatcactcccctgcccagcacgtgagccaagtggcaggacagcatcctgggactcagatctaacactgtgaggaactgaagccaggtgtccaaggcagcaagtcaaaaggctgatcttaaccagactcatgaaa

SEQ ID NO: 230071 - DNA, 387 bp, Homo sapiens
ctagcccttgtttcccctgctgtgtccctgcttccctccccttcctctagtaatacttaagatgccccacccatcctggcgcttctcccccctcacattctgagggtggcttggcaaaaaagataagtattgaaggaggaaaggtctattctttcatacagcgttttgtattctttgtattcttatgttccttatattctttgtatcttctaagcaacacttccatgttttttcacttaatatctccatcactcatcactcccctgcccagcacgtgrgccaagtggcaggacagcatcctgggactcagatctaacactgtgaggaactgaagccaggtgtccaaggcagcaagtcaaaaggctgatcttaaccagactcatgaaa

SEQ ID NO: 230072 - DNA, 658 bp, Homo sapiens
tcactcagcatctgggggaatcagttcctcagagcagcttttcatgtatcacctactcatgtcctgtcctagcctcatgaagaaaattactctgaggccctgacctttggaggacatttgaaatctcagaagagaagagaatgaccaagacatttagtgagtcagagatcagagctttattataacatgaggtaaaggaggaaaagaagacttgcaattggggtgttacatcaagcacgaagttcttccaggaaagccccatgagtctttgtggtctctgccaaccaatgaatggaatgagaggaagtggaaagagtatccatcaggccgtagcaggttcttggccattcagtcccaagagctcttctgtagcccaggtcagcagcagcccccagagctgtggcagcagccagagcccccagaaggttcactctcacagcagtcggggctctggtgccggcgccggtggaagagacggggcctgtggtggctcagggagcagccaccagccccagagctgcagcagcccccagagctgggaccacagcagctcccagagctgggaccacagcaagaagagactgcagggaaacatggagctgggcactgwggtgggcatttggggggacacttaggtggacattttggggtacacttg

SEQ ID NO: 230073 - DNA, 658 bp, Homo sapiens
tcactcagcatctgggggaatcagttcctcagagcagcttttcatgtatcacctactcatgtcctgtcctagcctcatgaagaaaattactctgaggccctgacctttggaggacatttgaaatctcagaagagaagagaatgaccaagacatttagtgagtcagagatcagagctttattataacatgaggtaaaggaggaaaagaagacttgcaattggggtgttacatcaagcacgaagttcttccaggaaagccccatgagtctttgtggtctctgccaaccaatgaatggaatgagaggaagtggaaagagtatccatcaggccgtagcaggttcttggccattcagtcccaagagctcttctgtagcccaggtcagcagcagcccccagagctgtggcagcagccagagcccccagaaggttcactctcacagcagtcggggctctggtgccggcgccggtggaagagacggggcctgtggtggctcagggagcagccaccagccccagagctgcagcagcccccagagctgggaccacagcagctcccagagctgggaccacagcaagaagagactgcagggaaacatggagctgggcactgtggtggrcatttggggggacacttaggtggacattttggggtacacttg

SEQ ID NO: 230074 - DNA, 658 bp, Homo sapiens
tcactcagcatctgggggaatcagttcctcagagcagcttttcatgtatcacctactcatgtcctgtcctagcctcatgaagaaaattactctgaggccctgacctttggaggacatttgaaatctcagaagagaagagaatgaccaagacatttagtgagtcagagatcagagctttattataacatgaggtaaaggaggaaaagaagacttgcaattggggtgttacatcaagcacgaagttcttccaggaaagccccatgagtctttgtggtctctgccaaccaatgaatggaatgagaggaagtggaaagagtatccatcaggccgtagcaggttcttggccattcagtcccaagagctcttctgtagcccaggtcagcagcagcccccagagctgtggcagcagccagagcccccagaaggttcactctcacagcagtcggggctctggtgccggcgccggtggaagagacggggcctgtggtggctcagggagcagccaccagccccagagctgcagcagcccccagagctgggaccacagcagctcccagagctgggaccacagcaagaagagactgcagggaaacatggagctgggcactgtggtgggcatttkgggggacacttaggtggacattttggggtacacttg

SEQ ID NO: 230075 - DNA, 616 bp, Homo sapiens
attattatttctgccctgcactgtgctgcctttaagggctactccacagcactacctgcctggtgctgccttcaaatactgctctgcagcattgactgagcacctgttgtgcaggcatccacttgctcagctcaggatggggaggcagcaggcacccatgactcagcagtgcctgtggcttatggccagcatttaccctgagtggatttgggatagtttaaacatcattcttggatgaatttttttttattayactttaagttttagggtacatatgcacaacgtgcaggtttgttacatatgtatacacgtgccatgttggtgtgctgcacccattaactcgtcatttagcattaagtatatctcctaatgctatccctcccccctccccccaccccacaaccgtccccagtgtgtgatgttccccttcctgtgtccgtgtgttctcattgttcaattcccacctatgagtgagaacacgcggtgtttggttttttgccttaatcctcacatcaatcatgaaggaagatcaattatctctcttttgcagaagagtatttgatcctcagattgtttataaggttgcatagctatagtacacggcctgggatgttag

SEQ ID NO: 230076 - DNA, 413 bp, Homo sapiens
tattcatagtcctgaggcttcaacactaagacaagccactcccacactctgtaggtgacggcaagggcaggcacacagggagggaaccagctgctggaatgccagcccggttgatgcaccaggcggatgccaaccagctgtctcatggcccaagccagacccagaaccctttatataaagacagccctcttcccagatgcctcagcctgaaggactgcttgcctgtgaggagggtgagtctaggaactggatcctgggatcggggtggatgtgatgttcaggggagagcccaggttcacagtcgtgaggcacaaagaagggagaagctaggcaccagggagggcgaggggtgcrttaacctgaggagaaaagtctggtgagcttttaggagacagaagcatagctacagagtt

SEQ ID NO: 230077 - DNA, 564 bp, Homo sapiens
acattaaaagacttctgtaaaattttggtttaaatgataccatcagggatatagaaaaagaggacttgggaggccaaactccaagaaaaaggcctaaggcagctccaagaaaaatgaggtggcactgatgggagctattctgatctcctgtggagggaggcaggtgagaagctgctggttatcacctggtcatacaacccatgttgtaaggtcctcttatgcccaggtgctgcctcacccatcaggagcacagcccaagaccaggataaaagggcctccttgatactgttccagtgtgagattcaggaaaagactctctcatctccataaataattaacactcaatcattagtaaagtcttgttcaggactgcacactgtttaagggtaaatgtccaaattcctgcagtgaaataagactttgtgtgctccctcgcatttaagcctttgtcatgtactctcagaaatgacctgaagctgaactggattatttttttgtactttgattatgcttctctcygtgatgcaagccatggtctctgcccttccaggacagcgtggctca

SEQ ID NO: 230078 - DNA, 345 bp, Homo sapiens
tatgtctattacagtgatgggagrgagactaaaatggaaagattgtgaaatgatacaagggaaaagattcttcttgaatctgttgaaaacacttatctttggagcagagggcaagtatggatgtcctagctctcaggatcaagatatcattaaattccttcacatgaaaatccagggtctcaaaggttcataattcctggaaataatctcatagtttaataaaacattgagtgcatctctgttctctaactcaaggtaacttcaccttactgtatgtctactttcagaggcctctctcaccagatcatttggctataagtcctggttctgctgtttccaagcttg

SEQ ID NO: 230079 - DNA, 551 bp, Homo sapiens
taaataataactcctcattccttgctccttctagcccctarcaaccaccatttctgtctctatcaacttgaccattctaggcagctcatataagtagaaaaagacattatttgtccttttatgactggcttactccacttagcataatgttctcaaggtttatccaagttgtagcatgtgccataatctctttcctcttcaaggctgactgatattccatggaatgtacatactacattttgtttatttattcatcagtggatggatgggcacttaggttgctttcaccttttttcttgtagtaaatagtgttgcaatgaacatgggtatacaaatatttctgtgaatccctgatttcaattcttatggatagatacctggaagtgggatcactggatcataggtaattttacttttagttttttgaggaaccgctatactatctttcatagtgactacataattttacattcccaccaacagggtacaagtcctaatttctccacatccttgtcaacatgtgttattttctgttcattgtcttgtttttg

SEQ ID NO: 230080 - DNA, 562 bp, Homo sapiens
ggcaccggcaccagagccccgattgttgtgagtgtgaaccttctgggggctctggctgctgccacagctctggggactgctgctgaccagacctcgaacatcacagagcaacccttatggagaaacttgcaaccaggacctgtcccagagtgatgcttctcctgcccctttttctcctttccttgggctgacacaccttgtgaggtgttttgtctgttgtcatggcccaagagcccatcctggatcctgatcttaccttcccactttacctcatacaacaataaagctcttttgcctcttsgtgaagtaccctggccattgtcaattcttctattcttttcaaatcccttaaagtccagtgccccagccgtacacttttaaggatgctttggtaggagtggagtgtgagaaagaggtatgctggaagcagtctccagagggtcaatcctgaaagagcagcctcacagtagggcttctcaatgggactgcctgtgtgcacttggagactgtgagatgtggaccctctcagcccaggcaggggcctgaagggactgacagcccc

SEQ ID NO: 230081 - DNA, 608 bp, Homo sapiens
ttgctagttatcccaaacaacaacaaaaaaaagattttttttttaaaagcagcttttaaacatctcctagctattaccaacctactgcacgctctgctccagttaatgttccttcctaatgcttactctttgtctcaagaactcagaagacatagctattcctagggttttgtgggtatcaagtgccaggaaacacagctttcactctatgtgatccccaatttgacttgtctgaagaagtatgagtatattctaatacatgtgttctttatctaaattcttgcattccaaatattcttctcccatttccactgaatygcaaacttcataagcacagatatttcaactaaccacatttgtagtaaaatgtgctgccctgttactttagcccaaatctctatattttgaatgcaaaaatctttgatacttggcataaatattaaatttatctgggaggtttcaattttgaacaaaatcagtgtttcatttctcacttgctggatttttggaactgtttaccgatgaaaagaacactgttggcattgaaccattcaatccattttggtcagaagtatgatatttttatttctaataaaagtgccctgcaa

SEQ ID NO: 230082 - DNA, 552 bp, Homo sapiens
ttggcacattactgttattaactaaactccacactttatccaaatttcactagttttttcctaatgtcctttttctgttccaggatcctattcagaatacacattatgtttagctgtcatgactcctagcctcttttggtctgtgacagtctatcaggctttccttgtttttgataatgacagttttgaagagtactyacctgtgtctttttaacatgcccaattacttttttttcttttttttttttttttactacttccttactttctggcacaagaagatgtttcaggctcattttattacctctctactttagttctggaatttgctatttcttcaaaaagcccttggtccctttaatggaaagtggcatttagaaactaatatgtgggcaccaaataggcttattgataccgaggtgccaagcgtcattgattctaggcatttcagcaaagaaaattaggatatatagatatagatatagatatagatttctacggatacctacagcattagcccaactccgtcaaggctctttttttgccttgctc

SEQ ID NO: 230083 - DNA, 552 bp, Homo sapiens
ttggcacattactgttattaactaaactccacactttatccaaatttcactagttttttcctaatgtcctttttctgttccaggatcctattcagaatacacattatgtttagctgtcatgactcctagcctcttttggtctgtgacagtctatcaggctttccttgtttttgataatgacagttttgaagagtacttacctgtgtctttttaacatgcccaattacttttttttcttttttttttttttttactacttccttactttctggcacaagaagatgtttcaggctcattttattacctctctactttagttctggaatttgcyatttcttcaaaaagcccttggtccctttaatggaaagtggcatttagaaactaatatgtgggcaccaaataggcttattgataccgaggtgccaagcgtcattgattctaggcatttcagcaaagaaaattaggatatatagatatagatatagatatagatttctacggatacctacagcattagcccaactccgtcaaggctctttttttgccttgctc

SEQ ID NO: 230084 - DNA, 552 bp, Homo sapiens
ttggcacattactgttattaactaaactccacactttatccaaatttcactagttttttcctaatgtcctttttctgttccaggatcctattcagaatacacattatgtttagctgtcatgactcctagcctcttttggtctgtgacagtctatcaggctttccttgtttttgataatgacagttttgaagagtacttacctgtgtctttttaacatgcccaattacttttttttcttttttttttttttttactacttccttactttctggcacaagaagatgtttcaggctcattttattacctctctactttagttctggaatttgctatttcttcaaaaagcccttggtccctttaatggaaagtggcatttagaaactaatatgtgggcaccaaataggcttattgataccgaggtgccaagcgtcattgattctaggcatttcagcaaagaaaattaggatatatagatatagatatagatatagatttctacggatrcctacagcattagcccaactccgtcaaggctctttttttgccttgctc

SEQ ID NO: 230085 - DNA, 422 bp, Homo sapiens
gtgtaaaaatcttttttaaaaaataaaataaggtcacatttacaggtcctttagggggaccaccattcaagccactacacacctccgagctgagctcgggacatttaccccgaaaatgttttttgccatccaggaactgataatagayttggcaaaaacacaaatgtaaacaaacatcttcagccccttttagagaggggctgcgtgtggtgtggtttctcatccatggaatccgagttatctggaaattccaaaactgtctagaatggagccttgtgactcttgatgtaattgaaactccttagtgtggtttacaaggatattattttttaaaatatcttcagccttatttttcttcctcccagaatatgcttcagccacattgtacttgtgttggttcctgatgtgctatgttctttttc

SEQ ID NO: 230086 - DNA, 424 bp, Homo sapiens
tcaaactttagtgcacttcagaattatatgaaaggcccattaaaacacagatcgcccttaacaaactagacatcaaaggtacatacctaaaagtaataagagccatctatgacaaacccacagcctacatcacagccgaacaggcaaaagctggaaacattccccttgagctcattcttaccactcttattcgacatagtattggaagtcctggccagagcaatcaggcaagaggaagaaataaaaggcacccaaataggaaaagaggaagtcaaactatctcacttcgcagatgrtatgattctatacctatgaaaccccatagtctctgcccaaaggctcctaggtttgataaacaaacttaagcaaagtttcaggatacaaaatcaatgtgcaaaaatcagcagcatttctgtacaacaat

SEQ ID NO: 230087 - DNA, 559 bp, Homo sapiens
cccctttgcctggtcacattctcatcattcatgactgttggtccaatttagcatataagtgtttaactttgtctttgggtctttgtttccttatgaagattgtgcaccatgtaaaactcgtattaaagaaatttgtgtgcacttctcctaattgtatatattatgtcaagacataaggtccagctaaaaaatccctaagagagtagaggtaaaattttgccttccctacatcagtaagtattgaagattgtaaccacttaaggaagctkttccttatctttgtattggcttagcccaggaagagatgcacttgaagaggagaattctggtagtatagaacagatatggggtcaccagctttttcaggtccaatgccttcctgaatataaaataataaatttaagaaaaaaaaatattgatattagaaccagcctgaacaggacaaagaggtttgtagaaatattagacaagagtcctcctgcactggcccccactcctctgcacagacactgtgccactcaaaattatctcccctctgagtgcaaagtggtccaaaccc

SEQ ID NO: 230088 - DNA, 559 bp, Homo sapiens
cccctttgcctggtcacattctcatcattcatgactgttggtccaatttagcatataagtgtttaactttgtctttgggtctttgtttccttatgaagattgtgcaccatgtaaaactcgtattaaagaaatttgtgtgcacttctcctaattgtatatattatgtcaagacataaggtccagctaaaaaatccctaagagagtagaggtaaaattttgccttccctacatcagtaagtattgaagattgtaaccacttaaggaagcttttccttatctttgtattggcttagcccaggaagagatgcacttgaagaggagaattctggtagtatagaacagakatggggtcaccagctttttcaggtccaatgccttcctgaatataaaataataaatttaagaaaaaaaaatattgatattagaaccagcctgaacaggacaaagaggtttgtagaaatattagacaagagtcctcctgcactggcccccactcctctgcacagacactgtgccactcaaaattatctcccctctgagtgcaaagtggtccaaaccc

SEQ ID NO: 230089 - DNA, 430 bp, Homo sapiens
aagtttacccaacagtgattaaaagcacactaacatctctcatggccttattgytatgctgtgtagaaatctagatgcaatgacagatttctaggactagtaactccaatattttatcagaacactttataataaataaatgcatctcatgttgtgggcagtgaccccaagattatcaatgccaccagtgtagtcacactggtgaaaagtttagccaaatggtcgggcatgttggctcatgcctgtaatcccagcactttgggaggctgaagcaggtggatcacttgaggtcaggagttcgggaccagcctggccaacatggtgaaaccctgtctctactaaaaatacaaaaattagccaggtgtggtggtgcatgcctgtaatcccatctacttgggaggctgaggcaggagaatcacttgaacctggg

SEQ ID NO: 230090 - DNA, 430 bp, Homo sapiens
aagtttacccaacagtgattaaaagcacactaacatctctcatggccttattgctatgctgtgtagaaatctagatgcaatgacagatttctaggactagtaactccaatattttatcagaacactttataataaataaatgcatctcatgttgtgggcagtgaccccaagattatcaatgccaccagtgtagtcacactggtgaaaagtttagccaaatggtcgggcatgttggctcatgcctgtaatcccagmactttgggaggctgaagcaggtggatcacttgaggtcaggagttcgggaccagcctggccaacatggtgaaaccctgtctctactaaaaatacaaaaattagccaggtgtggtggtgcatgcctgtaatcccatctacttgggaggctgaggcaggagaatcacttgaacctggg

SEQ ID NO: 230091 - DNA, 430 bp, Homo sapiens
aagtttacccaacagtgattaaaagcacactaacatctctcatggccttattgctatgctgtgtagaaatctagatgcaatgacagatttctaggactagtaactccaatattttatcagaacactttataataaataaatgcatctcatgttgtgggcagtgaccccaagattatcaatgccaccagtgtagtcacactggtgaaaagtttagccaaatggtcgggcatgttggctcatgcctgtaatcccagcactttgggaggctgaagcaggtggatcacttgaggtcaggagttcgggaccagcctggccaacatggtgaaaccctgtctctactaaaaatacaaaaattagccaggygtggtggtgcatgcctgtaatcccatctacttgggaggctgaggcaggagaatcacttgaacctggg

SEQ ID NO: 230092 - DNA, 603 bp, Homo sapiens
aagcaaatgtggaaaactgttacaaaattattttttcaagactactctttaccactttgtgcctataaattttacaatctagggatgagtttctagaaaaaaaaatagatttccaaagtttactccaggaatgctttaaagtctgaatagatctattaccataggagaaatttagaaaacatttaattcctttcttacataaactgtaccagagcatagggaatagaggaaacataaatgcaggtctcatcccagtgtaaggaacctacagcggtgtccactttatgtgcaataaacagacagctgagtgtaacagactgggagtcagtggaccaggttatggtactgactctgcctctcagtgcaatggggatttgagcaagtcacataacttctctgagcttccatttcatcctgtgaaatgctagamcctataaaatggggctggtgcggtttgcttttcataactcacagatctgtagtaggaatcaagtaagctaacactgtaggaaatgaaaagccttggacacatataagaaatactagtcaagaattcagggaagtccgtgtgcatcttgggacttgacctgtatttgtaattcc

SEQ ID NO: 230093 - DNA, 524 bp, Homo sapiens
tctacaaggaaaactataaaatactgatgaaagaaattaaagaagtcacacacaaaaaatggaaagacatcccatgttaatggactagaaaaattagtattttttaaatgaccatactcctcaaagtaatctacagatacaatgcaatcctgaccaaaataccaatgacattcttcacagaaaaagaaaaaatatcctaaaatttgtatggaaaygcaaaagaccccaaatagcaaaagcaatcctgagcaaaaagaacaaagctggaggcatcacactacccaatttcagaatatactacaaagctatagtaaccaaaacagcatggtactggcataaaaacagacacatagaccaatggaaccaaatagagacctcagaaacaaatccacacttttacagccaattgatttttgacaaaggtgccaagaacacacactagggaaagggtttcttcaataagtgatgctggaaaaactggatatccatatgtaaaagaataaaactagatccccatctctcat

SEQ ID NO: 230094 - DNA, 580 bp, Homo sapiens
cctgcaggccacttgcagtgtctccttgtcttgacccaggccagccatgaggcagcctggggctccccaggcaaacctctcaccctcttccagccctggccagagaggccgatcttgagtcctggataactggaaggtgtggttcaagaaggaggaggaaacagggagcagcctgggagctctccatcagttcagacaggcgggtccacgccggacctcctgtgctgccaagaggcttgctggaggcacaggggcatggcaagggggtccatgagaaatcccagggaatggtttgaggcaaaagtactgtggatattcaaagggagaaggagcagagaagaaggaggataccaaaaaccacggagcaatgaaagtgaccttgartccttacaaaagtccaggttagtttaaccaaaccatggtgtattatcaaatattaatatgatggttcatgcataaggaaaggaatgaatgattccgggaagttaacttgtattcaattgacctcacacctcataacatttcttgatagactaaaatgcagcataaaagagagtaccttaattttggcaagaagatt

SEQ ID NO: 230095 - DNA, 519 bp, Homo sapiens
cagcacatgtaccagcatgtggagagacagaataagatccagcccttcgatatgcatcttgcctcacttttgcaccatccatgcaccaccacattcaagaatcagaccaaagggacctttttgtaagaaacaaagtagccgtttttagatctgttatttttcaaaaccactcagtacaatgattttaactagtaaaattytacccaatcaagaacattttctcttctgtgtggcaaatacagcagatgggtcgattaaaaaaaaaaaaaaaaaaaaaaacagagtgctctcagaagcacaaagaaaaatgtactttttaaaagacaatctataatgtgtacatatctaggtacacaatccagtttttaaatttctcatctattgatatgaaacagatccatattgtccatgttatcttgatgtaaatatcagtattattcctatttttgattcccttcaaccaccattatacatgtgcttgcatgtagataccacacacacaaattatacatacacaac

SEQ ID NO: 230096 - DNA, 596 bp, Homo sapiens
tgttgaaagaagaaacaatgacaggaagttgcatatttttctgacaaatgctgaggaagagcccaaacccacaggccgctttgaatgaagagaacagaaggtctttcttatattagtcagcatgccacactgtgcagtagtgatctgcctggggrttgacccctgacacaaagggagccttgcatacaggtggagcatgaatggagccaatggcctatgacaggaggtggccgaattatccaggcagttagagaggaagctaatgcattaataattattcatacataatacattaatgcattaataatgtagactttacatccatatttgaatactactcttttgcttttagttgtatgacctcaggtgaattatttaaattttataattggcttatctataaaatgaagactgtaatagttcttacctggtggtaactattttggtgagaattaaatgtgttcatatgaattaacatgtacaaaaacaatgcacccagcacatagtagatgctcagtaaacaattttaaaagcatatgtcttatatataatataaaatattatttttatattatattatgtccattgtagtatag

SEQ ID NO: 230097 - DNA, 423 bp, Homo sapiens
cttgataccagatcctgtcattgaggccacactgttcaatccttgggggatctgatgaatggaatgaaataagatagaacttattggactattcatatcactccagaaccagaattttcttactttagttttaaaagaaacttaggtcatacctcctatgatgacctaatcgggacarttgtgaaagtcttcaagacaggaaaatttgtgaccaccttgttagctaatcagagctctaaatgtcacaccatgttttcttcaccccagcagactgaaggttttaaatgtcttgattgccagaatgctgtgttcaatgattacaattttgtttttaccggttttgcaaagcagcaatgacaacagagacttgattaagaaaaatgaaggaagaaatgcaaaaagagaacacatgtagaagggagt

SEQ ID NO: 230098 - DNA, 476 bp, Homo sapiens
aatgctcttgctcaatgatccaggaatcccacttataggtgcaaatcctgaagaaactggcattcaatgagattcatccgcattgtttatattagtgaataaatagaaacaacctaaatgtccacccacaggagaacagataaataaattgtggcatagttatctaatgcaacattacataacagaaaaaaatgaatacattgaatctgtaagtatggcatgagtaaatctaaaaaatataatgttgggaagaggattaaaaagcaagttgcagaatatataaatttatcaaatttacataaaatttaaaatgttccacctaatttctatgcactgcttacatatatwaaaatatgtttatcaatataaaaccatggataagaatgataaacatgaggtcctcttactggttaactgaggaataagtgaataacatggattcaaaaaggatggtgtggccgggtgtggtggatcac

SEQ ID NO: 230099 - DNA, 553 bp, Homo sapiens
agaattctatgcagccacagaaaaagaatgagatcctattctttgaaggaagcaacacggaaagaggtggaggccgttgtcctaagcaaactaacacaggaccagaaagccaaataccctatgttctcacttgtaagtgtgtgttaaacattgartacatacggacacaaagaagggaacaacagataccagagcctacttgaggatagagggaggcaggagggtgaggattaaaaaactacctattgggtactatgcttattacctggctaatgaaatgatctgtacaataaactcccatgataatttacctataaaacaaacctacacaggtacccctgaacctaaaataaaagttaaaaaacatagtcacctcaaatgcaaagctgaaatttagaaagtgtaagtgcttactaattcccataaatgaagtttagttcattcacctctagggaagactgcttgagtatgctcatttccctcctgcagaaaatacaataaactaagatgtccatatgtggctcgactgattgttcttttatattggcagaga

SEQ ID NO: 230100 - DNA, 553 bp, Homo sapiens
agaattctatgcagccacagaaaaagaatgagatcctattctttgaaggaagcaacacggaaagaggtggaggccgttgtcctaagcaaactaacacaggaccagaaagccaaataccctatgttctcacttgtaagtgtgtgttaaacattgagtacatacggacacaaagaagggaacaacagataccagagcctacttgaggatagagggaggcaggagggtgaggattaaaaaactacctattgggtactatgcttattacctggctaatgaaatratctgtacaataaactcccatgataatttacctataaaacaaacctacacaggtacccctgaacctaaaataaaagttaaaaaacatagtcacctcaaatgcaaagctgaaatttagaaagtgtaagtgcttactaattcccataaatgaagtttagttcattcacctctagggaagactgcttgagtatgctcatttccctcctgcagaaaatacaataaactaagatgtccatatgtggctcgactgattgttcttttatattggcagaga

SEQ ID NO: 230101 - DNA, 529 bp, Homo sapiens
aaggaagcaacacggaaagaggtggaggccgttgtcctaagcaaactaacacaggaccagaaagccaaataccctatgttctcacttgtaagtgtgtgttaaacattgagtacatacggacacaaagaagggaacaacagataccagagcctacttgaggatagagggaggcaggagggtgaggattaaaaaactacctattgggtactatgcttattacctggctaatgaaatgatctgtacaataaactcccatgataatttacctataaaacaaacctacacaggtacccctgaacctaaaataaaagttaaaaaacatagkcacctcaaatgcaaagctgaaatttagaaagtgtaagtgcttactaattcccataaatgaagtttagttcattcacctctagggaagactgcttgagtatgctcatttccctcctgcagaaaatacaataaactaagatgtccatatgtggctcgactgattgttcttttatattggcagagagaagtatgtcaaagagaattc

SEQ ID NO: 230102 - DNA, 529 bp, Homo sapiens
aaggaagcaacacggaaagaggtggaggccgttgtcctaagcaaactaacacaggaccagaaagccaaataccctatgttctcacttgtaagtgtgtgttaaacattgagtacatacggacacaaagaagggaacaacagataccagagcctacttgaggatagagggaggcaggagggtgaggattaaaaaactacctattgggtactatgcttattacctggctaatgaaatgatctgtacaataaactcccatgataatttacctataaaacaaacctacacaggtacccctgaacctaaaataaaagttaaaaaacatagtcacctcaaatgcaaagctgaaatttagaaagtgtaagtgcttactaattcccataaatgaagtttagttcattcacctctagggaagactgcttgagtatgctcatttccctcctgcagaaaatacaataaactaagatgtccatatgtggctcgactgattgttcttttatattggcagakagaagtatgtcaaagagaattc

SEQ ID NO: 230103 - DNA, 481 bp, Homo sapiens
tcattattttccatctttgtggaatgaaagctccgtgtgtactgaatctttttacaaatctcttaacttccttaaacgttgtgcttgtttgcggttctcccaatgatgatcacatcatttcctgaacattcccagggtgaactcaatgcagattcttcagattttagggaaaacgtggattggtagaaaaaaaaacaaaaawgaccatggttttcaaaattttttttctatattcttccccattgacatactgtactgtttaaaagtgtcctattatactatatactgagatgttaagcataaaatctttccttagatatgttcctatgacatttcatccatttccaataaaacatgtgggtaagtaagatgtagtggatgtcaaaactaataggtttattttatgcaaaagtatataatctaatagccttccttattaaaggtgacttataaaacagacatttaggcagtgatgtgcagt

SEQ ID NO: 230104 - DNA, 481 bp, Homo sapiens
tcattattttccatctttgtggaatgaaagctccgtgtgtactgaatctttttacaaatctcttaacttccttaaacgttgtgcttgtttgcggttctcccaatgatgatcacatcatttcctgaacattcccagggtgaactcaatgcagattcttcagattttagggaaaacgtggattggtagaaaaaaaaacaaaaaagaccatggttttcaaaattttttttctatattcttccccattgacatactgtacwgtttaaaagtgtcctattatactatatactgagatgttaagcataaaatctttccttagatatgttcctatgacatttcatccatttccaataaaacatgtgggtaagtaagatgtagtggatgtcaaaactaataggtttattttatgcaaaagtatataatctaatagccttccttattaaaggtgacttataaaacagacatttaggcagtgatgtgcagt

SEQ ID NO: 230105 - DNA, 550 bp, Homo sapiens
caatgactccagctcagtcctattaagtttgaacaaatgaaaatattccttaactgtctggttgtccaaaatatgatgaaattattttttacctcgtctcagtgcaatgccaggaatttagcatgttgtgctcctttatcttctcttccttcctctttcctaacctcatcaacatcttcacacctttaagaaatgtttttcctatgatttattacaaaacaactctctcattttgattctctgttattctaaatattccctctctgaacttcttggtttctattccttgcatgttacgttttctgtccttgtttctcttctacctgtattatgtatacttccrtggttccacgatcttttctgtgaggatgactcccaaatctgccttcatttcaggttgtccccttgaattacaggctcacatgtctacttgctgataaggcatgttcatttctatatccaccagtgacttaaaatatagtacctcccaaatgaaattaatttctttgcttgagaattggtttcgcttctgtcttcaataaatgcaact

SEQ ID NO: 230106 - DNA, 550 bp, Homo sapiens
caatgactccagctcagtcctattaagtttgaacaaatgaaaatattccttaactgtctggttgtccaaaatatgatgaaattattttttacctcgtctcagtgcaatgccaggaatttagcatgttgtgctcctttatcttctcttccttcctctttcctaacctcatcaacatcttcacacctttaagaaatgtttttcctatgatttattacaaaacaactctctcattttgattctctgttattctaaatattccctctctgaacttcttggtttctattccttgcatgttacgttttctgtccttgtttctcttctacctgtattatgtatacttccgtggttccacgatcttttctgtgaggatgactcccaaatctgccttcatttcaggttgtccccttgaattacaggctcayatgtctacttgctgataaggcatgttcatttctatatccaccagtgacttaaaatatagtacctcccaaatgaaattaatttctttgcttgagaattggtttcgcttctgtcttcaataaatgcaact

SEQ ID NO: 230107 - DNA, 530 bp, Homo sapiens
ttactcaaataatacgattctaaagttatctgaaacctgtattcaagagcgcttgtctggtttctttccatcctttccatgaaaatccatgaagacataacactctaggattttatttgcttataaaaatctagtaaatacatcagaagttagaaaatgcatcagatttaagcaattaactgtgaatgagacttaaaatcgtcaggtttaaagayccaattgaaaaaaaatttggttattttgtggcctacaataatttaatgtaagaaccgtaattatcactaatcacatataccaagatatagcagaatttttgaaatctcatacaattttggaatacttattaataacatatccaaaaagatacaactcaatgttaaaaataatttcttatttgacaatgcttcccatataatttatcgtatcaaataagcctaattagtgtctcccttttggacacttcagggatcctttgtaatatctcaaagttagtttgaggtcaaaaagacataattttacaatttgaagtt

SEQ ID NO: 230108 - DNA, 591 bp, Homo sapiens
atgatttttataagctgttaatcttgatataattatatatatacatatacatgtgtgtgtrtgtatgttaaacatactcaaataggtgataaatttaaactttttaactctaattttgaaataattacctttactaacatattaaataatggataaatatattatctttaacttaccaacttaataacctgcacactttttaaatcagacaacatatattcattatcaagtgtacatattctcttttccctgtacatattcgtcttgagggatgatatatccgaaatagtgcctcactgtggaaatagtttctgccttctgaaacacaacttgaggatataacagaatttccagcagggaggtatagtttgaaaagattccagaaacgattctgataccacactcactgttgctaatcaatgacaatatgtcacttccatttgagaaattaaatagtaaatgatgtttattactccctagattttaatgtaaagtttaatagttcagtttagttttatacatattttgtcctaagcagtttacagatcaatatttttaaaagtttctactttttattaatttcattaaagt

SEQ ID NO: 230109 - DNA, 591 bp, Homo sapiens
atgatttttataagctgttaatcttgatataattatatatatacatatacatgtgtgtgtgtgtatgttaaacatactcaaataggtgataaatttaaactttttaactctaattttgaaataattacctttactaacatattaaataatggataaatatattatctttaayttaccaacttaataacctgcacactttttaaatcagacaacatatattcattatcaagtgtacatattctcttttccctgtacatattcgtcttgagggatgatatatccgaaatagtgcctcactgtggaaatagtttctgccttctgaaacacaacttgaggatataacagaatttccagcagggaggtatagtttgaaaagattccagaaacgattctgataccacactcactgttgctaatcaatgacaatatgtcacttccatttgagaaattaaatagtaaatgatgtttattactccctagattttaatgtaaagtttaatagttcagtttagttttatacatattttgtcctaagcagtttacagatcaatatttttaaaagtttctactttttattaatttcattaaagt

SEQ ID NO: 230110 - DNA, 409 bp, Homo sapiens
gacatagttttaatactctttccattttaggttttttttttttgtcttaaatctgaatgcagtcatgttcttcaagttttatcctatagaaagaactgscttcctatgaagccacagggattaaagacataaagctgcagatttcattgcggtagaaaaccctactttcctgcctgttggcagaacacttattaggagtttgcagaagcaaagtgcaattattctccatgatgccaggacctacattgttcattaacgtagaacaaaactcagatatattattaagtgtcccagattattcatttgtgagcagactaccaattgtctttccaaatgaattttctttgttctcagtacttttgatcatattcaaaatctcaaagcttttaaaattttcaaaatgggctct

SEQ ID NO: 230111 - DNA, 409 bp, Homo sapiens
gacatagttttaatactctttccattttaggttttttttttttgtcttaaatctgaatgcagtcatgttcttcaagttttatcctatagaaagaactgccttcctatgaarccacagggattaaagacataaagctgcagatttcattgcggtagaaaaccctactttcctgcctgttggcagaacacttattaggagtttgcagaagcaaagtgcaattattctccatgatgccaggacctacattgttcattaacgtagaacaaaactcagatatattattaagtgtcccagattattcatttgtgagcagactaccaattgtctttccaaatgaattttctttgttctcagtacttttgatcatattcaaaatctcaaagcttttaaaattttcaaaatgggctct

SEQ ID NO: 230112 - DNA, 409 bp, Homo sapiens
gacatagttttaatactctttccattttaggttttttttttttgtcttaaatctgaatgcagtcatgttcttcaagttttatcctatagaaagaactgccttcctatgaagccacagggattaaagacataaagctgcagatttcattgcggtagaaaaccctactttcctgcctgttggcagaacacttattaggagtttgcagaagcaaagtgcaattattctccatgatgccaggacctacattrttcattaacgtagaacaaaactcagatatattattaagtgtcccagattattcatttgtgagcagactaccaattgtctttccaaatgaattttctttgttctcagtacttttgatcatattcaaaatctcaaagcttttaaaattttcaaaatgggctct

SEQ ID NO: 230113 - DNA, 388 bp, Homo sapiens
aatattcatttgaaaagggctgagagttcagcttgtagaaaataaagaccaagagggagaagcagcaaagagctacatattagtaggaggtcagcttaagagctaagagggagcaacctcagggccttatggcaattaaagatattgaatatcaaggaattagaaggatttaaagaattatgactgagagtcttctattgtattcactttgacagagttcataaktcttatggactttttacttgcctttgttggctgggtttcattttttaaaattgcagttctacagagatacttagccatgaggcaagacaattatatttgtgctactcaattaaattgtgttacatcttaatgtcagagtctattctctataaattctaccagt

SEQ ID NO: 230114 - DNA, 388 bp, Homo sapiens
aatattcatttgaaaagggctgagagttcagcttgtagaaaataaagaccaagagggagaagcagcaaagagctacatattagtaggaggtcagcttaagagctaagagggagcaacctcagggccttatggcaattaaagatattgaatatcaaggaattagaaggatttaaagaattatgactgagagtcttctattgtattcactttgacagagttcataagtcttatggactttttacttgcctttgttggctgggtttcattttttaaaattgcagttctacagagatacttagccatgaggcaagayaattatatttgtgctactcaattaaattgtgttacatcttaatgtcagagtctattctctataaattctaccagt

SEQ ID NO: 230115 - DNA, 555 bp, Homo sapiens
catccatattcatgaagcatgttctcagagatgttcaaagagacttagaataccacacagtaataatgggagaaggaaacattccactgacagtattagatcattgaagcagaaaattracaaagatattcaggacctgaactaacactgaaccaaatagacttgatagacatacacaaaagtctccactcaagaataatagaatatacattcttatcaccgcatggcacgtattctaaaattgaccacacagttgaacacaaaacactcctcagcaaatgcaaaagaatcagaatcatattaaccagtctctcagaccacagtgcattaaaaatagaattcatgactaagaaaattactcgaaaccatacaattatatggcaattaagcaacctgctcctgaatgacttttgggtatatagtaaaattaaggaagaaatcaagaagttcgttaaaactaataagaactgagatacaacataccagaatctctgggacacagctaaggcagtgttaacaaggaaatttatagcgctaaacacttacatcaaaacg

SEQ ID NO: 230116 - DNA, 472 bp, Homo sapiens
ctgtcattatcccaataaccaaaaataatatctctatcacaggcaatagtgcatattggctaagagattgggcgctggagtcagacaagagccagactgcctgagttcaaattccagctcagtcatttattaagtgaatgtgtaaccacacaaaaccagtctggttcttcaacttttatgtaaaaaagttatgaatagtttttcagttgccatggactcccaggctgaaggtcccataacctgaacatgcccaaatgaaccaaacttgcaatgatgggcggracttaagtgctcagcccaagaagtgggactggattaaaaaggggacactgcatggcaagatccaggatccaatcaaatggagcccttgtggtaccccatggcaggattcagtcagatcatgcctcccagcatcatctcatcacaagacccaatcagataacacttcattaccctattcctataaaaccca

SEQ ID NO: 230117 - DNA, 479 bp, Homo sapiens
taacgttcattgaaaaatccatattcctgcgtttatactcatgaagcttaaccaattacagaagaatacaatacaaatagtttctaaatggacatagaatttaaattcagattttaatgaactaacttctggrcattgtagagtagataatgtagtcagaattttgcaaacgttggagtgtatacttagtaatggagttgattaataaatgtaaatgcagtaagattgagaatggaatagattaaaactttattttattcttcttgccagctctgtggctacatgggtgtgaaccagaacgaggcagaagggatctatttttctatttagtgccaatgagcccccatggatctatgcaggggcagggtgctttgtgcagatgaaggtaaaatccctccctgagagcaggtctgtgctcaggggtgttggcttctccattcacaagcgtcaggtggagcttgggtggaaaccaccttgat

SEQ ID NO: 230118 - DNA, 479 bp, Homo sapiens
taacgttcattgaaaaatccatattcctgcgtttatactcatgaagcttaaccaattacagaagaatacaatacaaatagtttctaaatggacatagaatttaaattcagattttaatgaactaacttctgggcattgtagagtasataatgtagtcagaattttgcaaacgttggagtgtatacttagtaatggagttgattaataaatgtaaatgcagtaagattgagaatggaatagattaaaactttattttattcttcttgccagctctgtggctacatgggtgtgaaccagaacgaggcagaagggatctatttttctatttagtgccaatgagcccccatggatctatgcaggggcagggtgctttgtgcagatgaaggtaaaatccctccctgagagcaggtctgtgctcaggggtgttggcttctccattcacaagcgtcaggtggagcttgggtggaaaccaccttgat

SEQ ID NO: 230119 - DNA, 584 bp, Homo sapiens
ctgacagctcaaaaaaacagaatgtcttcttacctccaaatgacccagcagtggttcttaatcaggctgaaatgacagtcatggaattcagcattgggacaggaacaaagattaccaagtttcaggagtaagttgaaacacaatcaaaggaatctaaggaatttatttaaatgatgcragaagtgaacgacaaaatcaccattctgagaatgaaacccatctgatagagctgaaaaactcactacaagaatttcataatacaatcagaaatgttaacagcagaatagaccaagctgaggaaagaatctcagaacttgaagaccagatctttgaatcaactcaatcagacaaaaatgaataaaaaagcataaacacaacttcagagaaatatgggattatgtaaagagaccaattctgtggctcactggcatccctgaaagagaggaagagagagcaagcaagttggaaaacatatttgatgataactgtccatgaaaatttccccaactttgctaaagagctcgacattcaaattcgggaaatgcaaagaaccccttgagatactacacaagatgtccattccc

SEQ ID NO: 230120 - DNA, 551 bp, Homo sapiens
ggctaacagcagacctttcagcaggaactatacaagccagaagagatagggggcctatattcagcattcttaaagaaaagaaattctaatcaagaatttcatatccagccaaagtaagctttataatcaaaggaggaataagatccttttcagacaaacaaatgctaagggaattcaccaccatcagactcaccttacaagagatccttaagggtgtgctaaacatgggaacagaagattgttaccagcaaccacaaacacacactgaagtacatagaccaccgacataaagcaactatgtaatccagtctgcataacaaccaactaccaacatgatgacaggatcaaatccggcacatatcawtattaaccttaaatgtaaaagggttaaaggccatacttaaaaggcacagagtggcaattgaataaagcaagacccaatgacatgcagttttcaagagacccatttcacatgcaatgacacccataggctcaaagtaaaagaataaagaaaaatctatcaagcaaatataaaacaaaaacaagcaagg

SEQ ID NO: 230121 - DNA, 586 bp, Homo sapiens
aggtccaaaattgaatcagtgataaaaagtctgccaaccagaaaaatccctggatcagacaaattcacagccaaattcrgacagatgtacaaagaagactggtaccattcctgctgaaattattcccaaaaattgagaaggaagaacttctctctaactcatttattaggccagcatcattctgacactgaaacctggcagagacacaacaaaaaaagaaaacttcaggccaatatccatgttgaactacagatgcaaaaatcctcaacaaaattctagcaaatcaagtccagcagcacatcaaaaagctaatctaccacaatcaagcagcctttatttcttgggtacaacgctggttcaacatatgcaaatcaataaatgtgattcatcacataaacagaactgaaaacagaaactgtatgatcatctcaacagacacagaaaaggcttttgataaaattcaacagtccgtcatgttaaaaaccctcaacaaactagatattgaaggaacataactcaaaatttaagagctatctatgacaaacctacagccaacatcatactgaacaagcaaaaggtggaggca

SEQ ID NO: 230122 - DNA, 586 bp, Homo sapiens
aggtccaaaattgaatcagtgataaaaagtctgccaaccagaaaaatccctggatcagacaaattcacagccaaattcggrcagatgtacaaagaagactggtaccattcctgctgaaattattcccaaaaattgagaaggaagaacttctctctaactcatttattaggccagcatcattctgacactgaaacctggcagagacacaacaaaaaaagaaaacttcaggccaatatccatgttgaactacagatgcaaaaatcctcaacaaaattctagcaaatcaagtccagcagcacatcaaaaagctaatctaccacaatcaagcagcctttatttcttgggtacaacgctggttcaacatatgcaaatcaataaatgtgattcatcacataaacagaactgaaaacagaaactgtatgatcatctcaacagacacagaaaaggcttttgataaaattcaacagtccgtcatgttaaaaaccctcaacaaactagatattgaaggaacataactcaaaatttaagagctatctatgacaaacctacagccaacatcatactgaacaagcaaaaggtggaggca

SEQ ID NO: 230123 - DNA, 586 bp, Homo sapiens
aggtccaaaattgaatcagtgataaaaagtctgccaaccagaaaaatccctggatcagacaaattcacagccaaattcggacagatgtacaaagaagactggtaccaytcctgctgaaattattcccaaaaattgagaaggaagaacttctctctaactcatttattaggccagcatcattctgacactgaaacctggcagagacacaacaaaaaaagaaaacttcaggccaatatccatgttgaactacagatgcaaaaatcctcaacaaaattctagcaaatcaagtccagcagcacatcaaaaagctaatctaccacaatcaagcagcctttatttcttgggtacaacgctggttcaacatatgcaaatcaataaatgtgattcatcacataaacagaactgaaaacagaaactgtatgatcatctcaacagacacagaaaaggcttttgataaaattcaacagtccgtcatgttaaaaaccctcaacaaactagatattgaaggaacataactcaaaatttaagagctatctatgacaaacctacagccaacatcatactgaacaagcaaaaggtggaggca

SEQ ID NO: 230124 - DNA, 586 bp, Homo sapiens
aggtccaaaattgaatcagtgataaaaagtctgccaaccagaaaaatccctggatcagacaaattcacagccaaattcggacagatgtacaaagaagactggtaccattcctgctgaaattaytcccaaaaattgagaaggaagaacttctctctaactcatttattaggccagcatcattctgacactgaaacctggcagagacacaacaaaaaaagaaaacttcaggccaatatccatgttgaactacagatgcaaaaatcctcaacaaaattctagcaaatcaagtccagcagcacatcaaaaagctaatctaccacaatcaagcagcctttatttcttgggtacaacgctggttcaacatatgcaaatcaataaatgtgattcatcacataaacagaactgaaaacagaaactgtatgatcatctcaacagacacagaaaaggcttttgataaaattcaacagtccgtcatgttaaaaaccctcaacaaactagatattgaaggaacataactcaaaatttaagagctatctatgacaaacctacagccaacatcatactgaacaagcaaaaggtggaggca

SEQ ID NO: 230125 - DNA, 418 bp, Homo sapiens
aatcattccacaaaaatctgtagcatttctacataccaacaacatccaaggtgagaggcaaatcaagattgcaatcacatttacaatactcacaccaaaatttacctaggaatacagctaaccagggaggtgaaagatctctataacaagaattaaaaacgytgctgaaaaaaatcagagaggacacaaacatgaaaacattccatgctaatggataggaagaatcacctttgttagaatggccatactgcccaaggcaatttacagattaattactatttctatcaagcttccaaaggcattcttcagggaactaggaaaaactattctaaaattcatatggaaccaaaaaagagcccaaggcaatcctaagcagaaagaaaaaagccgggggcatcacatttcccaacttcaaatg

SEQ ID NO: 230126 - DNA, 418 bp, Homo sapiens
aatcattccacaaaaatctgtagcatttctacataccaacaacatccaaggtgagaggcaaatcaagattgcaatcacatttacaatactcacaccaaaatttacctaggaatacagctaaccagggaggtgaaagatctctataacaagaattaaaaacgttgctgaaaaaaatcagagaggacacaaacatgaaaacattccatgctaatggataggaagaatcacctttgttagaatggccatactgcccaaggcaatttacagattaattactatttctatcaagcttccaaaggcattcttcagggaactaggaaaaactattctaaaattcatatggaaccaaaaaagagcccaaggcaatcctaagcagaaagaaaaaagcygggggcatcacatttcccaacttcaaatg

SEQ ID NO: 230127 - DNA, 629 bp, Homo sapiens
acaccaaaatttacctaggaatacagctaaccagggaggtgaaagatctctataacaagaattaaaaacgttgctgaaaaaaatcagagaggacacaaacatgaaaacattccatgctaatggataggaagaatcacctttgttagaatggccatactgcccaaggcaatttacagattaattactatttctatcaagcttccaaaggcattcttcagggaactaggaaaaactattctaaaattcatatggaaccaaaaaagagcccaaggcaatcctaagcagaaagaaaaaagccgggggcatcacatttcccaacttcaaatgatactatcaagctaaagtaacaaaaacaacttggcactggtacagaaacagacacatataccaaygtagcagaatagaaaacccagaaataaagccacacatgtaaaactatctgatcttcaacaaagttgacaaaagcaagaaatgtggaaaagactccctattcaataaattgtgctgggataattggctacccatatgcagaagattgaaactggactccctccttaccctatataaaaaaatcaactcaagatgaattaaagacttacatgtaaaacctaaaactatgaaaaccccag

SEQ ID NO: 230128 - DNA, 629 bp, Homo sapiens
acaccaaaatttacctaggaatacagctaaccagggaggtgaaagatctctataacaagaattaaaaacgttgctgaaaaaaatcagagaggacacaaacatgaaaacattccatgctaatggataggaagaatcacctttgttagaatggccatactgcccaaggcaatttacagattaattactatttctatcaagcttccaaaggcattcttcagggaactaggaaaaactattctaaaattcatatggaaccaaaaaagagcccaaggcaatcctaagcagaaagaaaaaagccgggggcatcacatttcccaacttcaaatgatactatcaagctaaagtaacaaaaacaacttggcactggtacagaaacagacacatataccaacgtagcagaatagaaaacccagaaataaagccacacatgtaaaactatctgatcttcaacaaagttgacaaaagcaagaaatgtggaaaagactccctattcaataaattgtgctgggataattggctacccatatgcagaagattgaaactggactccytccttaccctatataaaaaaatcaactcaagatgaattaaagacttacatgtaaaacctaaaactatgaaaaccccag

SEQ ID NO: 230129 - DNA, 424 bp, Homo sapiens
aagtggaagctaaacattgaatatgcatggacacacagcaggggacaagacatagcaggacctatttgagggcggaaggtgaaagtagggkgaggattgagaaactacttatcaggtactatgtttattgctccagtgatgaaataatatgcacatcaaacccccatgacacacaatttccccatgtatcaaacctgcatatataccccctgaacctaaaataaaagttggaagaattagaaaaaaaaaaaaggagtgcctaacttgggggttgttgtaatgttcgcttaacaaacacacagtcttttgggcatctaaatcacagcacagaggctctggggcatgggatctagtgacctcatacagtggttgagataatcagaatatagacagtatcaaacatatctaattactttacaaattt

SEQ ID NO: 230130 - DNA, 543 bp, Homo sapiens
tgagttccgttgttttgatttttagatcccacaaataaatgagaacatggcaatgtttgtctttctatgcctggcctatttcacttaacatartgacctccagttccatccatgctgtcgcaagtgacaggatctcattctcttttatggctgaagagtactccattttgtatgtgaaccacattttcttcattcatctgttgatgaacacttagggtgtttccaaatcttagctgttataaacagtattgcaacaaataaaagagtgcagatggaaaattgattttgatggcttttttctttaataagacattaatttcttcatgtataactggaaggcaaacaaatgatccatttgcttagtttattcttgaatccataatataagtgacagaaatggattattaaaatatacttgaatttggggaagaatgatatggacacattttaaatcaaaacatgatgaattggctgtttaacctactacctcattggccaatctggggcaagatgaaagtatttgtaaacactgttttggcaatt

SEQ ID NO: 230131 - DNA, 555 bp, Homo sapiens
gagttccgttgttttgatttttagatcccacaaataaatgagaacatggcaatgtttgtctttctatgcctggcctatttcacttaacatagtgacctccagttccatccatgctgtcgcaagtgacaggatctcattctcttttatggctgaagagtactccattttgtatgtgaaccacattttcttcattcatctgttgatgaacacttagggtgtttccaaatcttagctgttataaacagtattgcaacaaataaaagagtgcagatggaaaattgattttgatggcttttttctttaataaracattaatttcttcatgtataactggaaggcaaacaaatgatccatttgcttagtttattcttgaatccataatataagtgacagaaatggattattaaaatatacttgaatttggggaagaatgatatggacacattttaaatcaaaacatgatgaattggctgtttaacctactacctcattggccaatctggggcaagatgaaagtatttgtaaacactgttttggcaattatgtgtaaagaga

SEQ ID NO: 230132 - DNA, 555 bp, Homo sapiens
gagttccgttgttttgatttttagatcccacaaataaatgagaacatggcaatgtttgtctttctatgcctggcctatttcacttaacatagtgacctccagttccatccatgctgtcgcaagtgacaggatctcattctcttttatggctgaagagtactccattttgtatgtgaaccacattttcttcattcatctgttgatgaacacttagggtgtttccaaatcttagctgttataaacagtattgcaacaaataaaagagtgcagatggaaaattgattttgatggcttttttctttaataagacattaatttcttcatgtataactggaaggcaaacaaatgatccatttgcttagtttattcttgaatccataatataagtracagaaatggattattaaaatatacttgaatttggggaagaatgatatggacacattttaaatcaaaacatgatgaattggctgtttaacctactacctcattggccaatctggggcaagatgaaagtatttgtaaacactgttttggcaattatgtgtaaagaga

SEQ ID NO: 230133 - DNA, 325 bp, Homo sapiens
ctggggcgaacctggaagctgaattggtgctggggtgagcctggaagytaagtctatgaaaatgagccacatattgagaccacagggatcagtctggcattaggcacactggtattagggcacactggtacctgattccatgggaacaggtctggtgcctgagaccatgaaggtggatctgtagcctggaacaatgggaccggctttgtgccaagattcactggtaggagtctggtgccaaaatccatgtgagagtcaggcactcacttcactttcctttccccatgcaaaaggtatctctctctcaactgtgatgtgtaagctt

SEQ ID NO: 230134 - DNA, 579 bp, Homo sapiens
gataatttactatgcatgaatcaattgactaatgtgtcaatgaaggacagatagcaagcaaacacctgcctactataatttattactcaatataaatgaaacttatcacattctctttttctgattaccagraaaaaaaatccttttagttcattttggaagaaaattgaaacctacattaaaagcattataatttttggtaaaatatacccttgagcaaatatatgatatgaaaaatgttaattgtaagttggctgtcattcctacctaacgtgtagtttatctcaacacaaagctgagcagccaagcacaaagataatgctaattttttatagccattaatagttaatgctagaaaaactgtcatattttgttttaaaatattccctagaatgtagtatttcatatctatgacatttcataggaatacaaaaatgcatacctctcaacatttataacaacaacaaaatccttcaggtgtgatattttggcaaaaataaggaagaaagttccaacttttgaataaattaatctttagtactttttcttatagttgaaaaatgagacagaaaaattctt

SEQ ID NO: 230135 - DNA, 443 bp, Homo sapiens
taatgtgagagtttttgtagtgagaagagcaattcagaaagtagaactggcttatgtgaaatcgctgtgkcaggagagcaaggagtgttgggggcctgagtgaaggctggtgtggcacagtgagcagagtgggaagccctgtgcatggtgacttggggggacacagaaagaccgtacaggattttagaggcctagctgagtctttggactttatctcctgggcattggaataaccagaagtccttgacaccactgagataatgggaacacattaacaccattttgacctgtggatgacatgatcaggcttccatctcaaagataactgtggatacattggggataatagacaggaaggggtctgatatggtttggctctgtgttcccacccaaatctcatgttgaattgtagtccccaatattggaggaggaacctggtggga

SEQ ID NO: 230136 - DNA, 440 bp, Homo sapiens
tgtgagagtttttgtagtgagaagagcaattcagaaagtagaactggcttatgtgaaatcgctgtgtcaggagagcaaggagtkttgggggcctgagtgaaggctggtgtggcacagtgagcagagtgggaagccctgtgcatggtgacttggggggacacagaaagaccgtacaggattttagaggcctagctgagtctttggactttatctcctgggcattggaataaccagaagtccttgacaccactgagataatgggaacacattaacaccattttgacctgtggatgacatgatcaggcttccatctcaaagataactgtggatacattggggataatagacaggaaggggtctgatatggtttggctctgtgttcccacccaaatctcatgttgaattgtagtccccaatattggaggaggaacctggtggga

SEQ ID NO: 230137 - DNA, 435 bp, Homo sapiens
tttgtagtgagaagagcaattcagaaagtagaactggcttatgtgaaatcgctgtgtcaggagagcaaggagtgttgggggcctgagtgaaggctggtgtggcacagtgagcagagtgggragccctgtgcatggtgacttggggggacacagaaagaccgtacaggattttagaggcctagctgagtctttggactttatctcctgggcattggaataaccagaagtccttgacaccactgagataatgggaacacattaacaccattttgacctgtggatgacatgatcaggcttccatctcaaagataactgtggatacattggggataatagacaggaaggggtctgatatggtttggctctgtgttcccacccaaatctcatgttgaattgtagtccccaatattggaggaggaacctggtgggaggtta

SEQ ID NO: 230138 - DNA, 440 bp, Homo sapiens
tgtgagagtttttgtagtgagaagagcaattcagaaagtagaactggcttatgtgaaatcgctgtgtcaggagagcaaggagtgttgggggcctgagtgaaggctggtgtggcacagtgagcagagtgggaagccctgtgcatggtgacttgsggggacacagaaagaccgtacaggattttagaggcctagctgagtctttggactttatctcctgggcattggaataaccagaagtccttgacaccactgagataatgggaacacattaacaccattttgacctgtggatgacatgatcaggcttccatctcaaagataactgtggatacattggggataatagacaggaaggggtctgatatggtttggctctgtgttcccacccaaatctcatgttgaattgtagtccccaatattggaggaggaacctggtggga

SEQ ID NO: 230139 - DNA, 449 bp, Homo sapiens
tttgtagtgagaagagcaattcagaaagtagaactggcttatgtgaaatcgctgtgtcaggagagcaaggagtgttgggggcctgagtgaaggctggtgtggcacagtgagcagagtgggaagccctgtgcatggtgacttggggggacacagaaagaccgtacaggattttagaggcctagctgagtctttggactttatctcctgggcattggaataaccagaastccttgacaccactgagataatgggaacacattaacaccattttgacctgtggatgacatgatcaggcttccatctcaaagataactgtggatacattggggataatagacaggaaggggtctgatatggtttggctctgtgttcccacccaaatctcatgttgaattgtagtccccaatattggaggaggaacctggtgggaggttattggactatggagg

SEQ ID NO: 230140 - DNA, 464 bp, Homo sapiens
gatctgcaggatgaaaaaaattaatgtgagagtttttgtagtgagaagagcaattcagaaagtagaactggcttatgtgaaatcgctgtgtcaggagagcaaggagtgttgggggcctgagtgaaggctggtgtggcacagtgagcagagtgggaagccctgtgcatggtgacttggggggacacagaaagaccgtacaggattttagaggcctagctgagtctttggactttatctcctgggcattggaataaccagaagtccttgacaccactgagataatgggaayacattaacaccattttgacctgtggatgacatgatcaggcttccatctcaaagataactgtggatacattggggataatagacaggaaggggtctgatatggtttggctctgtgttcccacccaaatctcatgttgaattgtagtccccaatattggaggaggaacctggtggga

SEQ ID NO: 230141 - DNA, 464 bp, Homo sapiens
gatctgcaggatgaaaaaaattaatgtgagagtttttgtagtgagaagagcaattcagaaagtagaactggcttatgtgaaatcgctgtgtcaggagagcaaggagtgttgggggcctgagtgaaggctggtgtggcacagtgagcagagtgggaagccctgtgcatggtgacttggggggacacagaaagaccgtacaggattttagaggcctagctgagtctttggactttatctcctgggcattggaataaccagaagtccttgacaccactgagataatgggaacmcattaacaccattttgacctgtggatgacatgatcaggcttccatctcaaagataactgtggatacattggggataatagacaggaaggggtctgatatggtttggctctgtgttcccacccaaatctcatgttgaattgtagtccccaatattggaggaggaacctggtggga

SEQ ID NO: 230142 - DNA, 449 bp, Homo sapiens
tttgtagtgagaagagcaattcagaaagtagaactggcttatgtgaaatcgctgtgtcaggagagcaaggagtgttgggggcctgagtgaaggctggtgtggcacagtgagcagagtgggaagccctgtgcatggtgacttggggggacacagaaagaccgtacaggattttagaggcctagctgagtctttggactttatctcctgggcattggaataaccagaagtccttgacaccactgagataatgggaacacattaacaccattttgacctgtggatgacatgatcaggcttccatctcaaagataactgtggatacattggggataatagacaggaaggggtctgatatggtttggctctgtgttcccacccaaatctcatgttgaattgtagtccccaatattgraggaggaacctggtgggaggttattggactatggagg

SEQ ID NO: 230143 - DNA, 611 bp, Homo sapiens
cctgtggatgacatgatcaggcttccatctcaaagataactgtggatacattggggataatagacaggaaggggtctgatatggtttggctctgtgttcccacccaaatctcatgttgaattgtagtccccaatattggaggaggaacctggtgggaggttattggactatggaggcagatctctccttgctgttttcatgatagtgagtgagttctcacgagatctggttgtgtgaaagtgggyagcacctctcccttggctctctctctcccttctgccagccatgtgaagatgtggttgcttccctttggccttcagccatgattgtaaattttctgagtcctctccaactatgctttctgtacagcctgtggaactgtgagtcaattaaacctcttttcttcataaattacccagtctcaggtagttctttatagcagtgtgagaacagactaataccagcatcaagagtagctgggcgagatcagctggccacatgatggtgtcactgtgcccagggagttgatggtggttaatacagataaattctagagataaaattgacttgattaagaagacatgaatgtgaggaagacagaagagtcagga

SEQ ID NO: 230144 - DNA, 611 bp, Homo sapiens
cctgtggatgacatgatcaggcttccatctcaaagataactgtggatacattggggataatagacaggaaggggtctgatatggtttggctctgtgttcccacccaaatctcatgttgaattgtagtccccaatattggaggaggaacctggtgggaggttattggactatggaggcagatctctccttgctgttttcatgatagtgagtgagttctcacgagatctggttgtgtgaaagtgggcagcacctcycccttggctctctctctcccttctgccagccatgtgaagatgtggttgcttccctttggccttcagccatgattgtaaattttctgagtcctctccaactatgctttctgtacagcctgtggaactgtgagtcaattaaacctcttttcttcataaattacccagtctcaggtagttctttatagcagtgtgagaacagactaataccagcatcaagagtagctgggcgagatcagctggccacatgatggtgtcactgtgcccagggagttgatggtggttaatacagataaattctagagataaaattgacttgattaagaagacatgaatgtgaggaagacagaagagtcagga

SEQ ID NO: 230145 - DNA, 611 bp, Homo sapiens
cctgtggatgacatgatcaggcttccatctcaaagataactgtggatacattggggataatagacaggaaggggtctgatatggtttggctctgtgttcccacccaaatctcatgttgaattgtagtccccaatattggaggaggaacctggtgggaggttattggactatggaggcagatctctccttgctgttttcatgatagtgagtgagttctcacgagatctggttgtgtgaaagtgggcagcacctctcccttggctctctctctcccttctgccagccatgtgaagatgtggttgcttccctttggccttcagccatgattgtaaattttctgagkcctctccaactatgctttctgtacagcctgtggaactgtgagtcaattaaacctcttttcttcataaattacccagtctcaggtagttctttatagcagtgtgagaacagactaataccagcatcaagagtagctgggcgagatcagctggccacatgatggtgtcactgtgcccagggagttgatggtggttaatacagataaattctagagataaaattgacttgattaagaagacatgaatgtgaggaagacagaagagtcagga

SEQ ID NO: 230146 - DNA, 461 bp, Homo sapiens
gaggtacggagcgagagagagagtgtgtggctggaacttgaagttttttttttatttgaagttatatactttgggaataaacttaggttttcatrctctgccgagcttaagcaagatggcaaatgcatacattgagctctctaatcataacctcaatatatggattcttgttcattaaaatacttgcaccagcaaatatgatttccaaaatttgtgttttggaggtaattaagtaactgtataaaaataaatgctttcccctcctttccccagtgactttccatacttttaaaataataaaaataatgtatatatattttttaatttttaaaagcaacttaactctttgtttttaggaaactatagattaaggaaaacctttgatcccgtgtgtactagggatccacaggaatgttcctcagccctgtggcatgaggtctttctcaaagtccaggcagcta

SEQ ID NO: 230147 - DNA, 609 bp, Homo sapiens
gtcttactatgggatgctgaacaagctaaacttttttattttattttatttttaagttctgggatacatgtgcagaatgtgcaggtttgttacataggtatacatgtgccatggtggtttgctgaacttatcagcccatcatctaggttataagccccgcatgcattargtgtttgtcctaatgctctccctcctcttgtccctcatccccctacaggccctgatgtgtgatgttcccctccctgtgtccatgtgttctcatttgaacaagctaaacttcctaaacttcagccctaccatatgtacattggaaattataacagtgccttgtatggcatttagtcacaatgtctggtgtagaatagatgctctaaaattattattattatatgctgaagggcagacatctcatcttatttttttttttcacttaaaagaatatattttttcagagacaagatctcgctatgttgctcaggcaggtctcaaactcctgagctcaagtgattttcccatcttggtctcccgaagtgctgggattacaggcgtaagccaccatgcttgggccacatcttattttcattgtgttcagaatacaatatagggttg

SEQ ID NO: 230148 - DNA, 584 bp, Homo sapiens
gtatcagttgtccttgccctggattcccacgggaaggacatggatggactcagatggatgaatgcacatgcattacggrataggagccctgagctcagggaatgcaaatcccttgtaaagatccctaactatgcctagtctttgttccagaaggagataccaacatgcttgaaaagatggtcaaaacaaagggcagtctgtgtctgctcgtaaagtgtgcagaaatgtgagggactcatgaaaacatgtcacacaatactttcctcttatagtagacaagtgagtctgtatgcacatggggtactggatgaaatactttatcaaaactggtcagaaattcagacaaaaatttaattcaatcaaacaactgcatgtaataaataatattttcgtgtggctaccagtgactcacaagtccagctgcttcaaaaaacatcctaattctctagccccatcacagttcaattcaatataatctgtggggaggggcctggcctcagtatttttaaagctttccaggttactttaatgagtaatcaagtcagggctgacaatcactaagccaaaataagcctactactatg

SEQ ID NO: 230149 - DNA, 495 bp, Homo sapiens
tcagttcctgtgtagacagaacctaaaatctggggagaggcaagatcaactaatttgttttttttactcacttgacaagtattttgactaaagcacttaaggattgtggtgttgatttaaaaaaaaaatgtttaacaattttgtaaaagacatttttttgcagttttccaacaaaatcttgtaagcgaagcatgttttctttctccttatctcaacccaaatggtatgctattcctcatattttctttttttaaaaatcttgtattttagattaaggggtacatgtraaggtttgttatgtaggaaaatagattgtttcatcacccggatactgagcctagtacccaatagttatttttcctgatcctgtctctcctcccaccgttcatcctcaagtaggcctcagtgtgtgttgttcccctctttgtgtccatgtgttctcatcatttagctcccaattatgtggtatttggttttgaacatgtggtatttggt

SEQ ID NO: 230150 - DNA, 568 bp, Homo sapiens
gtgtcactgggctgtgtatttcagtgtatttttttttttagtggctggtaacaggcttttctttccatatttagtacttcctttaggagccttataaggcatgtctggtggtaaaaaaaaaaatcttctcagcacttctttgtctgaaaaggatcttatttctccttcacttatgaagctcaggttggttagatttgaaatcttggtgggaattccatttatctaagaatgttgaatattggctcccaacctcttctggcttgtgaggtttctgctaataggtctgctgttagtctaatggacttccctttgtacctttgtaggttatctctcattactttttctctgcctttaagatttttttgcttcatttcaagcttggagaatctgatartcatgtctcttggggatgattttcttgtgaaggattttgcagggttctctgcattttcagaatctgaatgttggtctctttagctaggttgggaaaggtctcatggatgaaatcctaaaatatgttttcaagtagtttccattctccccatctctttcagagacaccaatgagt

SEQ ID NO: 230151 - DNA, 568 bp, Homo sapiens
gtgtcactgggctgtgtatttcagtgtatttttttttttagtggctggtaacaggcttttctttccatatttagtacttcctttaggagccttataaggcatgtctggtggtaaaaaaaaaaatcttctcagcacttctttgtctgaaaaggatcttatttctccttcacttatgaagctcaggttggttagatttgaaatcttggtgggaattccatttatctaagaatgttgaatattggctcccaacctcttctggcttgtgaggtttctgctaataggtctgctgttagtctaatggacttccctttgtacctttgtaggttatctctcattactttttctctgcctttaagatttttttgcttcatttcaagcttggagaatctgatagtcatgtctcttggggatgattttcttgtgaaggwttttgcagggttctctgcattttcagaatctgaatgttggtctctttagctaggttgggaaaggtctcatggatgaaatcctaaaatatgttttcaagtagtttccattctccccatctctttcagagacaccaatgagt

SEQ ID NO: 230152 - DNA, 532 bp, Homo sapiens
tggagaatctgatagtcatgtctcttggggatgattttcttgtgaaggattttgcagggttctctgcattttcagaatctgaatgttggtctctttagctaggttgggaaaggtctcatggatgaaatcctaaaatatgttttcaagtagtttccattctccccatctctttcagagacaccaatgagtcatagattcggtctctttacataattctatgtttctcagagatttcttactttcactctttcttctttcttcttgtctggctgtcttatttcagaaagccagtcttcaagctctgagattctttcctcagcttggtctatcctgctgttaatacttgccattgcattatgacattcttgtagcgtgtttttcagctytatcgggtgggttacattcttttctctacagctattttatctgtcagctcctgtatcattttattgtgcctcttagcttccgtagattgggtttcaacattctgcttaatcttaatgatcttcattcatatccatattctgaatta

SEQ ID NO: 230153 - DNA, 595 bp, Homo sapiens
cactggtgagcacaggactgtgtgagttctccttgcacattcacgtgggtggtagtagccgctcagaacaggggtgggtcctctgttctcggtgcctattgtcacactggtggtagtgtcggtgcaggggcagggcrttggcaggggcggggctggcgggcttcatgcccactcatcaatgctccaacagtaatggcagtatggtggggggtcgagagggtgaagtgcactcaggatggcagcagtagcatggcacacacactgtggcaggaaaggggaggcaaggtccacccacacacacatgcactggcaaaacgatgtgggggatggccgtgggctagtgcatgcaggcaaagtggcacggggagactgcagtgggggcagggcacagttaggctgatgtgtgtacatgggggccactctgcagcagatctctgctggtcaggcacagtcagccagcacaggaactatgatgcaggtcctcaggaggtagcctccactgcaccccgctgtgaagctgcactgcaagcaggtgtggccaggctggggccccaggaggggcgagcagactgaaggatgcttaggtcagactggc

SEQ ID NO: 230154 - DNA, 595 bp, Homo sapiens
cactggtgagcacaggactgtgtgagttctccttgcacattcacgtgggtggtagtagccgctcagaacaggggtgggtcctctgttctcggtgcctattgtcacactggtggtagtgtcggtgcaggggcagggcgttggcaggggcggggctggcgggcttcatgcccactcatcaatgctccaacagtaatggcagtatggtggggggtcgagagggtgaagtgcactcaggatggcagcagtagcatggcacacacactgtggcaggaaaggggaggcaaggtccacccacacacacatgcastggcaaaacgatgtgggggatggccgtgggctagtgcatgcaggcaaagtggcacggggagactgcagtgggggcagggcacagttaggctgatgtgtgtacatgggggccactctgcagcagatctctgctggtcaggcacagtcagccagcacaggaactatgatgcaggtcctcaggaggtagcctccactgcaccccgctgtgaagctgcactgcaagcaggtgtggccaggctggggccccaggaggggcgagcagactgaaggatgcttaggtcagactggc

SEQ ID NO: 230155 - DNA, 574 bp, Homo sapiens
gcagatctctgctggtcaggcacagtcagccagcacaggaactatgatgcaggtcctcaggakgtagcctccactgcaccccgctgtgaagctgcactgcaagcaggtgtggccaggctggggccccaggaggggcgagcagactgaaggatgcttaggtcagactggccctgtctcaggggcaagactgcctgcagagttcagtctgacagttgccctagggctgaagtctcctatgagaacaagtctagcctaggccaatgggtgtccctgcccggttctccactacagaatgctcccacacacaaccttctgggctttgcacagtctggagttcccccattaccactttataagcaggtcttcctgacaactcaagtgtccctggtggttgtagggtctcctcctttcaggaattcagggacctgcgacaagaggaggttgccccttgcctgttcaactcacctctcctccaggagattttggggacctggaatgagtcctggtgcacggttgccccttgcagggttcccggcttcctcccccttcagcccaacatctgtgtcttccctct

SEQ ID NO: 230156 - DNA, 549 bp, Homo sapiens
tggtcaggcacagtcagccagcacaggaactatgatgcaggtcctcaggaggtagcctccactgcaccccgctgtgaagctgcactgmaagcaggtgtggccaggctggggccccaggaggggcgagcagactgaaggatgcttaggtcagactggccctgtctcaggggcaagactgcctgcagagttcagtctgacagttgccctagggctgaagtctcctatgagaacaagtctagcctaggccaatgggtgtccctgcccggttctccactacagaatgctcccacacacaaccttctgggctttgcacagtctggagttcccccattaccactttataagcaggtcttcctgacaactcaagtgtccctggtggttgtagggtctcctcctttcaggaattcagggacctgcgacaagaggaggttgccccttgcctgttcaactcacctctcctccaggagattttggggacctggaatgagtcctggtgcacggttgccccttgcagggttcccggcttcctcccccttcagcccaacatct

SEQ ID NO: 230157 - DNA, 574 bp, Homo sapiens
gcagatctctgctggtcaggcacagtcagccagcacaggaactatgatgcaggtcctcaggaggtagcctccactgcaccccgctgtgaagctgcactgcaagcaggtgtggccaggctggggccccaggaggggygagcagactgaaggatgcttaggtcagactggccctgtctcaggggcaagactgcctgcagagttcagtctgacagttgccctagggctgaagtctcctatgagaacaagtctagcctaggccaatgggtgtccctgcccggttctccactacagaatgctcccacacacaaccttctgggctttgcacagtctggagttcccccattaccactttataagcaggtcttcctgacaactcaagtgtccctggtggttgtagggtctcctcctttcaggaattcagggacctgcgacaagaggaggttgccccttgcctgttcaactcacctctcctccaggagattttggggacctggaatgagtcctggtgcacggttgccccttgcagggttcccggcttcctcccccttcagcccaacatctgtgtcttccctct

SEQ ID NO: 230158 - DNA, 574 bp, Homo sapiens
gcagatctctgctggtcaggcacagtcagccagcacaggaactatgatgcaggtcctcaggaggtagcctccactgcaccccgctgtgaagctgcactgcaagcaggtgtggccaggctggggccccaggaggggcgagcagactgaaggatgctyaggtcagactggccctgtctcaggggcaagactgcctgcagagttcagtctgacagttgccctagggctgaagtctcctatgagaacaagtctagcctaggccaatgggtgtccctgcccggttctccactacagaatgctcccacacacaaccttctgggctttgcacagtctggagttcccccattaccactttataagcaggtcttcctgacaactcaagtgtccctggtggttgtagggtctcctcctttcaggaattcagggacctgcgacaagaggaggttgccccttgcctgttcaactcacctctcctccaggagattttggggacctggaatgagtcctggtgcacggttgccccttgcagggttcccggcttcctcccccttcagcccaacatctgtgtcttccctct

SEQ ID NO: 230159 - DNA, 574 bp, Homo sapiens
gcagatctctgctggtcaggcacagtcagccagcacaggaactatgatgcaggtcctcaggaggtagcctccactgcaccccgctgtgaagctgcactgcaagcaggtgtggccaggctggggccccaggaggggcgagcagactgaaggatgcttaggtcagactggccctgtctcaggggcaagactgcctgcagagttcagtctgacagttgccctagggctgaagtctcctatgagaacaagtctagcctaggccaatgggtgtccctgcccggttctccactacagaatgctcccacacacaaccttctgggctttgcacagtctggagttcccccattaccactttataagcaggtyttcctgacaactcaagtgtccctggtggttgtagggtctcctcctttcaggaattcagggacctgcgacaagaggaggttgccccttgcctgttcaactcacctctcctccaggagattttggggacctggaatgagtcctggtgcacggttgccccttgcagggttcccggcttcctcccccttcagcccaacatctgtgtcttccctct

SEQ ID NO: 230160 - DNA, 564 bp, Homo sapiens
agccagcacaggaactatgatgcaggtcctcaggaggtagcctccactgcaccccgctgtgaagctgcactgcaagcaggtgtggccaggctggggccccaggaggggcgagcagactgaaggatgcttaggtcagactggccctgtctcaggggcaagactgcctgcagagttcagtctgacagttgccctagggctgaagtctcctatgagaacaagtctagcctaggccaatgggtgtccctgcccggttctccactacagaatgctcccacacacaaccttctgggctttgcacagtctggagttcccccattaccactttataagcaggtcttcctgacaactcaagtgtccctggtggttgtrgggtctcctcctttcaggaattcagggacctgcgacaagaggaggttgccccttgcctgttcaactcacctctcctccaggagattttggggacctggaatgagtcctggtgcacggttgccccttgcagggttcccggcttcctcccccttcagcccaacatctgtgtcttccctctgtctgctctcaaagcct

SEQ ID NO: 230161 - DNA, 527 bp, Homo sapiens
agccagcacaggaactatgatgcaggtcctcaggaggtagcctccactgcaccccgctgtgaagctgcactgcaagcaggtgtggccaggctggggccccaggaggggcgagcagactgaaggatgcttaggtcagactggccctgtctcaggggcaagactgcctgcagagttcagtctgacagttgccctagggctgaagtctcctatgagaacaagtctagcctaggccaatgggtgtccctgcccggttctccactacagaatgctcccacacacaaccttctgggctttgcacagtctggagttcccccattaccactttataagcaggtcttcctgacaactcaagtgtccctggtggttgtagggtctcctcctttcaggaattcagggacctgcgacaagaggaggttgccccttgcctgttcaactcacctctcctccaggagattttggggacctggaatgagtcctggtgcacgrttgccccttgcagggttcccggcttcctcccccttcagccc

SEQ ID NO: 230162 - DNA, 565 bp, Homo sapiens
tgctggtcaggcacagtcagccagcacaggaactatgatgcaggtcctcaggaggtagcctccactgcaccccgctgtgaagctgcactgcaagcaggtgtggccaggctggggccccaggaggggcgagcagactgaaggatgcttaggtcagactggccctgtctcaggggcaagactgcctgcagagttcagtctgacagttgccctagggctgaagtctcctatgagaacaagtctagcctaggccaatgggtgtccctgcccggttctccactacagaatgctcccacacacaaccttctgggctttgcacagtctggagttcccccattaccactttataagcaggtcttcctgacaactcaagtgtccctggtggttgtagggtctcctcctttcaggaattcagggacctgcgacaagaggaggttgccccttgcctgttcaactcacctctcctccaggagattttggggacctggaatgagtcctggtgcacggttgcccyttgcagggttcccggcttcctcccccttcagcccaacatctgtgtcttccctct

SEQ ID NO: 230163 - DNA, 584 bp, Homo sapiens
ttcctcccccttcagcccaacatctgtgtcttccctctgtctgctctcaaagccttccctctgaagatctgccaggagcacaccagtcttcccaatgtcctggtcccttggtgggagctgytcctcctggctgtgtctagtcagccatcttccctcatattttcttcacacaagttaacaatggttattttcacattgtaatttcatctattaattgacatttaagagaaaacaaatcagagtgtgtgataatttgctaatatttctcccaatgagcacatatgttttgttgtttccttcaacaaagacagtgatagctccacatcattgttctgattttatcagatctataggaggaaaactcaaactgtgatgaaggcattcagtgaagatctaaataaatggagagttgttctaagtatatggatagaaagactcaatattgtgaagatgtcagttctttcaaatttcatctatagattaaaagcaatcccaatagaaatcccagcaagttatctagtgggtattgacaaactgattccaaagtttatataaaaaggcaaaagatccagattagccaacaa

SEQ ID NO: 230164 - DNA, 536 bp, Homo sapiens
ttgtaatttcatctattaattgacatttaagagaaaacaaatcagartgtgtgataatttgctaatatttctcccaatgagcacatatgttttgttgtttccttcaacaaagacagtgatagctccacatcattgttctgattttatcagatctataggaggaaaactcaaactgtgatgaaggcattcagtgaagatctaaataaatggagagttgttctaagtatatggatagaaagactcaatattgtgaagatgtcagttctttcaaatttcatctatagattaaaagcaatcccaatagaaatcccagcaagttatctagtgggtattgacaaactgattccaaagtttatataaaaaggcaaaagatccagattagccaacaaatgttaaagaagaacaagtttgaaagtcttacactgtatagcttcaaaatctatgataaagttatagtgatcaagacagtgtggtattggtgaaagaataaaaaaatagatcaatggaacataccagcgggccaaaaaatagaccca

SEQ ID NO: 230165 - DNA, 536 bp, Homo sapiens
ttgtaatttcatctattaattgacatttaagagaaaacaaatcagagtgtgtgataatttgctaatatttctcccaatgagcacatatgttttgttgtttccttcaacaaagacagtgatagctccacatcattgttctgattttatcagatctatagraggaaaactcaaactgtgatgaaggcattcagtgaagatctaaataaatggagagttgttctaagtatatggatagaaagactcaatattgtgaagatgtcagttctttcaaatttcatctatagattaaaagcaatcccaatagaaatcccagcaagttatctagtgggtattgacaaactgattccaaagtttatataaaaaggcaaaagatccagattagccaacaaatgttaaagaagaacaagtttgaaagtcttacactgtatagcttcaaaatctatgataaagttatagtgatcaagacagtgtggtattggtgaaagaataaaaaaatagatcaatggaacataccagcgggccaaaaaatagaccca

SEQ ID NO: 230166 - DNA, 418 bp, Homo sapiens
tttgggtcttcatttctgaagactccatgtcatgtaaaactttgattaaatgaatgtatcatgcattacttttgctaacctgtcttttgttatagtagtgtcgcctgtgacctttatgatgggtaaggaaagatttcacatcttttctacccctacattatcatactgtgaaattttattatatgctgtcttgccctcatagaaagagaattttggagtttgaaagaatcctgytaatcatgaaatctggtcctttatttaacagaaaaattcccagagacatgaaatgattagtactgtttcacagagaagcagagggagagccagaccctcagtcagtccaggctctgctgtctttggaggtggggtttcaggtctccccagcagggttgtgaggtcccaaagaacgggaggcagg

SEQ ID NO: 230167 - DNA, 284 bp, Homo sapiens
ttatcatttatgtgttttgcaaaaatgtttcctaattttttgcctctccattctctgaatagtctcaaaaatttttaattttaatgaaattcacctttttaaaaaatkttatggatcgaggattcactgttggatgtaaaaagtcgctgccaaataaaaagtcacctatgctataatctcagctactccacagggtaaggcaagaggattacataagcccaggagctcaaagctgcagcgagccatgatagcaccaaccacactccagcctgggcgaccgagcg

SEQ ID NO: 230168 - DNA, 284 bp, Homo sapiens
ttatcatttatgtgttttgcaaaaatgtttcctaattttttgcctctccattctctgaatagtctcaaaaatttttaattttaatgaaattcacctttttaaaaaatgttatggatcgaggattcactgttggatgtaaaaagtcgctgccaaataaaaagtcacctatgctataatctcagctactccacagggtaaggcargaggattacataagcccaggagctcaaagctgcagcgagccatgatagcaccaaccacactccagcctgggcgaccgagcg

SEQ ID NO: 230169 - DNA, 409 bp, Homo sapiens
cttcttgctagaatattgtgtgcctgggcgcatacaagacgctggatatgtgttaaaagaatgaatgaatgaatgaatgactcaaatattatctcaaacttcactgggtactttgagtttttacaataaagttctcattcactcttcccagtcayggtaggcagttcctctcctcagtggatggctgccattatctagaaaatgggcaggtgctatcaatctgggtacaatttaatttaggttaaccaggattacctactacatgatttttgaaggttcattgcaaataatgcagttatccaaggcaaaacactaaatatttctaggcccatttgattccttaaatatttttgcctctcggtagctaatgttcatttctgggattggatttaaatactggtctgaattc

SEQ ID NO: 230170 - DNA, 409 bp, Homo sapiens
cttcttgctagaatattgtgtgcctgggcgcatacaagacgctggatatgtgttaaaagaatgaatgaatgaatgaatgactcaaatattatctcaaacttcactgggtactttgagtttttacaataaagttctcattcactcttcccagtcatggtaggcagttcctctcctcagtggatggctgccattatctagaaaatgggcaggtgctatcaatctgggtacaatttaatttaggttaaccrggattacctactacatgatttttgaaggttcattgcaaataatgcagttatccaaggcaaaacactaaatatttctaggcccatttgattccttaaatatttttgcctctcggtagctaatgttcatttctgggattggatttaaatactggtctgaattc

SEQ ID NO: 230171 - DNA, 409 bp, Homo sapiens
cttcttgctagaatattgtgtgcctgggcgcatacaagacgctggatatgtgttaaaagaatgaatgaatgaatgaatgactcaaatattatctcaaacttcactgggtactttgagtttttacaataaagttctcattcactcttcccagtcatggtaggcagttcctctcctcagtggatggctgccattatctagaaaatgggcaggtgctatcaatctgggtacaatttaatttaggttaaccaggattacctactacatgatttttgaaggttcattgcaaataatgcagttatccaaggcaaaacactaaatatttctaggcccatttgattccttaaatatttttgcctctcggtarctaatgttcatttctgggattggatttaaatactggtctgaattc

SEQ ID NO: 230172 - DNA, 579 bp, Homo sapiens
ataatgtatcttttttaaatgaactgtttacttctgtttgataatttaaatttaatatttttacattgctatttataagtgagtttgggctaattttttctcagtcgttttcaggatctctctttataaataatttggaartttttctttattttctgtgctctggactaatttaagtagcattagggttgtctgacttttaaaggttcagtaaaatttcgtctacttttttttctgtagcaatttatctgtttagaatctctgtctctactgtggtcagattttgtaggttggatttctgtacacaatcattagtttatcaaagtatgcaagtttatttgcataattacttatttaaattaactaatagtcatatttttttaagaattaaaatgtaagttcattatttctactgtttctattttctaaaattaatttctgcatttccctaataggccatgatgtatactttcttttggcttactatttttgtctttctatggttttgagttggaatttaatttacacattttaatttttgatataaatatttaatggtttaagtttactcagataact

SEQ ID NO: 230173 - DNA, 393 bp, Homo sapiens
tttatcacttcatatcattatcatttaacacttttcttgtacattcatagccttggaatgccaaaggtgaagggaaacttgagaaataakattaaaagttgtaggttctggtaggttacttttactaatgggcccaattcttctacccccgtatatttgaacacttcgctgtgtagcttcattgtgcctcctgtatcagccatgtgacttgctttgcttaatgggatattagatatggcacaagcagaggcttgaagagtgcttgtgtgcttgggtttgcctttgcttgtttctgtgttcctcagttcagccttctgaagaatgagaaaggcacctggctttatcgccttgctgccctggccaacagtcagcagaccatcaaagatgtgagtg

SEQ ID NO: 230174 - DNA, 407 bp, Homo sapiens
aggcgtgagccaccatgcccggcctagtaaggctctatttatagaccacttacctaacmttttctttatcacagcatagcagtatttgttttaaccacactcttattttataccctagtcactttttaaaaatagaagtccttttataagaatattttactctttctgttgtttaattaaaaagcaataaacaagtatgctattcttttaggaatatgcaaatgtatattctttaataagaaatagttgttcaaaatttgcagttgctggcatccaatctgaaaatggtaaaacaggcatattcaccttatgaaaaagggatttcaaagcccttaataaagtgaataatgtataaacaaaaggctcttgtaactatgaagtgaatagagttgcaaaaactatgtttt

SEQ ID NO: 230175 - DNA, 407 bp, Homo sapiens
aggcgtgagccaccatgcccggcctagtaaggctctatttatagaccacttacctaacattttctttatcacagcatagcagtatttgttttaaccacactcttattttataccctagtcactttttaaaaatagaagtccttttataagaatattttactctttctgttgtttaattaaaaagcaataaacaagtatgctattcttttaggaatatgcaaatgtatattctttaataagaaatagttgttcaaaatttgcagttgctggcatccaatctgaaaatggtaaaacaggcatattcaccttaygaaaaagggatttcaaagcccttaataaagtgaataatgtataaacaaaaggctcttgtaactatgaagtgaatagagttgcaaaaactatgtttt

SEQ ID NO: 230176 - DNA, 568 bp, Homo sapiens
ccaaagactcactatccttgggcagaaagagtacaagtttctattgctttagttgacagcaaaaggtgtcactttcttcatggctctacatctcaagttggcataactatttgttttatagatggtagtgggggagggtagaattctaggttatttgtgtggagacggtggtcttttcagccagatttcccttgtcaaaattacagcaagatcacagtgtgtgtcaaatttccccatcagaactggacaggaaaagcacatgactgtggcaagatcagatagcaacttgacacatctgtacwcatgaagtgtcaagttgagaaggcactaaaaaaaaatgttggttgcctcaagaaaacagtcagggaaagggcaaaaaggacaaatgagatgaaaaatatgatcagtcaatcaaatgctcttccctcaaaccagggaggttgtaaaaacaagagaccagcctcagccctgttttaacttaagggtgatctcagaaatacaagagccagtatacaacaaagcgaacacagatcgtgttagattttctccttttcagtataaaataagg

SEQ ID NO: 230177 - DNA, 568 bp, Homo sapiens
ccaaagactcactatccttgggcagaaagagtacaagtttctattgctttagttgacagcaaaaggtgtcactttcttcatggctctacatctcaagttggcataactatttgttttatagatggtagtgggggagggtagaattctaggttatttgtgtggagacggtggtcttttcagccagatttcccttgtcaaaattacagcaagatcacagtgtgtgtcaaatttccccatcagaactggacaggaaaagcacatgactgtggcaagatcagatagcaacttgacacatctgtacacatgaagtgtcaagttgagaaggcactaaaaaaaaatgttggttgcctcaagwaaacagtcagggaaagggcaaaaaggacaaatgagatgaaaaatatgatcagtcaatcaaatgctcttccctcaaaccagggaggttgtaaaaacaagagaccagcctcagccctgttttaacttaagggtgatctcagaaatacaagagccagtatacaacaaagcgaacacagatcgtgttagattttctccttttcagtataaaataagg

SEQ ID NO: 230178 - DNA, 531 bp, Homo sapiens
cagtgacctgtttaaaacaccctattatttcaaggacgttgaccatgataaaagagaaagaaaggagtaactagaaagagacccctaaatctcacaattgaaatcatcaaaggtactaaatgttttaagtcaaaacagaagaagagagtacttgagcctattttgattttagtcacagaggcataaattacttatgttgtatctgacagttacaacaattgaactgttttcagatccctcaaatcaattaaaaataaacattatggataagagttaatcaataaacatgtcatctagtgcttgatcacagccaactgtctgaagaactgaaagaactggcattatccttctttctggaggtgaacactgcagggcagggatagcaaatgggttttasttactgcgccagcttcagtagcttgctagggctgcccaggtgcccagggagctgtgctgcagagggttctgaggctgcatccagaaaccaaagggaaagaagctgcattgaattaccagcagttaccaggatat

SEQ ID NO: 230179 - DNA, 628 bp, Homo sapiens
gatataaggcaaaacatagattctcccaaataaaaattttatcgcttgaaaacattacacattttacactgattttatttccctctttgtttggtcaaacaaaccttcagcttacctttagcaactgtgcagaactggacagtatacattttctactattcatctccccttgtttatgttttgtgcatctattttgtcatcaagttttgattttattccttttgtattatgtgcatttgtataaataagaaaataaatgaaataaaaagtaataagtaagtaatttatatttyagtggagtagcttggtatgcttttttccaaacttccactaagtactgttgaaaacagataaacgcagaaactagcaatggcacttcaagttaaagatcggggaaggccctctgtgaagcctttttccttccatgggccagaacttgcattaacagcatatctttgggaggcatatattaagattcttagataatatggcatgtgttttactctctgaataggaaacatatgagtggtcagtattgagataggaaaggactttggcatctcataattttctgctaactattagaaatggtgactgatagaaacactgagttgaaaatagctatcat

SEQ ID NO: 230180 - DNA, 472 bp, Homo sapiens
tgtctatagcctgcagaacatctcatgttttgctcctagagaaaaaaacaaaacaaacaacagcaacaacaaaacacttcaattctatcattcacatctcttatcactgatccctttgttagaattaaacttaaattctgcatcaaaggagagtaggaaatgtagtkttggggcttcagaccatgagctatagggaagattttaaagggcagggaaagtgctgaataccaacagaagtatctcattcaaacattcattagcatgatttctaagattgtagttttccattggagaatacacatatttatttctaatttggtcaatagttaacaatttccagcttggggactcatctgggtgtcccagttctctaattacaaaaacctacgagtgctacctcatctaggatcctctgttggcattttcttcttggaaaatggtgttagtagagcgtggtggctcacgcctgtaa

SEQ ID NO: 230181 - DNA, 596 bp, Homo sapiens
tcaaaataccaatggcactgttcacagaaatagaaaaaacaatcctaaaatttgtatgaatatacaaaatacccagaataatgaaagctatttttagcaaaaacaagagcatcatactactacactacaaaatatactacaaagctatagtaaccaaaacagcatggtgctggcacaaaagcagaaatatagaccaatggaacaraatagggaactcagaaataaatccacatatttacagccaactcattttcaataaaggcatcaataatctatatgaggaaaaagtctcttcaataaattgttctgggaaaactgtatatctacatgcataagaatgaaactagactactatctctcaccacgtagaaaaataaaaccaaaattgatgaaagacttaaacctaacaactgaaattatgaaactattagaagaaaaaaattagagcaatgcttcagaacattggtctgggcaaagatttttttgagttagaccccaaaagcataggcaaccaaagcaaaaattgacaaatgggattacatcaaggtaaaaagtttctgcacagcaaaaaatacaatcaacaaagtgaagagaca

SEQ ID NO: 230182 - DNA, 596 bp, Homo sapiens
tcaaaataccaatggcactgttcacagaaatagaaaaaacaatcctaaaatttgtatgaatatacaaaatacccagaataatgaaagctatttttagcaaaaacaagagcatcatactactacactacaaaatatactacaaagctatagtaaccaaaacagcatggtgctggcacaaaagcagaaatatagaccaatggaacagaatagggaactcagaaataaatccacatatttacagccaactcattttcaataaaggcatcaataatctatatgaggaaaaagtctcttcaataaattgttctgggaaaactgtatatctacatgcataagaatgaaactagactactatctctcaccacgtagaaaaataaaaccaaaattgatgaaagacttaaacctaacaactgaaattatgaaactattagaagaaaaaaattagagcaatgcttcagaacattggyctgggcaaagatttttttgagttagaccccaaaagcataggcaaccaaagcaaaaattgacaaatgggattacatcaaggtaaaaagtttctgcacagcaaaaaatacaatcaacaaagtgaagagaca

SEQ ID NO: 230183 - DNA, 428 bp, Homo sapiens
gaattctgtggtcatattgctcctgctccaacattaagcatcaaattaagcttcaaggttagtgcttgaagctgccaatcagtgaaagtgggtgaaaatcactacaatgcaattttcatatactttgtatggggaatgagagcttacaaaaacaaatgcacttaggcaaacaataaacaaatgactgtttaaaaaaaaaaaaaccatcccagtgtagtggtgaatacatgagtctgggagcagagagagtcctarattaactcctgattctgctgctcaaaagctaagactctctgggaaaagagcaaggactcctgtatctctagatcatgatgaggtcccggcaaagagatctaagggagcatttctccagttatccccattcctggttgttttctatttctagatttcaaagcaggactcagtaa

SEQ ID NO: 230184 - DNA, 428 bp, Homo sapiens
gaattctgtggtcatattgctcctgctccaacattaagcatcaaattaagcttcaaggttagtgcttgaagctgccaatcagtgaaagtgggtgaaaatcactacaatgcaattttcatatactttgtatggggaatgagagcttacaaaaacaaatgcacttaggcaaacaataaacaaatgactgtttaaaaaaaaaaaaaccatcccagtgtagtggtgaatacatgagtctgggagcagagagagtcctagattaactcctgattctgctgctcaaaagctaaractctctgggaaaagagcaaggactcctgtatctctagatcatgatgaggtcccggcaaagagatctaagggagcatttctccagttatccccattcctggttgttttctatttctagatttcaaagcaggactcagtaa

SEQ ID NO: 230185 - DNA, 444 bp, Homo sapiens
aacggagatggcctagacaaaataattaaggtcaagagaaaaggagacagtggtagatgtcaaaccacataaaaccactttgtttaaaatataaactgagtactctagaagctcatgaggaaaaacaaaacaaaagcaaaaacctagaagctttgataactaagctgattaggttttacaaacgctgctgccaacgtaagcagaagtggcttacacaggagccttttctcctcagtgggtctgtttacaaacccatccttgaattccaagctttgcccagtcacctcaccatgactggtaaacaaaatgyattttacaacaggggaaaaacagatgaactgaaatcaccccccaagaacattcctgcctcttcactgaagtcatcttaaatctccacagaaagcctaatttttagagtacattagaaagggtaagtaaaaaaag

SEQ ID NO: 230186 - DNA, 547 bp, Homo sapiens
tgaaataataaataagattgatagtcccatagctagaataataaagaaaaaagggaaaagattcaaataaacacagtcagaaatgacaaagagggcattaccactgactccacagaaatacaaacaactctcagagactactgcaaacacctgtatgcacataaactagaaaacctaaaagaaatggataaattcctgaaatcatgcagcctcccaagattgagccaggatgaaattgaaccctgaaagaccaataacaaggtccaaaattgaatcagtgataaaaagtctgccaaccagaaaaatccctggatcagacaaattcacagccaaattcggrcagatgtacaaagaagactggtaccattcctgctgaaattattcccaaaaattgagaaggaagaacttctctctaactcatttattaggccagcatcattctgacactgaaacctggcagagacacaacaaaaaaagaaaacttcaggccaatatccatgttgaactacagatgcaaaaatcctcaacaaaattctagcaaatcaag

SEQ ID NO: 230187 - DNA, 580 bp, Homo sapiens
aactcaaaatttaagagctatctatgacaaacctacagccaacatcatactgaacaagcaaaaggtggaggcatttcccttgagaactgaaagaagacaaggtggcccactcacatcacacctattctgcacagtcctggaagtcttagccaaagcaattaagcaagagaaagaaataaaaggcattcaaataggaagacaggaagtcaamctatctctctttgcagatgatatgattttacacctagaaaaccccatagtctctgcccaatagctcattgatctgatatacaacttcagcaaaatttcaggatacaaaatcattccacaaaaatctgtagcatttctacataccaacaacatccaaggtgagaggcaaatcaagattgcaatcacatttacaatactcacaccaaaatttacctaggaatacagctaaccagggaggtgaaagatctctataacaagaattaaaaaagatgctgaaaaaaatcagagaggacacaaacatgaaaacattccatgctaatggataggaagaatcacctttgttagaatggccatactgcccaaggcaatt

SEQ ID NO: 230188 - DNA, 580 bp, Homo sapiens
aactcaaaatttaagagctatctatgacaaacctacagccaacatcatactgaacaagcaaaaggtggaggcatttcccttgagaactgaaagaagacaaggtggcccactcacatcacacctattctgcacagtcctggaagtcttagccaaagcaattaagcaagagaaagaaataaaaggcattcaaataggaagacaggaagtcaacctatctctctttgcagatgatatgattttacacctagaaaamcccatagtctctgcccaatagctcattgatctgatatacaacttcagcaaaatttcaggatacaaaatcattccacaaaaatctgtagcatttctacataccaacaacatccaaggtgagaggcaaatcaagattgcaatcacatttacaatactcacaccaaaatttacctaggaatacagctaaccagggaggtgaaagatctctataacaagaattaaaaaagatgctgaaaaaaatcagagaggacacaaacatgaaaacattccatgctaatggataggaagaatcacctttgttagaatggccatactgcccaaggcaatt

SEQ ID NO: 230189 - DNA, 580 bp, Homo sapiens
aactcaaaatttaagagctatctatgacaaacctacagccaacatcatactgaacaagcaaaaggtggaggcatttcccttgagaactgaaagaagacaaggtggcccactcacatcacacctattctgcacagtcctggaagtcttagccaaagcaattaagcaagagaaagaaataaaaggcattcaaataggaagacaggaagtcaacctatctctctttgcagatgatatgattttacacctagaaaaccccatagtctctgcccaatagctcattgatctgatatacaacttcagcaaaatttcaggatacaaaatcattccacaaaaatctgtagcatttctacataccaacaacatccaaggtgagaggcaaatcaagattgcaatcacatttacaatactcacaccaaaawttacctaggaatacagctaaccagggaggtgaaagatctctataacaagaattaaaaaagatgctgaaaaaaatcagagaggacacaaacatgaaaacattccatgctaatggataggaagaatcacctttgttagaatggccatactgcccaaggcaatt

SEQ ID NO: 230190 - DNA, 580 bp, Homo sapiens
aactcaaaatttaagagctatctatgacaaacctacagccaacatcatactgaacaagcaaaaggtggaggcatttcccttgagaactgaaagaagacaaggtggcccactcacatcacacctattctgcacagtcctggaagtcttagccaaagcaattaagcaagagaaagaaataaaaggcattcaaataggaagacaggaagtcaacctatctctctttgcagatgatatgattttacacctagaaaaccccatagtctctgcccaatagctcattgatctgatatacaacttcagcaaaatttcaggatacaaaatcattccacaaaaatctgtagcatttctacataccaacaacatccaaggtgagaggcaaatcaagattgcaatcacatttacaatactcacaccaaaatttacctaggaatacagctaaccagggaggtgaaagatctctataacaagaattaaaaaagatgctgaaaaaaatcagagaggacacaaayatgaaaacattccatgctaatggataggaagaatcacctttgttagaatggccatactgcccaaggcaatt

SEQ ID NO: 230191 - DNA, 577 bp, Homo sapiens
gaaacctacactgttttccataatgggggtactaagttacattctcaccaacagtgtacaagggttcccatttctccacaccttcatcaacacttatctttaatcttttttataatasccattctagattatgaaattacacctcgctgtggtttgatttacatttttttctgatgactagtgattttgatatatcaatatattgatataatacaaatatattataaaattttttcatacatttgttggccaaatagatatatcctttggagaaatgtctacttaagtcccttgcccatttttaaaactgggttatttgttttcttgaaattgagttgtttgattttagtatatatgttggatactgaccccttaccagatgtatggctcacaaatattttctcccattctataaattgtttcttcactttgttgattattgcctttgctatgaagaagtttttggtttgatgtaatcccatttgtctatttttgcttttgttgcctttgcttttggagtcgtatccaaaaatttattccacagaataatgttaagaaggttttcccccagtatttt

SEQ ID NO: 230192 - DNA, 577 bp, Homo sapiens
gaaacctacactgttttccataatgggggtactaagttacattctcaccaacagtgtacaagggttcccatttctccacaccttcatcaacacttatctttaatcttttttataatagccattctagattatgaaattacacctcgctgtggtttgatttacatttttttctgatgactagtgattttgatatatcaatatattgatataatacaaatatattataaaattttttcatacatttgttggccaaatagatatatcctttggagaaatgtctacttaagtcccttgcccatttttaaaactgggttatttgttttcttgaaattgagttgtttgattttagtatatatgttggatactgacccctyaccagatgtatggctcacaaatattttctcccattctataaattgtttcttcactttgttgattattgcctttgctatgaagaagtttttggtttgatgtaatcccatttgtctatttttgcttttgttgcctttgcttttggagtcgtatccaaaaatttattccacagaataatgttaagaaggttttcccccagtatttt

SEQ ID NO: 230193 - DNA, 577 bp, Homo sapiens
gaaacctacactgttttccataatgggggtactaagttacattctcaccaacagtgtacaagggttcccatttctccacaccttcatcaacacttatctttaatcttttttataatagccattctagattatgaaattacacctcgctgtggtttgatttacatttttttctgatgactagtgattttgatatatcaatatattgatataatacaaatatattataaaattttttcatacatttgttggccaaatagatatatcctttggagaaatgtctacttaagtcccttgcccatttttaaaactgggttatttgttttcttgaaattgagttgtttgattttagtatatatgttggatactgaccccttaccaratgtatggctcacaaatattttctcccattctataaattgtttcttcactttgttgattattgcctttgctatgaagaagtttttggtttgatgtaatcccatttgtctatttttgcttttgttgcctttgcttttggagtcgtatccaaaaatttattccacagaataatgttaagaaggttttcccccagtatttt

SEQ ID NO: 230194 - DNA, 585 bp, Homo sapiens
acataaagacctgtataataatatacatagttgcatgattcataatagctaataactggaaacaatacaaatgtccatcaacaggagattgcaaaaatagtgatatatttatatattygtatactacacaataacaagaaggaatgaaatactgacacatgcagtgggtgtggatgaataaaaaaaaattaaatgataaaaagccagtaacaaacaaatacataatatataattccatttctgtgaagtttcagaacaggtaaacatatatgtggcaatagaaattattacaatgttactgtatgaggggtaggaagaaggcaccgggaaacattctgaggtgacgggaatgttctgtgtcttaatctgggtggtggttacatggatgtgcacacttttcaaaactcattgaattgtacccataaaattcatttctctgtatataaattttaccttatgaatgaatcaacaccatgaaaaaatagccacaaaatccagaagatgagattctatgggacaaattagctaggtatgatgacgcatgcctgtaatcccagctacttgggaggctgaggcaggaaaatc

SEQ ID NO: 230195 - DNA, 585 bp, Homo sapiens
acataaagacctgtataataatatacatagttgcatgattcataatagctaataactggaaacaatacaaatgtccatcaacaggagattgcaaaaatagtgatatatttatatattcgtatactacacaataacaagaaggaatgaaatactgacacatgcagtgggtrtggatgaataaaaaaaaattaaatgataaaaagccagtaacaaacaaatacataatatataattccatttctgtgaagtttcagaacaggtaaacatatatgtggcaatagaaattattacaatgttactgtatgaggggtaggaagaaggcaccgggaaacattctgaggtgacgggaatgttctgtgtcttaatctgggtggtggttacatggatgtgcacacttttcaaaactcattgaattgtacccataaaattcatttctctgtatataaattttaccttatgaatgaatcaacaccatgaaaaaatagccacaaaatccagaagatgagattctatgggacaaattagctaggtatgatgacgcatgcctgtaatcccagctacttgggaggctgaggcaggaaaatc

SEQ ID NO: 230196 - DNA, 585 bp, Homo sapiens
acataaagacctgtataataatatacatagttgcatgattcataatagctaataactggaaacaatacaaatgtccatcaacaggagattgcaaaaatagtgatatatttatatattcgtatactacacaataacaagaaggaatgaaatactgacacatgcagtgggtgtggatgaataaaaaaawattaaatgataaaaagccagtaacaaacaaatacataatatataattccatttctgtgaagtttcagaacaggtaaacatatatgtggcaatagaaattattacaatgttactgtatgaggggtaggaagaaggcaccgggaaacattctgaggtgacgggaatgttctgtgtcttaatctgggtggtggttacatggatgtgcacacttttcaaaactcattgaattgtacccataaaattcatttctctgtatataaattttaccttatgaatgaatcaacaccatgaaaaaatagccacaaaatccagaagatgagattctatgggacaaattagctaggtatgatgacgcatgcctgtaatcccagctacttgggaggctgaggcaggaaaatc

SEQ ID NO: 230197 - DNA, 585 bp, Homo sapiens
acataaagacctgtataataatatacatagttgcatgattcataatagctaataactggaaacaatacaaatgtccatcaacaggagattgcaaaaatagtgatatatttatatattcgtatactacacaataacaagaaggaatgaaatactgacacatgcagtgggtgtggatgaataaaaaaaaattaaatgataaaaagccagtaacaaacaaatacataatatataattccatttctgtgaagtttcagaacaggtaaacatatatgtggcaatagaaattattacaatgttactgtatgaggggtaggaagaaggcaccgggaaacattctgaggtgacgggaatgttctgtgtcttaatctgggtggtggttacatggatgtrcacacttttcaaaactcattgaattgtacccataaaattcatttctctgtatataaattttaccttatgaatgaatcaacaccatgaaaaaatagccacaaaatccagaagatgagattctatgggacaaattagctaggtatgatgacgcatgcctgtaatcccagctacttgggaggctgaggcaggaaaatc

SEQ ID NO: 230198 - DNA, 575 bp, Homo sapiens
agcatagtctaaaacagttctgaagaattactttaaaatgttccttataaccttcattatactaccaaatagtaatttattcatacttgtctttatgactgastgggagaatttagaactcaagattttaaaaaaaataatatttatcatacaggctgaataaagaaaatgtggtacatatacaccatggaatactatgcagccagaacaaagaggaggatcatgtcctcttcagcaacatttatggagttggaggccattatccttagcaaactaacccagaaacagaaaaccaaataccgcttgttgtcacttataagtgggagctaaatgatgataacacatggacacatagaggggagcaacacacaatggggcctctcagagggtggagagtgggaggagggagagattcaggaaaaataactaatgggtactaggcttaatacctggctgatgaaatagtctgtacaacaaacacccatgacacaagtttccctatgtgataaaactgtacatgtcacactgaagttaaaagttaaataaaattatcaggccgggctcggtggctcatg

SEQ ID NO: 230199 - DNA, 575 bp, Homo sapiens
agcatagtctaaaacagttctgaagaattactttaaaatgttccttataaccttcattatactaccaaatagtaatttattcatacttgtctttatgactgagtgggagaatttagaactcaagattttaaaaaaaataatatttatcatacaggctgaataaagaaaatgtggtacatatacaccatggaatactatgcagccagaacaaagaggaggatcatgtcctcttcagcaacatttatggagttggaggccattatccttagcaaactaacccagaaacmgaaaaccaaataccgcttgttgtcacttataagtgggagctaaatgatgataacacatggacacatagaggggagcaacacacaatggggcctctcagagggtggagagtgggaggagggagagattcaggaaaaataactaatgggtactaggcttaatacctggctgatgaaatagtctgtacaacaaacacccatgacacaagtttccctatgtgataaaactgtacatgtcacactgaagttaaaagttaaataaaattatcaggccgggctcggtggctcatg

SEQ ID NO: 230200 - DNA, 575 bp, Homo sapiens
agcatagtctaaaacagttctgaagaattactttaaaatgttccttataaccttcattatactaccaaatagtaatttattcatacttgtctttatgactgagtgggagaatttagaactcaagattttaaaaaaaataatatttatcatacaggctgaataaagaaaatgtggtacatatacaccatggaatactatgcagccagaacaaagaggaggatcatgtcctcttcagcaacatttatggagttggaggccattatccttagcaaactaacccagaaacagaaaaccaaataccgcttgttgtcacttataagtgggagctaaatgatgataacacatggacacatagaggggagcaacacacamtggggcctctcagagggtggagagtgggaggagggagagattcaggaaaaataactaatgggtactaggcttaatacctggctgatgaaatagtctgtacaacaaacacccatgacacaagtttccctatgtgataaaactgtacatgtcacactgaagttaaaagttaaataaaattatcaggccgggctcggtggctcatg

SEQ ID NO: 230201 - DNA, 575 bp, Homo sapiens
agcatagtctaaaacagttctgaagaattactttaaaatgttccttataaccttcattatactaccaaatagtaatttattcatacttgtctttatgactgagtgggagaatttagaactcaagattttaaaaaaaataatatttatcatacaggctgaataaagaaaatgtggtacatatacaccatggaatactatgcagccagaacaaagaggaggatcatgtcctcttcagcaacatttatggagttggaggccattatccttagcaaactaacccagaaacagaaaaccaaataccgcttgttgtcacttataagtgggagctaaatgatgataacacatggacacatagaggggagcaacacacaatggggcctctcagagggtggagagtgggaggagggagagattcaggaaaaataactaatgggtactaggcttaatacctggctgatgaaatagtctgtacaacaaacacccatgacacaagtttccctatgtgataaamctgtacatgtcacactgaagttaaaagttaaataaaattatcaggccgggctcggtggctcatg

SEQ ID NO: 230202 - DNA, 552 bp, Homo sapiens
agagcattcttaccttcctttctgtcaactctaagctgtagacagggccttactcctttaaccaatcacaaaccagagaatccccaagtccacctacaacctataagacctctcctgaagataatccccctttctgaaccgaaccagtgtataccttccatgtgttgatgtctttgcccgtaactcctgcctccctgaaatgtataaaaccaaaccaacccggccacctcggaaccacttactcaagccttcttggttgcgtgttttctccaggcctcagtcactcatattggttcagaataaacctctttaaaatatattacagtttgttttatccattaacaaagtcaagcaattagttcttagatctgaaaatataactattactgcactaaaatagattaatgaaagaggatatactagatacaggaatatgaatagcacaaaatgtggcacatttgtggaacacagaaaagggattctaygagttagccagttaaaataactaaggccatggccatttcacatcccaggtccagaatttgaaagatc

SEQ ID NO: 230203 - DNA, 593 bp, Homo sapiens
aaagaccttgcatagtagtaggcttattttggcttagtgattgtcagccctgacttgattactcattaaagtaacctggaaagctttaaaaatactgaggccaggcccctccccacagattatattgaattgaactgtgatggggctagagaattaggatgttttttgaagcagctggacttgtgagtcactggtagccacacgaaaatattatttattacatgcagttrtttgattgaattaaatttttgtctgaatttctgaccagttttgataaagtatttcatccagtaccccatgtgcatacagactcacttgtctactataagaggaaagtattgtgtgacatgttttcatgagtccctcacatttctgcacactttacgagcagacacagactgccctttgttttgaccatcttttcaagcatgttggtatctccttctggaacaaagactaggcatagttagggatctttacaagggatttgcattccctgagctcagggctcctatcccgtaatgcatgtgcattcattcatctgagtccatccatgtcctttcccgtgggaatccacggcaaggacaactgat

SEQ ID NO: 230204 - DNA, 598 bp, Homo sapiens
gtcttactatgggatgctgaacaagctaaacttttttattttattttatttttaagttctgggatacatgtgcagaatgtgcaggtttgttacataggtatacatgtgccatggtggtttgctgaacttatcagcccatcatctaggttataagccccgcatgcattaggtgtttgtcctaatgctctccctcctcttgtccctcatccccctacaggccctgatgtgtgatgttcccctccctgtgtccatgtgttctcatttgaacaagctaaacttcctaaacttcagccctaccatatgtacattggaaattataacagtgccttgtatggcatttagtcacaatgtctggtgtagaatagatgctctaaaattattattattatatgctgaagggcagacatctcatcttatttttttttttcacttaaaagaatatattttttcagagacaagatctcgctatgttgctcaggcaggtctcaaactcctgagctcaagtgattytcccatcttggtctcccgaagtgctgggattacaggcgtaagccaccatgcttgggccacatcttattttcattgtgttcagaataca

SEQ ID NO: 230205 - DNA, 598 bp, Homo sapiens
gtcttactatgggatgctgaacaagctaaacttttttattttattttatttttaagttctgggatacatgtgcagaatgtgcaggtttgttacataggtatacatgtgccatggtggtttgctgaacttatcagcccatcatctaggttataagccccgcatgcattaggtgtttgtcctaatgctctccctcctcttgtccctcatccccctacaggccctgatgtgtgatgttcccctccctgtgtccatgtgttctcatttgaacaagctaaacttcctaaacttcagccctaccatatgtacattggaaattataacagtgccttgtatggcatttagtcacaatgtctggtgtagaatagatgctctaaaattattattattatatgctgaagggcagacatctcatcttatttttttttttcacttaaaagaatatattttttcagagacaagatctcgctatgttgctcaggcaggtctcaaactcctgagctcaagtgattttcccatcttggtctcccgaagtgctgggattacaggcrtaagccaccatgcttgggccacatcttattttcattgtgttcagaataca

SEQ ID NO: 230206 - DNA, 598 bp, Homo sapiens
gtcttactatgggatgctgaacaagctaaacttttttattttattttatttttaagttctgggatacatgtgcagaatgtgcaggtttgttacataggtatacatgtgccatggtggtttgctgaacttatcagcccatcatctaggttataagccccgcatgcattaggtgtttgtcctaatgctctccctcctcttgtccctcatccccctacaggccctgatgtgtgatgttcccctccctgtgtccatgtgttctcatttgaacaagctaaacttcctaaacttcagccctaccatatgtacattggaaattataacagtgccttgtatggcatttagtcacaatgtctggtgtagaatagatgctctaaaattattattattatatgctgaagggcagacatctcatcttatttttttttttcacttaaaagaatatattttttcagagacaagatctcgctatgttgctcaggcaggtctcaaactcctgagctcaagtgattttcccatcttggtctcccgaagtgctgggattacaggcgtaagccaccatgcttggsccacatcttattttcattgtgttcagaataca

SEQ ID NO: 230207 - DNA, 591 bp, Homo sapiens
ttcatgtggatgtcccattgtttcagtaccgtttgttgagaaggctgttttttctccattgccttatgttttctcctttgctgagtttagtttttatggccatgaacaaaatcctcttgttcyttcacaaaactattaaagaccttttttcatccttttcgtcaaggcccaagtaattacaatttctcttcaaaacctctcataactcctggaggttcttcagagagttgagcttagaagagacttatttagcaaatgcaactataaggatgctaatgtactctgtccaggtcagaatttcttttcttcactagctgacgtgtgtgcttgacccttaacgtgggtctataaatgcagcactgggttcatcagtggatctgtaagctttggtgttttatttcccaagagctctatagatgctccccattccctgaattttgtgctgtaatgaaggtggacatggcattgtcagtgcgacccggtctcagagttaggtggactgcatgtgggttcaggttctgctactccctgtaggacctttctacaagtcacctgtctcctctaggcctcagtttctttatctgtaatgtt

SEQ ID NO: 230208 - DNA, 591 bp, Homo sapiens
ttcatgtggatgtcccattgtttcagtaccgtttgttgagaaggctgttttttctccattgccttatgttttctcctttgctgagtttagtttttatggccatgaacaaaatcctcttgttccttcacaaaactattaaagaccttttttcatccttttcrtcaaggcccaagtaattacaatttctcttcaaaacctctcataactcctggaggttcttcagagagttgagcttagaagagacttatttagcaaatgcaactataaggatgctaatgtactctgtccaggtcagaatttcttttcttcactagctgacgtgtgtgcttgacccttaacgtgggtctataaatgcagcactgggttcatcagtggatctgtaagctttggtgttttatttcccaagagctctatagatgctccccattccctgaattttgtgctgtaatgaaggtggacatggcattgtcagtgcgacccggtctcagagttaggtggactgcatgtgggttcaggttctgctactccctgtaggacctttctacaagtcacctgtctcctctaggcctcagtttctttatctgtaatgtt

SEQ ID NO: 230209 - DNA, 591 bp, Homo sapiens
ttcatgtggatgtcccattgtttcagtaccgtttgttgagaaggctgttttttctccattgccttatgttttctcctttgctgagtttagtttttatggccatgaacaaaatcctcttgttccttcacaaaactattaaagaccttttttcatccttttcgtcaaggcccaagtaattacaatttctcttcaaaacctctcataaytcctggaggttcttcagagagttgagcttagaagagacttatttagcaaatgcaactataaggatgctaatgtactctgtccaggtcagaatttcttttcttcactagctgacgtgtgtgcttgacccttaacgtgggtctataaatgcagcactgggttcatcagtggatctgtaagctttggtgttttatttcccaagagctctatagatgctccccattccctgaattttgtgctgtaatgaaggtggacatggcattgtcagtgcgacccggtctcagagttaggtggactgcatgtgggttcaggttctgctactccctgtaggacctttctacaagtcacctgtctcctctaggcctcagtttctttatctgtaatgtt

SEQ ID NO: 230210 - DNA, 591 bp, Homo sapiens
ttcatgtggatgtcccattgtttcagtaccgtttgttgagaaggctgttttttctccattgccttatgttttctcctttgctgagtttagtttttatggccatgaacaaaatcctcttgttccttcacaaaactattaaagaccttttttcatccttttcgtcaaggcccaagtaattacaatttctcttcaaaacctctcataactcctggaggttcttcagagagttgagcttagaagagacttatttagcaaatgcaactataaggatgctaatgtactctgtccaggtcagaatttcttttcttsactagctgacgtgtgtgcttgacccttaacgtgggtctataaatgcagcactgggttcatcagtggatctgtaagctttggtgttttatttcccaagagctctatagatgctccccattccctgaattttgtgctgtaatgaaggtggacatggcattgtcagtgcgacccggtctcagagttaggtggactgcatgtgggttcaggttctgctactccctgtaggacctttctacaagtcacctgtctcctctaggcctcagtttctttatctgtaatgtt

SEQ ID NO: 230211 - DNA, 587 bp, Homo sapiens
gtggatgtcccattgtttcagtaccgtttgttgagaaggctgttttttctccattgccttatgttttctcctttgctgagtttagtttttatggccatgaacaaaatcctcttgttccttcacaaaactattaaagaccttttttcatccttttcgtcaaggcccaagtaattacaatttctcttcaaaacctctcataactcctggaggttcttcagagagttgagcttagaagagacttatttagcaaatgcaactataaggatgctaatgtactctgtccaggtcagaatttcttttcttcactagctgacgtgtgtgcttgacccttaacgtgggtctataaatgcagcactgggttcatcagtggatctgtaagctttggtgttttatttcccaagagctctatagatgctccccattccctgaattttgtgctgtaatgaaggtggacatggcattgtcagtgcgacccggtctcagagttaggtggactgcatgtgggttcrggttctgctactccctgtaggacctttctacaagtcacctgtctcctctaggcctcagtttctttatctgtaatgttg

SEQ ID NO: 230212 - DNA, 503 bp, Homo sapiens
ttaaaggatattatcaagaaaatgaaaagacaacccacagagtggagaaaatatttgtaagtcatatatcatttgtaaatcatatatcatatcatatcatatatctgttcagggacctgtatctagcatgtaaaaagaatgctagccaggcacagtggcttacacctgtaatcccagcactttgggaggctgaagcaggaggattgcctgagcccaggagttcaagaccagcctaggcaacatagtggggccctgtctctacaataaaataaaaaattagtcggccatggtggtgcacacctgtagtcccagttactcaggaagctgagacaggaggactgcttgaacccaggaagctgtggcttcagtgagccatgatcacgccactgcattatagcctgggtgacagagcaagaccctggtccaaaaataataataataacaataatccaattaaaaatagtcraagaatctgaagggacatttctccagtaagcacaaga

SEQ ID NO: 230213 - DNA, 534 bp, Homo sapiens
ttagagttccggcggcagctcacaccggtgcgaaagcagcgagatagccccaacccggctcagagccctcaggctggtggctttggccctggctccayctccccacctctgccctgatccgctccgctcaggctagcagcctgccggccgaggccccgcccctctagacttgtcatcacagaagccgcacgtggccggggtgggacctcaggcgacctgcgaccatcactttgtctcctccttcctcctttggggccgccaccgccaatcagagccagcggatcctggttggagtgcgaccgcccgggtgaggcgtgagggagaaggggcggaaggaggaggggctctgagatgggagggggatcgtggtggaagggtcttggcgcgacttctgccaggctggaatccgagggggcgggtcctggtgaaaggcggagagaccgagaggaggcggggatcgggggtggggcctgggaaaagctgaggatcctggggaaatgcaaagaaaacgcgaaggaggtgcgaggtcagaag

SEQ ID NO: 230214 - DNA, 534 bp, Homo sapiens
ttagagttccggcggcagctcacaccggtgcgaaagcagcgagatagccccaacccggctcagagccctcaggctggtggctttggccctggctccatctccccacctctgccctgatccgctccgctcaggctrgcagcctgccggccgaggccccgcccctctagacttgtcatcacagaagccgcacgtggccggggtgggacctcaggcgacctgcgaccatcactttgtctcctccttcctcctttggggccgccaccgccaatcagagccagcggatcctggttggagtgcgaccgcccgggtgaggcgtgagggagaaggggcggaaggaggaggggctctgagatgggagggggatcgtggtggaagggtcttggcgcgacttctgccaggctggaatccgagggggcgggtcctggtgaaaggcggagagaccgagaggaggcggggatcgggggtggggcctgggaaaagctgaggatcctggggaaatgcaaagaaaacgcgaaggaggtgcgaggtcagaag

SEQ ID NO: 230215 - DNA, 610 bp, Homo sapiens
atagtcatatctacaccctccctcatcatcccaaaccattggaaccattaatctgctctccatctccatcattttgtcatttgcagaatgttatacccagagaatcacacagaatatgaccttatgagattgttttttttccactcagcataaygccaagttgttgaatgtatcactcacatagttggattatgtttttatatccaatatgccaactgtctttaaatttgtgtgtttagactatttacatttaacgtaattattaaaatgttagggcttaagtctgacattttattttctattttccgttttctttttcctgccttcctgtggattaaatatttttcaaatttctacaccttttatctatcattaacaggggttaacaggagttagcgaaggggaggagccatggtctttccatggcatgtggctagagtagcgtggttattgtccaaaagtttctgtcttgctatgtttcctctttcaccatcttttaaagagaaaaggctgtttttggctttcttggggtgtatgttcccattgccatttctgactaagttgccagttgatccaacacttacgttatatgaggcaaataaacaatcaa

SEQ ID NO: 230216 - DNA, 610 bp, Homo sapiens
atagtcatatctacaccctccctcatcatcccaaaccattggaaccattaatctgctctccatctccatcattttgtcatttgcagaatgttatacccagagaatcacacagaatatgaccttatgagattgttttttttccactcagcataatgccaagttgttgaatgtatcactcacatagttggattatgtttttatatccaatatgccaactgtctttaaatttgtgtgtttagactatttacatttaacgtaattattaaaatgttagggcttaagtctgacattttattttctattttccgttttctttttcctgccttcctgtggattaaatatttttcaaatttctacmccttttatctatcattaacaggggttaacaggagttagcgaaggggaggagccatggtctttccatggcatgtggctagagtagcgtggttattgtccaaaagtttctgtcttgctatgtttcctctttcaccatcttttaaagagaaaaggctgtttttggctttcttggggtgtatgttcccattgccatttctgactaagttgccagttgatccaacacttacgttatatgaggcaaataaacaatcaa

SEQ ID NO: 230217 - DNA, 463 bp, Homo sapiens
atgttcatatacaaaaaaagagtctcaacccataattcacaccttataaaaaattagaatggatcatcaacctaaatgtaagacataaaagtagaaaacttctcgaaaaaaatatataagaaaatctgaccttaagttaggcacagaattcctagatacaataccaaaaacatgattcataaaagaaaaaataaatcagattttatcaaaatagaaaacatttgacctgcaaaagacactgttaaaaggattaaggatgaaaagacaagccatagactgggagaaaatatttgcaaatcatataactcatagaggtgcsttatttataatcaccaaaactcagaaactacccaattgtccctcagctgataaagagataaacaaaactgtggtgtattcatcccacgggaaactatcccacaataaaaaggaatgaattattgatacatgtaacaatgtgtat

SEQ ID NO: 230218 - DNA, 590 bp, Homo sapiens
caatgtgtatgatctcaaatacatgttgctcagtgaaagaaatcagacccaaaagattatgtattctattattattccatttgtatgatattttggaaaaggcagagctacagcaatgagagaactgatcagttctccaccaagttgccaagatttggtggtgaagaaagtttcaggcggggcacagtggccctcgcctataatctcagcactttaggaggctgaggcaggaggattgcttgagcccaggagttygagaccagcctgggcaacatggtaaaacttgtttctataaaaaaaaatatgaaaatttgcagaccatgtcggtgtgttcctgtagcccagctacttgggaggctgaagtgggaagatcacttgaatctgggaggttgaggctgcagtgagccataatcgtgctactgtattccagcctgggcaacagagtgaaaccatgtcttaaaaaaaaaaaaaaaagaattttactacaaatgggtaacacattttgggggatgataaactttggtatcatgactgtaatagtggataaatggcactatgtgtgttaacaaatagaactttatttcacaaaa

SEQ ID NO: 230219 - DNA, 538 bp, Homo sapiens
gaattcattgcaaaaagatcattgcctaggcacrtagccatcatgttatctaaagtcaaaatgaaggaaataatcttaagagctgtaaggcaaaaacatcaagtagcctataaaggaaaacctgtcaaattaacaggagatttctcagaagaaaccctacagactaaaacagattggggtcttatttttagcctccttaaacaaaacaattatcagccaagaagtttgtatccagctcaactaagcttcataaatgaaggaaaaatacaatcttttccagacagacaattgctgagaaatttgccaccatcaagccagcactataagaactgctaaaaggagctctaaatcttgaaacaaatcctcaaaatacaccaaaatagaacctctttaaagcattaatctcacatgacttatataacaataacaaaatttaaaaaataaggtattaaggcaacaaataacccaatgaatataatagtacctcatatctcaatactaacattaaatgtaaatggcctaaatgccccacttaaaa

SEQ ID NO: 230220 - DNA, 592 bp, Homo sapiens
aattcttggaaatatacaatcctcctagattaaaccaggaagatataaaatctctgaacataccagtaacaagcagcgagactgaaatggtaattaaaaaattgccaacaaaaaaagttcaggaccagacagattcacagctgaattttattagacattcaaagaagcattggtaccaatcctattcacactattccacaaggtaaaaagggaatcctccctaaatcgttatatgaagccactatcaccctaatacccaaaccagcaaaggacataacaaagaaaaccacagaccaatatccctgatgaacatagatacaaaaatcctcaacaaaatactagcaaactgaatccaacagcatatcaraaagataatctaccatgatcaaatgggtttcatgccagggatgcaggtatgacctacatacgtaggtcaataaatgtaatataccacgtaaatggaattaaaaacaaaaatcacatgatcatctcaatagacacagaaaaagcatttgacaaaattcagcatccctttgattaaaaccctcagcaaaatcagcataccagggacataccttaaggtaataaaagc

SEQ ID NO: 230221 - DNA, 513 bp, Homo sapiens
tcatggatgggtagaatcaatattgtgaaaatgaccatactgccaaaagcaatctacaaattcgatgcaattcccatcaaaataccatcagcattcttcacagaactagaagaaacaaccctaaaattcayatagacccaaaaaaaaaaaaaaaaaaaaaaaaaaaagagcctgcatagccaaagcaagactaagcaaaaagaacaaatctggaagcatctcattacctgacttcaaagtgtactataaggctatagtcaccaaaacagcatggtactgttttaaaaataggcacatagactgctggaacagaatagagaacccagaaataaagccaaatattcatagccaactggtcatcaacaaaacaaacaaaaacataaagtaaagaaaggacatcctattcaacaaatggtgctgggataattggtaagccacatgtagaagaatgaaaccggatcctcacctgtcatacaaaaatcaactcaagagggatcaaagacttaaatctaa

SEQ ID NO: 230222 - DNA, 513 bp, Homo sapiens
tcatggatgggtagaatcaatattgtgaaaatgaccatactgccaaaagcaatctacaaattcgatgcaattcccatcaaaataccatcagcattcttcacagaactagaagaaacaaccctaaaattcatatagacccaaaaaaaaaaaaaaaaaaaaaaaaaaaagagcctgcatagccaaagcaagactaagcaaaaagaacaaatctggaagcatctcattacctgacttcaaagtgtactataasgctatagtcaccaaaacagcatggtactgttttaaaaataggcacatagactgctggaacagaatagagaacccagaaataaagccaaatattcatagccaactggtcatcaacaaaacaaacaaaaacataaagtaaagaaaggacatcctattcaacaaatggtgctgggataattggtaagccacatgtagaagaatgaaaccggatcctcacctgtcatacaaaaatcaactcaagagggatcaaagacttaaatctaa

SEQ ID NO: 230223 - DNA, 513 bp, Homo sapiens
tcatggatgggtagaatcaatattgtgaaaatgaccatactgccaaaagcaatctacaaattcgatgcaattcccatcaaaataccatcagcattcttcacagaactagaagaaacaaccctaaaattcatatagacccaaaaaaaaaaaaaaaaaaaaaaaaaaaagagcctgcatagccaaagcaagactaagcaaaaagaacaaatctggaagcatctcattacctgacttcaaagtgtactataaggctatagtcaccaaaacagcatggtactgttttaaaaataggcacatagactgctggaacagaatagagaacccagaaataaagccaaatattyatagccaactggtcatcaacaaaacaaacaaaaacataaagtaaagaaaggacatcctattcaacaaatggtgctgggataattggtaagccacatgtagaagaatgaaaccggatcctcacctgtcatacaaaaatcaactcaagagggatcaaagacttaaatctaa

SEQ ID NO: 230224 - DNA, 516 bp, Homo sapiens
gagatcttaggtaaagtggctagatgaatgtcagttttttaaatgaaaaattatagggagakgggacttgataccaattccaaagcaaaaatattctaggaagaataaaagatttgaaaaaggcaaggcttctataagaaacacacactttaaagggttataaaaataatatatgcgaaagcacttttttttttttttttttttgagatggagtttggctcttgttgcccaggctggagtgcaacggcacaatcttggctcactgcaacctccacctcccaggttcaagcgagtctcctgcctcagccgcccaagtagctgggattacaggagtgcaccaccatgcctggctaattttttgtatttagtagagatggggtttcaccatgttggtcaagctggtcttgaactcctggcctcaggtaatccactggccccggcctcccaaagtgctgggagaaagcactttttaaactgtgaagaactgcataaatctgtggacattttatgattacc

SEQ ID NO: 230225 - DNA, 516 bp, Homo sapiens
gagatcttaggtaaagtggctagatgaatgtcagttttttaaatgaaaaattatagggagaggggacttgataccaattccaaagcaaaaatattctaggaagaataaaagatttgaaaaaggcaaggcttctataagaaacacacactttaaagggttataaaaataatatatgcgaaagcacttttttttttttttttttttgagatggagtttggctcttgttgcccaggctggagtgcaacggcacaatcttggctcactgcaacctccacctcccrggttcaagcgagtctcctgcctcagccgcccaagtagctgggattacaggagtgcaccaccatgcctggctaattttttgtatttagtagagatggggtttcaccatgttggtcaagctggtcttgaactcctggcctcaggtaatccactggccccggcctcccaaagtgctgggagaaagcactttttaaactgtgaagaactgcataaatctgtggacattttatgattacc

SEQ ID NO: 230226 - DNA, 531 bp, Homo sapiens
gatcactcactcacccatcagacattgatggagcatctgctctgtgccaggcactgttgagatatggagsagcagcccgcacaggtggggctcctgccctcagagggccaggagttcagcgggacagacagacaatcaataacagtgacagggcgatgaaagttaaagacccctagggtgtaacaggacttcagagcagtggcctaactgcctggagaagtcaaaaggcctgctcagaggagataacttaactaacctagaagagctcccgggaggtcagagccagggaggggacctgaggcaggtgtgtttgtctgttttttgttgctataaaggaatacctgaggctgggtaatttacaaagaaaagaggttcatttggctcacggttctgcaggctgtacaggaagcatggcaccagcatctgtttctgatgagggcctcaggaagcttccactcaagatggaaggtgaaaggggagcagtcatgtcacatagtgagagaggaagcaagagagagggggaggtgccat

SEQ ID NO: 230227 - DNA, 542 bp, Homo sapiens
tagatcttcattctttaagaggatcactcactcacccatcagacattgatggagcatctgctctgtgccaggcactgttgagatatggaggagcagcccgcacaggtggggctcctgccctcagagggccaggagttcagcgggacagacagacaatcaataacagtgacagggcgatgaaagttaaagacccctagggtgtaacaggacttcagagcagtggcctaactgcctggagaagtcaaaaggcctgctcagaggagataacttaactaacctagaagagctcccgggaggtcagagccagggaggggacctgaggcaggtgtrtttgtctgttttttgttgctataaaggaatacctgaggctgggtaatttacaaagaaaagaggttcatttggctcacggttctgcaggctgtacaggaagcatggcaccagcatctgtttctgatgagggcctcaggaagcttccactcaagatggaaggtgaaaggggagcagtcatgtcacatagtgagagaggaagcaagagagagggg

SEQ ID NO: 230228 - DNA, 505 bp, Homo sapiens
ccagcaggcttgagaccctgatagaaccaatgtttcagtttaagtctgaaggtaggaaaagaaatgatgtcccaacctgaaggcagttaggaggaggagttctcttttattcatgggagagtcaggctttttgttctgcttaggccttcagctgattggatgagccccacccacagtcgggcagtctgcttttattcattctaccaactcacatgtcactctcacctagaaacacccccacagacacaccgaaagtgtttgactaatgtctgggcaacgcatggcctggtaaagttgacctgtaaaatgaactaacattactgctgtcaacaaaactattaagtcaastttcatatttatttaccgttctttttggccttagcctgtatcccattacagatggcagtcagaaataagagtaagttgagggctgagcacagaggcttgtgcctgtaatcccagcactttgggaggccaaaatgggaggaccacttgaggccaggag

SEQ ID NO: 230229 - DNA, 306 bp, Homo sapiens
agtttgttattatccaccttctgaagcctgcttctgtcaattcatcaaactcattctctgcccttgctggagaggagttgtgatcatttggaggagaagaggcattctggttttcagaattttcagcatttttgcactggtttctcctcatcttygtggatttatctacttttgatctttgaggctaatgagctttggatgggatttctgtgtgggttttttttttttttttttttgcttgttattgttgatgttgatgttactgctttctgtttgttagtttttcttctgacagtccagcctctc

SEQ ID NO: 230230 - DNA, 306 bp, Homo sapiens
agtttgttattatccaccttctgaagcctgcttctgtcaattcatcaaactcattctctgcccttgctggagaggagttgtgatcatttggaggagaagaggcattctggttttcagaattttcagcatttttgcactggtttctcctcatctttgtggatttatctacttttgatctttgaggctaatgagctttggatgggatttctgtgtgggttttttttttttttttttttgmttgttattgttgatgttgatgttactgctttctgtttgttagtttttcttctgacagtccagcctctc

SEQ ID NO: 230231 - DNA, 491 bp, Homo sapiens
tactttcaactcctgggaacgatgctcagaaccgagaatgcagtggccagaaaagggacattccttatgaggatcaccacacttattccactttttgtaactatctgtctacaggcctgaacgcctcactggattataacttcctgggaccccaggctctcacgttcatctctgtgatgcagaaacctagcatagacttggtacatgatgaagtctcaactgtgtttgtgtgtgtgtgtgtgtgtagcgtgtattttagagayggagtctggctctgtcccccagtctagagtacggtgatgtgatcatggcttactgcagtgttcaactcctggcctcaagcaatcctacctcagcctcccaaagtgctggcattacaggcatgagccactgtgcccaaccaaatatttcctaaaataatgactaaaaggtcatttccatgtagatagctaatttgattatcaaagtacttcaaatacattttattaagc

SEQ ID NO: 230232 - DNA, 609 bp, Homo sapiens
gacagacaaggtcctcctcccatggaccttgtagcctagtggagggagacagtaaacaacttccaaagaaaataaggccaggggccagagagtgaatgaggaaggggtgtggctccgggaatgggtggccagggaggtgaggggacagtttagctgagtgccaagaagaagctgccatgcacccatacaaggaagtgcaatccaggcagatggaactgcacagkcaaagatccggaggtgggaggcagcctggcactcgcaaagcatgcaaagactggctgcagcagaaatgcacccatcacggggagaagataaaggacaaggagggaggagatggggggcggacaacacagggctttgtcaccagggcaaggagtctagatgttactccatacacagtgtggatcatttgaaggttataagcaggagagtggaatgatctcatttatagttttaaaaggtcccccaggccactggtcagagaaaacactgcagtgagcaagagctgaagcagataatgggtatagggtttctttttatgggaatgaaatgttctcacattgtagttactcttatttttttttttttgtcttttgtttttgttttttt

SEQ ID NO: 230233 - DNA, 506 bp, Homo sapiens
aaggtgaaaactgatatttactatatatttttaaaatatatttgcccgtgttcatacagtcatcccttggtatccatagcggattggttccaggacttyccacagatactgaaattcatggaagcacacgtatatgatgtaaaacggtatatttgtatataatctatgcacatcatcttgtatacttacttatttacttattttgagatggagtctcgctctgtgctggagtgcagtagcttgatatcggctcactgcaacctccgcctcccagattcaagtgattctcccgactcagcctcctgagtagctgggactacagatgcgcactaccacacctggctaatttttgcattttgagtagaaacagggtttcaccatgttggacaggctggtcttgaactcctgacctcaagtgatctgcctgccttggcctcccaaagtgctgggattacaggtgtgagccactgcgctcagcccatcttgtatacttcaaatcatttcta

SEQ ID NO: 230234 - DNA, 269 bp, Homo sapiens
tgggtttttctgtgaagataatcatgtcatctgttggtaggtacagtcttgtttctccctttacagtctgtgtgtcttttacttttttatcttaccttattatactggctgggacttgtagtatggtgttaaattgggatggtgaagggggacatctttgatttgctaccgacttttagggggaaagcattcaccyttttaccatttaagtatatcatgactttttttgtaaatgcccttattacattgaagaagatttctgggaaatt

SEQ ID NO: 230235 - DNA, 269 bp, Homo sapiens
tgggtttttctgtgaagataatcatgtcatctgttggtaggtacagtcttgtttctccctttacagtctgtgtgtcttttacttttttatcttaccttattatactggctgggacttgtagtatggtgttaaattgggatggtgaagggggacatctttgatttgctaccgacttttagggggaaagcattcacccttttaccatttaagtatatcatgactwtttttgtaaatgcccttattacattgaagaagatttctgggaaatt

SEQ ID NO: 230236 - DNA, 523 bp, Homo sapiens
gtgtagttatttttttcatcatgtctttgtctagtttgaagcagggtgatattgaactcatacagtgagtgagaaattgtctctttctcttgtattttctaggatagatttctaaaattagtgttatttctcctttgaatttttggtagacttaccattaaaaccatctggacctagaaatttctttattagaagttatttaaacaatatttttattttaaaatagtttwagattacagaaatatttatgaagataatatagtttccacataccctatacctagtttgcctactattaacatcttatattatcatggcatatttgttacaaataaaccaatattaatacaaagacttgttctttgtgtcagttgagaaagagttcaagacacagacacacacaaggagtgggtttaggagtcgaaagtttaatagacaaagtggaagaaagagaagaaaagcgttctcatgttgataaagtgggttgcccaagagaggatctctggtttgtggcagaacacag

SEQ ID NO: 230237 - DNA, 523 bp, Homo sapiens
gtgtagttatttttttcatcatgtctttgtctagtttgaagcagggtgatattgaactcatacagtgagtgagaaattgtctctttctcttgtattttctaggatagatttctaaaattagtgttatttctcctttgaatttttggtagacttaccattaaaaccatctggacctagaaatttctttattagaagttatttaaacaatatttttattttaaaatagttttagattacagaaatatttatgaagataatatagtttccacataccctatacctagtttgcctactattaacatcttatattatcatggcatatttgttacaaataaaccaatattaatacaaagacttgttctttgtstcagttgagaaagagttcaagacacagacacacacaaggagtgggtttaggagtcgaaagtttaatagacaaagtggaagaaagagaagaaaagcgttctcatgttgataaagtgggttgcccaagagaggatctctggtttgtggcagaacacag

SEQ ID NO: 230238 - DNA, 565 bp, Homo sapiens
tgtgaaggtattttttaaacatttaaatcagtagactttgagagaagcagattacccttcatcatttgggtaggcctcatctaatcagctgaaggcattaagagaaatgaccgaggtcccatggggaggaaggaattctgcctccagactgtcctggaactcaagactgcaacatcaactcctgccagcttttccagcctgccagcttactttgaaaattgccagcccccatgattgtgtgagccaattcctaatctcttctcatatatatatatatatatatatatatatatatatatatatatatrtatgtatgtatacatataccgtatggctctgtttttctggagaactctgataaatacaaacagcattagaatccaatctcagcaatttctcatttagcccaagctcagctgcacaatccttctcagtgcaagactccagacaactgctttcaataggcaggagccagcataggcatgccacttaatagctgtccaggacttaagatggtaactgggggccgaaaaatttgtaggtatacctgatttggcagaaacca

SEQ ID NO: 230239 - DNA, 564 bp, Homo sapiens
gaaggtattttttaaacatttaaatcagtagactttgagagaagcagattacccttcatcatttgggtaggcctcatctaatcagctgaaggcattaagagaaatgaccgaggtcccatggggaggaaggaattctgcctccagactgtcctggaactcaagactgcaacatcaactcctgccagcttttccagcctgccagcttactttgaaaattgccagcccccatgattgtgtgagccaattcctaatctcttctcatatatatatatatatatatatatatatatatatatatatatatatatgtatgtatacatataccgtatggctctgtttttctggagaactctgataaatacaaacagcattagaatccaatctcagcaatttctcatttagcccaagctcagctgcacaatccttctcagtgcaagactccasacaactgctttcaataggcaggagccagcataggcatgccacttaatagctgtccaggacttaagatggtaactgggggccgaaaaatttgtaggtatacctgatttggcagaaaccatt

SEQ ID NO: 230240 - DNA, 593 bp, Homo sapiens
agttatggggcctccatccactcaggagaaagctaaggggccttgcaggagacagtgatggattcaagccataggaaaaagcatacatcaagggcctctacctcatccctatctttggaggatgtgtataatttatagagtgtttaaattagacaaatggcccaatcgatttagaataagggacaggaaacacatgtttattttgcattaaactgaacttcaccagggtagaaatgcttatgatctcctgagttatggtgcttgggttctccatgaamgtgtgcctaattactgggattgcttctttgcacaaaggcgatccattatggaacatgctgtctccataaagaacagggaataagctaagcagctcaggctaagtggtaatttatatcattgtttatagaaagaaagagcaagagcaggcaggagggcaagacgacagcaagagaacaagaaagaaacctgaagaaaagaagttttagtgaagatggaaaggcttaaaacataccatggagaatgacctcagccttctgtgtggaggatttgcacttggagataaggaaagagagggacttcagagagttaagcag

SEQ ID NO: 230241 - DNA, 607 bp, Homo sapiens
atttgggttggttccaagtctttgctattgtgaatagtgccacaataaacatacgagtgcatgtgtctttatagcagcatgatttatagtcctttgggtatatacccagtaatgggatggctgggtcaaatggtatttctagttctactaatctctactttgtgttctattctccagctatgctaacccctggcaagttcctaaatgtgacattctatctcacactttcatatctttgtacaaactgcaatctctggaatacccttcctctgctcctgtgctgtgtgggcttcaagatggtccctagtcatctctgcctcctaatgttcacatcctgtgtggttccctcccttgagtgttgatggagggggagatctaagttaattctaaccaatagaacatagcaggcataatggaatatcacctctatgattatgttacataygattgtaacttctaccttgctagcagactgtctcttgctggctttggtgaaacaaattgctatcctatgagctgctatatgaggaggcaggcccacatagtaaagaactatgagaagcttctagccaaccacgagaaggaaataaagtccctcagtcaatag

SEQ ID NO: 230242 - DNA, 570 bp, Homo sapiens
ataaattatcctatatatatattcttgcttagtcactgtttttggtagcatccaagccaagccaagtatattcttcctttctaatgccaggataattcctttttactactctgtattatttgccagcaacctagatgacctggaagcaccttcttgcccagagcctcctgatgagagcccagcctaaaccttgattttggtcttgtgagatcctaagcagaaaactctgttgagcccatccagaattttgaycaacagacctatgttgttttaagctacttagttggtggtaccttgttttctcactgatcttgaatcacaggagcaggccaagagatagaacctgtactgggttagatagtgtctccccaaaattcatgtccttcctgaattttagaatgtgaccttatttggaaataggaccattgaaaatgtacttacggttaaaatgaggtcttattggaataagtgggcccttaatccattctaactggtattgttataagaagagaagaggcacagacactgagacacaccagggagaaggctttgcgaagatggaggcagaga

SEQ ID NO: 230243 - DNA, 570 bp, Homo sapiens
ataaattatcctatatatatattcttgcttagtcactgtttttggtagcatccaagccaagccaagtatattcttcctttctaatgccaggataattcctttttactactctgtattatttgccagcaacctagatgacctggaagcaccttcttgcccagagcctcctgatgagagcccagcctaaaccttgattttggtcttgtgagatcctaagcagaaaactctgttgagcccatccagaattttgaccaacagacctatgttgttttaagctacttagttggtggtaccttgttttctcactgatcttgaatcacaggagcaggccaagagatagaacctgtactgggttagatagtgtctccccaaaattcatgtccttcctgaattttagaatgtgaccttatttggaaataggaccattgaaaatgtacttacggttaaaatgaggtcttattggaataagtgggcccttaatccattctamctggtattgttataagaagagaagaggcacagacactgagacacaccagggagaaggctttgcgaagatggaggcagaga

SEQ ID NO: 230244 - DNA, 571 bp, Homo sapiens
caacaatactgaaattaggccagtcaataatcctacaatggcctctaagtgttcaagtgaaaggaagagttgcatgtctctcatcttaaatcaaaagctagaaatggttaagcttagtggggaaggcatgtcaaaagctacgcagacagtgagccaagttgtaaatgcaaagaaaatgttcttgaggaaattaatttttttctttttctttttttttttttttgagatggagtctcactttgtcgcccaggctagagcacagtggcgcgatctcagtttactgcaacctctgcctcctgggttcaagcaattctcctgtctcagcctcctgagtagstgggactgcaggtgcccaccaccacacctggctaatttttgtgtttttagtagagacggggtttcaccatattggtcaggctggtctcgaattcctgactttgggtgatccacctgcctcagcctcccaaagtgctgggattacaggcgtgagccaccgcatccagccggaaattaatgtttttttaaaaaatcatcattcatggattcagtgaacatataaatgacaggaaac

SEQ ID NO: 230245 - DNA, 571 bp, Homo sapiens
caacaatactgaaattaggccagtcaataatcctacaatggcctctaagtgttcaagtgaaaggaagagttgcatgtctctcatcttaaatcaaaagctagaaatggttaagcttagtggggaaggcatgtcaaaagctacgcagacagtgagccaagttgtaaatgcaaagaaaatgttcttgaggaaattaatttttttctttttctttttttttttttttgagatggagtctcactttgtcgcccaggctagagcacagtggcgcgatctcagtttactgcaacctctgcctcctgggttcaagcaattctcctgtctcagcctcctgagtagctgggactgcaggtgcccaccaccacacctggctaatttttgtgtttttagtagmgacggggtttcaccatattggtcaggctggtctcgaattcctgactttgggtgatccacctgcctcagcctcccaaagtgctgggattacaggcgtgagccaccgcatccagccggaaattaatgtttttttaaaaaatcatcattcatggattcagtgaacatataaatgacaggaaac

SEQ ID NO: 230246 - DNA, 571 bp, Homo sapiens
caacaatactgaaattaggccagtcaataatcctacaatggcctctaagtgttcaagtgaaaggaagagttgcatgtctctcatcttaaatcaaaagctagaaatggttaagcttagtggggaaggcatgtcaaaagctacgcagacagtgagccaagttgtaaatgcaaagaaaatgttcttgaggaaattaatttttttctttttctttttttttttttttgagatggagtctcactttgtcgcccaggctagagcacagtggcgcgatctcagtttactgcaacctctgcctcctgggttcaagcaattctcctgtctcagcctcctgagtagctgggactgcaggtgcccaccaccacacctggctaatttttgtgtttttagtagagamggggtttcaccatattggtcaggctggtctcgaattcctgactttgggtgatccacctgcctcagcctcccaaagtgctgggattacaggcgtgagccaccgcatccagccggaaattaatgtttttttaaaaaatcatcattcatggattcagtgaacatataaatgacaggaaac

SEQ ID NO: 230247 - DNA, 581 bp, Homo sapiens
acaccccctctcaaccattggtaaaaaaaaactagacaaaaaataatcaaggataccatcaaacarcaagagctcattgacatttatagaacactccactcaacagcagaatgaacattcttttcaagtgcccaccaaacctatgccaagatagacagtgctatgatttgagtgtttgtccccttcaaaactcattgtaaaatttaatccccaatgtggcagtattgagaggtgggacctttaagaggtgattgggtcataaaggctctgtcatcatgaatggactagttcattcatggattaattggttaataagttgtcatagaggtgggactggtggctttacaagaaaaggaagggagacctaaactaggacatgagcatgttaagccccctttctatgtgatgccctgcaccatctcaggactctgcagcaagtccgccccagcaagaaggtccttacacgatgcagccctcaaccttgggcttcccagcctctataaccataaaaaaaaaaaaatccttttctttatcaatcgcccagttttgagtattctgttataagcaacagaaaacaaaga

SEQ ID NO: 230248 - DNA, 581 bp, Homo sapiens
acaccccctctcaaccattggtaaaaaaaaactagacaaaaaataatcaaggataccatcaaacagcaagagctcattgacatttatagaacactccactcaacagcagaatgaacattcttttcaagtgcccaccaaacctatgccaagatagacagtgctatgatttgagtgtttgtccccttcaaaactcattgtaaaatttaatccccaatgtggcagtattgagaggtgggacctttaagaggtgattgggtcataaaggctctgtcatcakgaatggactagttcattcatggattaattggttaataagttgtcatagaggtgggactggtggctttacaagaaaaggaagggagacctaaactaggacatgagcatgttaagccccctttctatgtgatgccctgcaccatctcaggactctgcagcaagtccgccccagcaagaaggtccttacacgatgcagccctcaaccttgggcttcccagcctctataaccataaaaaaaaaaaaatccttttctttatcaatcgcccagttttgagtattctgttataagcaacagaaaacaaaga

SEQ ID NO: 230249 - DNA, 595 bp, Homo sapiens
actattggtcactaaaataatctaattacattccatgaaaatgtaactggaaacaagacattgtttgacagtgtttgttgaaaacctttatcacaatattacccagagggaagtgggaagaaacagtttccaaacaactcagtttccaaacctgaactcagtaataaccccttctctttcacttacatctaaatatctgatccaggtcttagacaaactgtatgtgtgtgctcatgagccgcagmacacaggaagaggagccccaccatactctctgctgatgatgaggtttactattgagaaccaggagggaccttcagaggcagccagccttgtgggctcaccatactcagaaagaagagtgaacactaatttagctggtgtggccctactgctctagtcagacttcccacaacattctattcagtgaatccatggactccatgacatcactcagggaacatttggagtccccatagcctgtcagtctcagccagagacaaaaatccaaaattctactcagctagccagtggatgcaaccaaagcttcaagctccagatatcagagcttctacattctgtggatctaaagcct

SEQ ID NO: 230250 - DNA, 541 bp, Homo sapiens
agagggagaaagagagtccccagcactaaaaaggacacattagatggggttgtgtgagcagcaggcacctgcactgctccggggggtggcaggacctcygagggagctccctgggggttggctgcagggagactgcccgcaggtcccagcaaagagccccacacgcaagcctcggatgggatcctggcactgtctgcttaccaggagccaggccagacaaaggggaaccaaggtgtggagcactggacaaggagtgaaccaaaggtggccagttcggccatgaatagagtcctcccagatgccctcctcaaactaagttccccttcatagacttttgggatgagtggaacaaaccccagttgtagagatgagggagatttctgccagccctggcagaagtggggcagagaactgattataatcgattgcataaaaataaagctctatgactattgtgcgtgtgtgtgtgtgtgtgtgtgtgtgtgaagttttttttttttttttttgagacagtcttgctctgttgcccaggctggagtgc

SEQ ID NO: 230251 - DNA, 594 bp, Homo sapiens
catagaccaggcaacatgaaaaggacatgaattaggatggaaactgtgggattaaaagaaaaaagaagaataaagcctttagattaaaccattagactcagcggtgttttaaattttttggttgatggctgaatgaattaatagcaaccgaggawgtagcacctggaagtttaagcatttgagatttaacatcacaaagccataaaacattaaatatttacttctgttagtgtgctttggctttgacgtttacattatctcataacaattctattaatattagacattatcccaattttaaaggttgagaaaccagggttttaagttgttttgtatcttatttatatcttatcagtgatagaatccatacctttgctttggtgtctgtgcctttgcttatattcatttccaagccaacatagttgtcttgtactacacattatcatggatttatttttaattggggtataatttatactcagtgcaatagattttatgtcttaagtctattgagttttgataattgcatacacctgtgtaacctccacacaaaacaaaaatatagactattcgttcacctccaaaagattgctg

SEQ ID NO: 230252 - DNA, 594 bp, Homo sapiens
catagaccaggcaacatgaaaaggacatgaattaggatggaaactgtgggattaaaagaaaaaagaagaataaagcctttagattaaaccattagactcagcggtgttttaaattttttggttgatggctgaatgaattaatagcaaccgaggatgtagcacctggaagtttaagcatttgagatttaacatcacaaagccataaaacattaaatatttacttctgttagtgtgctttggctttgacgtttacattatctcataacaattctattaatattagacattatcccaattttaaaggttgagaaaccagggttttaagttgttttgtatcttatttatatcttatcagtgatagaatccatacctttgctttggtgtctgtgcctttgcttatattcatttccaagccaacrtagttgtcttgtactacacattatcatggatttatttttaattggggtataatttatactcagtgcaatagattttatgtcttaagtctattgagttttgataattgcatacacctgtgtaacctccacacaaaacaaaaatatagactattcgttcacctccaaaagattgctg

SEQ ID NO: 230253 - DNA, 433 bp, Homo sapiens
gtaggccagcttacaggtgaattatcgcaattctcaatcattagagtaggactaaataatgttctgttaagttaaagaaaagagcaactggttgtgctcctattgagaaagccacaataatgtcatccacatacattctcggtggaccccagtggctaaaatttggagtttcttctccttcgccttcttctctctcaggtaactcactacagagggagaaagaaaaaaatacacacaattttarggcatactcattattaaaggtccttggaaggttttgaaattgtaaaatctataggtagttaaatgattctcaatttttaagtttttaaaatatttacatcaataaatatgcaaagcaaaaatatattgctttaacattcaactcaacaaatccccacccagcattagaaaatcacagaattattataaa

SEQ ID NO: 230254 - DNA, 517 bp, Homo sapiens
agaagaaatctacttaaagacagtattcaaggctgggtatagtggctcatgcytgtaatcccagcactttgggggactgaggcaggtggataacttgaggccaggagtttgagaccagcctgcccaatatggcaaaaccccatctctcctaaaaatacaaagatttgacaggtatgatagtgttcatctgtaatcccagctacttgggaggctgaggcatgagaattgcttgaacctggaaggcagaggttgcagcaagccgagattgcgccactgcgctccagccagggtgacagagcaagactgagttaaaaaaataataataaaaggcagtatgcacaaagtgttcagatcagccgtcagtccagactcaccttatggatcctagagataagccttgttattcctttcagcattgtccttgtactcttaaaaaaaaaaagtgaaaggtaaagcacaaatgggaaaaaatatttgcaacatgggaaactgacaatggattattatgggttaataa

SEQ ID NO: 230255 - DNA, 501 bp, Homo sapiens
tgctatagtaatagaaaatgtgaaatacaaaaaaaaaagtcataggaagtaccataagaaaggacacacacaaaggtcctaatacacaaacacatacacacagacacacacacacacgtgcacgcrcacagagatcctaataatacatgcgaacagatagtcttgggtggagggcacagggaagctcatacacagccaaaattgactcgatgtttttcaaaaatataatacatcgtcattaactatagggaccatgttatacaataaagctcttgaacttattcctcccatttaactaataatgatgtatcctttgatcaacattttttccaaaccttttcctccaatcactctagcctctggtacccactgttttactttgtacttctatgagatcaacttctctggatgccacatgtaaatgagatcatccaatatttgtgtttctgtgcctggctaattttacttaacctaatgcccaccaagttcattcacattgtc

SEQ ID NO: 230256 - DNA, 563 bp, Homo sapiens
caaactcacaaatccctgaggtccacatgctcagagcccagctcagcactaggaattgcctaggagtttcagtccttgaggcctagactgcctttcaagtttgttttatttaggccctgagagcactttaatccatggtggcaaggcttgtcaaaactcaggttccaacaactgggatgagtgattcccgtctggctagggctgctctaaatgccccctccatgcgtggactacacctgaattgagcctggtttttcttcctactgtgacagggccttactgagttcaatgcatagtctcataagagctgggggtggagtgacacaagcacccttgtggccaccactactgtgactgcactgcatcagttctgaaaccagtacagcactgggtctcatccaagacctgatgtaatcrgtccctggctgctgcctatttcctttccactattttattctccttccacagacagcgaagcctcaccccatggccaccaccactacaagtccacagaggtactgccaggctaccgctgatgttcacttaagaaccaagggctctta

SEQ ID NO: 230257 - DNA, 640 bp, Homo sapiens
tgatgagaagagatttcagatccatctcttaaagggaataataacaaaggataataaacatattgttaaaccaccatggaatatttgtaactttatttaatccagattttcctgaagtaatcttaccatagaaatctatattaaagtaacatgtttctaaggwttccctaaaagtacccatgacataaccaaattctatatggttttatttgaatatatatatgaagaaactttttcaagagaaaaagcttgagtctttctaaaatattcaagcagcttgagtgtttctaaaatattcaagcagcttgacgactgttttcaaatactcccttgaattgtatttatagtttttgactgtttctaataattcataactgttgatcatgatctaaattggcaatcctaattttggattatacaattggacataaaaatatatgttttggagagacattttctatctgtaacttggcatatactgctgtattttaaagtttaagtggtgttattaagggtgctgactaggatcactattctgcaatgtgaaactgttatgagcaggaatgaaatacagtttttaaagcagagtgttctattttttcaacaaccaacagattggtaaaatggaacattttgtaaa

SEQ ID NO: 230258 - DNA, 640 bp, Homo sapiens
tgatgagaagagatttcagatccatctcttaaagggaataataacaaaggataataaacatattgttaaaccaccatggaatatttgtaactttatttaatccagattttcctgaagtaatcttaccatagaaatctatattaaagtaacatgtttctaaggattccctaaaagtacccatgacataaccaaattctatatggytttatttgaatatatatatgaagaaactttttcaagagaaaaagcttgagtctttctaaaatattcaagcagcttgagtgtttctaaaatattcaagcagcttgacgactgttttcaaatactcccttgaattgtatttatagtttttgactgtttctaataattcataactgttgatcatgatctaaattggcaatcctaattttggattatacaattggacataaaaatatatgttttggagagacattttctatctgtaacttggcatatactgctgtattttaaagtttaagtggtgttattaagggtgctgactaggatcactattctgcaatgtgaaactgttatgagcaggaatgaaatacagtttttaaagcagagtgttctattttttcaacaaccaacagattggtaaaatggaacattttgtaaa

SEQ ID NO: 230259 - DNA, 640 bp, Homo sapiens
tgatgagaagagatttcagatccatctcttaaagggaataataacaaaggataataaacatattgttaaaccaccatggaatatttgtaactttatttaatccagattttcctgaagtaatcttaccatagaaatctatattaaagtaacatgtttctaaggattccctaaaagtacccatgacataaccaaattctatatggttttatttgaatatatatatgaagaaactttttcaagagaaaaagcttgagtctttctaaaatattcaagcagcttgagtgtttctaaaatattcaagcagcttgacgactgttttcaaatactcccttgaattgtatttatagtttttgactgtttctaataattcataactgttgatcatgatctaaattggcaatcctaattttggattatacaattggacataaaaatatatgttttggagagacattttctatctgtaacttggcatatactgctgtattttaaagtttaagtggtgttattaagggtgctgactaggatcactattctgcaatrtgaaactgttatgagcaggaatgaaatacagtttttaaagcagagtgttctattttttcaacaaccaacagattggtaaaatggaacattttgtaaa

SEQ ID NO: 230260 - DNA, 567 bp, Homo sapiens
aaaatattgacttcaaggttccatctctttatgattctagtgcatttatctgactattatccaactttacccttctaaagggtaaattcttgagagtgaatctgtaatacttacctaacttgaggtatcaaaatgtataaattaagcctaaattatacagtatgcaaggagaatttcataacttattgcatagtgtatacatactagttcatagtatgtacatgattcagggtcagataaataatttttattgctttttttcaattcgaaaagaatgtttatctaatttcagaatgagagatgtcaytggctaatttatgtgctaatatgaccacaaatcatgctttatttgtaaaagttaatctattttatgctctatccaaaataaatcaataattattttgaagcctcatgggcataataattttatatattctttacccagtttctggatcttaatagttgcttaataagcattcatcttctttcttatgtattatgaaaagagaatcacattactttttaaaaaagtagtactctgtgctaaataaatatagtctgaaactt

SEQ ID NO: 230261 - DNA, 471 bp, Homo sapiens
attaaatatcttgattccttagaaactttttattttctaaacaaaaatgtaattcagaaaaaaattctaaatgtagattttagtaatatacataattgccaaataataaaagcaagacacttagactttttgtcataactttgagatttttaagtgtttgatataaacatttgattcttaaacatttgatatattaacacaggtatataaatattattgatcaagagattttttgaaatatccctgataaactgataattcagtggacaaactaggtaatttaatgttagttaatccctgattttgcawctttgaaaaataacatttgtataatatatttattaatactagagctagatttgatttatcagtttaaaaaatataatttttggacattagttgtatggatcaagtaagttattattgttgccacaaattgtacatttgtttaataattgatgtcctttaaaa

SEQ ID NO: 230262 - DNA, 510 bp, Homo sapiens
acctctaaataatactattatgcttcaaattgagtattaccaattattttcttcttttttttgtggtattgmtaccagttaactcactttttcatatgctatactagcccaatacattgttactcttactaatttagattaatatattttgtctaaagtcaattttttaaagtcaaatatattttaccttcactcactcattttccagtgcccttcttttctttatgtagattcatatttctctctcatctattttatctctgtctaaataacttcttttgactttcctggaagggcaaatgttttggcaatggattcactcagtttttttgttgttgtttagttgttgaggaagatttttatttctctttcaattctgaaggttaatttcactgcctatagaattatagattggcagttttgtttcctgttattctctttcaacacttcaaatattttactacaccttcctcttgctttcataatctttcatgtaattttgatgaaaag

SEQ ID NO: 230263 - DNA, 510 bp, Homo sapiens
acctctaaataatactattatgcttcaaattgagtattaccaattattttcttcttttttttgtggtattgataccagttaactcactttttcatatgctatactagcccaatacattgttactcttactaatttagattaatatattttgtctaaagtcaattttttaaagtcaaatatattttaccttcactyactcattttccagtgcccttcttttctttatgtagattcatatttctctctcatctattttatctctgtctaaataacttcttttgactttcctggaagggcaaatgttttggcaatggattcactcagtttttttgttgttgtttagttgttgaggaagatttttatttctctttcaattctgaaggttaatttcactgcctatagaattatagattggcagttttgtttcctgttattctctttcaacacttcaaatattttactacaccttcctcttgctttcataatctttcatgtaattttgatgaaaag

SEQ ID NO: 230264 - DNA, 607 bp, Homo sapiens
caagggtgtgtgttcaggggtggacaatacccctttcacacttttcacagtttgggcattcacagtatgtgggctattttctgggtcatgcaggagcaatrtactttcttcagagggtctgtggattatcttggctttcctgttatatccttgcagcagttcttggagcaaaagttcacaatgcgagtctccacatcctgctctgtccatccaagtgggagctgcaagttagtcctgcctcctatccaccattttttcctattttgtattttaaattaaaactcattagaatgtaaactccatgagggcaataattttaatccagttttttcactgctaaatacctcaaaactgttacatgtgctgccattatcatggacgttctaaacatttctcatgaatgaatgttgatatagcacagtgctgatctcaccacctgccacaaagtaaaaactctctaaatgtcaaacactactattataagtaatactattctatcattgagacaactatggttctgtatctctttaaggagtgcagtctaggcaacaacatatttcaacatcaggtatctgttatctcatgttcctaagttcatctttttacc

SEQ ID NO: 230265 - DNA, 529 bp, Homo sapiens
cacatcctgctctgtccatccaagtgggagctgcaagttagtcctgcctcctatccaccattttttcctattttgtattttaaattaaaactcattagaatgtaaactccatgagggcaataattttaatccagttttttcactgctaaatacctcaaaactgttacatgtgctgccattatcatggacgttctaaacatttctcatgaatgaatgttgatatagcacagtgctgatctcaccacctgccacaaagtaaaaactctctaaatgtcaaayactactattataagtaatactattctatcattgagacaactatggttctgtatctctttaaggagtgcagtctaggcaacaacatatttcaacatcaggtatctgttatctcatgttcctaagttcatctttttacctgatcaatattagtaaagatctatggcctcaagtgaactttactctatgaatttacaattgggaacttaggttgaaaatttacctagtattatttattctgctgctataattt

SEQ ID NO: 230266 - DNA, 576 bp, Homo sapiens
actgtaggaggataaatctgtgctgttttaagccactaaattgtaattcatcaaagcagcaataggaaagtagtgtggtcagtattttagagcaggagactttaatttagacagacgtgggttcaagaacagatctgctacatgctattaatttatttacttcataagttttagtttgtctataacatgggagaaataatagttcctacttaataaagttattttaggactaaaagaggtaatgaatgtaaaatgcctgctgtgttagtattctattggtgcgtaacaatgtcaccacaaactcagcagsttaaaacaacacaaagaaattatttcccattgggtgtaggttgggggtctgggtgcggcttaaccgactccttgcatcgatggctatcaaagctgcaatcaagatgttagctggactgcagtctcatctgaggcttgactgggcaagacttcttccaaactcactgtagttattggcagcattcagtgctttgcagactgctgaactgagagcctctgtttcttgtggctgttaactgaaggcagccctctgccccttgccttgca

SEQ ID NO: 230267 - DNA, 497 bp, Homo sapiens
atctggaacaactgcctcaagagagttaggtttggtcctaatgaatcaaagcaaataccaaatgaagattaatcattgttatcagggcaagagaaaggggctttgtatatcttggtaactattgaaactggaaaggctatcagtacaaattcacaacagtatgataaagcrtagaattttctctgtaggaattattattccagacattaagagtctctctaacctctccatactctcttccctgctctaatcactccagtctttctggtctccttactcttccacaaacaagccaagaatgctctcacttcagggcctttgcactggttgttccctttgcttgggacactctttcataagaaaatgacatggttcactcagtctccttcaagcttttgtgcaaagtccccttcaagcttttttacttcttatttaggcctaccctaatcaccttactgaaaagtgcaacttctcttcacctagctcttttgttaccc

SEQ ID NO: 230268 - DNA, 497 bp, Homo sapiens
atctggaacaactgcctcaagagagttaggtttggtcctaatgaatcaaagcaaataccaaatgaagattaatcattgttatcagggcaagagaaaggggctttgtatatcttggtaactattgaaactggaaaggctatcagtacaaattcacaacagtatgataaagcatagaattttctctgtaggaattattattccagacattaagagtctctctaacctctccatactctcttccctgctctaatcactccagtctttctggtctccttactyttccacaaacaagccaagaatgctctcacttcagggcctttgcactggttgttccctttgcttgggacactctttcataagaaaatgacatggttcactcagtctccttcaagcttttgtgcaaagtccccttcaagcttttttacttcttatttaggcctaccctaatcaccttactgaaaagtgcaacttctcttcacctagctcttttgttaccc

SEQ ID NO: 230269 - DNA, 551 bp, Homo sapiens
ccagaatttagctctaattttatctcggttgagttgttcttagtgattttcttatactctttaaattatttccactgaaaccacataaactttgtaaccagaaagtaatcagaatattaataaacaaaaaatcaaattacctacccaacatttttactgcaccagaaaaaaaaataggacagatttttctggtggaaatacctatgacagttgatgagaatagaaaaagaaataaatctgagagctgagaacaatcctatcactcctctactgtacactacatagaccagggagatttgctactcttacagtctgccttcattcttaaattgttgtgtgaggatattgttcttgaagacattgcagaaragttcatattttatatcattccaaaatataaattttatattcattaacaatgacctcgtcggtccggcatggtggttcatgcctgtaatcccggcagtttgggaggccgaggcgcatggatcacctgaggtcaggagtttgacaccagtctggccaatatggtgaaaccttgtctctaccaa

SEQ ID NO: 230270 - DNA, 551 bp, Homo sapiens
ccagaatttagctctaattttatctcggttgagttgttcttagtgattttcttatactctttaaattatttccactgaaaccacataaactttgtaaccagaaagtaatcagaatattaataaacaaaaaatcaaattacctacccaacatttttactgcaccagaaaaaaaaataggacagatttttctggtggaaatacctatgacagttgatgagaatagaaaaagaaataaatctgagagctgagaacaatcctatcactcctctactgtacactacatagaccagggagatttgctactcttacagtctgccttcattcttaaattgttgtgtgaggatattgttcttgaagacattgcagaagagttcatatttyatatcattccaaaatataaattttatattcattaacaatgacctcgtcggtccggcatggtggttcatgcctgtaatcccggcagtttgggaggccgaggcgcatggatcacctgaggtcaggagtttgacaccagtctggccaatatggtgaaaccttgtctctaccaa

SEQ ID NO: 230271 - DNA, 629 bp, Homo sapiens
ttttcttcctcactccaaatcctttcatctctgttagcattaatatctgctttgttgtaccactcaacaaatttgcttctcaatcctttattgcctcatctctgttgccacttttctcgactttatgttcctattgccaaagtacagtctttcccatcatctgaaactcctcaatttccaaagtcacaaattcatatattctgctcattaattaccatatttatttcttctgactagcttactcacacttccatggaaatactgttttaacacattgatacttttaacttaatgcccctactactttctcacatcctttagtagtctccagtatttactctttcttcatgtctctcttcaaattaaatagctcacattccaaataattcttttgcaagcaaycttaaatctcttgccccactttccttttgattgcacagtctagcaaatactcatggctgaataaacttacacatccatcttctccatttatgtacataagcagccaagtgttgtaaagaaaggcaaaaaaaaaaaaaagattagtatctctaaaaattcatgactcagcactgctaaacaatcctactctatcttgtttttgtctgcttagtaccccaccactttgt

SEQ ID NO: 230272 - DNA, 605 bp, Homo sapiens
agattaggggtctagtttcattcttctgcatagctagccaggtatctcagcaccatttattaaatagggcatcctttcccccattgtttatttttgtgaactttttcaaagatcaaatggtttgtaggtgtacagcttcagcttcatttctgggatccttctgttccattggtgtatatgtctgtctttgtaccagtgacatgcagttttgattaatgtagccttatagtgtggtttggagtcaggtaatgtgatgccttttgttttgttttttgtttgtttgttttctgttttgtttttttttttctcagcattgctttggctatttgggctyttttttttgtttctataactaaaataatataaccagaaatataagcaaatgtatgtttaaaaatgaatgtagttaaaagtttaaattgtgatttagaaatctgttaatttttcttactaaaatagagctccgaatatgtaataaaacaagtactactcatagtaacactaaaattatattaataaaacttaaaggctcatctttcaaatgtacatttttatgcagacaaaagctaatgatagattaataataaatataggttaaacagaag

SEQ ID NO: 230273 - DNA, 581 bp, Homo sapiens
ctcggtttccctgaatttgggtttaatgtgtaatgttctctagcattttgatctttctttttcttgaagaaaaagacagatatcaataaattcttaacttctctttgagaaattaaagtttctctgggcagaaccaggtagcatccttctaagctttggaataccctggggcaatcaccatgttagtgattctttgatctttgacttagtgtcctatrctacaaggatggcacatcttctaagcaaagtttgctttcatattcatcagaataaaatttatctcacaaaataaaactatttaaaaagcaaaatggtaattattgtaacattattttcaacatctcacaaatctaattgaagtgataattcaatgaagctattacaatttgccaaatcacctggctagattgtgccttttcatcaagctatcttttacttctgccatcatctcactttctacatgactttttcaaactttctcccctctcctcagtccttcaacttgtctcccacgatagccctccacaggggaaataaaaaacacatgacatgaatgtgcttattcctgccacaaattcact

SEQ ID NO: 230274 - DNA, 520 bp, Homo sapiens
acaactatatagtctagtcaatgggcattaggaaatgaaaatatgatgtgtagattaatttgtaacagatggaagacatacaaaagagattaagttctacatcaaatcatacaaactaaaaattagacatttattggttttcatttataaataacgaaatgttcagcacaaataatttagattcaaatatttaagcaaggaaaaactccgaagtttttaacttatttcctcaaaattatattttataaggaatttcatgatgtattgaaatatgactcctctttctgccattcatttctatgttcttaagggttcttgataagacagagtgcttgaggggaaaaagagagatttttgaaataagcatcaattgcagtcaggtgttamttacaatctcagcctttcaatttttcatataatgagtcattgtttttattaagtactaataagaataaatgatcttacttagtaaataataccaccagttcccttttaaaaatgcaatattatttactacact

SEQ ID NO: 230275 - DNA, 548 bp, Homo sapiens
  misc_feature (1)...(548): n = A,T,C or G
nnnnnnnnnnnnnnnnnnnttaaaagtgtcttgctttcattcctttatatgcagcctgaataaccacagcagaatgccattgtctgatataattttctctttgyaattttgcagctctatatgttcgataatgttgctgaattagaattgaagcatgtttccaagtctgaaatgtaatatatgttctgtacatcctgaaagtagcctgaatgagaactgcagccctttgcatttcttgtaacttcttctttaccatcagtcttctgtaagatgactgtattgtaatggctgcctttcttaagtgcaagaattggtacaatttatgtttggcacaaatggtggctcgatatttcctctgaacaaaaatagtagcttttttgagggaaatgaatcttctcctcaccagtaatgatctaaacctactctgaataagggttgcagaggaatgcatactcttcaaatgtcttctagttttcatacccctgaatgcagcctgaaggatcacagcagagtgtctttgtctgagataatgctgcctctgcagtttt

SEQ ID NO: 230276 - DNA, 569 bp, Homo sapiens
attaatctcacattaccataatagatgtagtactaatgaaaaagtttgaaatattttgagaattaccaaactatgacacaaacacaaagtgagcatatcctgttggaaaaagtgttgcagacttgcttaacacagggttgccacaaaccttcagttcgtaaaacactcaatagctgcaaagcacaataatgcaaagagcaataaaacgaggtatgcctatatgccttaagaacaattgtactcctagtacaattgaagagactgaatacatttcacaccaaaagacatgttcataatacctttaatcataatagctcaaaactrgaaagccaaatgttcatcaaaaatagaacagattaagtatagtgcagaatacgaaataaaaaaattaaaccacggctatactcaacgctgataaatctcaaaaaatgtaataatatcaaatcaaagaattcatatggtttgaactcacctgtaacaattcaaaaagtaagcgaaactaaattattgtgtttaaagaaaacacttaggaaaatggcatgattagcataatggttagcttgagctgg

SEQ ID NO: 230277 - DNA, 596 bp, Homo sapiens
aaaaaatgacaaatgggatctaatttaatgaaagagcttctgcacagcaaataaaactatcaacagagtgaatagacaacctacagaataggagaaaacttttgcaaactatgcatctgacaaggtctcatatccagtaatatataaggaacttaaataaatttacaagaaaaaaacaactttattaaaaagcaggcaaaggacatagacacttttcaaaagaatatatacatgtgaccagtgatcatatggaacatagctcaacatcactgatcattagagaaatgcaaattgaaaccacaatgagataaccatctcacaccagtcaaaatgactattattaaaaagtaaaaaataacagatgctggtgaagttgtagagaaaaaggaacacttatacactgttggtgaaagtgtaaattactkcaactattgtggaaagcactgtggcaattcctcagaaataccatttgacttggtaatcctattactggtcacatacccaccccaaaacaaattattatattataaagacccatgaatgtgtatgttcattgcagcactattcacaataccaaagacatggaatcaacctaa

SEQ ID NO: 230278 - DNA, 574 bp, Homo sapiens
attttggtaattctcacaatatttcaaacttgttattattatatctgttatggtgatctgtgatcattgatctttgatgttactctagtaattgttttggggctccatgaacacccstaattaagatgattaacttaataaatgctgtgtgtggtttgagtgctccactaaccagccattctctcatctctctccctttccttgggtcttcttattccccaggacacaaaaatactgatattaaacgaattagtaactttacaatgccctgttaagcgttcaaatgaaaggaagactggcatttctgtcacttttaattaaaacctagaaatgattactcttattgaggaaagcgtgtcaaaagccaagataggatgaaagttaggtctcttgtacccaacagtaacataacttttgaatgcaaagaaaaagttcttggaggaaattagaagtgctactccagtgaatacatggatgataagaaagcaaagcagcctcattgctgacatggagaaagttgcagtaatctgggtagaagatcaaatcagccgtaacattctcttaagacaaacca

SEQ ID NO: 230279 - DNA, 616 bp, Homo sapiens
atgtataatatatagcatgaatgtatgcatatgtctgtgcatgtgtgggtgcatatatgtatgcatatttgtacgtttctgaatgaatttgtatatatacatgtgcatatttcctagctctgtcttctgaaagcatcaagaagcaaagacattccagttgggcatgcctagtcccaaactttggtctctaatactattcaccactaaaaggactccaactccttggctaattccagggctcaggcagggtaggtatggatgatcctagaacattttgttcttttaaaagttagactagggctcaaaaactaagagatggataccaaaaggacagagccatatgaataggctccttcttgccaaatctggagcaatttgatcatcaactatttagtacttgaatgaattataaactattaaaaatagaaattccttagtccataccaataataaatagataaataactaaataagtgggaaagaaagcagagtccytgcttatggtatgttgctgagagtcaaccggcaaatgtgtaggatgagctagtcttgaaagattagcattttgcaaacattgatgactgccaaattatgatgaagagccagatacttgaat

SEQ ID NO: 230280 - DNA, 533 bp, Homo sapiens
aataaaattgaattattttgacccacatttatggttatattttaatatcgatataacttagcatataagttatattttggggtgaaaaaattttaaatatccttgtaagatatacactgcagttcctgaagtcaatgaaagctcacatacctgataattgacccttctcagaatttaacctgaagtgaatctttcggacacagattgctttagtgtatgctgtgtacatttcgggaaattgagtttagtcaacatggttggcagactacccaacattcacctccacttcctgtttctaactctcacagttttgttcagatattcattcctttttcagtttcagaagaaattctgattggagcaatttaattgagatatattttcctgttatccaggagtggattcatttaaaatggcccaatcagactgaagagaaaggcatacttacacaagtttctgggacacaagtttctctttctcttctctctctagctttagcttgygattctgcagatcacaaattatcatgtatt

SEQ ID NO: 230281 - DNA, 573 bp, Homo sapiens
atgaactggcaaacagaaggtagaatgtttgtatattgctgcctggcagcaatcaggtattgtgaagaaattgaagggtaaggagagctcttcccaaccaaatgtgcaactgtattagaggactctctcctggaagagcatttgattttatatctggagagttgacagaaactttatgaaagtgtggaatcatgcagtatttgtgcaaatatggtagaattatcaattgagaattytgttcaagctactatagagggctagtataagcaatgctgtttctttctcctaggtataacaagaagggagtcaagttttggtcttttcagttctcagcattttgccccagagagttattaacagcttttgcaagtcagaagtaaaaatgaaagtggaactcaaaccatgctctgacccaaacttatgtttgaggacgacgtaggctcattgggtgtaggttgaactgagtggtccctaagtgaaaggagatgaaaattgaaggaagaagaggggcaaaaatccccaacactaagagtaggaagatgagctggatggtttctacaaatggcagacagg

SEQ ID NO: 230282 - DNA, 437 bp, Homo sapiens
ggattctcaaacctgctgccaagtttaccactcaattcctgtctctctatgtgactttctgcttatcctggctttacttctagttgctttttttttttttttttttttttttttttttacactcagctggttatcatggtgctcctgcactccaacttccccaataatctgattccctggcttctactcatagctcctctatgagaatacagccttaatttgacactaatcatgaactcattcactggtttcctccctgaaaraaaggcccttttcccaggcagccataaccagagtcttaaccgagctaacttttctctgttggatattaactgctagagcctctctttttactgtctctctgcttcaaccgtaattatgctcacttccattcctattcaaattaactctttggatcctgttaactccttaagaga

SEQ ID NO: 230283 - DNA, 531 bp, Homo sapiens
gtactgattcgtcatttaacccaacaaaatagtaaacctttttttttaagacctcagacataaattgaacaatcactgagtatgtagtatttaataaagggttttgcatgaaatccaagaggatgcaacctcaaatacctacagaacagaagatgggttaggggacccagagtggacttgaacacccctgccctaggtaaaggtacagctgctacccagcagatgccaattgttgccatgaagaattgtagcccaaggtggtcagacctgattttttcagaaagccaaaaaatatagattttatttgacatctcccyatttttaaattttggaaactttttttttagagaaacaccctagaggccaaacaaaatgttactaggaatatgactatgaggtgcctattgaaaatgtctagctatttaaattgcattggcaggtagtggagtttagtataaggggagctgggtttgaagtaaacttggggttccatgtaagtgttcaataaacatctgtcatctagtattttat

SEQ ID NO: 230284 - DNA, 569 bp, Homo sapiens
gctatttaaattgcattggcaggtagtggagtttagtataaggggagctgggtttgaagtaaacttggggttccatgtaagtgttcaataaacatctgtcatctagtattttatggaccttctgagatctctggcaactttctgtccttgtttcttgcattaaatcatttatcttggcacttaaaagagagtaccatgcttcctgactggtctcttggggcccctttagtctcccagtctttgccatggaagcatggtgctgcacatttggcatgagctcaggtgacacattaagattttgcttattggccaggygcagtggctcaagcctgtaatcccagtactttgggaagctgaggcgggaggatcacgaggtcaagagactgagaccatcctgaccaacatggtaaaacctcgtctctactaaaaatataaaaaaagaaaaatacctgggcatggtggcacatgcctgtagtcccaactcaggaggctgaggcaggagtattgcttgaacctaggatgcagaggttgcagtgagctgagatcatgcctctgcactccagcctggt

SEQ ID NO: 230285 - DNA, 569 bp, Homo sapiens
gctatttaaattgcattggcaggtagtggagtttagtataaggggagctgggtttgaagtaaacttggggttccatgtaagtgttcaataaacatctgtcatctagtattttatggaccttctgagatctctggcaactttctgtccttgtttcttgcattaaatcatttatcttggcacttaaaagagagtaccatgcttcctgactggtctcttggggcccctttagtctcccagtctttgccatggaagcatggtgctgcacatttggcatgagctcaggtgacacattaagattttgcttattggccaggcgcagtggctcaagcctgtaatcccagtactttgggaagctgaggcgggaggatcacgaggtcaagagactgagaccatcctgaccaacatggtaaaacctcgtctctactaaaaatataaaaaaagaaaaatacctgggcatggtggcasatgcctgtagtcccaactcaggaggctgaggcaggagtattgcttgaacctaggatgcagaggttgcagtgagctgagatcatgcctctgcactccagcctggt

SEQ ID NO: 230286 - DNA, 487 bp, Homo sapiens
agagtgctgaaagcttcccctctaatcagcctgtgtggattctgctagcattccaaggcrtctcagacaatccctggaaaactttggggactcagtgaggttttctaaacattttttctgcctgaagatactaaagataagcagcttcacataattacattgttatttcaacacgaacacaacttatcgactgccatttcagtctcaaaacaactgtacatctcaaagaagccctcccttataaattctcaacccaacagggtattgcttttgtccaattattttttagggttgggggaaatcagaagactagcatatcttaaagcatttactttaaaaacctctgttctgcttaattcatgtctaaaagctgaagtggatggctggcctcgggtgaaggaagaacattcctgatgaatggacttgtcagtcatgtgaccagctgcaaaacagtctggaatacagagattatcagcagtcaaaggtt

SEQ ID NO: 230287 - DNA, 619 bp, Homo sapiens
caggtctccagtaaaaccccaccttcaagccagggatggcctgaagcctggaggccaggctgccaatttcaagtagagttgctgaccaggagtgagaacttatggtcttctcccaggcctgcccatggctgcccattgaccaatcagcacacacctcctctcttttgagcccataaataccsttgactcagccagactcacacagacatcaggactaccagctacaggaaggagctatccattttatatctcctcaactcatcaagatgacctgtgtgtagaaacgtgctacccactattggtctcccctttcccgagaggtggacactaagacagatgaccttcctgaggaaaggagctactcactttgggtctcctgagaactgttctgctgctcagtgaagctcctgtccaccttgctcatccttcagttgtccacatacctcattcttcctggacatgggacaagaacttgggacttgccaaatgttaggactaaaagagctataacacaaacagtgctgaaacgtgctcccctgctcacaacgttgtgggtgacaagaaggagaaaacagctgcggcccttcaaggaattcagacctatgtgatccctgagtca

SEQ ID NO: 230288 - DNA, 619 bp, Homo sapiens
caggtctccagtaaaaccccaccttcaagccagggatggcctgaagcctggaggccaggctgccaatttcaagtagagttgctgaccaggagtgagaacttatggtcttctcccaggcctgcccatggctgcccattgaccaatcagcacacacctcctctcttttgagcccataaatacccttgactcagccagactcacacagacatcaggactaccagctacaggaaggagctatccattttatatctcctcaactcatcaagatgacctgtgtgtagaaacgtgctacccactattggtctcccctttcccgagaggtggacactaagacagatgaccttcctgaggaaaggagctactcactttgggtctcctgagaactgttctgctgctcagtgaagctcctgtccaccttgctcatccttcagttgtccacatacctcattcttcctggacatgggacaagaacttgggacttgccaaatgttaggactaaaagagctataacacaaacagtgctgaaacrtgctcccctgctcacaacgttgtgggtgacaagaaggagaaaacagctgcggcccttcaaggaattcagacctatgtgatccctgagtca

SEQ ID NO: 230289 - DNA, 603 bp, Homo sapiens
cattcttcctggacatgggacaagaacttgggacttgccaaatgttaggactaaaagagctataacacaaacagtgctgaaacgtgctcccctgctcacaacgttgtgggtgacaagaaggagaaaacagctgcggcccttcaaggaattcagacctatgtgatccctgagtcaggactgtgacaccctctttggggctctgtggatcctggtatctccaagcttttgggcaccacmacattccctagtgcccacagcagaagccacttgcagtacacctggtccagccacagcctcacatgaagccagcaccagtgttggtgcctggagctgcctgccctgccacagctgtgtgcctggctgtgtgcagtggctgaaccccatgctcaattgctcacacagcagtcactgctctgtgcctagttcacccttggcaaatgtgggattcaggccagtagcaagaggtgagtgcagcctgccaagcctagtcagtagaaggagcccagtagaagtgagcaaaacccaagcaaagatgccaccggagacagaggtttctggctggccaagtgaagccctaaggacactgtgacaataccttttaca

SEQ ID NO: 230290 - DNA, 603 bp, Homo sapiens
cattcttcctggacatgggacaagaacttgggacttgccaaatgttaggactaaaagagctataacacaaacagtgctgaaacgtgctcccctgctcacaacgttgtgggtgacaagaaggagaaaacagctgcggcccttcaaggaattcagacctatgtgatccctgagtcaggactgtgacaccctctttggggctctgtggatcctggtatctccaagcttttgggcaccaccacattccctagtgcccacagcagaagccacttgcagtacacctggtccagccacagcctcacatgaagccagcaccagtgttggtgcctggagctgcctgccctgccacagctgtgtgcctggctgtgtgcagtggctgaaccccatgctcaattgctcacacagcagtcactgctctgtgcctagttcacccktggcaaatgtgggattcaggccagtagcaagaggtgagtgcagcctgccaagcctagtcagtagaaggagcccagtagaagtgagcaaaacccaagcaaagatgccaccggagacagaggtttctggctggccaagtgaagccctaaggacactgtgacaataccttttaca

SEQ ID NO: 230291 - DNA, 461 bp, Homo sapiens
gcattgctaggtcatataagttcctttctagaatatcccctaatttagttttcctttgaataattgtttaatggataaagtgtatttttttctctagaaatccctttgacctttacagaagactggacttataactgaacattatgccaatagaaatgataagatttgttctaatgcttcagaaatttgcttgaagatagtagtgttagtaaatattcaaaagctgttttcttacacagaaatatttttagcaaaatgaataatgcaatattattaagcattgtttctgagatttttaaaaagtatttttttaacccttgatgcaattgcttgtttttactttaattttatctcaccagctagcwaatatataataacttattttcatcttcttttattaccttaggcattcactataattcctgaatttagatttgggataaaatagtgtataataaaaa

SEQ ID NO: 230292 - DNA, 468 bp, Homo sapiens
gaattcgacgattagcttaatcactgagtttccagtggtagtggtggtggagatttgttgatactgtttgtcagaaatgaggagtgtctactaatttgtttaaactgagttggataccatttcccattaatttcattgatagaggaaaataatgaggtaagcattaatttcttaaaatctggcacacattttcacacatacatctttctcatcagtcttctgtgtttttttttttcaaggggaaaaatacgttttctgattttggtaaaaataaattgaaaaagttattggagaatagagaaaaattatgtcaactactatccaatttcctttttgagttgtcaaattgttgtggttggcagaggstcagaacctacaaaaagtcactgttttatctgggattatttacattttccttcaagtatccagtcctggttttgtacactaaggaagtcaactccattctgg

SEQ ID NO: 230293 - DNA, 569 bp, Homo sapiens
ttgtaagtttaatgtaatcatatcagatgagtataaatattgtataagttattggaagaaaagttgaatacataaatcatatgttttatatctatgatactgcatattcacatttcttcacagcactgttttccttgaattggttaaaaattatgtggtctgatattctaaatatttctttgctattataacaaagcacattccatttccattttgaacacttaattttgtgagcagtatttcttaggacgtatctctattattgatatagttggtaatgaaccatgttttcttgtagcaattagtaattttaatccatttccatttgtagttgaaaaaaattgaaaaaatacccaacaccattccattaaaatgcattttcaatagaattttacgtttgtttcacaagtataaaactaaacataggccgggcgcggtggctcatgcctgtaatcccagcactttgggaggctgaggcrggcggatcacgaggtcaggagatggagaccatcctggctaacacggtgaagccccgtctctactaaaaatgcaaaaaattagccgggcga

SEQ ID NO: 230294 - DNA, 610 bp, Homo sapiens
ctcttctgtttccattcccatacatttctcaatactggtatgaaatgagaatggatccaagctggagaatgaatgagtaaaggagctgagttcggattcagagtctcagagtaaacaargaagtaaagcaactgcatatgggaagctgatatctgatttacagaaggaggaaagattttgaaagcgtaggggtttaaccatatatggcctttaactgtagctctagcgtttactgtttgtgtgaacttgagcagcttactcaacttctttgaacctcaatttcctcatgtaaaaataaagattgctgttgttaggatttaatgaaaatatgtatttatttattcaacaactacctatctaaaattgttgtatgtcctagttgcatagcagtgtacaaaatagaagttccctacccttaagaagaagacagataataagttaacaaacacataacataattacagattgtattgataaaaatatgatgagtgatagatccaaggtgatatgataaaggcgccctgctttagagaaggaatgtgtcttaggtgaattccaaatgagccttttctcagttgacattttggtttaaacgtggctagtgagaagc

SEQ ID NO: 230295 - DNA, 567 bp, Homo sapiens
cagttgacattttggtttaaacgtggctagtgagaagccagctattgaaaagcctggagaaaagtattttaggcaaaattaacagcaaatgcaaaggcactagaatgcaagtaagctgagtgtggagaataaaaatggytagagcattttgtgaaaggtagaatgtggtctcagatgaagcttttgatcagcatacaatagcagtacctattgaaatgttatgctattcgttgaagctctaaaactacttctattacaattgtattggagaattgatctaatgttggcaggatattattgaatttagtagtagtttaatgaataaattgcttgactagctgcagtatattgagttttaattcacaaacttacagctgacttcctatctgaacttgtgaaaattatataatctcagcctcaatatcggtgattccttacatttacacctgacgattttcgtaaggctattgtgattatttatgttggagactttataactaattaaccctgtatagatagatgcaatgcatatcacatcagataataaggatatgttgtgagttgcga

SEQ ID NO: 230296 - DNA, 609 bp, Homo sapiens
gtgtaaagcacaaaatactccagcaagaacaacagaaaagccacttgcaagtacaaattgacacaatgcttttaacttttatttgtacttaaaaaaactttcttaagctcaccttgcctcacccccttatttccactgtcagctaaccacaaatctttttcaaatcaacatctcagctctcaccaaattaattatttaggttcagataaaaattttatttacaccatttttgttcattcattcttcaggtgtttttaatctctcagtgtaaaacatttctaaacacagtaaagcccaraacttctctggcatttctattactttctctgagaacagtcttcaacttgttatttatgaaggtttttttttatatcactagtttatatttcaatcaaccagtctagtgattttatcttaaattagtatcattcaaacagtttaaatgtcaaaggccaagtttaaccaaggaagaaaacatcctttagagttattactgtaccacttcaaaaaaagtattaagaaaatcatctatagaaattaagataaaataatggaaatcagggccagttacatgagtatgggacctgttcagtcacacgacccaagctt

SEQ ID NO: 230297 - DNA, 641 bp, Homo sapiens
cataaatatttgaagagatattcttttttgaaataatctatcatattttctcaacagcaatttttttccttacatgtgggacatggattttgatgtatctgtcttgtgttctagagttagtcaaacaaaaagggaatagggaagaatataaaagctgccttttaaatattttgatacctttaaaatacttgtaatatgtagccctaaaaaaagaatgagttcatgtcttttgcagggacatggatgaagctggaagccatcattctcagcaaactaagatgggaaaagacaaccaaacactgcatgttctcacttataagtgggagttgatcagtgagaacacgtagacacagggagggaaacatcacacactggagcctgttttgggggctggggaacaaggagaaggagagcattaggacaaatacctaatgcatgtggggcttaaaacctcgatgatgggtgaataggtgcagcaaaccaccatggcacaggtatacctatgtaaaaacctgcacattctgcacaagtatctcagaacttaaaaaagaaaaaaagtacttgtaatagaagtttatgaacagaargcaaagaagaaataattttctcacatacacataaacccctggtcctttcaccct

SEQ ID NO: 230298 - DNA, 534 bp, Homo sapiens
tagatcaaacagtgaatctttcgggtagttttttwaaaaaactctatttccttcctaatatacatgtaaatatgcacacagaggtttacagacataccaagatatacgtatctatatacgtaagtagagggaaagttatttaggaaggtgccgaagtggtaatccacatggaatttttggatttcgctgatagtcctcacagcttgagtgtaagatgcaacaggggcaagctggatcttgaggtccagcagagattggggccagagtatgagggcccttgagatcttgcagggtctgcactgattctgacaaagggccagtgagtactttttaacagatagacaggagatgaccatagacaggagatgacctgctaagtgcttgagctaagcattctgtcagtgggggaggctgtagtggataattgtaatgccagtggtaggaggagcagacttgaaactgaggcagtctggttaaaaaatgatgcagacctttactagagcatctgtaaagaggcgccagagtttgagagat

SEQ ID NO: 230299 - DNA, 471 bp, Homo sapiens
atttccaagggatcccttttaagaccaatacaaataaggtaaggttgaaaataacacaggtgggcatgggtggctgctggtggtggtgaagccagmacaaagttatcactcatcaggataggcctacctgaggacgaagtcttttacttgggcttgcaggagtcaccggggttgacaggagtgggccgggggagctgtcctagcctagctgagccgtcccaactacccatagtatgcattggctacagacatggcttaggttagagcaatattttgtagctatggagaatagcaagacttatattagcatgactgatgtagaactgagtccactggcaacatgtattaaacagctgctcaaatttgccacagtgtgcaacttgaatgagatgccaatttagtttttaatcctgttgtaaattgaccattgcttagctcattcctgacagacctctttgaaaagcagaattc

SEQ ID NO: 230300 - DNA, 336 bp, Homo sapiens
ataatttcatattatctaatatccattccatattcaaatttcctcaattgcccacttttagtactaggatccagtcatgttttacccactgcatttggcagttttatcttttagtcagtatcttttaatctaaaaatmcttttgcctttattcttctttaatgacattgactttttgaagagtccaggctggttgtcttacaaaatgtcctaaattctgcatttgtttggttgtttcttcatggtatcattaaacctattattctttcacttgtatttcctgtgaactgaaagctaaatctagattcaaattaaacagttctgataaaagtacttc

SEQ ID NO: 230301 - DNA, 538 bp, Homo sapiens
tctggcataattcaaattatgagtggccattataataagatgattggcagtttcgaaaggcacagaagagacgaccatgaaaccgatttacaaacattaaggtacragaagaattctccttctcttctcatcataactcctcctctatacctctccaaaggtctcagatcatccttttttttaactggtaaggaggaagaggtgtaaggaatataataatatcaagcttctctcttactggagttccctatttctgtccctttcaccatatcttctctatatctctcttttaaaattaggtgagctaaatcttacatctcctagaaatttaataaaagaataatttttatttgtatgaggaccttatttgtccttttcccccgtgtatcagtgggtcccaacagaaggggcatcatcatcctcattctaagaaatcataccttcaaatatcccctgaattacaaaataagtatgctacatgtggtatcagtttaggactgcacaatatgaagcttcaaattattttcatactgatgct

SEQ ID NO: 230302 - DNA, 538 bp, Homo sapiens
tctggcataattcaaattatgagtggccattataataagatgattggcagtttcgaaaggcacagaagagacgaccatgaaaccgatttacaaacattaaggtacaagaagaattctccttctcttctcatcataactcctcctctatacctctccaaaggtctcagatcatccttttttttaactggtaaggaggaagaggtgtaaggaatataataatatcaagcttctctcttactggagttccctatttytgtccctttcaccatatcttctctatatctctcttttaaaattaggtgagctaaatcttacatctcctagaaatttaataaaagaataatttttatttgtatgaggaccttatttgtccttttcccccgtgtatcagtgggtcccaacagaaggggcatcatcatcctcattctaagaaatcataccttcaaatatcccctgaattacaaaataagtatgctacatgtggtatcagtttaggactgcacaatatgaagcttcaaattattttcatactgatgct

SEQ ID NO: 230303 - DNA, 271 bp, Homo sapiens
caactttataataaaaatcacagggtaaaagtgtttacttaaaagtaatctacttttacaagcctgtgtgtttgtattagcccattttcatgctgctgataaagaaatacctgagactgggtaatttatacaggaagaagagtttaatggacttacagttccaagtggctggggaggcmtcataatcatggcggaaggtgaggaagagcaagtcatgtcttacatggatggcagcaggcaaaaaaagcttccggagggaaactctccttta

SEQ ID NO: 230304 - DNA, 271 bp, Homo sapiens
caactttataataaaaatcacagggtaaaagtgtttacttaaaagtaatctacttttacaagcctgtgtgtttgtattagcccattttcatgctgctgataaagaaatacctgagactgggtaatttatacaggaagaagagtttaatggacttacagttccaagtggctggggaggcctcataatcakggcggaaggtgaggaagagcaagtcatgtcttacatggatggcagcaggcaaaaaaagcttccggagggaaactctccttta

SEQ ID NO: 230305 - DNA, 617 bp, Homo sapiens
aacagcacaggaaagacctgccctcatgattcaattacctcccaccaggtcactcccacaacatgtgggaattcaagatgagatttgggtggggacacagccaaactatatcagtgttcttctgaccaaagttataagaaacttattttttaaagatcaagcattaaatatggcattgttcttcttcaccatatctaacttttttcctgggtaggctattatgttcatgaatatccccacaagatcccaaaataggaaaactctttcatgaaataaatgtcagggcyacctctgtgcaagaacagtgcatcatgattcaccatcaacacatcggttctgtaaagaaagacccctggcatgtgaaggtaagtagcaccaaaccagtcaaagcacacacagaatactgattggggctgcaacaatcaatgactaccaatgtcatccctcaaaagcatccttgtaaatagttaaattatttcctatagttgactgtaaatggacactgtttactcgggcaagaattttcattaaagctcatattccaaataatggtatatgtttattaatttaaattttcacacagatcactttgagaaaagatttcatgtagtagatct

SEQ ID NO: 230306 - DNA, 449 bp, Homo sapiens
atcctgaccagatgagcactcttggtgtggccagtgagtcttcctttttccatttgtgtgtgcaatagaaaccagtttatgattttacaggtaacctaatgccaagattgcaaaatggagcatagtctgcaaaaatatataattgtgtaagtgtctaygtgtgcatgtgtgtgagattaatatggcacattaggtttccattttagtgctttttagctttgtcctgtcctttcccagaaaagctggtcaagctttttttgaatcacttctacactgttatgattctgatgatcaaaaaagatacccacaggttttctaaagcacagcatttcacaaccttatgtcagtctgaaacaaaatgaaacaaaacacagcaaaataaaacaaaacggttacattagaaaagattaaatggaatgcttaaagaaatttagaaacatttaaaactg

SEQ ID NO: 230307 - DNA, 449 bp, Homo sapiens
atcctgaccagatgagcactcttggtgtggccagtgagtcttcctttttccatttgtgtgtgcaatagaaaccagtttatgattttacaggtaacctaatgccaagattgcaaaatggagcatagtctgcaaaaatatataattgtgtaagtgtctatgtgtgcatgtgtgtgagattaatatggcacattaggtttccattttagtgctttttagctttgtcctgtcctttcccagaaaagctggtcaagctttttttgaatcacttctacactgttatgattctgatgatcaaaaaagatacccacaggttttctaaagcacarcatttcacaaccttatgtcagtctgaaacaaaatgaaacaaaacacagcaaaataaaacaaaacggttacattagaaaagattaaatggaatgcttaaagaaatttagaaacatttaaaactg

SEQ ID NO: 230308 - DNA, 582 bp, Homo sapiens
cagtgcaaagccttaaggaagaaatcttcctcggataatcaaggaatatcaaggagccaaggtggcttgagaagtcagattatctatccgaaactgttataaaatgtatacaagtctatggcatctggcaagaatgagaacatttccatattttatacaggacctttgtgtattgcacaacctgataagtcagccttacctagaattcctgctcctccatacttgccttaggttgcccttcacttcatacaacactttctcaaggaagatttcccatcccaaatcatggccatcatcaaattctctaaactcctgtttgcacatggttaaagactggtatatgcgaccatatatttacatgtatttgttctttctagctatgtgtcttccttgtatatctgaccaaattggaaatctctctagagccataatgcttccccagtgcctgtcaacatgccctatacatagtagacccatggtaactgttcatggaagccamtgctaaagacctctgacatcttaaaaaaaaaatctagaatactttttatgaatgaaactttacattgctgcccagattgcaaa

SEQ ID NO: 230309 - DNA, 359 bp, Homo sapiens
acatccttatggtcctgacaacttctttggcaatgtcagcagcccttggcattttgtcatgcattcttctccaacttgaaattcaggcttagtgcatgcagtatgccacagtcaggcttgtggctactccaggaggggagctgtgactcattcttgagtcacttggccagctttggtttcaattaagcaaatgaatgaaaacaattaaaaacagaagttgccgactaaggctaataaaagggcagcagtaatttttgtctactgtcactgttgtttctctagattgtcatatctttaaaaactyggtaagacaaatctgttagtgtttgattttagatttcttgtttataatctaaaaa

SEQ ID NO: 230310 - DNA, 600 bp, Homo sapiens
aactgactctcctatgtagttagcataggatattaccagcaccctagaatctcactttggtccctccctcaggcctcaaaggtacttctatcttgaccttcaacgctaagattagtttttctgatttcttttttttaagtgtacgtaaatagaatcacacataatgcactcttttgtgtctggcatcttgtgttcaatatcatgttttgagacatatccacattgtcccatgcagcaatattttgttcatcttataaatgtaccatattttatccatttttctgcttccaagttttagtattacaaatatactgccttgaccatcctgtacatatcttttgctgaatgcgtacatatcttttgggacacatttctgttgtgtatagaactaagagtggcttttaactgtgtcgctctagctgtattacacagcatttgccagagtttccctaaatattcttaatatcgttgtgttgttctatgtttaatatttaatatgccaagggttctcagggaacatatggtcacmgttttttttcccccaatggtgtctgtaaagaaacaggataaacatttcaccatagcatcaactttccaaat

SEQ ID NO: 230311 - DNA, 438 bp, Homo sapiens
tcaggggcatcttggaggcattagtctgattgacctgcatgaagggtgactgaggtgatgacatgaaaacaacctgtaagttgatattatgaagaaggtgaaccatgaaggagatgatggacagagaacagtggctgggaaatgagaccccaaggatggcaagtgctcccrtggccagggagagatggataaagctggagagacagataaacaaaacagtcaagtctgttggcaggaagcgaagagggcctgagctctggtggagactggtccctggagcttccacagtttaaccggaagggagtagggcaagacagttgctgatggggataggtgtggagctttggtgatgggcacacaaaggcgcttcccttagactgcatgtgtcccccatggagtttgatggctggaggaaggaaaagagaaagcaacaagtgc

SEQ ID NO: 230312 - DNA, 585 bp, Homo sapiens
tcctataattttcttaatagaattttcttctgtagcttcttagattgtaagaatacagtatatcatacatataacatataacacatgtgttaattgactttgtgttattggtaaggcttctggtcaacagtaggttattggtggtcgttttgggggactcaaaagctatatgcagatttgtcattgcataggaggttggctcctctaactgctgagctgttcaaaggtcaactgtactggctgatatggtttggctttgtgtccccacccagaatctcatcttgaattataatcctataatccccatgtgtcacgggagggactygatgggaggtgattgaatcatgggggcggtttccccccatgctgttcttatgatagtgagagtatagtttcataaggggcttcccccttcccgcttggctctcattctctctcctgctgccctgtgaagaggtgccttctgccatgattgcaagtttcctgaggcctccccagccatgcagaactgtgagtcagttaaacctctttcctttataaattacccagtattaggtatgtccttacagcagcatgagaacagac

SEQ ID NO: 230313 - DNA, 575 bp, Homo sapiens
agaagctttaaaaattttttttagattgattgattagttgcataactaacttgagatggaagccaggcaaacagtggaagaggtggatggaacaagaggatgggaggtctttgtgtatgatagaattaaaactgtcaggcaaaagtcaaggttgtmcctgtacttttcctaacccaaataaaaggagcactggacaagttgtcataaaacatgttctcaccttatatcaagctttcctaggttgaagaccttgtaaaagtcatttaatatctctaaaccttgatatccccatttagaaaattgagtagcatcaccattctattctgcctttctgttatcactattaaaaaagataatgaatctaaaagtgtaataattccatattattacattattacattcatataaatatgtatggttgtaatatgtgtgtattaataatacataattatatgtacattatatgtacctaaatatatgtacattaataatacataataaatatgtatgattaatatggattaatataataatgtaacattattacattactacatccatataaaattccatat

SEQ ID NO: 230314 - DNA, 575 bp, Homo sapiens
agaagctttaaaaattttttttagattgattgattagttgcataactaacttgagatggaagccaggcaaacagtggaagaggtggatggaacaagaggatgggaggtctttgtgtatgatagaattaaaactgtcaggcaaaagtcaaggttgtccctgtacttttcctaacccaaataaaaggagcactggacaagttgtcataaaacatgttctcaccttatatcaagctttcctaggttgaagaccttgtaaaagtcatttaatatctctaaaccttgatatccccatttagaaaattgagtagcatcaccattctattctgcctttctgttatcactattaaaaaagataatgaatctaaaagtgtaataattccatattattacattattacattcatataaatatgtatggwtgtaatatgtgtgtattaataatacataattatatgtacattatatgtacctaaatatatgtacattaataatacataataaatatgtatgattaatatggattaatataataatgtaacattattacattactacatccatataaaattccatat

SEQ ID NO: 230315 - DNA, 575 bp, Homo sapiens
agaagctttaaaaattttttttagattgattgattagttgcataactaacttgagatggaagccaggcaaacagtggaagaggtggatggaacaagaggatgggaggtctttgtgtatgatagaattaaaactgtcaggcaaaagtcaaggttgtccctgtacttttcctaacccaaataaaaggagcactggacaagttgtcataaaacatgttctcaccttatatcaagctttcctaggttgaagaccttgtaaaagtcatttaatatctctaaaccttgatatccccatttagaaaattgagtagcatcaccattctattctgcctttctgttatcactattaaaaaagataatgaatctaaaagtgtaataattccatattattacattattacattcatataaatatgtatggttgtaatatgtrtgtattaataatacataattatatgtacattatatgtacctaaatatatgtacattaataatacataataaatatgtatgattaatatggattaatataataatgtaacattattacattactacatccatataaaattccatat

SEQ ID NO: 230316 - DNA, 439 bp, Homo sapiens
ctttggctccagagtctatgtcaacaaggcctgggatggtttccagaacctatacactaagcctaaatatggagaccttaccataatattaaatatgccaagattcaactgtaaaatcatccctgataccaagaaccaataaaatctcaaytaagcgagaaaagacaaccatttgatgccagtaccaagtgaaccagatagtagaattgaaaatgattttaaagtagcctccataagtatggattcaataagtaattacaaatttccttgaaacattaaaaaaataaaaagtataaaagcaataacaaaatcggattacagaaatgaaaaatataataagtaatatctcaatttatttcagatctgcttgggaagttccctttatattggggactgctaaatatttatttacatatggagataaatacctatctatcat

SEQ ID NO: 230317 - DNA, 410 bp, Homo sapiens
agcttattaaatattaactcacactattacaaggtcccacaataggctgtctgcaagctgaggagcaagcaaagccagttcgagtcccaaaactgaagaacttggagtctgatgtttgagggcaggaagggtccagcaaaggagaaagatgtaggctaggagcccaggttagtctagtcttctcatgtttttctgcctactttatattctagccacgttggcagctgattagatggtgcccacccagattaagggtgagtctgcctttcccagcacgctgactcaaaagttaatctcctttggcaacatcctcacagacacacccakgatcaatactttgcatccttcaatccaatgaagttgacactcagtattaactatcacagggagttagttaatagttgaagtgc

SEQ ID NO: 230318 - DNA, 408 bp, Homo sapiens
atatatagttaaagggaagcttattaaatattaactcacactattacaaggtcccacaataggctgtctgcaagctgaggagcaagcaaagccagttcgagtcccaaaactgaagaacttggagtctgatgtttgagggcaggaagggtccagcaaaggagaaagatgtaggctaggagcccaggttagtctagtcttctcatgtttttctgcctactttatattctagccacgttggcagctgattagatggtgcccacccagattaagggtgagtctgcctttcccagcacgctgactcaaaagttaatctcctttggcaacatcctcacagacacacccatgatcaatactttgcatccttcaatccaatsaagttgacactcagtattaactatcacagggagt

SEQ ID NO: 230319 - DNA, 512 bp, Homo sapiens
agctgtttcttctcacactcatgaaaatttgtccagtccttcataaaaatatttttaaaaattatactaaaaaattacacctcctaaaactggacatgagcaatgccatgaatttagggcccctgggaagagtagagtgctcagcattttgttgcgtgctctaaaactgtgaaggtctttgaacagtcatggttaatgcctgagatactaagtgtttgtgtttaggytgtagctggccccttcttataaatcatatgagatttttcttctgacaatagcaggggtgaagtagcagataaagcacatactgtcctttccttcagaagctgctagttcaccagtgtcgaagccagtacacttatactgaggcagagaaaaaggtgtacacaaatacagtgcaacttagtatgcatagtttggaaacatctatgaaaggctggacaatgaggacaagaaaggtttagtctgggaaacttcctggaagataaaagctgaggcttattggaaaggca

SEQ ID NO: 230320 - DNA, 512 bp, Homo sapiens
agctgtttcttctcacactcatgaaaatttgtccagtccttcataaaaatatttttaaaaattatactaaaaaattacacctcctaaaactggacatgagcaatgccatgaatttagggcccctgggaagagtagagtgctcagcattttgttgcgtgctctaaaactgtgaaggtctttgaacagtcatggttaatgcctgagatactaagtgtttgtgtttaggctgtagctggccccttcttataaatyatatgagatttttcttctgacaatagcaggggtgaagtagcagataaagcacatactgtcctttccttcagaagctgctagttcaccagtgtcgaagccagtacacttatactgaggcagagaaaaaggtgtacacaaatacagtgcaacttagtatgcatagtttggaaacatctatgaaaggctggacaatgaggacaagaaaggtttagtctgggaaacttcctggaagataaaagctgaggcttattggaaaggca

SEQ ID NO: 230321 - DNA, 582 bp, Homo sapiens
  misc_feature (1)...(582): n = A,T,C or G
nnnnnnnnnnnnnnnnnnnnnnnnnnnnnnnnnnnnattgtctaacatgcagcatgcttcactcagtatctttctgtgctcttagtatcttttgggctgtttgcaactcgtgaggtagaggaaaacacattggctttggcgtcagaccatctgtgctccaaccttagccctagcatttactagttttaagttctgaggtaaatcattgataatttttttatatgtaagacagatataatatcagtaattatctaacagggttaagaaattaatgaatttatcttattaccaaccacatacaacaccttgacattccacaaatagtttctctgctccacttattcytctgattttataaaaattgaatgtatctacatgaaatgttcttattaccttttttatgaggccttcttacatccccagagtcagaatttgtcaatcatatatctgtcctcccaatgcatggtgtctactccttgtcttagaaattgtcatgttctaaccctgactataggtaagtaaatatccgtctgttttctctgttgtactttgagcaacatgagggcatgtcctgtgtcgtgt

SEQ ID NO: 230322 - DNA, 605 bp, Homo sapiens
taccttctgtcccttccctgagttttcattaagtaaactcatattgtagggagtggggaatgtaactacacatggacaaatttatttcatcaggagccactgtctattcccctagacccattcagtttccaaagaaactaaccattggttaggaaccattgtctgagcattgggcctattcatttcccctaacattgtttactctagatttcctaatctcccttcccctgtgaagaaggttttaaaagtatatgcacttcatttggttttggataatcattctacggtgatttttttttttttacccacgcataataaaataaatttgtatgcctttttctcctgttaatgtgacttttgtcagtttattttcagcaaatcttgactgcaaaggggaagtcttccctcttcactcctatgcttctttcttttcttcatttttttttctgccttccaatttaccttgactacctttttttcaattatctcacaatcttgaataaatcaacgtttagtagttatgtagttaagcacttttacatttgagcaacgtgaataatgtaatatagttgacttytttaatggaaggccttcccttgggcttt

SEQ ID NO: 230323 - DNA, 605 bp, Homo sapiens
taccttctgtcccttccctgagttttcattaagtaaactcatattgtagggagtggggaatgtaactacacatggacaaatttatttcatcaggagccactgtctattcccctagacccattcagtttccaaagaaactaaccattggttaggaaccattgtctgagcattgggcctattcatttcccctaacattgtttactctagatttcctaatctcccttcccctgtgaagaaggttttaaaagtatatgcacttcatttggttttggataatcattctacggtgatttttttttttttacccacgcataataaaataaatttgtatgcctttttctcctgttaatgtgacttttgtcagtttattttcagcaaatcttgactgcaaaggggaagtcttccctcttcactcctatgcttctttcttttcttcatttttttttctgccttccaatttaccttgactacctttttttcaattatctcacaatcttgaataaatcaacgtttagtagttatgtagttaagcacttttacatttgagcaacgtgaataatgtaatatagttgactttttwaatggaaggccttcccttgggcttt

SEQ ID NO: 230324 - DNA, 583 bp, Homo sapiens
aatttgtttctccaatctgctgagccaaagaccaaagtggtccaagacagaaaactactgcraaattgcataccaatctctttggtttcaaggtcagataattttctaatttgctagggtcttaatctgtacattgagagattcaagtagacgatgtacaatttgaaatcagataacaaatagaggtggtctgcatcaggagagctagtaaactgagacccaaaccccaaatcaatagagcttaccgtctcactattctctctgcttctgcactctaccatctacctgtctcgtcttctcgtcactctctttttcattcattctggttcctacactccttccctacctttatttccctctttctgcaattaatgaagaagtaggcacataaatgttagtgcagcacaagtaaaatgcaggatttacaatcattttgtggaatcatatttaagatatggaaagcattcatgatttattaagtgaaaaaataaaaatttacaaagaaatacaagtagtgatcaaaatatctgtcctctttctatttacctggttagttattcagccaggggaaaatagtattcca

SEQ ID NO: 230325 - DNA, 534 bp, Homo sapiens
acctgttagccaattgtatgtcttctttggaaaatcatctgttcaagtcctttgctcattttctaattttcgtttttgttatagatttgaagaagctccttgtatattttggattttaacctcttgttagatgtatgcaaatattttcttccattccataagagaactttttttattgyttattgttttctttgctgtgcagaagatgtttagtttgatgtagtccaatttgtttatttttgcttttgttgcatttgtttctggtaccgtatccaagaagtacttggcaagaccaaacagatcactttgctctgatgcctgagcagcagctgaggcaagctgttcagtgctgattaaactactatgtaaagtacaaaccctccctgaggtgataaccatggccagatacaacagccctccaaattatccccatccttttaaaactgtataaaatactaaatatataattcttattatatatgataaaagtcataaagctttttccttgtgtttttttttttccaggagttttac

SEQ ID NO: 230326 - DNA, 629 bp, Homo sapiens
atgaggtttaaggaatcatttctgttctcccatcctgtatatggcctagaactcagatttcaaggtaactctggcacccattggccaagaggggagctattcagttggttggaaggcttagaatttcattttaatttctcacttctttatgtcaaaatgtgtcacttccaagaagaaaatatgcaaattatctaaatatgaaagatatgtttaaagcacttttaccaytgaacaatgatattctgcttaggaattaatgaaactgtgatctttgtaagaatttcagaaccaatttgttctatctttaagaacaattctatttggtatagttcttgacaatttgattttcatactatattcatgaagctcaagtacattagcataatagtagcactgggctttaaaatatgtaatttcactctgtcccatttagattttcagggactttgtctcacttctgagaaactttcaaagacaaaaacagaaatagtaagccaagagtcgtttttgaagaatctgactgaatttcaatttcacaaagaaagcagaaagtaaataatacttgatctggaccatccttttcaggaggcaacccaaataatggttcaaaattttctaataacacaatg

SEQ ID NO: 230327 - DNA, 629 bp, Homo sapiens
atgaggtttaaggaatcatttctgttctcccatcctgtatatggcctagaactcagatttcaaggtaactctggcacccattggccaagaggggagctattcagttggttggaaggcttagaatttcattttaatttctcacttctttatgtcaaaatgtgtcacttccaagaagaaaatatgcaaattatctaaatatgaaagatatgtttaaagcacttttaccactgaacaatgatattctgcttaggaattaatgaaacwgtgatctttgtaagaatttcagaaccaatttgttctatctttaagaacaattctatttggtatagttcttgacaatttgattttcatactatattcatgaagctcaagtacattagcataatagtagcactgggctttaaaatatgtaatttcactctgtcccatttagattttcagggactttgtctcacttctgagaaactttcaaagacaaaaacagaaatagtaagccaagagtcgtttttgaagaatctgactgaatttcaatttcacaaagaaagcagaaagtaaataatacttgatctggaccatccttttcaggaggcaacccaaataatggttcaaaattttctaataacacaatg

SEQ ID NO: 230328 - DNA, 629 bp, Homo sapiens
atgaggtttaaggaatcatttctgttctcccatcctgtatatggcctagaactcagatttcaaggtaactctggcacccattggccaagaggggagctattcagttggttggaaggcttagaatttcattttaatttctcacttctttatgtcaaaatgtgtcacttccaagaagaaaatatgcaaattatctaaatatgaaagatatgtttaaagcacttttaccactgaacaatgatattctgcttaggaattaatgaaactgtgatctttgtaagaatttcagaaccaatttgttctatctttaagaacaattctatttggtatagttcttgacaatttgattttcatactatattcatgaagctcaagtacattagcataatagtagcactgggctttaaaatatgtaatttcactctgtcccatttagattttcagggactttgtctcacttytgagaaactttcaaagacaaaaacagaaatagtaagccaagagtcgtttttgaagaatctgactgaatttcaatttcacaaagaaagcagaaagtaaataatacttgatctggaccatccttttcaggaggcaacccaaataatggttcaaaattttctaataacacaatg

SEQ ID NO: 230329 - DNA, 371 bp, Homo sapiens
acagacctgttgtgctggctatgttcatcttttccccagtggtctgctatacctactctcacgtatgttaaaatcccatactatattagtctatttctttgcttccattggctgtttactcccactgctattttattacaaatattgcttcataataacttttactaaatagacaagtgscaccattttaatctcctcctttgaaatgtcttcttcttggccctcattcttacatatcccactcctctctactcaaaatgagattttgattgaagttgggttgaaatgattgacttgtagatgattggcatgtttatgtaactgagacattctattcattcatacagcatatggatcaatttatttatgtt

SEQ ID NO: 230330 - DNA, 609 bp, Homo sapiens
tggtctgctatacctactctcacgtatgttaaaatcccatactatattagtctatttctttgcttccattggctgtttactcccactgctattttattacaaatattgcttcataataacttttactaaatagacaagtgccaccattttaatctcctcctttgaaatgtcttcttcttggccctcattcttacatatcccactcctctctactcaaaatgagattttgattgaarttgggttgaaatgattgacttgtagatgattggcatgtttatgtaactgagacattctattcattcatacagcatatggatcaatttatttatgtttttgatatagtccaatacagttttataaagtgctatgtttagatgtaacatatcttttacagttttttatttttgttgatacttcaaatggcatctttttattacactttttgtcaactgttactcacatataataatgcaatgttaaatatatccatttgtatctatgcacttgctgaactttgtgttataatttgtctttattttcatttggaaattttatatcatctttaactaatttcattctttcttctttatggtcttaatgctgtgtgtt

SEQ ID NO: 230331 - DNA, 607 bp, Homo sapiens
tataatgactttctttgtctcttctggcagtttgtggcttaaaatctattttgtctgatgtaagtatagttactcttgctcttcttcggtaacatcatgaaatatattttttgratccctttatttttagtctatatatatctttataggtgatgtgtgtttcttgtaggtaacagatcaatgggtcttggtttttgatcccttcagttactctacatcttttgattggagagtttagttcacttacattcaacgttgttaaaattcataagtaggggcttactcctgctattttgttatttgctttctggttgttttgcagtcttctcttccttctttcttccctcctatgtatcttttagtgagggtgaggatgattttcttgattagtatattttagcttcttgatttttattttttgtgtatccattgcatgttttctgatttgaggttaccaagaggtttgcaaatactatgttacaactcataattttaaagtgatgacaaaacttaactctgattgcatatagaaacaagcaagcagacacacagaaagaaaactaataaaaactctaaactttaacgtcatcccctgctttttaacatt

SEQ ID NO: 230332 - DNA, 608 bp, Homo sapiens
aaagctgtcctacccccaatcttctgggaaagccttatcctgcctcttgcccttccccctgactgcttggaatgcagaggcggggcttcctgctctgctcactgtgcacaactcaaaatgagcccaaaatctgaattttaactttcagcctcctagatgccacccctagttactgaaacccattgagaattaaaaatttaattaagataatcaagaattttttaattgagctgaacaaaatgagggaagtttggagtgttcaagttcaaggcagggctggctggagcccatcagggatactgtagagatttctaaaatcattacataattagactatttgacctgtaatgttcttccaagatttgaaacctggggaatatcagcttgacaggttagtttaaagctttgttaaatgaacaggtgggtcatttttactcccactgggtgtctttcatctttttatgtttttattttttttaatttcaactattatttcatatacagtggggcacatgtgcttatacattmctcattgtgctattgacagtagcaaaaacatggaatcatctttttatatagttgtcctcactatctctgactctgttact

SEQ ID NO: 230333 - DNA, 503 bp, Homo sapiens
cagagaaagtgtctgctgtcgtcaggatctagagaaccactctgaatgggacaatgtgatttacatgccaagaacatcctggcccattggctttgacctctgtccatgggcagtgtggttagccttaaacaggttttgacaagcagaccagcttttcatgctgtttttgagatttctgttggcagtggcagtccatacgtgtaggcccagtctaaggtggttcctgaatatttatgggccatcctcttgtggatcaaggaggtgatccgccacacatcagcttgctgtggrgaagaggacagtttgggctctgtgtttaattggcaagtgcagtctgctcattggtcatgtgatccttgttagcataggggcctttctggtcagcatccacgtgggtaacaaaaagtaggaacggaactgatttctatctaaatgtcttgtcctcacagtggggcttctatatgtcagtactaggcttcccagtggctccaacaaatggccag

SEQ ID NO: 230334 - DNA, 512 bp, Homo sapiens
attaaaagctttatatattattatctttttttactttatttggaattactttaatgttttcttttaatttcttgagatgtacaattagattatcaaaattttagcctttcatcttttctaacatatcrattttaaatatataatttttcccaaagcaaagctttagctgcattttgcaaattttgtcatttcttttatcattcagttaattttttttgaaatttcttatttggtttattctattatctttttattatttggtagtgtattatttaatttcaaatatttgggacttttctcattatctttttgatatttatatctagtttaattccactgtattttaaaaatatattctatatttttcagaaacttgatttatatccagcaacagtctattttattgtatattgtatgtacatttgaaaagaatgtgtattttgcagtggtttatattaccaaccagattttcatttttaatcatgttgtttaaatacttcattatttttata

SEQ ID NO: 230335 - DNA, 539 bp, Homo sapiens
tggcttaaaacaacagaaatttattgtctcacagtcatagaagccaaaatcaagttcaaaatcaaggtgtcagcaggactgtactccctctgaaacctataaggagagtccttccttgcttcctctactttctggtggctccyggcactcttcggcattccttggcttgtagatgcatcgctccagtctctggctctgtcgtcgcatggcattttgcctgtgtgtctccctcttttcttataaaaaacacagtcgcattgaatcaagggctcaccctactctagtttgacctcatcttaagcgattacatctacagtgactctatttccatgtaaggtcacattctgaggtactaagggttaggactccaacatacctttttttggagacacaggtcaacacataacaagtggtaaaccaaaatagacatagccccatgctttcatcaagctagcagtcgagtggggaagtcacattacaagtatgttgagaatttccaaagggggaagtattaatgggaccatacagtaagagaattt

SEQ ID NO: 230336 - DNA, 424 bp, Homo sapiens
agcttgaaagtgattagaatgtgcaaactgatatagtagctttcatatgctcttaaagggtaccaccacaggaaagtccatttaagatgctggtaggtttaacaaagttggagtgttggcactattgaattggacaacagttcttcagagctgactcagagctgcaatgcacttagtacattaaagcagctgacatgatgactttttgcgagccttcccaggcactggagtttttctgttaatctgccgcactaggtcataaaagatctcattaacatttattttgaattttgtagaagaatctaagaatgcacagttgttccattgtcttgctagatttttgaccttsttccttccctacagctctttcatcttccaagtcatacttattaccaacaagaatcattggaacatcatcagtgtc

SEQ ID NO: 230337 - DNA, 539 bp, Homo sapiens
tttaggctgttagcaaattgggtgtcagtttcagaatatgaggtccagctccagccaatggatgcaggacacagcagtaaggacaacccaaatgcatagggataaatatgyctgcttttcctttgttcaggtgtgctctcgccattgttccatctgcgactgagcaccctttctgcagaaagtaaagattgccttgctgagagatcttttgtctctgtactgtcttttctttgtggcaccaattatctatttctaacaattttggtatttctaacagggagttattggttaataggcatagagtgtcagtttgggaagatgaaaaagtcctggagatggcacaacaacgtgaatgtatttaatgtccctgaagtatatacttaaaagggttcaaatggtaaaatctatgttacattttactataataaaaaaagaataggaggcagaaaagcaacagacacagaagcaactaatacaaggaatacatagagctgtgtcattatagaaacaaataaaagtaaacatctgctatgtgggtt

SEQ ID NO: 230338 - DNA, 553 bp, Homo sapiens
ttccaagggagtctttggcaaccatgaatgtgctaaaacttgggtacaattatgttcaaaggctcaaaatctggaaggtacttgatgctttaaatttttttcattaaggatctttacaattaaagtagctacaacattaaaaaaaatcatccctttcctcacttgatatttccttggaagtatgccagttagcccatgtataattactaattgtctttcacatttgaatttgatttttaacattttttaaacaattacatgaagtgtcataagacacccagtctcaaaaaggcttcctgaattctactttgcctatttttaatttgacttaaataaacaaaaagccaaggacaaggtttcaaatctttcaaatttttaatatacttttaaaccttgtacttcaagttttggaaagactagtattttagggtcaacaacttgataagcatattaataatagagagarttgaaataattagaaatatgactgaagattatccaatttaatcctaagccatggtaaataaggagtagatggcagcagatcccaaat

SEQ ID NO: 230339 - DNA, 590 bp, Homo sapiens
aattaagcttgcaaatagaaggccagccagaagcattaatcattcatttgccaggtgtggtttgttgttgttttaatttcctgagaaggaaagactaaatacagaattcatatcagttacttgtgaagtttacacccatcttttaaagaaataatttgtcaaaccattcttcattcatccaacagtagtgttgctaacaaaaagartttttttttttttcaagccggagtctcactctgtcacccaggctggagtgcggtggcacgatcttggctcactgcaacctccacctcccgggcccaagcaattctcctgcctcagcctcccgagtagctgggattacaggtgcctgccaccatgcccggctaatttttgtatctttatagagacagggcttcaccatgttggccaggctggtctcagactcctgacctcaggtgatctgcctgcgttggcctcccaaagtgctgggatcccaggcgtgagtgcccggccgacaagaagaatttttaaacttcccaaattttaacctttttattgtccatttttacatgaaagtgattaatgtactgatttaaaaacaaaaaaaa

SEQ ID NO: 230340 - DNA, 590 bp, Homo sapiens
aattaagcttgcaaatagaaggccagccagaagcattaatcattcatttgccaggtgtggtttgttgttgttttaatttcctgagaaggaaagactaaatacagaattcatatcagttacttgtgaagtttacacccatcttttaaagaaataatttgtcaaaccattcttcattcatccaacagtagtgttgctaacaaaaagagtttttttttttttcaagccggagtctcactctgtcacccaggctggagtgcggtggcacgatcttggctcactgcaacctccacctcccgggcccaagcaattctcctgcctcagcctcccgagtagctgggattacaggtgcctgccaccatgcccggctaattkttgtatctttatagagacagggcttcaccatgttggccaggctggtctcagactcctgacctcaggtgatctgcctgcgttggcctcccaaagtgctgggatcccaggcgtgagtgcccggccgacaagaagaatttttaaacttcccaaattttaacctttttattgtccatttttacatgaaagtgattaatgtactgatttaaaaacaaaaaaaa

SEQ ID NO: 230341 - DNA, 638 bp, Homo sapiens
tgtctgttatgttgcacgaagaaagatggatggactaaggctaatgggttccaaaacttgacaagaacgtttggttttggcagagattcctcagcagaaaaatggagtgcttggatggggctctgggttaaaacaattttaaggtctctggaggcactcaagtacctaaagtacttgtattacattattgtagagggggtctacttgtagttctctattgcaaagaatatcaacaactggaaaaccttggtgttcaattaaatgcccagtgattctcaaatgaagtctgtggagactttcttctrgagtaggccaggcttcactcccttgccccagaacagaggggatcccaccgaaaaacacagggcacattaaaggaatattgcagggaggaaatcacgttgttgtcatcaggggaaagcaactgcactaaatctccttcctccagccttcattcctcaaactgcctcacaggcacttgtagaaatatttctaggacatcaattaacttagttttgggaaaatcttgcagttgtaggcctgatctgagcatctgattccattttatcaagaggcttacagctgtccttctcaaggtacctctaattaaagatgagccaagggggcagactagattg

SEQ ID NO: 230342 - DNA, 563 bp, Homo sapiens
acagctctgatctgctgccatgaagccacagggctcagtgaagagtcttttgtcatttctgaggcggagggcacaatggcttatttcatctttctgtttcctttacgattttcctttctgcattagcagtcaggaaaccctgaatgacattttatgtttaattacagcaggtttcctaacatctataagttttttgttttaattatcttacttcgttccaattttaatttttgtgctattttcatttcctcttcccccttctccaatgattaatatacatagttttaatattaatccacttagaccctttcggatacaaagcataatacatacaaaatgaaatcaaacttctggtctactgagctctatcatcaaagcagcttttacagattcgggatcattcattcagcctcaattacccttgaaaggcagttgcttcccygtgctatttgagggaacattatctggggaacaatagaggcttcttgaagaaacttgaagaaagacactttaaaaaaacatcatttacttttggtcatgctggatttggggcattcctactc

SEQ ID NO: 230343 - DNA, 563 bp, Homo sapiens
acagctctgatctgctgccatgaagccacagggctcagtgaagagtcttttgtcatttctgaggcggagggcacaatggcttatttcatctttctgtttcctttacgattttcctttctgcattagcagtcaggaaaccctgaatgacattttatgtttaattacagcaggtttcctaacatctataagttttttgttttaattatcttacttcgttccaattttaatttttgtgctattttcatttcctcttcccccttctccaatgattaatatacatagttttaatattaatccacttagaccctttcggatacaaagcataatacatacaaaatgaaatcaaacttctggtctactgagctctatcatcaaagcagcttttacagattcgggatcattcattcagcctcaattacccttgaaaggcagttgcttccctgtgctatttgagggaacattatctggggaacaatagaggcttcttgaagaaacttgaagaaagacactttaaaaaaacatcatttacttttsgtcatgctggatttggggcattcctactc

SEQ ID NO: 230344 - DNA, 631 bp, Homo sapiens
taggtgaaaaatgagttccctgccagtcactagacatatttaagtagatgctggatgacaactttcacttgtatatatgtattatataaacatcgatagatgtgtatatacatgtgtgaatacatatgcattgaatatatgaatgcatatttgcgtaaatatatatttaacatatctgtggtatatggttgtgattgttcgggaagaaatgggagaatgaagcatcaatggggagttgcactagatgacgtcaagggacctctatttggattctaattcattatgtatttggagatttttccatcaaacccttacagttcaaaataaaattattttctgggcttggtktaatttgagatggagcaggctgctgtggattactccaaccatttatgatctgatataaacccttggttctaaatagcagctgactccctgagggccaaataagcaaagaaaatagagcataggtctacttcaatcccaattctaatttctgctctctgtggagctgtttccaatgcagtgaacacacctcagtagctagagtatttttcagcttctccggttttcttatgaatatattataaagggaacactttcttttaaaagttcctgagtacttttatta

SEQ ID NO: 230345 - DNA, 447 bp, Homo sapiens
attaggtcccatttttaaaaaaccataaactaagcagcaacattcatttatctgggcttccaccgaaatcagatcaaaaggagtctgctttatgcagatctgaaaacagttttttggacacaaattcattttctgtaataaactaaatactgaagagttttaataatttgggtcaaatcattgaatacttcctcacatctacatttgtggggttaaacattcttggtattaaygaatgtaatttctgaactgcttttaaataagtgggactaatatttccttggtctttgtttacttctttctgtactgagtgatttagccattgtttgatttgagtaaacgtcagtatttacacttacatgaaagaggcttgcctaacctgggtatgtggtcaattcaaacacccagacttggcattgttatggttaatggttctgtgctggctgt

SEQ ID NO: 230346 - DNA, 323 bp, Homo sapiens
aaagattgagtaaacattattataaacatttctttcaaattgttaacaaaatgcttttatttcacataactctcttccatggccatctcttgattgacattttttttctttgtggaaaaaagctttatgaagttgtgggaagtgaaattgtcatttctcctagaaatacacgtacaaattttcatggaaatgtgtaaaagactttcaaggtctctctagggctgacttgacctgtctgaattaggataactgtgcctttcacacactggtcttcctattacagytatgcataaaaatatataagtagaataattttaaaatga

SEQ ID NO: 230347 - DNA, 614 bp, Homo sapiens
catttttagaattattttgacattgcttggcatattgtctscagattttgctactatgcagaatccttcaatagatccctgactgagtatttctttccatatgtctctctggtttgggaaatgagaatgaatatctttactgaatgtgttttgttatctttacttgctgactagctggaggaaaacaattgacatatggagagtttgttgctttaaatggacttataggtcaaggaagaaaggcagatgcagttattctggtatgcagtggaggaatattctcagaagtcctgaaaaggcagcttgccaaaggattagcctcgaggtaaaaagaggaggcagaaacaaagaatggggacttacaaacacatgaaaaattggagataccagtttagggaactctgtacattctaactcccttggaaacagtggaaaatgtaattctgcaaaaaaaataaaataaatttaaaagattctggcatatagaataaagaatgaggtaacttagacattgatataacacattcaggtgagatttttctttggtcatgtgggttggtagcttcttccataagatgaaaaatttctaaagttagaagatggaaaccagaaat

SEQ ID NO: 230348 - DNA, 601 bp, Homo sapiens
gctttgttcatctttttgcatagtgtcagttcaagtctgttgctcatttttaaaaaatgtgttgcttgactttctcttgttgagttttgggagttctttatatatactaggtacaagtcctttgtgggatatttgaattggaaatattttctccatcatagcttttttattcaaaattgcttaatgttatctttcacagagcaaaagcttttcatttggatgaagaccasgctatcattttttttcttttacggctcatgcttttaatgtcatgtctaagaacttcttgcctaagaccaggacacaaagattttctccgtgttttcttgcagaaatacatttcacctttagatcagtgacctattttcagttattttttgtataaggtgtaagtttgataggtagcttgaattttttttcgtatagacgcccaattcttccagtaccatttgttgaaaaagacagccttttctcttttgaattgtctttaaaccttgtcaaaaatctattgccgtttctctgagggtctgtttctggactctattctgctatgtgtctgtcccttcatcaatactccattttttttattaccgtggcttta

SEQ ID NO: 230349 - DNA, 537 bp, Homo sapiens
catgctactgcactctagcctgggtaacaaagtgagactccatctcaaaaaacaaacaaaccaaagaagctctgtaggcctaatcttaacttttttttttttttttggttccttttctatattccccttacacttttttctgttgttgttcttatataccacaaattcttagctctctgaaattcaacaatgtatgacattaaaaacagctataagattttgtcatgagtggaatattcaactttgtagagaactcgataatgtaacctctccagggaaggaattgggagcatatgattcttttttctcattcaacagataatgtgctaggggccttggagagttgaaacacwatttaaaaaaaaaatagtttttcaatccctgtcctttaagagatttggggtagagagaggaaaataatgtttacagaatacttactgtgttccaggctatacatccctatatctagattcatgtctatatttatatctagtcacgacaatagtataaggcaagttttgctttccctgttttaca

SEQ ID NO: 230350 - DNA, 568 bp, Homo sapiens
atccaggaacctgggccttatccttggctctttcctctaccaaccccctggggcagttgatcacacctgcaatgtgtcagatccattgctaagcacctcatatgcaatgattttattttagtgtcacaatcttaagggggaagaaagaaagagtgaaactatggctgattctagctatggcacttattggtgaggaaatttaagcagagctctctaagcctcagctttcctcccattttgtgccatgtggagcaggttcccctatcctcatccctctccttgtccccagttcatgagagatgcttcttttatgttctccactccctttyctcacactatattgcaatgttgccatgttctcattttgcatcctatggatgtggcacaaaaaaagatagattattcttctcccatggaaaataaaagcagaagcaattatgatgtatactatctggtaacaaatgtgtgctttatttcttgggaaagtttggagtagtttcaagtggtttacttgagcttaaaaaaattactgaaatgtacgttttttgttttcacttttttcagtttg

SEQ ID NO: 230351 - DNA, 563 bp, Homo sapiens
tctctctggctgtaatgctcttcccctggcagccactgtctgygacctcataaccttcagtgcctgttcaaatgctgtcttttttaggaggtcttctgttgccacatgtttagaatagcaacatgccccaacccttatcagcctccttcatcctactctacttcatgtttctccaatgcacttttcaccacctaatattctaatttttttctcacttctttatctgatcatttcacctattatttatgctttatgaagacaggaacttttatctgtcttgttcactaatgtatacccactgcatcctacagaaaccaatatatggtaagcacttaagtaacatttgtgaattatgaggattatataaagcaatgagtgtaagtgccggtgcctttctcatataagcacccaatacatgttaattattagtattggtatttactactgatatgtttctaggtcaaaaaacatttattgaacacttggtataccaaacacaatctttgatcagaaaaatgtgtctctcttgaccaacatacaggttagggggaaaagtgtctctc

SEQ ID NO: 230352 - DNA, 563 bp, Homo sapiens
tctctctggctgtaatgctcttcccctggcagccactgtctgcgacctcataaccttcagtgcctgttcaaatgctgtcttttttaggaggtcttctgttgccacatgttyagaatagcaacatgccccaacccttatcagcctccttcatcctactctacttcatgtttctccaatgcacttttcaccacctaatattctaatttttttctcacttctttatctgatcatttcacctattatttatgctttatgaagacaggaacttttatctgtcttgttcactaatgtatacccactgcatcctacagaaaccaatatatggtaagcacttaagtaacatttgtgaattatgaggattatataaagcaatgagtgtaagtgccggtgcctttctcatataagcacccaatacatgttaattattagtattggtatttactactgatatgtttctaggtcaaaaaacatttattgaacacttggtataccaaacacaatctttgatcagaaaaatgtgtctctcttgaccaacatacaggttagggggaaaagtgtctctc

SEQ ID NO: 230353 - DNA, 568 bp, Homo sapiens
atccaggaacctgggccttatccttggctctttcctctaccaaccccctggggcagttgatcacacctgcaatgtgtcagatccattgctaagcacctcatatgcaatgattttattttagtgtcacaatcttaagggggaagaaagaaagagtgaaactatggctgattctagctatggcacttattggtgaggaaatttaagcagagctctctaagcctcagctttcctcccattttgtgccatgtggagcaggttcccctatcctcatccctctccttgtccccagttcatgagagatgcttcttttatgttctccactcccttttctcacactatattgcaatgttgccatgttctcattttgcatcctatggatgyggcacaaaaaaagatagattattcttctcccatggaaaataaaagcagaagcaattatgatgtatactatctggtaacaaatgtgtgctttatttcttgggaaagtttggagtagtttcaagtggtttacttgagcttaaaaaaattactgaaatgtacgttttttgttttcacttttttcagtttg

SEQ ID NO: 230354 - DNA, 563 bp, Homo sapiens
tctctctggctgtaatgctcttcccctggcagccactgtctgcgacctcataaccttcagtgcctgttcaaatgctgtcttttttaggaggtcttctgttgccacatgtttagaatagcaacatgccccaacccttatcagcctccttcatcctactctacttcatgtttctccaatgcacttttcaccacctaatattctaatttttttctcacttctttatctgatcatttcacctattatttatgctttatgaagacaggaacttttatctgtcttgttcactaatgtatacccactgcatcctacagaaaccaatatatggtaagcacttaagtaacatttgtgaattatgaggattatataaagcaatgagtgtaagtgccggtgcctttctcatataagcacccaatacatgttaattattagtattggtatttactactgatatgtttctaggtcaaaaaacatttattgaacacttggtrtaccaaacacaatctttgatcagaaaaatgtgtctctcttgaccaacatacaggttagggggaaaagtgtctctc

SEQ ID NO: 230355 - DNA, 583 bp, Homo sapiens
ctcctgcttattcaggctacaatgtaatcatctctgccattggcccttacggccctgcagacccaaatgtgtttgatgtgacctggagccaactgattgctcgttggaggaatggcagactaagataacaacaatagcaacaataatgataaaaaatctaacagaggttcattgaatgttaagcagaaccacataatcttcagaaaataactctcttctcgtatagctttaggtttgctatacctgactgatatggtttggatctgtgtccccgtccaaatctcatgtcaaattgtaactaccagtgttggaggtggggcctggagggaggtgattcaatcacaggggaaatttcttataaatggtttaacactatccccttggtgctgttctcatgatggtgactgagtgcttatgagatctggttgtttcaaagtgtgtagcacctccccctrccccttggccctgctcctgccatgtaagacatccctgcttctccttcacctcctgccatgattgtaagtttcctgaggcctccccagaagcaaaagccactatgtttcctgtactgcctgcagaatcc

SEQ ID NO: 230356 - DNA, 583 bp, Homo sapiens
ctcctgcttattcaggctacaatgtaatcatctctgccattggcccttacggccctgcagacccaaatgtgtttgatgtgacctggagccaactgattgctcgttggaggaatggcagactaagataacaacaatagcaacaataatgataaaaaatctaacagaggttcattgaatgttaagcagaaccacataatcttcagaaaataactctcttctcgtatagctttaggtttgctatacctgactgatatggtttggatctgtgtccccgtccaaatctcatgtcaaattgtaactaccagtgttggaggtggggcctggagggaggtgattcaatcacaggggaaatttcttataaatggtttaacactatccccttggtgctgttctcatgatggtgactgagtgcttatgagatctggttgtttcaaagtgtgtagcacctccccctgccccttggccctgctcctgccatgtaagacatccctgcttctccttcacctcctgccatgattgtaagtttcctgaggcctccccagaagcaaaarccactatgtttcctgtactgcctgcagaatcc

SEQ ID NO: 230357 - DNA, 472 bp, Homo sapiens
gaattcatgagcagtgcctgtcaatgggtattggctctgtgggtccctccacatcctttttatccctcagctgatccaacagccctctgtcttgtattccagggcatcggtgaacaatatctgaaaaaaaaraggagtctgtcactcctctctacagtgaggtctgttatccagaccagaccatgaagatcatctgattggaggaagcaggaggatctggcactcccaggacacctacactctgagtctaaatcctgcagacccccgcctttcccagctctggttcagttcccgcttccccttgtctgtgtttctctaacctcatagccacatttctacagggtacacatggcctggttgtactctgtgacacctccccaagctgtccttacacttgggcaggggctgttctccatcactgagatgtctcctgacccctctcctccagaagccttcccaagaggagcctgtc

SEQ ID NO: 230358 - DNA, 477 bp, Homo sapiens
cctgtcaatgggtattggctctgtgggtccctccacatcctttttatccctcagctgatccaacagccctctgtcttgtattccagggcatcggtgaacaatatctgaaaaaaaaaaggagtctgtcactcctctctacagtgaggtctgttatccagaccagaccatgaagatcatctgattggaggaagcaggaggatctggcrctcccaggacacctacactctgagtctaaatcctgcagacccccgcctttcccagctctggttcagttcccgcttccccttgtctgtgtttctctaacctcatagccacatttctacagggtacacatggcctggttgtactctgtgacacctccccaagctgtccttacacttgggcaggggctgttctccatcactgagatgtctcctgacccctctcctccagaagccttcccaagaggagcctgtctgattgagcaggtggtgaatt

SEQ ID NO: 230359 - DNA, 478 bp, Homo sapiens
cctgtcaatgggtattggctctgtgggtccctccacatcctttttatccctcagctgatccaacagccctctgtcttgtattccagggcatcggtgaacaatatctgaaaaaaaaaaggagtctgtcactcctctctacagtgaggtctgttatccagaccagaccatgaagatcatctgattggaggaagcaggaggatctggcactcccaggacacctacactctgagtctaaatcctgcagacccccgcctttcccagctctggttcagttcccgcttccccttstctgtgtttctctaacctcatagccacatttctacagggtacacatggcctggttgtactctgtgacacctccccaagctgtccttacacttgggcaggggctgttctccatcactgagatgtctcctgacccctctcctccagaagccttcccaagaggagcctgtctgattgagcaggtggtgaattc

SEQ ID NO: 230360 - DNA, 454 bp, Homo sapiens
tgtcaatgggtattggctctgtgggtccctccacatcctttttatccctcagctgatccaacagccctctgtcttgtattccagggcatcggtgaacaatatctgaaaaaaaaaaggagtctgtcactcctctctacagtgaggtctgttatccagaccagaccatgaagatcatctgattggaggaagcaggaggatctggcactcccaggacacctacactctgagtctaaatcctgcagacccccgcctttcccagctctggttcagttcccgcttccccttgtctgtgttwctctaacctcatagccacatttctacagggtacacatggcctggttgtactctgtgacacctccccaagctgtccttacacttgggcaggggctgttctccatcactgagatgtctcctgacccctctcctccagaagccttcccaagaggagcctgtc

SEQ ID NO: 230361 - DNA, 565 bp, Homo sapiens
gcattgggtaaaaagaaagaaaaggggcaaagaagaactcttggaaggccagagtccctgctggagcatttccttcccacccttcacatcccaggttccacaaaggaagaggaggggcctgactcctccccactggaaagagcacaaacttctgtggctccaccctagtgcgcaggctggttggagtttttctgaggagccccctcccacctggctgtctcacatagatgactctcaaatgcattatgccaagcaaaagaagctgttctcaaaaaaacctgcaaactgcatgattacattttgacgacactcttacaagacaaaactatggggacagcaaacacatcagtggctgccagagacyatggtaggaaaagaggttcacaaccaagggacataagagaaggagttgtcgtcagaggtaactctgacttcctggttgtcactcctgcccccacatggcatgtgacttgtttcagctccccaaggctgaaggtgccatcctgggaagcagagggtttctccttctctggaattaaccaagcagaggctggaggaactgtta

SEQ ID NO: 230362 - DNA, 565 bp, Homo sapiens
gcattgggtaaaaagaaagaaaaggggcaaagaagaactcttggaaggccagagtccctgctggagcatttccttcccacccttcacatcccaggttccacaaaggaagaggaggggcctgactcctccccactggaaagagcacaaacttctgtggctccaccctagtgcgcaggctggttggagtttttctgaggagccccctcccacctggctgtctcacatagatgactctcaaatgcattatgccaagcaaaagaagctgttctcaaaaaaacctgcaaactgcatgattacattttgacgacactcttacaagacaaaactatggggacagcaaacacatcagtggctgccagagactatggtaggaaaagaggttcacaaccaagggacataagagaaggagttgtcgtcagaggtaactctgacttcctggttgtcactcctgcccccacatggcatgtgacttgtttcagctccccaaggctgaaggtgccatcctgggaagcagwgggtttctccttctctggaattaaccaagcagaggctggaggaactgtta

SEQ ID NO: 230363 - DNA, 605 bp, Homo sapiens
ttgaatttattttccatcctctggcatgcaactatctcaccaataagtccagtgtatttgctactttttgctcactggatccaaccagcataatgtcatgaatgtaatgcaccaatgtgatatcttacagaagcaaaaagcaatcaagctctctccgaataagtttatgacacaaagctggagagttgatatacccctgaagtaggacagtaaaggtatattgctggccttgctggctgaaggcaaattgtgtctggtggcccttatggacaggaatggagaaaaaggcatttgccaagtcaatagctgcataccaggtaccaggagatgatgtgttaatttgctcaagcactgaaaccacatgtggtacagtagctgcaattggagtcaccacttagttaagcttacagtaatccactgtcattcttcaagatccatctgtcttctgcacaggccaaataggagagttgaacagggttgtggtgggaatcaccacctctgtgtctttcaagtccttgatggtggcactaatctccrtaatccctgcagggatgtaatattgtttttgatttactgtttttctaggtagagctagctctaatggt

SEQ ID NO: 230364 - DNA, 487 bp, Homo sapiens
agatatcagaattataggagtttcccataactttggtacacataccagtaacatatttatacaaatataacccaaagtaagccaaacaccattttatatttgacaatgctttttgtatgatttttgtaccacataagtgaaaattcacctttacattagtgtactattaatgttaaacccaattcttaataaaaccttatagacatatctacccaattttaatgtttgatcataaggtaagattctcataaaccttttataatcttttactatttttgttgaagaggagtttagtgttctaagagaaacctgttgtgcttttatttcagtgttcaatttacagaaaagctgggtaatatccctttaaatttagccaatatgttcacacacaatttmttttacaattaattttctcataaaccttccacaacttgcttaaaccttcagctttattttatttaaaacaatcctttaatcttttagacaa

SEQ ID NO: 230365 - DNA, 464 bp, Homo sapiens
attgtattttgaggatgtaacgcctctttttgtttcttgtayaatttaaaaggcaaatacataaaacagtgattctctttttgtaaatatcaaatcaatgtgttgtgaaagcacatagtagataaaacatgatgttcactccactcctttccttctcttatagctctttctttaccaggtctccaaactgtcacagagcctagctcttcctgcacattgaactggactttggggggatctgtccagctgcaactaaactcctctttggatcctaacatccaagagattgagtggaatggaaattctgagaacgagaaaaaagaaataaaacggtttctgatgtcctggaagcctaatatccctaatcctcattggcatgagcttaaagacaaatacaagcacaggttccacctgttggagatggttttcttgagcatcaggaatctcactgtggaaatgagtgg

SEQ ID NO: 230366 - DNA, 418 bp, Homo sapiens
aatactgtaaaattgattattaaaattaataacatatcagaaatgtctttaattggttggttcaaaaactgatttaaaattcttaaatgacctaaaaaagttggccaaaacaaaacaataaaactggactttaaaacacttagaaggagatgggctgttagaacaggtctttaggtaaaatggtcttagataaattgacctgaaggccagttggagagttctcaggacaaagcctgtctgaggcccaagctgaagatgcagaaggtgactcagaccctgtctcctggatctctcagggcaatgagcaagccaacattctccctgggaaacaaggagccctaggcagagagtktagtggagaaagctggagaagtgggaagagaaggagcagagtctgagggtaaaccagagtgccaga

SEQ ID NO: 230367 - DNA, 418 bp, Homo sapiens
aatactgtaaaattgattattaaaattaataacatatcagaaatgtctttaattggttggttcaaaaactgatttaaaattcttaaatgacctaaaaaagttggccaaaacaaaacaataaaactggactttaaaacacttagaaggagatgggctgttagaacaggtctttaggtaaaatggtcttagataaattgacctgaaggccagttggagagttctcaggacaaagcctgtctgaggcccaagctgaagatgcagaaggtgactcagaccctgtctcctggatctctcagggcaatgagcaagccaacattctccctgggaaacaaggagccctaggcagagagttyagtggagaaagctggagaagtgggaagagaaggagcagagtctgagggtaaaccagagtgccaga

SEQ ID NO: 230368 - DNA, 555 bp, Homo sapiens
ataagctagatctcttgcaatatcttctttaacctcctctcagctccattttctttctcttttctttctttctttctctyttttttttttttttttttttttttacaaaaccctaccaatccacagtccacaaggaacagaaccatttttgagcacagagagggggcaatgttttgatagcaagtttgaacatttctctttagaggtttcatgggcagtgccttccttttctttcacctgaagctctggcgtccttatctataacactgaaagtattagctcttattacattatttgggagtcttcaaatgctcctgaattttggacactaggatgataatgataattcaagttcgtatctgtccttttgtatttctgcccttatctttgcttttttacccactcaaatacacacacacacacacacacacacacaaataggaaagagaaagtgcaaaggacttccattttgaaagctcaggtgagcatcctaagaacttcttcccctccatctaaatcatgaaagccagaacacaaagataagtctcgaagcca

SEQ ID NO: 230369 - DNA, 550 bp, Homo sapiens
aagctttttcatatatcacgaacttgtcgtgccatggttttcagctccatcaggtcatttaaggtcttctctgcacagtttattcttcttagccatttttctaaccttttttccaggttttcagtttccttgagatgggttcaaacatgcttctttagcttagagaagtttgttataaccgaccttctgaagcctacttctgtcaactcatcaaattcattctccatccagccttgttccattgctggtgaagagctacagtcctttggaggagaagaggtgctctggtttttagtrttttcagcttttctgctctggtttctccccatctttgtggtttaatctacctttcgtctttgatgttggtgacctacagatggggttttggagtagatgtccattttattgatgttaatgttattcctttctgtttgttagttttccttctaacagtcaggtccctcagctgcaggtctgtttgagtttgctggaggtccactccagaccatttgcctgagtatcaccagcagaggctgcagaacagcaaata

SEQ ID NO: 230370 - DNA, 466 bp, Homo sapiens
taggtattttatcttatttgtagcaattgtaaatgggattactttcttttttaatttctattttaagttcaggagtacaagtgcagatttattacataggtaaacttgtaatatggggatttgttgtaaaaactattttatcactcaagtattaagccaagtacccattagttatttttcttgatttctttttcaaattgttcactgttgacctatagacatgcttctgatttatgtatgttaattttgtgtgctgaaactttactgtgtttctttctctcttctaatagttttttgctggagtctttaggttttccaaaatataagattatattatctaaawaaaaggataacttgacttcttcctttccaacttgaatgctctttatttcttttcttgtctgatggctccaactagtacttccaataccacgtggaataaaagtggtgaaagtagacatccttg

SEQ ID NO: 230371 - DNA, 617 bp, Homo sapiens
tgaatggcaaggcagcgcattggaatataggaagaggttgaaagctaatccaaggaaaacagtaaaatggtctaagagtttaaaggtgacatagccattttaagaaacaataaaactaaacttttagaataaaaaattattactacattaattttagaatgcaattggaaggattaataacagaataaaccaagctgagaaaagaatctcagaactcaaagatgttttctttgaatcaacacaggcagacaaaaataaagaaaagcaaaatttttaagtgaataacatgtttgagaaatatgrgattgtgtaaataaaccaaacctaagaaagagagggatagagaacaagcaacttggaaaacatatttgagagtatggttcatgaaaattctttcaatgttttcagagagatgacatgcaaatttaggaaattcagagaacacctgagagatactatacaatatggctatacccaaggcaaacagtcattagatactccaaagttaatgagaaaaaatcttagagacagctagaaagaagggtaagtcacctacaaagggaaactcatcaggctaacagtgaacccttcagcagaaagtttagaagccagaagag

SEQ ID NO: 230372 - DNA, 504 bp, Homo sapiens
cgttcttcattcccttaattttgagcatatgggcgtcattgtgtgggagatgggtctcctgaagataacataccattggttcttgcttttttatccagcttaccactctgtgtcttttaagtgggggcatttagcccatttacattcaacgttattatttatatrtgtggatttgatcctgtcattgtgttgttagcttgttattgggcaggcttgtttgtgtggttgttttatagtgtcactggtctgtgtatttaagtgtgtttttgtattagctggtagtggtctttccatatttagtacttctttcaagatctcttgtaaggcaggtctgatggtaacaaagtttctcagcatttagttatctgaaaagaatcttatttctccttcactgagaaagcttagtgtggctggatataaaattcttggttgaagattttttttctttaagaatgttgaatataggccctcaatctcttctggctcgtatgatttcagttgatg

SEQ ID NO: 230373 - DNA, 623 bp, Homo sapiens
agtggtgtgataagaagtcactgcagccttaaactgctgggctcaagtgatcctcctgcctcatccacctaagtagctgaaactatacatatagaccaccacacttggctaatttctttttaatttggtagagatggggtctcactatgttgtacaggccagtttcaaactcctagacccaagccattctcctgcgttggcatccccaaacactggaattacagcatgagacatagcacctgaccttttctaaattctctatgtcatttaagtcgctctcatttattatttccttctttctgtttgctttgggatttgtagtttgctttttttttttgtcccatgtcatacaaatagaggactaggttactgatttgaggtctttcttcttttttatgtagatgttttgaagctatacatttctttttaagcattgttttcactgtatcccctaagttttgtatgtactgtttttactttgagttcaaagtatattttaatttccattgtgrtttattttttgactcattgattatctaggtgcacatttacacatacttgtaaattctccaactttccttctaatttattctactgtggtccaaaaatatactttgtatggc

SEQ ID NO: 230374 - DNA, 569 bp, Homo sapiens
tgggtcctggtcataagaagcaagagcaagtagaaagacaagttactgaactggggtccaataccacagtgtgtctaacagcaaagcttgtggctttaggaatcatttcacctttcaaacctcatctgcaaatggaagaaaatcaaggtataaaaataacaactttggatgagaaggaacatggagaggagatggctaatgtgtatctcccacgtggatggacaaaacagtgtgtggagactcatgccataggcttttgctccaagaaccaccagagtaacataccagaaaaaaaaaaaaaagaattcacagactctttgaaagaagtggcagaccactgcaaattctgtttgaccagaygaaaaactatgaatgcccaaagtgtgaagggggggaaacctgcctccaaacagacatactcacttggcaacctgaaaatccaaattacagaaaaagaatttaaccttaactagagctgaaattaattctgtgcaatataaaagtagaaccaacagtgggaagagccttgtaggcactcccattctccaactcgagcccagggaagacat

SEQ ID NO: 230375 - DNA, 497 bp, Homo sapiens
ctcaaagaacacctgagaaattcattgcaaaaggatcatcaccttggtacatagtcatcaggttatccaaagtcaaaacaaaggaaagaattctaaaagctgtgaggcaaaatcatcaggtaacctatgaaggaaaacctatcagattaactgcagatttctcagcagaaatcctacaaggcagaaggaattagggtcttctctttagcctcctgaaacaaaataattgtcagccaataattttgtatccagcaaaactaatattcatgaatgaaggagaaattaaagcmtttttcagacaaacaaattctaagagaattcaccactaccaaggcagcactacaagaaatgctaaaaggagttctaaattttgaaacaaaaccccaaaatacaccaaaatagaacccttcttaaacataaatcttactgtgcctctaaaacaataacacaaagaaaaaagggtattcaggcaagaactagaatgatgaataaaatag

SEQ ID NO: 230376 - DNA, 595 bp, Homo sapiens
  misc_feature (1)...(595): n = A,T,C or G
aagggctggttgtttaaaaaatcttggacctgttctactctttcttgctccttcccttgccatatatgtctgctccctcttcgccttcttccataagtgtawgtttcctgatgccttcaccagaagcagattccagcactatgtgtcttatatagcctgcagcaacccatgagccaaatacctctcttttcttnnnnnnnnnnnnnnnnnnnnnnnnnnnnnnnnnnnnnnnnnnnnnnnnnnnnnnnnnnnnnnnnnnnnnnnnnnnnnnnnnnnnnnnnnnnnnnnnnnnnaagatgaagtcagtgtctgcacattcaaagactgtcattatttgaccccagttcaccttgcacaattcatctgggtccacgttttttctgtgcatgcaacaggcaagatatactaaatatctcactatttttctggcattcttggtccttcacaactcttggctgggtatgtggtacactctctttcagaggcttgtttgtcactctgcatgacaagctacctttcattcatctttagtttcttactgtcatcctgtaaaccaaaaaaggttttatctttgctatgaaagaaaaaaaatgaa

SEQ ID NO: 230377 - DNA, 557 bp, Homo sapiens
tcactctgcagctactgactatgtttgctcaamgctctggggctctataatcagcaaatgtgaaagacaaccaagcctgtgtccttcactaccggatggcagggtcccctaggcccttggtgcgtccacagttgccaattgagagccacagcctggaatccaaaagcatagtagtctacctgatgttctattgtactgtagctgagctgccactcaaaccacaagataaaatcttgcccactcttccctccccttttcagtggcagaagagcctcaccctgtgaccaataccacaacaggctcatagtcaatacttccagactattactgttgtgcccttaaggcctaaggcattttcagtcaacttgtggtgaagactacctggctggggactcacccttcagtgcagtgcactcccccactggcccaggacaggaccagaaatgtcatctaaaagccaaattctagaacttgggaccccaagggtctgcttggtgcgctgcacccacctggggctaagctgttacttgaagccagcaagtctcagagtatatccc

SEQ ID NO: 230378 - DNA, 587 bp, Homo sapiens
gttatttgtatactgtaaaacttgtccgtcttcaagagattacttggccaagctcagtggctcacacctgtaatcccagctctttgggaggccgaggtgagtggatcatgaggtcagcagatcgagaccatcctggctgacatggtgaaaccctgwctctactaaaatacaaaaaattagccaggcatggtggtgcgcacctatagtcccagctacttgggaggctaaggcagggaaatcacttgaacccgggagtcggaggttgtagttagctgagattgcaccactgcactccagcctggcaacagagcaagactctgtttcaacaacaacaaaaaagagatcattcagttagaattataatttcttcccagttcatttttgttttatgccaagcagtttaaggtttgggcaaattaaacttttcccagaggtgaatgtcttgtgattacccatctgcaaagagagtacagaggaggaaatagaaaaaaaaagcttattaatttttttctcaaaagagtctcagtcattcaggatgtattcactgactgatgatgattggttacccatctggaaagaggaaaaaa

SEQ ID NO: 230379 - DNA, 587 bp, Homo sapiens
gttatttgtatactgtaaaacttgtccgtcttcaagagattacttggccaagctcagtggctcacacctgtaatcccagctctttgggaggccgaggtgagtggatcatgaggtcagcagatcgagaccatcctggctgacatggtgaaaccctgtctctactaaaatacaaaaaattagccaggcatggtggtgcgcacctatagtcccagctacttgggaggctaaggcagggaaatcacttgaacccgggagtcggaggttgtagttagctgagattgcaccactgcactccagcctggcaacagagcaagactctgtttcaacaacaacaaaaaagagatcattcagttagaattataatttcttcccagttcatttttgttttatgcsaagcagtttaaggtttgggcaaattaaacttttcccagaggtgaatgtcttgtgattacccatctgcaaagagagtacagaggaggaaatagaaaaaaaaagcttattaatttttttctcaaaagagtctcagtcattcaggatgtattcactgactgatgatgattggttacccatctggaaagaggaaaaaa

SEQ ID NO: 230380 - DNA, 585 bp, Homo sapiens
ccagaagctgttttttttttttttttttgcaaaattaacaaaataaataggccactagctagactaataagaagaaaagagagaagatacaaacacaatcagaaacaatgggaatattaaccactgacacaaagaagtacaaccaaatataaaagaacattatgaacaactttatgcacataaaataaaaaatctagagtaaatgaataratttttgaacacatacaccctcccaagactgaaacaaatagaaattgaatccctgaacagaacaataatgagctctgaatttgaggaagtaataaatagcctaccaataattaaaaaaaaaacccaacatcagatagattcatagctgaattatatcagatataaaaggaggagctggtgccattcctactgaagctattccaagaaataaaggagaagctcctccctaaatcattctatgagaccagcattatcctgataccaaaaactggcaaagatacaacaaaaatagaaaactttagacccatatccttgatgaatattgattcaaaaatcctcaattaaatactgacgaacctaatccagcagcacatc

SEQ ID NO: 230381 - DNA, 578 bp, Homo sapiens
tttaatgacaacttttacaacagttattggtgatgtactgttccagcacttgttagcaatatataaacaatttacatagttaactgtttcagagtattgttccaggataattactgaataatttctcttctccacaaaatcatatctgcttaaaggaataaatataataaaacatttatgatgaagaaagatgactaatagtttacagaatctttaaaactcactgaccatcttgattaattgctgtataggtttgtgctttgtgatttaccacatctaaactcagatgggatactgataatgcatacagcaattgatagagttacaagggtggctggaaaatcttaagatgaatcctaaacaccaaaatatctcctcattggcgtggcagtataaaatctagtttttwaaaaaaagacaaaaactctaaattcagaatcttccactttgacttcagcctacataataattacattgatgtcaatattgatgacccagatataaaatattatttatttatttgttcaataaataattgttgaacaactctcatgtacaaagaactttcctggaaacta

SEQ ID NO: 230382 - DNA, 606 bp, Homo sapiens
ctgttacttaagctcactaagcctcagttttctcatacatataattttctcgagataatttaataaaataatgtagattaaagctctggaagaatagraaatttcatctgcttctttcattactctgtccttagttgtttgattagtggctagtacatgataggcattttaaatattaataaatatctataaaatgcctgacatttagaaggttttccaataaatgttcagctatcattatatggtagaaactatcaatgaacatctattggcaaaactgcataatgcatttatacatatatcccaacccaaatatttgctattgatagcaaacacattatccttgagctattaaggcataaacacaaaattaaattatgaatataatattagggtggcatcaacttattaaaaacctacttaaatttctatccttcactgcttaacagtgtaacaatttttatgtttactgccaattgggtagggtgaaattttattttattggaaattaaattaaattcttcaagcatcaggggtttggggaagtacaaaggggctgaaatgcatgctctgatatttggtgactatgccatgttctctctgtcc

SEQ ID NO: 230383 - DNA, 436 bp, Homo sapiens
aattgccagaattcacatttcagaactctgtaatttgaccaaagtttacagcaatctaggaagcatttataaaaacaaacaaacaaaacaaaacacagtagaatctcagtagaaacacgtaagttttgtggtattttaagttactctatttacatacttctccatccagctcagtggtagccttaaaaaccacagcctgtattttactgaaaccagtagactggcagccacacataggcagaaccagcagagtggcagccaccagagtaggcagaagccatttggatctttttcatatcaccatcccaggagaattggcattattgacttgtctggcaggtggaggtccctggaggacccactagcaaagctatctttcttctwctttactttgagatcaccctgaagggaaagccttatactgggggcatttgta

SEQ ID NO: 230384 - DNA, 568 bp, Homo sapiens
acctcatcttttcattatttttaataaaatcttttacagacctaaactttttgattttgataaggttcaacttaacaatttttctctttatggattgtgcttttggtgcaaggtctaagaacattttgcttgaatcccttgatgttgtccattctgtggtctcattgcatctcaactggacaaccatgatagtctctccactgctatctgctcctgccattgaaaatgaattcatcctacgccaaactgccagattgcaattaacgtagcacaggtgcaattacagaaatgctgtcctcaaacattcaaaggtccccactgaatattaaagtacaatctctcccrcctagaattgtaacccatgccccctacctgccactttttctggttctgcccagccaactcccttcccccttaacatgtcatattctagacaaaacaactactagctgctctccaagaagcacttataattatggtagtggtagggatatgaactgggaagaatggacttctaaagtgatacataaaaccccatttctgccaatgaaaattctacctaacttat

SEQ ID NO: 230385 - DNA, 175 bp, Homo sapiens
aaaataaaaggatatgtctttgtgaccttaygggagggcttcctaagcagacacaaaaagtgctagccataaaaatgattgataaatttaactgcatattggtcagtattgtcctaaagttatgagaaaattcaaaagaccagaaaatgaaataatctatgtaaacatttaaaaa

SEQ ID NO: 230386 - DNA, 175 bp, Homo sapiens
aaaataaaaggatatgtctttgtgaccttatgggagggcttcctaagcagacacaaaaagtgctagccataaaaatgattgataaatttaactgcatattggtcagtattgtcctaaagttatgagmaaattcaaaagaccagaaaatgaaataatctatgtaaacatttaaaaa

SEQ ID NO: 230387 - DNA, 484 bp, Homo sapiens
ttttgcaattgaaaaaatttgtctcttacttaaccgtataaaatttagaaatgcggaaaagtcaaaaaggaaaaataattcccagatataatcactgataacattttgggattttcccaggaatttttctttacattttcacatctatctctataatatataccacaatagtattgtactccattggtttacaacctgctttttcactattaacaatacactgtcagctttattctgtgacaacacttttcataaagattcactcaactacacataaagcttcaaagctctttaattgtcatgtcattttgctcatttctccaatttgttctcagaggcaacatcagagactaagtagaacttaatttatcttaatttcaacartgttttttgactatgttcccttaaattctggacccaactatttgcttataaaatttgattgggagtcaaaaatatcaagtctgttaagctacaatttcct

SEQ ID NO: 230388 - DNA, 365 bp, Homo sapiens
tactgttgactgatttcagctatgaaaacgagtttttctcaaaccattcatttccccacccttcctgtataattactaatgatccatgggatcmtggagtatggcatctacattgaagagtgattccactcagagaggatgcctatgccacccaccgctttatcatccttccctaacaaagtgatcaaccatctactctatgacaagcaactaatagatccagcaatagttaaattagtgcttcctggttgacatccatctgcactttccttacacagaagaggggataacatggactgaaagccaggaggattcaatccagggatattggttatcattcaatatttttataaccacaaccagca

SEQ ID NO: 230389 - DNA, 451 bp, Homo sapiens
ataagttctggtgagtcagtcactatcattcccaaacaacatatttttatatgaatatggtactgttgactgatttcagctatgaaaacgagtttttctcaaaccattcatttccccacccttcctgtataattactaatgatccatgggatcctggagtatggcatctayattgaagagtgattccactcagagaggatgcctatgccacccaccgctttatcatccttccctaacaaagtgatcaaccatctactctatgacaagcaactaatagatccagcaatagttaaattagtgcttcctggttgacatccatctgcactttccttacacagaagaggggataacatggactgaaagccaggaggattcaatccagggatattggttatcattcaatatttttataaccacaaccagcagatctttgtatatatacggcttacct

SEQ ID NO: 230390 - DNA, 441 bp, Homo sapiens
aagcactacatgtaggtcattgtrtttcatttaagccttacaacgatgttatgaggaaagtgtcatcatcatcatcaccatcatcatcatcatcatcatcatgtcatgattagagttgagcaaattgaggcttacagaggtaataacttaaccaaaatctcacaagctaattactgttgcttagtaaatttatttggctcacttctccttggtggttgtttgtagtaattacaaagatgtatggcaatatgttatttaggcagaagtgtactgtcatagtctaatatacccaatttttgtgcttatttaaattataatgagaatgcaagacttttattagattaattcacactcagatccaattaaatgtcatggacaccaggtaaagtttgagtattatcttgttggagcttttggttgagagctggcactacatgtttt

SEQ ID NO: 230391 - DNA, 441 bp, Homo sapiens
aagcactacatgtaggtcattgtatttcatttaagccttacaacgatgttatgaggaaagtgtcatcatcatcatcaccatcatcatcatcatcatcatcatgtcatgattagagttgagcaaattgaggcttacagaggtaataacttaaccaaaatctcacaagctaattactgttgcttagtaaatttatttggctcacttctccttggtggttgtttgtagtaattacaaagatgtatggcaatatgttatttargcagaagtgtactgtcatagtctaatatacccaatttttgtgcttatttaaattataatgagaatgcaagacttttattagattaattcacactcagatccaattaaatgtcatggacaccaggtaaagtttgagtattatcttgttggagcttttggttgagagctggcactacatgtttt

SEQ ID NO: 230392 - DNA, 441 bp, Homo sapiens
aagcactacatgtaggtcattgtatttcatttaagccttacaacgatgttatgaggaaagtgtcatcatcatcatcaccatcatcatcatcatcatcatcatgtcatgattagagttgagcaaattgaggcttacagaggtaataacttaaccaaaatctcacaagctaattactgttgcttagtaaatttatttggctcacttctccttggtggttgtttgtagtaattacaaagatgtatggcaatatgttatttaggcagaagtgtactgtcatagtctaatatacccaatttttgtgcttatttaaattataatgagaatgcaagacttttattarattaattcacactcagatccaattaaatgtcatggacaccaggtaaagtttgagtattatcttgttggagcttttggttgagagctggcactacatgtttt

SEQ ID NO: 230393 - DNA, 441 bp, Homo sapiens
aagcactacatgtaggtcattgtatttcatttaagccttacaacgatgttatgaggaaagtgtcatcatcatcatcaccatcatcatcatcatcatcatcatgtcatgattagagttgagcaaattgaggcttacagaggtaataacttaaccaaaatctcacaagctaattactgttgcttagtaaatttatttggctcacttctccttggtggttgtttgtagtaattacaaagatgtatggcaatatgttatttaggcagaagtgtactgtcatagtctaatatacccaatttttgtgcttatttaaattataatgagaatgcaagacttttattagattaattcacactcagatccaattaaatgtcatggacaccaggtaaagtttgastattatcttgttggagcttttggttgagagctggcactacatgtttt

SEQ ID NO: 230394 - DNA, 597 bp, Homo sapiens
atatacagattttggagagacacagacattcagaccatagtactatcatttacaagttgtgtaactgtggtacttctcttcatgctgtcacaggtacttcacttgtaaagtggggattagagtaatacctacctcagggttgttgggaagattaggtattcatgtatgcatgaataggtcttagaacagtgccagacaaataataaatgtgagcatcatcattatcatgacaacttttgttgaacctggagtagccctatattatcatactgtactattattttatttatcttaccattagtaaaaccatagttatggaaaagttaaatcatactaccaaggaaataaagtgagtaagtgctctaacccagakgcaaagctgtgttgtctccattttgcctcaatattcctaatgggacttaagctttattttgggagtatctttgtcaagttttattattgtattacattggctttgtaaatgatttaggatacattccatcttttcctttgctctgaagctgtttaaatagaagagaaactacctcttcctcaaatgtttgataaaatattgtttgtgaaaccatctagcttcga

SEQ ID NO: 230395 - DNA, 537 bp, Homo sapiens
tgtccctcacaagccaaaacttagaaccatcccttcaagggacagggctgtatttcctttgtggctcctggctacacttaatccgccctaggcactggaagggaacctgcactatagtagcagtggttctcaatgtattatttttaaattccactgacatggcagcatcatctggggacacacctaacctaggctctttttttattttttatatttttaatttttagacggagttttgcactgtcgcccaggctggagtgcagtggcacaatctcgtctcactgcaacctctgccttctgggttcaagcaattctcctgcctcagcctcccgagtaactgcaactacaggcacccaccaccatgcctggctaatttttgtatttttagtagagacagggtttcaccgtgttgrccagactggtctcaaactcctgaccttgtgatctgcctgccttggcctcccaaagggctgggattacaggtgtgagccactgcacccggcctaacctaggctcttttataaagagtgcactatc

SEQ ID NO: 230396 - DNA, 444 bp, Homo sapiens
gtgcccatctcgagttatgggtgatttattttgctttcatttttctttgctttttatactgtaggtgctcattaagttcttcttacttcatagttcaatttattttgaagagaattctactaatttgcatttctgtggctccctcaagtaggattttgatttgtaaaactcatataactkttttatcaaataacaactggaaatgaatacaaagttgctgacatccctagcattttaattgttgaaggtagagggatcatctcaagattacccaagaattatgtggctgaataattgctcctttagcatgtgctatacattttatttaattgcaacatgtaacttgcccatgatggagaaaatccatcatgaactttgacatttttctgatcacctaagaattctcatttctggtttgtgacatgctgaatatattgggtgatt

SEQ ID NO: 230397 - DNA, 450 bp, Homo sapiens
tttttatggcacacactcaggtgcccatctcgagttatgggtgatttattttgctttcatttttctttgctttttatactgtaggtgctcattaagttcttcttacttcatagttcaatttattttgaagagaattctactaatttgcatttctgtggctccctcaagtaggattttgatttgtaaaactcatataactgttttatcaaataacaactggaaatgaatacaaagttgctgacatccctagcattttaattgttgaaggtagagggatcatctcaagattacccaagaattatgtggctgaataattgctcctttagcatgtgctatmcattttatttaattgcaacatgtaacttgcccatgatggagaaaatccatcatgaactttgacatttttctgatcacctaagaattctcatttctggtttgtgacatgctgaa

SEQ ID NO: 230398 - DNA, 616 bp, Homo sapiens
tgtgccaccatgcctggctgaattttgtatttttagtagagacgtagtttaatcatgttagccaggccggtctcgaactcctgacctcaggtgatccacccacctcggcctcccaaagtgctgggattacaggcgtgagccaccacggctggccatcctcttttgaatcccctcaacttctccaatctgtacatttatgcctcttgccaaatatgagaagttttcagccattattccataaattattgtcttcagcctggccctctttctcctgtctcagttggaatttcaataatgtgaatgttagatctttcttatataccacagayccctgagactttgttctttttttaaatttctatattctttcagtcgttcacatttgataattatattttccctcttccagttcacttactctttcctctatttcttcattctggcactaaccccattcactgtgcctttaaattaactgtatatcttttaattctaaaattcccatttggttcttctttatgtcttctgtttctttgctgaagctttctactttttgtttctttaaagattgtttgtgatggttagttgaagtatttttattaggactgctttaaaa

SEQ ID NO: 230399 - DNA, 614 bp, Homo sapiens
gtttccagcaggtgaggataaatatcatggctcgctacttgccttctctgacaaccctgcagggatttaaggcacctcatcacaactggtgagggtggcagtctaggctcctctcatggcctttgatggtatggttggagttggggtcaygtgtttgtttgtttgttttttctgttgtatttgtctagaatataaaatattttcccagagtttcttttcctgctacactgccccttttgtggtcctctggctaggagagcagccttttgttgggggttgtattgtctctgcccttggcatttccaaactgctgccttctttagctccaagtcatggttatatgaggcagaaagcaaacctggaaactcaccaccatatgtcattctttgtgtcccaagttgcccagctcagttaccttcttctccccaccttccagagtctccttgtgtttgttgaatatgtaattttcagggttgttagcgggaagaatagcgaatagcaggtctactgcaatttgcagaatcagaagtcatattttgttagtttattgttttcttgtttttctcttaggggagactggaaggctggagggggctgaagtagaaagaattcca

SEQ ID NO: 230400 - DNA, 614 bp, Homo sapiens
gtttccagcaggtgaggataaatatcatggctcgctacttgccttctctgacaaccctgcagggatttaaggcacctcatcacaactggtgagggtggcagtctaggctcctctcatggcctttgatggtatggttggagttggggtcacgtgtttgtttgtttgttttttctgttgtatttgtctagaatataaaatattttcccagagtttcttttcctgctacacygccccttttgtggtcctctggctaggagagcagccttttgttgggggttgtattgtctctgcccttggcatttccaaactgctgccttctttagctccaagtcatggttatatgaggcagaaagcaaacctggaaactcaccaccatatgtcattctttgtgtcccaagttgcccagctcagttaccttcttctccccaccttccagagtctccttgtgtttgttgaatatgtaattttcagggttgttagcgggaagaatagcgaatagcaggtctactgcaatttgcagaatcagaagtcatattttgttagtttattgttttcttgtttttctcttaggggagactggaaggctggagggggctgaagtagaaagaattcca

SEQ ID NO: 230401 - DNA, 575 bp, Homo sapiens
aagttgtctccattttggttggtattcaatcccttattctggtggagagaacagtgcatctctgaaaagcctgattttgaaccagatgcagtgacaagattaacctttgtgttgtctcatttgaagaagaggtgagcgtattctgtgtatgggaaatggctaaattgatgttttgtgaaatgaagaaccaacttttgcagagactaatggcggaaccacaaatctaatttctattctggggtacaaaactcatctacattttctgtagcttccttcatttcaagcatctgaagtactatatgaatgaaaattcattaactaatcacgtcaacattctctgaacattcatcagcattgataaaaatgaaatatgattaaagtatttaacatttaaaagtaattaatgcatggttttggtattaaatagactgagctgaatattaagagttaatattaaaaataaaatataaatgtttcccaatttaataatttcaatttgtgatattaacgtatgcaygcactgttttgtaattgttacaatcacagtgttctcattccatttaccttgcatttta

SEQ ID NO: 230402 - DNA, 522 bp, Homo sapiens
gggtgtcatggtaatgttacacttgttttgttgagtgatgcaggagatkttttgttccttctcgatgagagcccaggtctacacaggcaaactttcttatctcatttgtcagtgggttggaattttgggggaacctctttcacagcatttataaacttttgatcagcttggtctatgtagggatcacaaatataatgtaccacttctaatgtgtttgaggcctcttctggttacagcaactggctaccgcccgagggcaactgaaagtgttttaattttttttattcctgtgggatggtggttgaggttatatagtctgccacattgtcagaaaaagaaataattttagagaacttttacttctgattctgccctgtcatatacttattttttatttgaatgtttgttatagtttatattattgtgtaatttttttaaccttcttaattaaaaaatatgagaaaaatctgaatccactacttacttagaatacttttttcacgtatcagaaggaaaaaagag

SEQ ID NO: 230403 - DNA, 625 bp, Homo sapiens
tacacgcacccaccatcactcccggctaatttttctatttttagtagagacagggtttcaccatgttggccaggctggtcttgaactcccgacctgaggtgatccgcctgccttggccttccaaagtgctgggatgacaggtgtgagctgccgtgcccagccagaagcatctttgtattacggttctgttatcagacgccgggaggctgggaggaggtccatgccaagcctgtgtctacagtgtttcctctacgcaaacagcaggagggttggaagcacgattcaattccaactgctgtgcactgatttatatcgatttcatttctttttttggcaggtgtcaagttaatgactttgaagagtaatacacagtttacatatttaaaccraaaaacttcccaattgcataaaaccctacccacatggacaagaaggtatttcttgtcacttcctcaggaatcctcacagctgcatcttgcagagtcacaaggaattgtaacttgttacatttcagagcagtaggcttagtaccaccaaggagatgaaaatacctattgaagatttcatattataaaccagtccagaataattcatactgaatatattttatcatattttgggtgga

SEQ ID NO: 230404 - DNA, 214 bp, Homo sapiens
gaattctgaagattaataataatctatgtaaagggcaagtcacrtagtaggtcctggctaaacaataggttgtcttatgatgataatgtttagctattttgaaccatttacatatatggtttttttgtttttgtttttgttttattttagttaaacaatcattttattgcttgagtacacagacaaatttatgcgaccagggcagaggctgtag

SEQ ID NO: 230405 - DNA, 454 bp, Homo sapiens
gaattcagtatattagtactgatatgaatcaaataaatcattctttcaagaaaagatagccatgcttgaaaatctctttcaggtcacaagggtaacaaaataattaaaaagtgtttcwctttagttatcatatgtatattattcaataaaaggcctatagaaaaaaaaatgccgagattacacacattgcactagtcattgaactgataggtgagctaatgaatggacttaaagatctgaaaccatgccacctacaatagtggtatgtatggaatactccagtaacataaatgaaagaacaactcagttggatgggttggatcagctaaagctcaaagaagaggtaacatttagtttgattactaactgtaaaatagaagctcttggggtatgtttattaggagaggtcattctgggcagaggatgagaagaagcaaaaatatgtaagagtgaa

SEQ ID NO: 230406 - DNA, 454 bp, Homo sapiens
gaattcagtatattagtactgatatgaatcaaataaatcattctttcaagaaaagatagccatgcttgaaaatctctttcaggtcacaagggtaacaaaataattaaaaagtgtttcactttagttatcatatgtatattattcaataaaaggcctatagaaaaaaaaatgccgagattacacacattgcacyagtcattgaactgataggtgagctaatgaatggacttaaagatctgaaaccatgccacctacaatagtggtatgtatggaatactccagtaacataaatgaaagaacaactcagttggatgggttggatcagctaaagctcaaagaagaggtaacatttagtttgattactaactgtaaaatagaagctcttggggtatgtttattaggagaggtcattctgggcagaggatgagaagaagcaaaaatatgtaagagtgaa

SEQ ID NO: 230407 - DNA, 454 bp, Homo sapiens
gaattcagtatattagtactgatatgaatcaaataaatcattctttcaagaaaagatagccatgcttgaaaatctctttcaggtcacaagggtaacaaaataattaaaaagtgtttcactttagttatcatatgtatattattcaataaaaggcctatagaaaaaaaaatgccgagattacacacattgcactagtcattgaactgataggtgagctaatgaatggacttaaagatctgaaaccatgccacctacaatagtggtatgtatggaatactccagtaacataaatgaaagaacaactcagttggatgggttggatcagctaaagctcaaagaagaggtaacatttagtttgattactaactgtaaaatagaagctcttggggtaygtttattaggagaggtcattctgggcagaggatgagaagaagcaaaaatatgtaagagtgaa

SEQ ID NO: 230408 - DNA, 559 bp, Homo sapiens
gaattcaagaatggcacagcagggccgggcggagtggctcatgcctgtaatcccagcactctgggaggctgaggtgggcagatcacgaggtcaggattttgagaccagcctggccaacatggtgaaaacccatctctactaaagatacaaaaattagttgggtgtggtggtgcatgcctgtagtcccagctactcaggaggctgaggcagtagaattgtttgaacctgggaggtggaggttgcagtgagccgagattgtgccactacactccagcctgggcggcgacacagtgagactttgtctcaaaaaaaaaaaaaaaaaaaaaagaaagaaagaaagaaagaaagaaagaaasaaacaaacaaagaaagaaagaaacaaagaaaggcacaactaccacaaaagcaaaaatgctcaaaatctctgattgttcataaattattcctccacaggtgtccatcacacaatccaaccagtaccgcagaataaatcaaatcatccatagcttaacaagctgcaaaatagtcatataacgtttcttcctctttctcaagtcca

SEQ ID NO: 230409 - DNA, 465 bp, Homo sapiens
tgaattcttgctctgctgtgtggctgtagaccttccctctgcagacaggagcgcccttgtgccttctaaatctggatcatgactgtctgaacaccctactctttcstaagaatcaaccctcagatcccactggaaatgagaagaaagccctatagacaaactagctgtagcaaacgaacatgatgtactgttttcattaggaaaacttcaggaccttacaactggttacttcttcttcttcttttaaattttttattatactttaagttctggggtacatgtgcagaacgtgcaggtttgttacataggtatacacgtgccacaatggtttgctgcacccatcaacccgtcatctacattaggtatttctcttaatgctatccctcccctagccccccactccctgacaggccccggtgtgtgatgttccccttcctctgtccatgtgttttcattgttcagctt

SEQ ID NO: 230410 - DNA, 465 bp, Homo sapiens
tgaattcttgctctgctgtgtggctgtagaccttccctctgcagacaggagcgcccttgtgccttctaaatctggatcatgactgtctgaacaccctactctttcgtaagaatcaaccctcagatcccactggaaatgagaagaaagccctatagacaaactagctgtagcaaacgaacatgatgtactgttttcattaggaaaacttcaggaccttacaactggttacttcttcttcttcttttaaattttttattatactttaagttctggggtacatgtgcagaacgtgcagrtttgttacataggtatacacgtgccacaatggtttgctgcacccatcaacccgtcatctacattaggtatttctcttaatgctatccctcccctagccccccactccctgacaggccccggtgtgtgatgttccccttcctctgtccatgtgttttcattgttcagctt

SEQ ID NO: 230411 - DNA, 567 bp, Homo sapiens
ttttctgcagggcagatattcctcaaaayaaaaagttgattttaaaaaaaccaaaaaagtatgtttaaaatgtttctaagcctttggacaaatatgtaatattaagttaaaaaggaggtgatggaaaattatttttacactatcatctcagttctttaagtaggagagatgtattaaaagtcaattttttctctgtgtagtgggaatgtttgtaatttttaatcactttcattatattcctgtgtattttccaaatattcaaaagcaatataaaacttttaaaataaataattaaatacaccccatttttgcattagtttatagcaattataccagtagatggtatttctatttattgctttactgttttggtcccctttaaaggaatgtatttatgcaagtacctccacaggtagaaactagcatatttttttctcattttaagtgaagcagaacttaacaggaaaaatcaaatcatattcttacttctgaaattatggttttaataatctattataacaaaacaaccaatatttctagaaactacatttacttttaaaaattagc

SEQ ID NO: 230412 - DNA, 381 bp, Homo sapiens
aaccaatcccctgcagatactgaaagacaactgtattgcaaagtttccggtaaagatcactgtttcagctttgggcttttattagcacctctctaataaaactcgcatgtgtcacaaaaagaagaaagcatttttaggcacacagtgtctcaacccatacttagaaaacaatccacatttttcttttgttagtggaacaaaagtattcgaagacgtaattgcctgtcgcattgacagcatttcacgggattctagagcctcagcttttgagtgggagcagggaaattgactttttcatgaaagtwatgggaggtctattttttcttttgatatcttgtttctcagggattactgctttttcccagtgcatcttatgctaaa

SEQ ID NO: 230413 - DNA, 618 bp, Homo sapiens
gggtttaataaggtcatcagagtgaagccttaatctgataggcttggtgactttataagaaaaaaaggagacaccaaagagctctctytctctttccacattcacagcctgagaaaaggccatatgaggacataaaggaaggtgaccacacaccaggaagagagccctcaccagaaatcaaaccctgccagaccttaatcttgaactttccagcctccaaaactgtgagaaaataactttctgttgttacagccactcagtcaatagtaataccttttgttatcacagtccaaactaagacaacacataataagaagaaaaatcaatcaatagaaacagaactagaaatgacatacattacagaattaaaaaggatgttaaaacacttattataactatatttcatatgtaataatggtaggagaaagattaagcattttaactagagatatagaacatataaaaagactcaaattaaacttctagagataaagataaatctaaaatgaaaaatacatgagataatatttacagcagattagaaaatataaaaaaatgattagtgaacttgatggcattataatagaacatgaaacacaaggaaagaaaaaatttttt

SEQ ID NO: 230414 - DNA, 429 bp, Homo sapiens
tatgttttattgaatagatatagttatagtggttaaaataatccccctttttcctagtctacctttcaaagctagctctaggtcactgaaagttcagcatgtaaccatagctytgaaatacactgtttatgatttcacattaaaaccataaatgtatattttattatatgggaggaaacatctgagtgaatggtgaatgaaacacatgcaagcaacctccttaatctgacttaggtaatgctcacaggcaggcaacaaactctattgtattttatttatttagtaccacgcagtggaccaaggaacctgagagtctttggtgaaacaaccaatagcctctcggtagcctgggatcatgctgatgggccagttcagcagtacaggatcatctattctcccactgttggtgatccaattgatgaatatgta

SEQ ID NO: 230415 - DNA, 579 bp, Homo sapiens
tgttttacacttcattcaccaaaaatctactkaagtaacatgacttcaggtgtctttctgcagtcacttgccaaaagtctttttgtgcttaaatgatcttgacaacattacagaatttgaagaggtgacatttgaaagctcctaagggaaaagcaggactagagttgactcagctcagtctctcaaggtcaagaatctgtatttattgatattgttgtctacagactgagtcaatggagactcacatgactcaagatgattttaacaacctcactttttaaattttctcagattttagactatattttgggactttcctggggaaaatggcatatttcagaatttcatgctatcaaagtggattttttttaactagatcttggattttccaggaagggccaaagtcatgttttgtttttcttatgaaaaagaagtttttcaagttggattcgttatttgcgcaatgctgtgaatagtaaactcagcaactacttaacatactacctgaacagcattgattttataagttgtgggcttgggggcagtatctctggaagcttaaggatttattctaggtaa

SEQ ID NO: 230416 - DNA, 579 bp, Homo sapiens
tgttttacacttcattcaccaaaaatctactgargtaacatgacttcaggtgtctttctgcagtcacttgccaaaagtctttttgtgcttaaatgatcttgacaacattacagaatttgaagaggtgacatttgaaagctcctaagggaaaagcaggactagagttgactcagctcagtctctcaaggtcaagaatctgtatttattgatattgttgtctacagactgagtcaatggagactcacatgactcaagatgattttaacaacctcactttttaaattttctcagattttagactatattttgggactttcctggggaaaatggcatatttcagaatttcatgctatcaaagtggattttttttaactagatcttggattttccaggaagggccaaagtcatgttttgtttttcttatgaaaaagaagtttttcaagttggattcgttatttgcgcaatgctgtgaatagtaaactcagcaactacttaacatactacctgaacagcattgattttataagttgtgggcttgggggcagtatctctggaagcttaaggatttattctaggtaa

SEQ ID NO: 230417 - DNA, 552 bp, Homo sapiens
cctttggtatccatgggagattggtttcaggatctcccatagaaaccaaaatcctcacatgctcaagttcctgatataaaatggcatagtatttgcataaacctatgcatatactgccttatacagtaagccctcacctaacgttaaataatttcttgraaactgcaactttgaacaactgacataaagaaaccaattttccagaggttaattgatataaacaagagttaagttcctacatcatatttctgatcacaaaaacatcaccaaacttctcaataaaaaccaaaacacttctcataagaaacactgatgtatgtgtgagctatatacacatttaagaaagataaatgaaaaccagtaacataattattcacccatttattccagttaagggtcacagtggacacagcctgtccaagtagctcagggcgaaagggagaaccccatcctaggcacacacacacacacccacactcactcaggctgggaccacgtggacgcaccagctcacctaacatgcacatctttgagatgtgggaggtaactaga

SEQ ID NO: 230418 - DNA, 485 bp, Homo sapiens
gaaaatcactgctttaggcggcaaaataatctcaaggctgaccctcagagaacagaggasatgatttaagcttttcatcacatctccatggacacatgtgggatgttcactgctctcttctcccctccatcttgtctcgacaggaaatggctctgaacacacgcatgcctcttattgaagagctgagcacattttcacattaatgaagttctaagtgttacctagcaaggcatttacttggttcaatacattgtcatttttgtcctgaatctgaggagctccagacatcagtaactacaggaagaaattatccgacttgctttggtttagtttcattatattgggtttatgcaagagtccctttttagagtacctaagagggactaggaaagagagagggagaagaacgtaaagatgccagaagaccagtctgtaggctatctctaggagaggttactgctcctcaaaaggggaaggcgtagaaa

SEQ ID NO: 230419 - DNA, 519 bp, Homo sapiens
ctccattcatgacttacttcagacaattcagatgaaacatatttatttcctcccctatatgaaagacaataatttgtgtatttttttgggcaatatatttgcattcttttttattaatgggttcttataagattcttttaaggttgaaataattaacctttaaaggcacaaataattaatagtcttttctttgttcaggattattgagcttattgttgcactcaaatgttttcaaaagaaaaatttatatctcagaataaatgaggagataataaacattagagagcaaagacatacaatgtggctgcctaacgaagaaagcttaaatcataagatataaacataaatcagggaaaatactactaatatgatcttcaggattcttttggatttaacattacaccraaaaccttcatgtacacattttttttaaaaaatacagaaagcccagtatttctaccaggtccagaaaaaaacaaaatgaatgaatgaattgaatactgcagaaattttaaaatt

SEQ ID NO: 230420 - DNA, 426 bp, Homo sapiens
gtatgtctaacgagacactcagcaacaccgtgcaaactctgggatacatgcaagttagtctaaaactttacaatataactcttacagcaacttgactgctgaaagcacagttaatccagtcttactgcactataactctttaccagtttataataccggattgccatcttctcttgttagtttgcacatgtgagcatattagtagactaaaaggcatacacaagcatccagacaaataaaaagaaactatgatacagkatgttcccattcgtggtattaaaaaaatggccacaaatacatgatgggtaaaatgacacattaataaacttaacttttaaatatggaaaactcccattcacaatcacaaaatatacattttatgtaggacctggatgctaaaatgtgcgttaaatgaaacctatggtc

SEQ ID NO: 230421 - DNA, 563 bp, Homo sapiens
tcctcagccagtaacaatttatgtcctgaagatagcaaggagtgctgatttaatttattttacaaacagtgtcctttcatgggagagagcaggctggtaaaattgtttcaagaatcagaacatttttcttggttatttataacataactcgacaatctagctacacagggcttcattcatttgagaaagactattgaatccaaaaataataatcctttatatttgtacagtatttgcagttttataaggaactcttcacgttcattttctcatttgatttttctgacaactccattagggtagagagggcaggtattgttacctccaaattacagatgaggaacctgaaacctgagtgcttgtaagtcctacccagggtttcayagccactcagtgactgggactggagccccctagattttaccctagctcaaaagccagtgctctttccactattccgttttgatacccttggaaagttcactgcttatctaggaaagaaaaattggtagttcttgctgaggaacgtggaaatctgaaggagagacagatctgagagagtc

SEQ ID NO: 230422 - DNA, 517 bp, Homo sapiens
cacgttacaaggcaggttggtatgaaggaaagagcactgacccgtgagttattctcgcggggccaggctctgctcyactcagctctgtgttctctgccaagtccctttagatcaatgtgtcgcatgtccccccattgtgagttgagtacattggaccaaaggattatagtttgttttcttcccaggcaagtgcctcctcctgatggggagttagtatgatgtgggtggccccagtaggactgggctggtcttactgttctaagaagtgttagcagaaaaatggctaggcattggagtaaccctgtgatttgacattttggggcatcctttcatggtacgatacacctggccaaaagtctcccagctcagaaattctataactagaaatgctttgaataaatatatactgagaaggtattttggggggaaattttaaaattcttatctgacttggctagagcaactgcttacgacactggacttcttaggggtatcgataatggttgtctttgaatgg

SEQ ID NO: 230423 - DNA, 517 bp, Homo sapiens
cacgttacaaggcaggttggtatgaaggaaagagcactgacccgtgagttattctcgcggggccaggctctgctccactcagctctgtgttctctgccaagtccctttagatcaatgtgtcgcatgtccccccattgtgagttgagtacattggaccaaaggattatagtttgttttcttcccaggcaagtgcctcctcctgatggggagttagtatgatgtgggtggccccagtaggactgggctggtcttactgttctaagaagtgttagcagaaaaatggctaggcattggagtaaccctgtgatttgacattttggggcatcctttcatggtacgatacacctggccaaaagtctcccagctcagaaattctataactagaaatgctttgaataaatatatactgagaaggtattttggggggaaattttaaaattcttatctsacttggctagagcaactgcttacgacactggacttcttaggggtatcgataatggttgtctttgaatgg

SEQ ID NO: 230424 - DNA, 628 bp, Homo sapiens
cactgcatctggccaaacatacatttaaatagagcagatgaaagatctatagtgtagaagtaatctgcatataaaccagtcttaaattgagacgtgacctatgactgttaaagcagtccacatcacacaaaaataaagggcttggaagatagcagcctggtttaaccaggttagatataatttattattattagatagtgtctacattgttgctaaaagcttaggctctggggttcctaatttgggtttaattctgtcttggttacttgttaattctgtcaccttggagtggttccttaaatctccctaggccttggtttcctcatttgtaaaatggggataataatggcttaccgtgtggaataaattagagtaattcatacaaaggatttatcatcatattggttatagaagaaacaatgaatattcatgatcatttttatcaagaatataattgaaatatatttctgagcgttgaggtttttctcttaaagaaaagtgtaaaggtatactttcttaagactgctcatacatgctggatcacccatatacatttccaggaaattgtatgttctagcaattstatgttccaaatgtgctgctttcagttttttcgagaaacaaatga

SEQ ID NO: 230425 - DNA, 492 bp, Homo sapiens
aatgacagggtcgagaaggcaacattgattgagtgaaagaatgagaagacacagtcagtcagaaggtgattctcactaagggtaagtggggtggtgatggcacaccattttgastatactgaatgctgctgtgtggttcacactcctttggttaattttgtgttatgtaaatttcacatcaacaattacttgtttgaaaaagagaaaacaaggctctgagaaacaactgcaacccataaatttttattatccttcttctctgtttgataaatatttgtgtgtagcgagcctgccatggcaattcctgcccttcccctggcccagcttagttcttaagtctccccactgagctgctgtacttcagagatttacacacctgcccccctgcctgcccccatggggtcccctcacctgagctcctcagcttgcttgagctgctctgcaagcttctcctccttgaactgtcgctcattcctcagcatagattttatg

SEQ ID NO: 230426 - DNA, 629 bp, Homo sapiens
cacatagtgcatcttgcggccactagatacaaagccatgtacagaaatgaggccaggtgcagatggggcgaattgaaaagatgaaagaagaaaagaatgacagggtcgagaaggcaacattgattgagtgaaagaatgagaagacacagtcagtcagaaggtgattctcactaagggtaagtggggtggtgatggcacaccattttgagtatactgaatgctgctgtgtggttcacactcctttggttaattttgtgttatgtaaatttcacatcaacaattacttgtttgaaaaagagaaaacaaggctctgagaaacaactgcaacccataaatttttattatccttcttctctgyttgataaatatttgtgtgtagcgagcctgccatggcaattcctgcccttcccctggcccagcttagttcttaagtctccccactgagctgctgtacttcagagatttacacacctgcccccctgcctgcccccatggggtcccctcacctgagctcctcagcttgcttgagctgctctgcaagcttctcctccttgaactgtcgctcattcctcagcatagattttatgaggtctttgcactcttcatattctgagaaaagacagacacgc

SEQ ID NO: 230427 - DNA, 629 bp, Homo sapiens
cacatagtgcatcttgcggccactagatacaaagccatgtacagaaatgaggccaggtgcagatggggcgaattgaaaagatgaaagaagaaaagaatgacagggtcgagaaggcaacattgattgagtgaaagaatgagaagacacagtcagtcagaaggtgattctcactaagggtaagtggggtggtgatggcacaccattttgagtatactgaatgctgctgtgtggttcacactcctttggttaattttgtgttatgtaaatttcacatcaacaattacttgtttgaaaaagagaaaacaaggctctgagaaacaactgcaacccataaatttttattatccttcttctctgtttgataaatayttgtgtgtagcgagcctgccatggcaattcctgcccttcccctggcccagcttagttcttaagtctccccactgagctgctgtacttcagagatttacacacctgcccccctgcctgcccccatggggtcccctcacctgagctcctcagcttgcttgagctgctctgcaagcttctcctccttgaactgtcgctcattcctcagcatagattttatgaggtctttgcactcttcatattctgagaaaagacagacacgc

SEQ ID NO: 230428 - DNA, 629 bp, Homo sapiens
cacatagtgcatcttgcggccactagatacaaagccatgtacagaaatgaggccaggtgcagatggggcgaattgaaaagatgaaagaagaaaagaatgacagggtcgagaaggcaacattgattgagtgaaagaatgagaagacacagtcagtcagaaggtgattctcactaagggtaagtggggtggtgatggcacaccattttgagtatactgaatgctgctgtgtggttcacactcctttggttaattttgtgttatgtaaatttcacatcaacaattacttgtttgaaaaagagaaaacaaggctctgagaaacaactgcaacccataaatttttattatccttcttctctgtttgataaatatttgtgtgtwgcgagcctgccatggcaattcctgcccttcccctggcccagcttagttcttaagtctccccactgagctgctgtacttcagagatttacacacctgcccccctgcctgcccccatggggtcccctcacctgagctcctcagcttgcttgagctgctctgcaagcttctcctccttgaactgtcgctcattcctcagcatagattttatgaggtctttgcactcttcatattctgagaaaagacagacacgc

SEQ ID NO: 230429 - DNA, 559 bp, Homo sapiens
gggatttccacatctttactcttcagtctcctgaatttctggcatctgatcctccaaaatttagagatgaagagaacctcaagggcacatcaaggaagttgacaagatgattcaaccacaasgaagtggagtcagaattcacagcccctgaggtctgactctgaatgcggggccactttcccaagacttgcagcctctcctctaaaacactgcactggggcatgaagtagtgatttcttgtacagtcgggaaggcccctaggactgtgggactgatggtttcccttttactgggaatttcaaggacaagtatgcgaaagattttaaaaatctttgatttttaaatcatatcttcagttatgattttaagaatcatatctgaagcataaagtgtgacacataacaccataaggccatgaaggaaatatgcccaaatgttaataaagtttgtgttaatttagaaacagcagaatgaagaactaatagatagtgtttactgtgtgccaataaatgttctaggagattgacaagaaatagctcatgtaattcactgcagcaat

SEQ ID NO: 230430 - DNA, 502 bp, Homo sapiens
cttctcctccttgaactgtcgctcattcctcagcatagattttatgaggtctttgcactcttcatattctgagaaaagacagacacgcctgcctcagtggaaggctggacatgctgctgtggtcattgcctacagggcaggagccaggtccatcccaaggacaaaactctccccagtaccagggtctagacagggatttccacatctttactcttcagtctcctgaatttctggcatctgatcctccaaaatttagagatgaagagaacctcaagggcacatcaaggaagttgacaagatgattcaaccacaaggaagtggagtcagaattcacagcccctgaggtctgactctgaatgcrgggccactttcccaagacttgcagcctctcctctaaaacactgcactggggcatgaagtagtgatttcttgtacagtcgggaaggcccctaggactgtgggactgatggtttcccttttactgggaatttcaaggacaagt

SEQ ID NO: 230431 - DNA, 559 bp, Homo sapiens
gggatttccacatctttactcttcagtctcctgaatttctggcatctgatcctccaaaatttagagatgaagagaacctcaagggcacatcaaggaagttgacaagatgattcaaccacaaggaagtggagtcagaattcacagcccctgaggtctgactctgaatgcggggccactttcccaagacttgcagcctctcctctaaaacactgcactggggcatgaagtagtgatttcttgtacagtcgggaaggcccctaggactrtgggactgatggtttcccttttactgggaatttcaaggacaagtatgcgaaagattttaaaaatctttgatttttaaatcatatcttcagttatgattttaagaatcatatctgaagcataaagtgtgacacataacaccataaggccatgaaggaaatatgcccaaatgttaataaagtttgtgttaatttagaaacagcagaatgaagaactaatagatagtgtttactgtgtgccaataaatgttctaggagattgacaagaaatagctcatgtaattcactgcagcaat

SEQ ID NO: 230432 - DNA, 502 bp, Homo sapiens
cttctcctccttgaactgtcgctcattcctcagcatagattttatgaggtctttgcactcttcatattctgagaaaagacagacacgcctgcctcagtggaaggctggacatgctgctgtggtcattgcctacagggcaggagccaggtccatcccaaggacaaaactctccccagtaccagggtctagacagggatttccacatctttactcttcagtctcctgaatttctggcatctgatcctccaaaatttagagatgaagagaacctcaagggcacatcaaggaagttgacaagatgattcaaccacaaggaagtggagtcagaattcacagcccctgaggtctgactctgaatgcggggccactttcccaagacttgcagcctctcctctaaaacactgcactggggcatgaagtagtgatttcttgtacagtcgggaaggcccctaggactgtgggactgatggyttcccttttactgggaatttcaaggacaagt

SEQ ID NO: 230433 - DNA, 559 bp, Homo sapiens
gggatttccacatctttactcttcagtctcctgaatttctggcatctgatcctccaaaatttagagatgaagagaacctcaagggcacatcaaggaagttgacaagatgattcaaccacaaggaagtggagtcagaattcacagcccctgaggtctgactctgaatgcggggccactttcccaagacttgcagcctctcctctaaaacactgcactggggcatgaagtagtgatttcttgtacagtcgggaaggcccctaggactgtgggactgatggtttcccttttactgggaatttcaaggacaagtatgcgaaagattttaaaaatmtttgatttttaaatcatatcttcagttatgattttaagaatcatatctgaagcataaagtgtgacacataacaccataaggccatgaaggaaatatgcccaaatgttaataaagtttgtgttaatttagaaacagcagaatgaagaactaatagatagtgtttactgtgtgccaataaatgttctaggagattgacaagaaatagctcatgtaattcactgcagcaat

SEQ ID NO: 230434 - DNA, 559 bp, Homo sapiens
gggatttccacatctttactcttcagtctcctgaatttctggcatctgatcctccaaaatttagagatgaagagaacctcaagggcacatcaaggaagttgacaagatgattcaaccacaaggaagtggagtcagaattcacagcccctgaggtctgactctgaatgcggggccactttcccaagacttgcagcctctcctctaaaacactgcactggggcatgaagtagtgatttcttgtacagtcgggaaggcccctaggactgtgggactgatggtttcccttttactgggaatttcaaggacaagtatgcgaaagattttaaaaatctttgatttttaaatcatatcttcwgttatgattttaagaatcatatctgaagcataaagtgtgacacataacaccataaggccatgaaggaaatatgcccaaatgttaataaagtttgtgttaatttagaaacagcagaatgaagaactaatagatagtgtttactgtgtgccaataaatgttctaggagattgacaagaaatagctcatgtaattcactgcagcaat

SEQ ID NO: 230435 - DNA, 613 bp, Homo sapiens
tggggaggatgacattattttagatggagagagcacttagtttctcagagagaagacaggacttcgttcatcactttcgtgatggtgagcctatagatcttactgtatttgttctgctggttggccaggaagcmggccagttgagttacaaaacatttctctttgaggtttctgaactgctgtttcttctctgccagctgggggcgcaatttctcattcatttctagaatgttcatctctgccttctcgctggacaaagggccggctgataccaccatgctgacatttgtggcagaagaggtggggccagggactggggagaagaaaggcaaacacatgatgggttaaaaactggtgaaatcaaataggcttaatcaggactgagggatgtcactggcagccttgtctacttatttgaagatgatgtttccctggtttcactcttgtcatctccagtcttgatctcctttaagtcaacttgtcttagctatgcagtcaccttgaaaccaagacataaacacttctacacttttcttgcttataagtttctataaagcaaggcttggccctgagatttttaccccatgagtggccaatgtttctgtgtagcaca

SEQ ID NO: 230436 - DNA, 558 bp, Homo sapiens
attctctgtctacaaccagagctgagttgactttgtcttcctcaaatgtgatgttgatgttcttgtgaggctggttggagtcacaagggccgtggctatttgaacaagtgatggcacattcctccagtgagtcctcagggactttgctttcttcagccttctgcacctccctgatgagccaggtrggacagagatgacagaagattaaacacagagggattggaccccagggagtcctagctggttttgacaggcggcattaagagagtggtcccagaaagcaaaatggaggttccctttaagggggaacaggcaatcctcttctctctgcaacagaacatggctgccatgggagccagagaggaagagagcagctggtgttcagtgcactggacagataggagctgaggaggatgaagactcagctatccctgtatggtacagacatgacacttggcacacatagagaaacacgacagctgccgcaccctgtgtctaagctgggttgaatttcacatactgtggccaagcgaatgcgggcttttggcccatcataga

SEQ ID NO: 230437 - DNA, 596 bp, Homo sapiens
aggaactcacacactgtttactaacttcagtagctacatcattttagattcccaatagtaatatatgagaattccatattctccatcacttttgaaacatgtgttgtctttattkttttcttaagtcatactgctgggtgtgaagtggtatctcattttggtttaaatttacattttcctaatgacgaaaaacattgaacatctttgcatgtgcttcttggccatttgtgtgtttcctttagagaaacctctactcacagctttttttccccattgttaaatgtggttgtcgtttattgctcagttatatgaattccttatatactctaggtactagacctgtgtcaaacatacaatttggaaatagttctcccattatgtggattatcttttcacttccttgacagtgtcctttgaagcatacaagttttttattttaatgaagtccatttatctatttttccgttgtttgtgcctacttaaaaaatgtctaatccaaaatcacaaagatttgtacctaggtttccttcaagacatcgtcttttgaatgagaactttcctgggttttagaggagggtggacattgtttattgatg

SEQ ID NO: 230438 - DNA, 515 bp, Homo sapiens
ttatgttagaacattttgtctattctttgtcaattgttgtttatctacaattttaacatggataaaggagagttcagtgtcaatatattcttaacaactaattacggctcatgtccaccgccatgcgatcatatttaartctgtcaactatcctgttacttaggtattatcctgttcctgatgagaaaacaaactcagaaagattgcaaaatttccctaggtcacaaaactagtgaggagaggagtaagaattagatatccgttccttttggccttcaaagctaaccttgtaccattagatcaaactgatttacatacttttgctggaattagtctcagacttgtggttctcacttgattttcccaaggaaacagtgtgccactttaatatcgtttcaaactttgaaatttaaaactctttttattatacttttttgtctttgttctattccgttgcttttggtttcttctcaacggatccctcttatttatatgctaaatatttgttacctatt

SEQ ID NO: 230439 - DNA, 640 bp, Homo sapiens
aaggaaaaagattcacctgaacctcaatactgactcaaaaactaactcaaaatggattatgcaactaaatataaactataaaagtagaaaaagtatagcaggaaatataagacaaaatcttcacgaygcagttaggcaaagtgttctttgttatcaagaaacacaaaccattaaagaaaacattgataaattcaactttataaaaagtaaaagtttttgctcaacacgagacagtattaagagaacaaatataagctgcagattgggagaaaaacaggggaaatgacaaatgtgacaaaggacaagtgtgatagttacttgcacgtgtcactgtgactgagcaccagggtgccgggacattcggccaaatgtgattctggttgtgttccagagagtgtttcacatatgattaacatcgggatgggcagactaagtgaagcagattgccccccttaacgggggtgggactcatgcaatcaatcaaaggtcaggagagaattaagaggcctaatgggaaacaaatgctttcctgggtatccagctttccttccatcttgggaatttcagcctccataatctcagaaacaaattcacatatgtatacacacacatatacatttcataggtatgtggctaagat

SEQ ID NO: 230440 - DNA, 515 bp, Homo sapiens
tcagaaacaaattcacatatgtatacacacacatatacatttcataggtatgtggctaagattgtatttttaaaagttcagccatgagatgattggtgaagccagccaatgaataagggtgtgttctattatatgactcagtcttcttttgtacacgattgaagttctgcatttgaagtaggaggacaggagagagcaagtccacctaggatgataacagctgaatttctcaacagacacttcaaagccctaggsgttaacttagagagtcaaaaatcccacccataaccctgcccctaaacgccagggctagggaacactgtggccctcaggtgattttgtttcacttggtctgggagccacacaagggcagagggagcaggaaacactaagcaaatcgaggccaggacagcagggagggcctgttcatgacagaacacaggtaaaactatcctcagaaagagcatgtggagaaacacagatcatgcctgagacctggtggattagagcactgg

SEQ ID NO: 230441 - DNA, 459 bp, Homo sapiens
attttgggcaaacaccttatatccagtaatgcgatccatgtatcaagaccacgaggaagattattaaacatgctaaactcagcgagacctgattccctcatgaggactctgttaaggatgagtaccactcagcaagtgatgactgtgacattcacttttgaacagctcatgagcattaatatatttaattgtggatctaaaccaaaaaccaaggkgtgggcaagatgacaaccacagaatgtcactggcatatgtttaggttcaaataccattatgagaagtggcaggtaaaggaggtaggaaaaagaaaacacatcatgtaactgactgtcatatggaaatatttgacgctgaaagtcataatttaaaatgtataaaccaaatattagaagtgtgtctagttcaaaggggggaaaactatgaaacatttttaatcaatatcaaacatgagctacacaa

SEQ ID NO: 230442 - DNA, 459 bp, Homo sapiens
attttgggcaaacaccttatatccagtaatgcgatccatgtatcaagaccacgaggaagattattaaacatgctaaactcagcgagacctgattccctcatgaggactctgttaaggatgagtaccactcagcaagtgatgactgtgacattcacttttgaacagctcatgagcattaatatatttaattgtggatctaaaccaaaaaccaaggggtgggcaagatgacaaccacagaatktcactggcatatgtttaggttcaaataccattatgagaagtggcaggtaaaggaggtaggaaaaagaaaacacatcatgtaactgactgtcatatggaaatatttgacgctgaaagtcataatttaaaatgtataaaccaaatattagaagtgtgtctagttcaaaggggggaaaactatgaaacatttttaatcaatatcaaacatgagctacacaa

SEQ ID NO: 230443 - DNA, 466 bp, Homo sapiens
tgaacccgggactccggcctgggaggcgagaatgctaccaccgaaccaccaatgcctccccgtagccacggcctggaggatatgagaaaagagtatccacaaagacttagaaacttccaaccgcctttttcaagtgtcgactaaaagctaacaaagacatccaaaccaaatgtttttataggaaacttttactagacaaagttataaatatcaaaatagctcatttggtggatcaaactcttaastctgaaaaaggtctttctacctgcattataaacccctataataaaacatcagaaattcattcatgtttcttttttctaatcttaaatcttccattgtcaatctcaaactgctgccttagaggttctgagaaggtaacctaactggtagtttaggtaaataaagttcaaatccagggaggaaataagaagcagaagcagaattagaagaaagatgaaataaa

SEQ ID NO: 230444 - DNA, 247 bp, Homo sapiens
agacctatatctaccatttaaatcagtgtccttgtgaatacccagacatgttgtttcttccaactrcctgagctaccctacaccaagcacaaacttacacattttcaatccagaaagtgcccagacagtgccatccttacccaggccacgaggctgatctcagctcctcagccagcttcccttctagtcaattttttgggagctgggcctccagctgggatactctctggatgagactcttcaggtc

SEQ ID NO: 230445 - DNA, 604 bp, Homo sapiens
ggtctttccagactagatgaataatcacttgtaactgagagggactggacccggctcttgaagttttgaatgaccttgttggcattctgcagctgggccttcagatctttgatgtcctttcataggacccagatgttttctgactttccatatacccagaactcttcctgcctccctagttcattctccaagggcttcctctcagaggaactagccagygttcagccccggcgcccctgctcagagcacagcccctccaccaggaccatttccttgcggctgctgtgctcctcatgctctgaaaaaagacaaagatgtcttcctaaataaaagctggatgtgctgttgtggccactgcctttgagaggaggcaggtttggtcatgaggacaataattactagggaataaggtgaagtcgtactttattcaaccctgacactgtactaggcattcaaatacagtatttcttatcctccttatacccacaagttaggtttcaccactttctattttactgactggggaaaccaaaacttaaagagaggtggtaaaccagcttgttctagatcactcaaactagcacatggcagagcctgaattcaa

SEQ ID NO: 230446 - DNA, 604 bp, Homo sapiens
ggtctttccagactagatgaataatcacttgtaactgagagggactggacccggctcttgaagttttgaatgaccttgttggcattctgcagctgggccttcagatctttgatgtcctttcataggacccagatgttttctgactttccatatacccagaactcttcctgcctccctagttcattctccaagggcttcctctcagaggaactagccagtgttcagccccggygcccctgctcagagcacagcccctccaccaggaccatttccttgcggctgctgtgctcctcatgctctgaaaaaagacaaagatgtcttcctaaataaaagctggatgtgctgttgtggccactgcctttgagaggaggcaggtttggtcatgaggacaataattactagggaataaggtgaagtcgtactttattcaaccctgacactgtactaggcattcaaatacagtatttcttatcctccttatacccacaagttaggtttcaccactttctattttactgactggggaaaccaaaacttaaagagaggtggtaaaccagcttgttctagatcactcaaactagcacatggcagagcctgaattcaa

SEQ ID NO: 230447 - DNA, 562 bp, Homo sapiens
aagcttgaagatatatttggtccaaggaagagactcttcagakggaaggtcacatcagctagaaacattaatgcgactggatgggctcaaaccaccgacttttcagtcaacttccgacagcactaacctagtgttccagagaccctgcttgttaaacagtgaaagctgttgctcaattgtgtcatccataattgtcaaatattgtcatttagtagcacaaggaagtattctctgttgccaagctagagtacccataactcttctgttttgttgaacattcttccccaccacaaaccctctttagaagactggtggctcctaaaacattgaggccaacagtcctgtccttgtgcatgtttgggcattgatccagggccaaatcagtgggagactcctccacgcacatgccaggtccccaggtgacaactgcagtctctggatctgaggtcatccactttcccattcctagctcacctcacccatcatgaagcctggtcaggattgccagagacccgagtgggcaggtgcccgcactaaagacagaacctgctgtgtgcccact

SEQ ID NO: 230448 - DNA, 455 bp, Homo sapiens
acgtgtgtacaaaaaccagggcccggccggacacggtggctcacgcctataatcccagcactttggcaggtggatcacttgaggtcaagagttcaagaccagcctggccaacgtggtgaaaccctgtctctactaaaaatacaaaaattagccgggcatggtggtgcacgcctgtagtccctgctacttgggacgctgaggcaggcgaacagcttaaacccyggaggcagaggttgcagtgagcccagatcgtgccactgcactccagcctgggcaacagagcaagactgtcaaaaaaaaaaaaaaaaaaaaaaaaagaaaagaaaagaaaaatgagggtcctcactcagctttggaagtaacagaacccttgtattactctaagcagagaagctgaatatataaaccagacccaaatgcagctgctcagcaggcctcaaggtggagacttgcac

SEQ ID NO: 230449 - DNA, 455 bp, Homo sapiens
agggcccggccggacacggtggctcacgcctataatcccagcactttggcaggtggatcacttgaggtcaagagttcaagaccagcctggccaacgtggtgaaaccctgtctctactaaaaatacaaaaattagccgggcatggtggtgcacgcctgtagtccctgctacttgggacgctgaggcaggcgaacagcttaaaccccggaggcagaggttgcagtgagcccagatcgtgccactgcactccagcctgggcaacagagcaagactgtcaaaaaaaaaaaaaaaaaaaaaaaaaraaaagaaaagaaaaatgagggtcctcactcagctttggaagtaacagaacccttgtattactctaagcagagaagctgaatatataaaccagacccaaatgcagctgctcagcaggcctcaaggtggagacttgcaccctgcttcctgcactcc

SEQ ID NO: 230450 - DNA, 585 bp, Homo sapiens
gatcccggcgctgcaggtgccctcgcactggactaaactggaccgcgaagggaatagccggaacccgccaggctcagagccctgccgcccstcactcaccccgagcctcggccgccgcgacccggttcacaacatccgcccaacctctcggctacggcgtccgttcagggccaaatcacgcgcacgctcgcgcgctgagcctccagccgcgcacgcgcaccggcccgcgcccagcctccgctaggggaccccctccgtggcttcccaccgggttgttccaggcctcagcttcgccgaaaggcctcaccacctccgacctccgcctgccccggggatgctcccagccctgctgcggcagaacgcgacgtgctaaccggaatccctaggccgcctgtctcctacccatacttggaggccccgctcagacggtcctgaaaacgtctgaaaggcggttcctgccagagtccctgctacctgttacctccacccctatttagtcctagtggacagcctcgctcaccttccctgggatgacacttctggcggctgagatgagcgagcctctctgggctctgccgccgggcg

SEQ ID NO: 230451 - DNA, 585 bp, Homo sapiens
gatcccggcgctgcaggtgccctcgcactggactaaactggaccgcgaagggaatagccggaacccgccaggctcagagccctgccgcccctcactcaccccgagcctcggccgccgcgacccggttcacaacatccgcccaacctctcggctacggcgtccgttcagggccaaatcacgcgcacgctcgcgcgctgagcctccagccgcgcacgcgcaccggcccgcgcccagcctccgckaggggaccccctccgtggcttcccaccgggttgttccaggcctcagcttcgccgaaaggcctcaccacctccgacctccgcctgccccggggatgctcccagccctgctgcggcagaacgcgacgtgctaaccggaatccctaggccgcctgtctcctacccatacttggaggccccgctcagacggtcctgaaaacgtctgaaaggcggttcctgccagagtccctgctacctgttacctccacccctatttagtcctagtggacagcctcgctcaccttccctgggatgacacttctggcggctgagatgagcgagcctctctgggctctgccgccgggcg

SEQ ID NO: 230452 - DNA, 585 bp, Homo sapiens
gatcccggcgctgcaggtgccctcgcactggactaaactggaccgcgaagggaatagccggaacccgccaggctcagagccctgccgcccctcactcaccccgagcctcggccgccgcgacccggttcacaacatccgcccaacctctcggctacggcgtccgttcagggccaaatcacgcgcacgctcgcgcgctgagcctccagccgcgcacgcgcaccggcccgcgcccagcctccgctaggggaccccctccgtggcttcccaccgggttgttccaggcctcagcttcgccgaaaggcctcaccacctccgacctccgcctgccccggggatgctcccagccctgctgcggcagaacgcgacgtgctaaccggaatccctaggccgcctgtctcctacccatacttggaggccccgctcagacggtcctgaaaacgtctgaaaggcggttcctgccagagtccctgctacctgttacctccacccctatttagtcctagtggacagcytcgctcaccttccctgggatgacacttctggcggctgagatgagcgagcctctctgggctctgccgccgggcg

SEQ ID NO: 230453 - DNA, 655 bp, Homo sapiens
atacaaattacttagcctctttgagcctcagttttcttatatgtaaagctggattaatagtacattttgtgtttaaaaagataatgtatatgaagtgtttaccatwtttcttggcatctagttcagttctcagtaactgatgtggtggtggtggtggtcatagtagcagtaagatccgtagtaatagtagcagcagttgttttagaaattagtaactgaggcctggcaaagttaaaggctctttcattaacacccagatgggaagaaatgaagctggtcttcagaggcaggctattttcactctgtgtcccaaattttcccccctagaccgtttttatacttctggggctctcagaaaatattctcagctattctgttagcttgatctcctaccatctgagagtgggcttccttcaaacaaccaaatttccaggtatttctaaactgcccttcccctacaccattctttgattcagtatttcaagacccctaagagaaatggtacatttacgtgtaagcacaggatagtgaagtatttacaacaagtgctttggagccagcaaatatggatcagaatgcagctttcctttcctacatacatgacattgggcagctaatttctaagattttacttctttgtctatgaaagtggagt

SEQ ID NO: 230454 - DNA, 655 bp, Homo sapiens
atacaaattacttagcctctttgagcctcagttttcttatatgtaaagctggattaatagtacattttgtgtttaaaaagataatgtatatgaagtgtttaccatttttcttggcatctagttcagttctcagtaactgatgtggtggtggtggtggtcatagtagcagtaagatccgtagtaatagtagcagcagttgttttagaaattagtaactgaggcctggcaaagttaaaggctctttcattaacacccagatgggaagaaatgaagctggtcttcagaggcaggctattttcactctgtgtcccaaattttcccccctagaccgtttttatacttctggggctctcagaaaatattctcagctattctgttagcttgatctcctaccatctgagagtgggcttccttcaaacaaccaaatttccaggtatttctaaactgcccttcccctacaccattctttgrttcagtatttcaagacccctaagagaaatggtacatttacgtgtaagcacaggatagtgaagtatttacaacaagtgctttggagccagcaaatatggatcagaatgcagctttcctttcctacatacatgacattgggcagctaatttctaagattttacttctttgtctatgaaagtggagt

SEQ ID NO: 230455 - DNA, 655 bp, Homo sapiens
atacaaattacttagcctctttgagcctcagttttcttatatgtaaagctggattaatagtacattttgtgtttaaaaagataatgtatatgaagtgtttaccatttttcttggcatctagttcagttctcagtaactgatgtggtggtggtggtggtcatagtagcagtaagatccgtagtaatagtagcagcagttgttttagaaattagtaactgaggcctggcaaagttaaaggctctttcattaacacccagatgggaagaaatgaagctggtcttcagaggcaggctattttcactctgtgtcccaaattttcccccctagaccgtttttatacttctggggctctcagaaaatattctcagctattctgttagcttgatctcctaccatctgagagtgggcttccttcaaacaaccaaatttccaggtatttctaaactgcccttcccctacaccattctttgattcagtatttcaagacccctaagagaaatggtacatttacrtgtaagcacaggatagtgaagtatttacaacaagtgctttggagccagcaaatatggatcagaatgcagctttcctttcctacatacatgacattgggcagctaatttctaagattttacttctttgtctatgaaagtggagt

SEQ ID NO: 230456 - DNA, 600 bp, Homo sapiens
ctcactagcataattgtgcattatcttcctcttatatcgccggcctccctgcacccccatgcccacctcctcctcgcgcctccatgccgcctcccactgctccagctccttgcagctgcgagtccagtcactggtcacctttcgtatctcctcactcacagcctggytggccaaacctgcctggtccagctgttctcagagcatggcattcacctgggccaggctggcactcctgaatggggcacaggggatcagtaggcgctcgcccagggggccatgctgcgagccctggccctccctgctgctcctactccagccagatgagggcactctccaggtcttggctgtgctctgcgtcctgggtggcagagaggttaaagcatcaggctgggcaggtggagggcagggcctgcctctgccccaccctggcacccaccctcagctgctgctgctccagctctccggatctctccaacagctgctccagctccgagaacctcttcttgtactggagaatctggggattgggagctgatggtgagccccaggggtgggggcagggcaaagtgaacacgtgggagggaaagagcaggaatgggt

SEQ ID NO: 230457 - DNA, 600 bp, Homo sapiens
ctcactagcataattgtgcattatcttcctcttatatcgccggcctccctgcacccccatgcccacctcctcctcgcgcctccatgccgcctcccactgctccagctccttgcagctgcgagtccagtcactggtcacctttcgtatctcctcactcacagcctggttggccaaacctgcctggtccagctgttctcagagcatggcattcacctgggccaggctggcactcctgaatggggcacaggggatcagtaggcgctcgcccagggggccatgctgcgagccctggccctccctgctgctcctmctccagccagatgagggcactctccaggtcttggctgtgctctgcgtcctgggtggcagagaggttaaagcatcaggctgggcaggtggagggcagggcctgcctctgccccaccctggcacccaccctcagctgctgctgctccagctctccggatctctccaacagctgctccagctccgagaacctcttcttgtactggagaatctggggattgggagctgatggtgagccccaggggtgggggcagggcaaagtgaacacgtgggagggaaagagcaggaatgggt

SEQ ID NO: 230458 - DNA, 474 bp, Homo sapiens
aggaaaagtcctggagagaacactgtcctctcctgaagtaaaatcacttctacctgaccacggcactgcagctcatgggcagcacatgctgtggatatttgttcattcatttaacaaatatttatttaatatctgttgcatgccaagcaaggccctgygatgtttagggaccttgacatcttcccttcacatctgagtcataatacaaagaggactctctgaccccactgagctggcaatgcctcgggatttttacctgttggatctggcagctcttgatgtcagcccacaccatgtgaggctgctcttggtgcacccaatggggaagtttctacatcagggcctcggagaatccactggaagccctggacagtgggagtcagcggcatccccagtgtggaggccaagagcacacagtgcttaagctccaggcaccctcaggaggacggcaagggacaattggctggtgagagc

SEQ ID NO: 230459 - DNA, 598 bp, Homo sapiens
  misc_feature (1)...(598): n = A,T,C or G
nnnnnnnnnnnnnnnnnnnnnnnngttctcctacacacataacaatccactgtctaatcctcacacagggacttcaggctcctcagcatgagaataggacactgtgagagatcttcttcaggaggcctgaaggctgatcatgatagagattcctgggtttttgtcccagaaactgtgggtaaaattccctattctggtagaycgttatcccaagatcatttgtcccaagtttgtgcaaatggttatgccatatttttccaatcgatttaaagcaaatgcccccaaatggttgctgggagaaaaactgcaatattcagccctgtctcatcaaatactcagattcttcatggtagcgaggattttagacgctgaaattagagtgaaggatgaaatctacaagatctacaaaattgagacaaaatcagagttgtgtgaatttgtcacatctgcccagatccaacatcttgagagtaggattagggtgccacaggcatggcctgagactaggaagagagccctgctcactgacccatcccttgcctgggcttccaagtggaactagagtttcattcaacctacatgtgcctataggtcctcc

SEQ ID NO: 230460 - DNA, 598 bp, Homo sapiens
  misc_feature (1)...(598): n = A,T,C or G
nnnnnnnnnnnnnnnnnnnnnnnngttctcctacacacataacaatccactgtctaatcctcacacagggacttcaggctcctcagcatgagaataggacactgtgagagatcttcttcaggaggcctgaaggctgatcatgatagagattcctgggtttttgtcccagaaactgtgggtaaaattccctattctggtagaccgttatcccaagatcatttgtcccaagtttgtgcaaatggttatgccatatttttccaatcgatttaaagcaaatgcccccaaatggttgctgggagaaaaactgcaatattcagccctgtctcatcaaatactcagattcttcatggtagcgaggattttagaygctgaaattagagtgaaggatgaaatctacaagatctacaaaattgagacaaaatcagagttgtgtgaatttgtcacatctgcccagatccaacatcttgagagtaggattagggtgccacaggcatggcctgagactaggaagagagccctgctcactgacccatcccttgcctgggcttccaagtggaactagagtttcattcaacctacatgtgcctataggtcctcc

SEQ ID NO: 230461 - DNA, 598 bp, Homo sapiens
  misc_feature (1)...(598): n = A,T,C or G
nnnnnnnnnnnnnnnnnnnnnnnngttctcctacacacataacaatccactgtctaatcctcacacagggacttcaggctcctcagcatgagaataggacactgtgagagatcttcttcaggaggcctgaaggctgatcatgatagagattcctgggtttttgtcccagaaactgtgggtaaaattccctattctggtagaccgttatcccaagatcatttgtcccaagtttgtgcaaatggttatgccatatttttccaatcgatttaaagcaaatgcccccaaatggttgctgggagaaaaactgcaatattcagccctgtctcatcaaatactcagattcttcatggtagcgaggattttagacgctgaaattagagtgaaggatgaaatctacaagatctacaaaattgagacaaaatcagagttgtgtgaatttgtcacatctgcccagatccaacatcttgagagtrggattagggtgccacaggcatggcctgagactaggaagagagccctgctcactgacccatcccttgcctgggcttccaagtggaactagagtttcattcaacctacatgtgcctataggtcctcc

SEQ ID NO: 230462 - DNA, 482 bp, Homo sapiens
tgtgtgaatttgtcacatctgcccagatccaacatcttgagagtaggattagggtgccacaggcatggcctgagactaggaagagagccctgctcactgacccatcccttgcctgggcttccaagtggaactagagttwcattcaacctacatgtgcctataggtcctccctgtggcaatgacatctctcagctcagtaagggccatttgcagtaggaatatgaccctaaccagaagactcagtggatccttatcaccttcatagaaaggtactcaccatccatgtcaagagcccagccaacacgctgttgctccaatatgtaacaggcacttctgtagggctggcatgagtcagtcagttcaagataacctgaaggagttgaataacatctatccagtgagtcctgcaagacttcaggccctttctcatccagcagctccctgctgagcctggaacagtgggaaaaagtaaagaataagcc

SEQ ID NO: 230463 - DNA, 482 bp, Homo sapiens
tgtgtgaatttgtcacatctgcccagatccaacatcttgagagtaggattagggtgccacaggcatggcctgagactaggaagagagccctgctcactgacccatcccttgcctgggcttccaagtggaactagagtttcattcaacctacatgtgcctataggtcctccctgtggcaatgacatctctcagctcagtaagggccatttgcagtaggaatatgaccctaaccagaagactcagtggatccttatcaccttcatagaaaggtactcaccatccatgtcaagagcccagccaacacgctgttgctccaatatgtaamaggcacttctgtagggctggcatgagtcagtcagttcaagataacctgaaggagttgaataacatctatccagtgagtcctgcaagacttcaggccctttctcatccagcagctccctgctgagcctggaacagtgggaaaaagtaaagaataagcc

SEQ ID NO: 230464 - DNA, 520 bp, Homo sapiens
gatttctaggagaaaaactgcaatatttagccctgtctcatcaaatactcagattgttcatggttgtgaggactttagacactgaaattagagtgaaaaaggaaatctacaaacccttgagtcaaaatcatagttctctgaatttgtcacatctgcccaggtccaatgtcatgagagtagaatcagagtgccacaggcatggcctgagactaggaagagagccatgctcactgacccatcycatgtctgggcttccagttagaactagagtttcattcaacctacatgtgcctataggtcctcactgcagcaatgacatctctcagctcagtaatggccacttggagcaggaatatgatctttatatggaagactcagtggatccttatcaccttcatagaaaggtactcacctcccacgtcaagagaaaagccaacatgtttttcctccaatgcataaaaggaacttccatagggcaggcaggagtcaggctgttcaagacaactggaaggagttgaat

SEQ ID NO: 230465 - DNA, 578 bp, Homo sapiens
cataaaaggaacttccatagggcaggcaggagtcaggctgttcaagacaactggaaggagttgaataacatctatccagtgagtcctgcaagacttcaggctctactgcctccagcagctccctgctgagcctggaaaaggaggaaaaagtaaagaataagccaggggaaatcagacacaacagagccccaactaggtttcatgggtagcataaggaagtggttgaaaaagtaaaaggakagatccattaatgaggtaacaaattattgccttcatgttgggacagaacagggccaaatggaaaagaatgaaagagaaagacagatagacacacacacacacacacacacacacacacacacacacacacagagaatgagctcagtgaattgtccaggtgacacactgatgagggagtaacaggacactctgagttagtgccctcaggacacacagcatacagtgatcaggaaaggactgtgctcaataattttccataaaatgtgctcaagtttccatgcagtcgccatgagaatacagtttttgaagtctggtccacctacagtaggttagtaaat

SEQ ID NO: 230466 - DNA, 566 bp, Homo sapiens
tgtcagcccgccctgttttccctgaaccaggagtctccagatgtcaacacagaagtagctgttcacaattgctcagttacctggggcatggtgggccttggtcttcttcctcttcctggtcctttttaattcctgcaatacattcagacagggacagacaaaataagccaattcacctacacccgtaacagtccactgtctaatccccacacagggatctcaggctcctcagcaagagaacaggacaatgtgagagatatacttcaggaggcctgaaagctggtcatgatattctttggtttgcatctcagaaccaagggygaaatatccctattctggtagatcgttatcccaaaatcatttatcccaagtttgtgcaaacagttatgccttattgttcccatcagttcaaagacaatgccccagatgatttctaggaggaaaactgcagtattcagccctgtctcatcaaatgcccagctcgttcatggatgcaagaattttagacactgaaattagaatgagggaggaaatctacaaacccttgagtccaaatcatagttctg

SEQ ID NO: 230467 - DNA, 566 bp, Homo sapiens
tgtcagcccgccctgttttccctgaaccaggagtctccagatgtcaacacagaagtagctgttcacaattgctcagttacctggggcatggtgggccttggtcttcttcctcttcctggtcctttttaattcctgcaatacattcagacagggacagacaaaataagccaattcacctacacccgtaacagtccactgtctaatccccacacagggatctcaggctcctcagcaagagaacaggacaatgtgagagatatacttcaggaggcctgaaagctggtcatgatattctttggtttgcatctcagaaccaagggtgaaatatccctattctggtagatcgttatcccaaaatcatttatcccaagtttgtgcaaacagttatgccttattgttcccatcagttcaaagacaatgccccagatgatttctaggaggaaaactgcagyattcagccctgtctcatcaaatgcccagctcgttcatggatgcaagaattttagacactgaaattagaatgagggaggaaatctacaaacccttgagtccaaatcatagttctg

SEQ ID NO: 230468 - DNA, 451 bp, Homo sapiens
ccttgcctgggcttccaagtggaactagagtttcattcaacctacatgtgcctataggtcctccctgtggcaatgacatctctcagctcagtaagggccatttgcagtaggaatatgaccctaaccagaagactcagtggatccttatcaccttcatagaaaggtactcaccatccatgtcaasagcccagccaacacgctgttgctccaatatgtaaaaggcacttctgtagggctggcatgagtcagtcagttcaagataacctgaaggagttgaataacatctatccagtgagtcctgcaagacttcaggccctttctcatccagcagctccctgctgagcctggaacagtgggaaaaagtaaagaataagccagggggaatcagaaaccacacagccccagctagatttcatggctaacataaggaagagtttgaaaagaaaaagga

SEQ ID NO: 230469 - DNA, 451 bp, Homo sapiens
ccttgcctgggcttccaagtggaactagagtttcattcaacctacatgtgcctataggtcctccctgtggcaatgacatctctcagctcagtaagggccatttgcagtaggaatatgaccctaaccagaagactcagtggatccttatcaccttcatagaaaggtactcaccatccatgtcaagagccmagccaacacgctgttgctccaatatgtaaaaggcacttctgtagggctggcatgagtcagtcagttcaagataacctgaaggagttgaataacatctatccagtgagtcctgcaagacttcaggccctttctcatccagcagctccctgctgagcctggaacagtgggaaaaagtaaagaataagccagggggaatcagaaaccacacagccccagctagatttcatggctaacataaggaagagtttgaaaagaaaaagga

SEQ ID NO: 230470 - DNA, 451 bp, Homo sapiens
ccttgcctgggcttccaagtggaactagagtttcattcaacctacatgtgcctataggtcctccctgtggcaatgacatctctcagctcagtaagggccatttgcagtaggaatatgaccctaaccagaagactcagtggatccttatcaccttcatagaaaggtactcaccatccatgtcaagagcccagccaacacgctgttgctccaatatgtaaaaggcacttctgtagggctggcatgagtcagtcagttcaagayaacctgaaggagttgaataacatctatccagtgagtcctgcaagacttcaggccctttctcatccagcagctccctgctgagcctggaacagtgggaaaaagtaaagaataagccagggggaatcagaaaccacacagccccagctagatttcatggctaacataaggaagagtttgaaaagaaaaagga

SEQ ID NO: 230471 - DNA, 559 bp, Homo sapiens
tgtctgacaagacaaaatcattattttcagcatgtactgttttccctggacttggcatctccaggtgtcaacatcaaattaactgtccacaatttctcagactcacctgggacctgttgcctcttggtcctcctttttcacttgatcccaccgatgtcctgcaaataaattcagatggggcctcttacattaagcagttcttccttgcacacagaaacattcctctgtccaatcctaacacaggkacatcagtctggtcagtgtgagaacaggagactttgagagaaatattccagtaggcctgaggtcaagtcttgagaaaactggcttgggttctttcatgagccttgggcaaaattaccctgttttggaatgttatcttccctatgtgctctgtcctaggtttgtgtacacaaatgagcaactttttccccaataaattgtaggcaaatagttctaacacctcataggagagatacttcaatattaagctttctctcatcaaatacccagaatttgttagtttatgagattgtggacacagagatttgatgaaggg

SEQ ID NO: 230472 - DNA, 559 bp, Homo sapiens
tgtctgacaagacaaaatcattattttcagcatgtactgttttccctggacttggcatctccaggtgtcaacatcaaattaactgtccacaatttctcagactcacctgggacctgttgcctcttggtcctcctttttcacttgatcccaccgatgtcctgcaaataaattcagatggggcctcttacattaagcagttcttccttgcacacagaaacattcctctgtccaatcctaacacagggacatcagtctggtcagtgtgagaacaggagactttgagagaaatattccagtaggcctgaggtcaagtcttgagaaaactggcttgggttctttcatgagccttgggcaaaattaccctgttttggaatgttatcttccctatgtgctctgtcctaggtttgtgtacacaaatgagcaactttttccccaataaattgtaggcaaatagttctaacacctcataggagagatacttcaatattaagctttctctcatcaaatacccagaatttgwtagtttatgagattgtggacacagagatttgatgaaggg

SEQ ID NO: 230473 - DNA, 440 bp, Homo sapiens
atctacattgatatataggttcagcccacagtgatggcaaatctcagcccaacaaggggcacaaggcccaaagattatggggtctacctgggccatgaactggagctttatcaccttcacaatggagtactcacygcctatgtcaacagccacgcagacttgctgttcctctaatgagtgaaatgtgccgctgtaagactggtacgaggccaacatttcaggaggaattgagagagtcgaataaccttcatcccaggactcctgggggacttcctcctcttcagactcctgcagattcctgatgagccaggcaggacagggatgatagaagatttaaccaacagacattagacaacaaaacctcccggatgatctgatgggagacagaatggagtggtcacagaaaccaaaggcatttttccttcaagagaaataaaact

SEQ ID NO: 230474 - DNA, 440 bp, Homo sapiens
atctacattgatatataggttcagcccacagtgatggcaaatctcagcccaacaaggggcacaaggcccaaagattatggggtctacctgggccatgaactggagctttatcaccttcacaatggagtactcaccgcctatgtcaacagccaygcagacttgctgttcctctaatgagtgaaatgtgccgctgtaagactggtacgaggccaacatttcaggaggaattgagagagtcgaataaccttcatcccaggactcctgggggacttcctcctcttcagactcctgcagattcctgatgagccaggcaggacagggatgatagaagatttaaccaacagacattagacaacaaaacctcccggatgatctgatgggagacagaatggagtggtcacagaaaccaaaggcatttttccttcaagagaaataaaact

SEQ ID NO: 230475 - DNA, 440 bp, Homo sapiens
atctacattgatatataggttcagcccacagtgatggcaaatctcagcccaacaaggggcacaaggcccaaagattatggggtctacctgggccatgaactggagctttatcaccttcacaatggagtactcaccgcctatgtcaacagccacgcagacttgctgttcctctaatgagtgaaatgtgccgctgtaagactggtacgaggccaacatttcaggaggaattgagagagtcgaataaccttcatcccaggactcctgggggacttcctcctcttcagactcctgcagattcctgatgagccaggcaggacagggatgatagaagatttaaccaacagacattagacaacaaaacctcccrgatgatctgatgggagacagaatggagtggtcacagaaaccaaaggcatttttccttcaagagaaataaaact

SEQ ID NO: 230476 - DNA, 425 bp, Homo sapiens
gctacatctgatgtaaaagtcctaataataaggttaaaaactacctctgattaaaactacttctcaccaagactcccattcatgtgtmcacagggtaattcaacactttgccagctatttagttgtggcttcttaaaggaaacaagatgtcagtctctattttcatggatcacttttatctgaaatcttttctctgcatgatacaaatttactagaatcataatctgtcctttgtaatatgtcaaaaagtggagaaatcaattatgtgtaattatacatggagtctcccagtatactttcagagcttattattagtaaatttcatgacaaaagaaggacaagaatagaaatatttcattacaaagaaacgaggataaggtagttgttttttcaaattactcttaccctgactttttttcatagta

SEQ ID NO: 230477 - DNA, 552 bp, Homo sapiens
tggtgaaacgccgtctctactaaaaacacaaaaattagctgggcgcagtggagtgtgcctgtaatcccagctactcgggaggctgaggcaggagaatcgggaggcagagtttacagtgagctgagattgcgccattgcactccagcctgggtgacagagcaaaactctgtctcaaaaaaaaaaaaaaaaaaaaaaaaaaattagccaggtgtggttgtgcmtgcctatagtcccagctacttgggagacagaagtgagaggatggcttgagcccaggaggtggaggttgcagtgagatgagattaggctgctgcactccagtctaagtgacagagtgagaccccgtctccaaaaaaaggagtgatattgtctctgtcttaaggaaatcacagataccctagcagtaataatacaagaaaggatatggtagacaacaagatgcactgttggaaaagttaacaacaaaacaatatgtttcccattctaaagagaggaaccagaccattcatgttgaactttcaaaggtcaaggttctaaactagttctgccagc

SEQ ID NO: 230478 - DNA, 552 bp, Homo sapiens
tggtgaaacgccgtctctactaaaaacacaaaaattagctgggcgcagtggagtgtgcctgtaatcccagctactcgggaggctgaggcaggagaatcgggaggcagagtttacagtgagctgagattgcgccattgcactccagcctgggtgacagagcaaaactctgtctcaaaaaaaaaaaaaaaaaaaaaaaaaaattagccaggtgtggttgtgcatgcctatagtcccagctacttgggagacagaagtgagaggatggcttgagcccaggaggtggaggttgcagtgagatgagattaggctgctgcactccagtctaagtgacagagtgagaccccgtctccaaaaaaaggagtgatattgtctctgtcttaaggaartcacagataccctagcagtaataatacaagaaaggatatggtagacaacaagatgcactgttggaaaagttaacaacaaaacaatatgtttcccattctaaagagaggaaccagaccattcatgttgaactttcaaaggtcaaggttctaaactagttctgccagc

SEQ ID NO: 230479 - DNA, 618 bp, Homo sapiens
tgccagctgcagtgattcactcctctctagtctacataagaagttgaggttgaagagaaagagatttatttggtgagaaattgacagtgttttacatttcacccaccttaagtaccagcctctgatggagaagtggatgtattttttgatggtacaaataccctaaatagacactgcagagcatgctcggagaagtggaaattgcctcagtgctggcacagcaagaatttcagaccctgaagaatatggctccccggataggcgacttaatgccttctgttggtgttctaagttgtttctgagtattgacatagttggggacctgaaagacagcgagtccatgtctttctctgacctggaaaattgggcagttgccaattcctctgaacctcaggtgagcttctgtgaaatacacttaaagcatggggagttgcatccactgatctcttcttattttatttttatcaatgacggtttatttactctttgggagtaaacaggtaaaaacaaccttctgtagaakccaagttgtcttttcacctgtccttgaatttggaccagtcagatagcccagtaatagtaataataataataataatagtgaaaaaaggcagaatg

SEQ ID NO: 230480 - DNA, 535 bp, Homo sapiens
gtgttgtgtggttctcagtttgttttctcagctttgcgttcttccctttcatcttcaatactgttttacacctcatttctttaaaaattgattttatgttctcattaacttttatatcatgaagcactggctggaaattatttctttgtgaagttctgcttacttccagcatggtttttcatctgtatttgtatccttctttctcatatgtatttatttttgctgataatgtgtttgcaaagttattgtgtcccttctttttatcttttaaaatacagcagttttgtttaggccttctcttygctgtgctatagtgtgagtgaattccacttgcttttctattaccttagattcaaggaggaagaaagagctcaactgtggctgtgtacagttggaggaggatccacactctactctcttctgaaattttagtaaatgttttctgtgctaaaatcttaatctattggagtttatattcattacactgagaagtattcttgggctttggattatttcttctaatcaacatggagcc

SEQ ID NO: 230481 - DNA, 533 bp, Homo sapiens
tgcccaggctggtcttgaactcctgggctcaagcaatcctcccacctctgtctctcaggtagctggattgcaacatcactctgggcatgccactccaatttcaagagtgtttcatcataacaatattatattattatcccttaaaatataatcatttaacctagtgctcacaatttataggacattgtgtgatgacaaaaacaaagacagcctttgcttaagagattgaaacttaaagtcagttcagagtgtgataaaaatgggtttctgtctccatcatggtatgtttttaaaaaatgacctttatgatttcagtgactatgccrtttcagtcccgaccacttttctccatgattgagctggtcctacatcagctgtctcaagattattccacactgtaaactctaaagggaaatggccattggccaaggagcttgctttcagcaatccaaagagatgtcttactttctaagagacaaccctacctccctcttgtgaaagacattatgaggaatttagttgactcagagcaa

SEQ ID NO: 230482 - DNA, 504 bp, Homo sapiens
caagagaaaaatattggtgtgttagatgtttttttgtgctatttcagttattaatcacagagcttgagtgaaattattttaactatttatttaaactcaattagcttgaaacttttaagraatcataaaaaatgaatacagaaccatatataaattatatatcactaatttttataattcttcttactcaaaatttacttgggaaaaatatagaaactgtatttatggattgtttaaggagtataaaatatttatttaaaagctattaaaaactagtttttagcagatcatctttagagaatgtctttggagcttgatagtcatgagtttttaatgttagattaatttcatattaaagacaaaagtgaaacattaagaaacaaactgttttgaagctaatgtaatttataatcacagtatatattgggaagacttaaaaactaggagaaattacataaatgaatatcctgagtaaacaacaactaacatttattgtacacttag

SEQ ID NO: 230483 - DNA, 533 bp, Homo sapiens
gcatttagttactctacgtttttttattggagagtttgttccactttcagttattattgataattaaggacttactcctaccattttgttaytagttttccagttgttttgtggcattttctttcttcttcctttcctttctgtcttccttttagtgaaggtgtttttatctgatgatatgttttaacatattgctttttaaaattctttgtgtatctgttttatgtttttaaatttgaggttaccatgaggcttacaaatagtataagccattattttaaactgataacaacttatcactgattgcttaaacaaattaataaacaagcaaagagaaaacaaaactcaacactttttctttttgttgtttccatttatcttattatactatctatgtcttgaaaagtttttgtagttattatttttgataggttaaacttttagcccttctactcaagtagtttacatatcacaattacagtgttatttagctgttttttttctgtatttactgttaccagtgagttttgtat

SEQ ID NO: 230484 - DNA, 533 bp, Homo sapiens
gcatttagttactctacgtttttttattggagagtttgttccactttcagttattattgataattaaggacttactcctaccattttgttactagttttccagttgttttgtggcattttctttcttcttcctttcctttctgtcttccttttagtgaaggtgtttttatctgatgatatgttttaacatattgctttttaaaattctttgtgtatctgttttatgtttttaaatttgaggttaccatgaggcttacaaatagtataagccattattttaaactgataacaacttatcactgattgcttaaacaaattaataaacaagcaaagagaaaacaaaactcaacactttttctttttgttgtttccatttatcttattatactatctatgtcttgaaaagtttttgtagttrttatttttgataggttaaacttttagcccttctactcaagtagtttacatatcacaattacagtgttatttagctgttttttttctgtatttactgttaccagtgagttttgtat

SEQ ID NO: 230485 - DNA, 629 bp, Homo sapiens
tttcatcatgaaaagatactgaattttatataataatttttggaatgtactgaaatgatcattttgtttttgttcttgattcttttttttctgacagaatcttgctctgttgcccaggctagatagagtgcagtagcacaatctcagctcactgcaacmtttgcctcctgggttcaagcaattctcatacctcagcctcctgagtagctgggattataggcatgcaccaccacaccaggctaatttttgtaatattagtacagacagggcttcaccgtgtttcccaggctggtctctaactcctagcctcaagcgatctgcctgccttggcctccaaggtgctttgattctattaatctgatatattacatttattgatttgcatgtgtgttcttgcattgtgggatgaatcccatttgatgataatgaatgattcttttaatgtattattacatttggtttgctagtattttgttgaggatttttgtatctatgttcatcagaattattggtctgtagttttcttttctttttttgagacagggtctcactctgtcaccagcctcaacttcccaggctcaagcaatcctcctacctcggcttctgagtagctgggactacaggtatgt

SEQ ID NO: 230486 - DNA, 629 bp, Homo sapiens
tttcatcatgaaaagatactgaattttatataataatttttggaatgtactgaaatgatcattttgtttttgttcttgattcttttttttctgacagaatcttgctctgttgcccaggctagatagagtgcagtagcacaatctcagctcactgcaacatttgcctcctgggttcaagcaattctcatacctcagcctcctgagtagctgggattataggcatgcaccaccacaccaggctaatttttgtaatattagtacagacagggcttcaccgtgtttcccaggctggtctctaactcctagcctcaagcgatctgcctgccttggcctccaaggtgctttgattctattaatctgatatattacatttattgatttgcatgtgtgttcttgcattgtgggatgaatcccatttgatgataatgaatgattcttttaatgtattattacatttggtttgctagtattttgttgaggatttttgtatctatgttcatcagaattattgrtctgtagttttcttttctttttttgagacagggtctcactctgtcaccagcctcaacttcccaggctcaagcaatcctcctacctcggcttctgagtagctgggactacaggtatgt

SEQ ID NO: 230487 - DNA, 549 bp, Homo sapiens
ttttcagttctgatgttatttacttttgcacaaagttacttataaaatttgtagtattaagaataatgactcatgaacaccatttgtacaacacgctgcatgtgcatgtttttgcttaataatacagatgatgtttagaaaaagagagaaactgggaggctgggaagagggctgagggaggagaaattayctatgggtacaatgtacgctaatgggtgatggtaaaactaatagcccagacttcaccactatgcattatatccatgtaacaaagctgtactcatactccctaaagtataaaaataataatgagagagagagagagaatacacaaggcaatataaaagaaagaatctctgctgctgagctaacacacaagagtggattgttattataaatcaggcttaaacaagtaagagatattacccagtatcaagacttattaaatactttcaaggctacaggcaatccagaggttcagaagaagcagagagattctgaggcattgagagcaggtcactaggtccttccttttcagtacaggcatac

SEQ ID NO: 230488 - DNA, 549 bp, Homo sapiens
ttttcagttctgatgttatttacttttgcacaaagttacttataaaatttgtagtattaagaataatgactcatgaacaccatttgtacaacacgctgcatgtgcatgtttttgcttaataatacagatgatgtttagaaaaagagagaaactgggaggctgggaagagggctgagggaggagaaattatctatgggtacaatgtacrctaatgggtgatggtaaaactaatagcccagacttcaccactatgcattatatccatgtaacaaagctgtactcatactccctaaagtataaaaataataatgagagagagagagagaatacacaaggcaatataaaagaaagaatctctgctgctgagctaacacacaagagtggattgttattataaatcaggcttaaacaagtaagagatattacccagtatcaagacttattaaatactttcaaggctacaggcaatccagaggttcagaagaagcagagagattctgaggcattgagagcaggtcactaggtccttccttttcagtacaggcatac

SEQ ID NO: 230489 - DNA, 567 bp, Homo sapiens
aaaaggatactgagctttcacttccaggcgcttcaggagccacgggttacagtgcagacatggccaagtccaagaaccacaccacacacaactggtcccgaatatggcacagaaattgcctcaagaaaccccaatcacaaagatacgaatctcttaaggggtggaccccaagttcctgaggaacatgcrctttgccaagaagcacaacaagaagggcctaaagaagatgcaggccaacaatgccaaggccatgagtgcacgtgcaaaggctatcaaggccctggtaaagcccaaggaagttaagcccaagatcccaaagggtgtcagccacaagctccatcgacttgcccacattgcccactccaagcttgggaagcatgatcatgcccacattgccaaagggctcaggctgtgtgggccaaaggccaagaccaaggatcaaaccaaggcccagcctgcagctccagcttcaattccagctcaggctcccaaaggcgcccaggccactacaaagggttcaaagtagagatctccatctgccaatatgaggacagaaggactggtgtg

SEQ ID NO: 230490 - DNA, 567 bp, Homo sapiens
aaaaggatactgagctttcacttccaggcgcttcaggagccacgggttacagtgcagacatggccaagtccaagaaccacaccacacacaactggtcccgaatatggcacagaaattgcctcaagaaaccccaatcacaaagatacgaatctcttaaggggtggaccccaagttcctgaggaacatgcgctttgccaagaagcacaacaagaagggcctaaagaagatgcaggccaacaatgccaaggccatgagtgcacgtgcaaaggctatcaaggccctggtaaagcccaaggaagttaagcccaagatcccaaagggtgtcagccacaagctccatcgacttgcccmcattgcccactccaagcttgggaagcatgatcatgcccacattgccaaagggctcaggctgtgtgggccaaaggccaagaccaaggatcaaaccaaggcccagcctgcagctccagcttcaattccagctcaggctcccaaaggcgcccaggccactacaaagggttcaaagtagagatctccatctgccaatatgaggacagaaggactggtgtg

SEQ ID NO: 230491 - DNA, 567 bp, Homo sapiens
aaaaggatactgagctttcacttccaggcgcttcaggagccacgggttacagtgcagacatggccaagtccaagaaccacaccacacacaactggtcccgaatatggcacagaaattgcctcaagaaaccccaatcacaaagatacgaatctcttaaggggtggaccccaagttcctgaggaacatgcgctttgccaagaagcacaacaagaagggcctaaagaagatgcaggccaacaatgccaaggccatgagtgcacgtgcaaaggctatcaaggccctggtaaagcccaaggaagttaagcccaagatcccaaagggtgtcagccacaagctccatcgacttgcccacattgcccactccaagcttgggaagcatgatcatgcccacattgccaaagggctcaggctgtgtgggccaaaggccaagaccaaggatcaaaccaaggcccagcctgcagctccagcttcaattccagctcaggctcccaaaggygcccaggccactacaaagggttcaaagtagagatctccatctgccaatatgaggacagaaggactggtgtg

SEQ ID NO: 230492 - DNA, 627 bp, Homo sapiens
agtgaattattaaagcattggttctcaaacttcagcatgattctaatgggggactcataaaatacaaattgacagaccccaccctcagagcttcttctgactcagtagctctgagaggaagttcaagaattgcctttccaacaagttcccaagtgatgctgctccagggatgacactttgagaaccactacctaacaaaaactttaatcatatttgtgatggctcattttacaggtcaacttgactggtccacagagtgcccagacacttggttaaacattattctggatgtatctatgagggtgtttctggatgagattaacattcaaatctgtagccaaagttaagcagattgtcctgcctaatatgggtgggcatcatccaatcctttagaggcctgaatagaacaaaaaggagaagtaagggagaatctgctttctctgcttgtttttgagctgggatgtcagtcttctgcatttagactgtaactataccaccagcctctcttctgggtctccaatttgcagayagtagataggggatttctcagtctccaaaacagaagagccaatgccttataaatctctttctgtatgtatatatgtgtgtgtgtgtgtgtgtttgtgt

SEQ ID NO: 230493 - DNA, 565 bp, Homo sapiens
aatcattttagggccaggcaccagagtgatccataagttacccaaatatcaaacaaagagccgtgtgttattctggccagaaagctgcaagcagccattgagactgtaccagccccaaagctctgactcttcagacagatggaccaggaaactctactgaaacttactgataccccagccttgcctcatgcttcagtgggagaagccaagccttccagcatcctttcrccaccaaattcccagcccatctgtgtccatggctacctcttgttacttccttcctgttaagagaatcaaaggccacttcatgctttgggccaagatcctattccctctctcactacagaaagctcattccttcagtttcttgttccccatccagcagaatcttctctgctccccatcagcattgcatatgctccagtatctcccagctcaaaacacatgcaaaccaccccccatttgaccccacagtcctgtaagtgcacagcctcatcatctgttctctttctcagacagtactctcacaatatgttgtctgcaaacattttctgcacttcctctc

SEQ ID NO: 230494 - DNA, 508 bp, Homo sapiens
  misc_feature (1)...(508): n = A,T,C or G
ctttgcttgctaccatgcaagacatgactttgctcctcattcaccttccgccatgattctgaagcctccccagccatgtggaactgtgaatgaatcaattaaacatctttcctttgctaaattacccagtaaacagctttcctctactaaattacccagtcttgggtatgtcctttattagcagcatgtgaacagactaatacatgttctaaatagaataatcagaaatcatggaagtacctttggaaatattaataaaagtgaactgaatttttgttataattattaatacctatcatctatattattttgactttctttaaaaaatagagtgtggacctaactttacctactrgttttttttttttttttttggactggcacaggtagatgagtaaatagaaaaatatgagttgtaagtacccattgatttattgctgacttgcacaatatgttaccttccgtgccagaggtaacatagtgggtaagnnnnnnnnnnnnnnnnnnn

SEQ ID NO: 230495 - DNA, 508 bp, Homo sapiens
  misc_feature (1)...(508): n = A,T,C or G
ctttgcttgctaccatgcaagacatgactttgctcctcattcaccttccgccatgattctgaagcctccccagccatgtggaactgtgaatgaatcaattaaacatctttcctttgctaaattacccagtaaacagctttcctctactaaattacccagtcttgggtatgtcctttattagcagcatgtgaacagactaatacatgttctaaatagaataatcagaaatcatggaagtacctttggaaatattaataaaagtgaactgaatttttgttataattattaatacctatcatctatattattttgactttctttaaaaaatagagtgtggacctaactttacctactagttttttttttttttttttggactggcacaggtagatgagtaaatagaaaaatatgagttgtaagtacccattgatttattgctgmcttgcacaatatgttaccttccgtgccagaggtaacatagtgggtaagnnnnnnnnnnnnnnnnnnn

SEQ ID NO: 230496 - DNA, 541 bp, Homo sapiens
aaattctgaagcaatacagcagagattggtttaaggtcataatgtaggtgacaaattccctgccttccaccatttctgagtagtctttctactgtgaaggggttttcacttgtcagtgtggaaacacaatggcctgggacctcaatgggaarccccttcaagccctgagacatggtatcgtgggggagtaggagttctgaatcccatccattgtgttcagctgagctgcaaacaggaaatattgtggtcaatcttgtagaattaaaaccagggatccttattaatatggatattcaggatgttgaagtcatagtcctgggggaggaaccgggaacactcataatccctttgaaagcatttgttgtgtacaatttatttgtggttatagcagatggtatctagaggatgctgaaaatgggaacctctggattcactcctattacctggtctcctaatttttgccacctgtcctctcttcactgagttccctgtgctagtcatacctgctccataatggtttaaccaggtcagtctgagtgac

SEQ ID NO: 230497 - DNA, 540 bp, Homo sapiens
tgaggctttctagtccctacaatcaatgagtgaaaatcgaattgcagagatgaaacaagctgatttgtgtatctgtgctggatatgtggggactaactctgtcagttaacaaagtgaaggatgcatgtcattctaaggtttcaatggtctagaatctaaagatcttgtggagatgttaccattagaggatcttgactgcgagttgtccaggttcttagtgttatgaacaaagaattggacaaaacacccagcaaagcaaaggaagaaggaagcaatgaaagaagaaagcagggacttactgaaaatgaaagtacactccacagtgtggcagaaggcctgagcagtggctcaaggtccaagatacagsatcttctccgcttcaaacaccctctacaggtttcccattggccccttggtggtcacctcatgtagatgaagtggtggcccgcagtcagtctgattggttgtgcaaagcaaccaatgagaggctgaattaaagttacaaaggtcacactcctgtgcaaacatctgattggctgc

SEQ ID NO: 230498 - DNA, 618 bp, Homo sapiens
gtcttgagctcacggatctgtgtcaggcttttggtctataagaatcaagtgagggtcgggggcagtggctcacgcctataaccctagcactttgggaggccgaggctggcggatcacctgaggtcaggagttcaagagcagcctggccaacatggcaaaaccctgtctctactaaaaatacaaaaaaattagccggtcatggcagtgcacgcctgtagtcccagctactcgggaggctgaggcaggagaatggcttgaaccagggaggcagaggttgcagtgagccaagatcacgccactgcactgcagcatgggcaatagagcaagactctgtctcaaatttaaaaaaagaaaaaaaaaaagaataaagtgagaaccaggctgctgatcagagttaaaggccacgggagtggtgggttgagatctgttctccccagacattgggatctggaatgtaactttatttcctgtttctcttttcttttcatctataaattaagtcgcttgccatgtttgttttcttttcagacattayacttgtattagccgtctcccaaagaagaaatatttattaaacacttgtacatcatgcttcataaacgaacatctagtgaggta

SEQ ID NO: 230499 - DNA, 419 bp, Homo sapiens
aaaaaaaaaaaaagacagaacaacaggggaaggagtgggggctttggatgtggacacatcagaatcacatggggtgggaaaagattttaraaatggtagcagggaagagggataggaaagctggtcaggcaccataacatatgtctaattcaatctttgaggcaagagggagctactaaagggttttgagtaggggagagacatagcactaatcactcagacagtgagtgaaccttacccccagcccagaatctacagctcaccagagctttgctattctcatctaatgcatgatcttcattaatcttcaaaacgaacatttgaagaaagtactctttcccccactttaaaggtgaagaaattaaatggtatcttgagagacttgtaaatgtcaagtgtctaatgtatgataaccatta

SEQ ID NO: 230500 - DNA, 406 bp, Homo sapiens
ctgttgtctcttattctcacggcattttttgtatgcctggtgataytgcatttaattctctaccctaggttgtcatacaaaatatcattaactgggtagctttaacaacaggaatttattcctcaaatccttgaggctgagaagtccaagatcaagaggctggctgattcagtttcctggtgacaggtcccttcttggattgcagaaggctgcctttttgctctgtacttgtgtagtggagagaaagagaaccctggtctcttattctgtgattataaggatactaacctcatctaaacctaattaacttccaaagccccatctccaaataccatcatgttgggggttaaggcttcatttcgaggaggacacaaaccttcatttcatatactggacattgtgtgaa

SEQ ID NO: 230501 - DNA, 406 bp, Homo sapiens
ctgttgtctcttattctcacggcattttttgtatgcctggtgatattgcatttaattctctaccctaggttgtcatacaaaatatcattaactgggtagctttaacaacaggaatttattcctcaaatccttgaggctgagaagtccaagatcaagaggctggctgattcagtttcctggtgacaggtcccttcttggattgcagaagsctgcctttttgctctgtacttgtgtagtggagagaaagagaaccctggtctcttattctgtgattataaggatactaacctcatctaaacctaattaacttccaaagccccatctccaaataccatcatgttgggggttaaggcttcatttcgaggaggacacaaaccttcatttcatatactggacattgtgtgaa

SEQ ID NO: 230502 - DNA, 406 bp, Homo sapiens
ctgttgtctcttattctcacggcattttttgtatgcctggtgatattgcatttaattctctaccctaggttgtcatacaaaatatcattaactgggtagctttaacaacaggaatttattcctcaaatccttgaggctgagaagtccaagatcaagaggctggctgattcagtttcctggtgacaggtcccttcttggattgcagaaggctgcctttttgctctgtacttgtgtagtggagagaaagagaaccctggtctcttattctgtgattataaggatactaacctcatctaaacctaattamcttccaaagccccatctccaaataccatcatgttgggggttaaggcttcatttcgaggaggacacaaaccttcatttcatatactggacattgtgtgaa

SEQ ID NO: 230503 - DNA, 486 bp, Homo sapiens
aggtttcaggggttctctctgacacctaaatttcaagacatagccttttttttaatatactcgccaataaattttcctaaagaacaatgggtcaagaagtagtcaggagacctgaatccatgcaaaggggcatgccagtgctcaggccccaccttgctgggactcagggttgcatcgtgtaaaataaggatatagtctattgtgtctaggttagattgtgttttccattatcaactcaatttcaggtaaaattcacctgtagcccttccttacatctgcagaaaaattggtgcatcatatcctttgcatgttaatatacaagtcgattacgtagaaagagatcgtycacattggaacatggaaacaattctagcttaaaaaattaaaaataactggcagacaaaactaatgtatcatgacagaaaatagatcaatggttgcccagggttgggatgcagaagagggactgactgcagaaaggcacaa

SEQ ID NO: 230504 - DNA, 574 bp, Homo sapiens
gaaaacatacttcatagacctactctgtaaggtttctatttcgtgctgtgacaaagtatttagggactgcaaatgacagatgtgaagtacattagcgaaatgaatagttacatcgtcccaccagaggaagcacttttttttatcacaacaatttatcatgaaagaggtggtgatttaagagaaaacattgaaacgaaagtaygtattgcaaaggaagttagcaaattgaaattatgactaaaacactagtaagcagaagcttttgtaaatgctttggaagagcatttttgtgactgattttaatacgttgaaattaaactgtattacttaaaaggtgaataagtgaaaaaatgtacaagtctcagagtacctcatgtcaaaggaaagaaggaagcttaaccgcgacttagatattacttgcatatttcgctcactggctttagagtatcattacctgtattcttgagtgagattagtaatgaatgtaagtatattatgtaaagcgttgtttcaaaaagagagcttgaaaattttttttttggttaaatttttggttagatctgattagactgtc

SEQ ID NO: 230505 - DNA, 522 bp, Homo sapiens
ctctactaaaaatacaaaaactagcagggtgtggtggcacatgcctgtaattctagctattagggaggctgagacacaagaattgcctgaacctgggaggcagaggttgcagtgagctgagatcgcaccactgcacyccagcctgggtgacagagtgagactccatttcaaaaaataataataataataagtgtagatatctttgcaacgcttcagtctttattagctaatgtaataatgcataatgtgaggggttagatgtaaaaagagtaattggtgtttgggagagtgctggaagcaggagatccagcaaagggttcaaatcaaaggaatggcaaaagtagaagtgaaattaggatagagactgaattactatatcataattttgtctagcactagtctcaaacacaatctgtcagctgaagtctatttcttttcagaaaggtaaattttttaatctaaatttttgtctttattaatcaattctatcataaacatgggtctaggtggacatattccata

SEQ ID NO: 230506 - DNA, 553 bp, Homo sapiens
gggtgtggtggcacatgcctgtaattctagctattagggaggctgagacacaagaattgcctgaacctgggaggcagaggttgcagtgagctgagatcgcaccactgcaccccagcctgggtgacagagtgagactccatttcaaaaaataataataataataagtktagatatctttgcaacgcttcagtctttattagctaatgtaataatgcataatgtgaggggttagatgtaaaaagagtaattggtgtttgggagagtgctggaagcaggagatccagcaaagggttcaaatcaaaggaatggcaaaagtagaagtgaaattaggatagagactgaattactatatcataattttgtctagcactagtctcaaacacaatctgtcagctgaagtctatttcttttcagaaaggtaaattttttaatctaaatttttgtctttattaatcaattctatcataaacatgggtctaggtggacatattccatattagcatttgcaggtttattatgaaacaatgactgaaaattgctaccattactgaaa

SEQ ID NO: 230507 - DNA, 553 bp, Homo sapiens
gggtgtggtggcacatgcctgtaattctagctattagggaggctgagacacaagaattgcctgaacctgggaggcagaggttgcagtgagctgagatcgcaccactgcaccccagcctgggtgacagagtgagactccatttcaaaaaataataataataataagtgtagatatctttgcaaygcttcagtctttattagctaatgtaataatgcataatgtgaggggttagatgtaaaaagagtaattggtgtttgggagagtgctggaagcaggagatccagcaaagggttcaaatcaaaggaatggcaaaagtagaagtgaaattaggatagagactgaattactatatcataattttgtctagcactagtctcaaacacaatctgtcagctgaagtctatttcttttcagaaaggtaaattttttaatctaaatttttgtctttattaatcaattctatcataaacatgggtctaggtggacatattccatattagcatttgcaggtttattatgaaacaatgactgaaaattgctaccattactgaaa

SEQ ID NO: 230508 - DNA, 522 bp, Homo sapiens
gaatacaattttttacaaacaattagcccggcgtcgtggcaggcgcctgtagtcctagctactcgggaggctgaggcgggagaatggmgtgaacccaggaggcggagctggcagtaagctgagatcgcaccactgcactctagcttgggcgacagagcgagactccgtcttaaataaataaataaataaatagaatacaatttttatttagttttacattcctagcagcttcaaaatatatggcagaacaggaaatgtatgatggtacagtcaccgtgttcactttgcatacaaaatgaacacaagctctaggaaaaccatattcaatttttattgtcattgatcccttatcactaatgcatattatatgatacacatctatagttatatctatctatctatctatctatctatctatctatctatctatctatctatctacctacctacctacctatcaactttataaactgatggtagagcctgaagtataaacagaaaatggtattcttaatttgggaa

SEQ ID NO: 230509 - DNA, 522 bp, Homo sapiens
gaatacaattttttacaaacaattagcccggcgtcgtggcaggcgcctgtagtcctagctactcgggaggctgaggcgggagaatggcgtgaacccaggaggcggagctggcagtaagctgagatcgcaccactgcactctagcttgggcgacagagcgagactccgtcttaaataaataaataaataaatagaatacaatttttatttagttttacattcctagcagcttcaaaatatatggcagaacaggaaatgtatgatggtacagtcaccgtgttcactttgcatacaaaatgaacacaagctctaggaaaaccatattcaatttttattgtcattgatcccttatcactaatgcatattatatgatacacatctatagttatatctatctatctatctatctatctatctatctatctatctatctatctayctacctacctacctacctatcaactttataaactgatggtagagcctgaagtataaacagaaaatggtattcttaatttgggaa

SEQ ID NO: 230510 - DNA, 583 bp, Homo sapiens
acattaaatacataaacatataaacaaataaaataacaaggtaaggtcagcaaatacaacaaaagatgtttatgaaaatttgacaaatgccgctggatgccgttcattatccatcttttattgctaatagaatatcgctattgttcaatgtggcaaaaaatctatttttaagtgttccttgtggcaatgtgatgcagttctgaacaataaaatgtgagaagacttgaaatttctgggagagtttcattcctttcccaggtatatccccttctttgctgtttatttcctcctggctagaatgtggaagtgatgtctgatgctgggtggccacgctgtgattatgtgaaaaagacaggacaagggccttgagttaactttaccaattgcctacatgtctcttaggtgtgagaaaaataaaattataactcatttaagctactctttgatgaacatttcagacaaatgggaatcctactttctacagaaaatgatggtgtrtgactaatacactggatagttaggaaaggctttactggtactttaacatgacaagaagtgatcatgaccataaaaaaatactata

SEQ ID NO: 230511 - DNA, 628 bp, Homo sapiens
aattcagacttaaaaaagagttgtaaaaatagtatagagtttccatattccctttacctaggttgcactaattaacatcttacataactatagtgcaattatcaaaactaagaagtctatattgttgtgatactattaaatttgtagtgaactataaatttcacacagaaatgtagatgagatattcaatttcacttatttgaataagtagctttccatctcccattttatttttgcttgcattataaaacaccattgctcactagactctagacatgagacatcrgtgtagccaagatagaataacagagaccaggtttattctcctgccagaaaaatcaaaaactgagcaaaaacccaatacttttcaagacactagatatcaagcaatggagggagttgagttgatctttcaccataattttccactaacaaaaaccaattccggtattgccggatgcaacaggcattatcttcttgaaagactccatcatcttcctggaagagtccattatcttcctggaagatccaggtagtatagctattccttcaccacatagggtaagttgggttttgtggtcagctgagcctccactcttctcccaacagtaatgagacttaataaata

SEQ ID NO: 230512 - DNA, 450 bp, Homo sapiens
agcctgggcaacacagtgaggcctcatgtctaaaaaaaaaaaaacacaaaaatcagccatgcatggtggcacaaacctgtattcctagctactcagaaggctaaggtaggaggatcactccaggaggctgaggctgcagtgagccaaggttgcaccattgcactccagctgaggggacagaaggagaccctctatattaaaataattgtttgcaatatttgaatgctataattgaagtggctataaataccytgatgcatacaactttaccaaaatctggatttggtgtgtgtgtgtgtgtgtgtgtgtgtgtgtgtgtgtgtgtttgtgtgtgtgcatgttttagaatatattttaaaaatggaaactactgagtcaaaagtaagaatccttttaaggctatggacaaacattgagaaattgttctctaaatcagtttgtttgtttgtt

SEQ ID NO: 230513 - DNA, 608 bp, Homo sapiens
caatgttactttttttcaatctcgatattctttgtaccttaaagaattttattcacatgtcacaaacaagattcatttataaaagatataattttaaatgtttgctcaatctttagaagttcattatagaaatattcttgaaatcaccaaatctgatcagcattctagctttctgtaactctgctgtaagtcaataaataaagcaaatgtgtctatattatttcataggacaaagaagtctaagcttattaatagacttataaatgatattgtattatgtactatgctaccagcataggaagtgggattayttggtataattaaaatttggaaaatcaataactattgaataattttggaagagaaactagtgcaattggcttgtgaattatttttaagacatacataagtacaataaattaggtaaattatatgtaacaggcccttattttaaaatgttaattcacaagttatgtgtcaataatgcctttactctttggcaaaattcaacagcccttcatgctaaaaactctcaataaattaggtattgatggggcatatctcaaaataataagagctatctatggcaaacccacagcaaatatcat

SEQ ID NO: 230514 - DNA, 544 bp, Homo sapiens
tagatctcttatacttattcaacatcctaacaaagtgctttcgtaccactatttgattctttctggaaccttaggagacacagatattattacttttgttatacagatgaataaatgtatcataaataacaatgatcacatgcttaaactgtaatacctaaagtaaaaaactagtttggtgctctgtcaaatcaaaccagctgscttggaaagctgattgaaagtaaagaatacagataaaaaggtagaagaaagacatacattttggagtccaattcagacaaagccaacaattcaatattttaattaaattaatctgagtttatttctgttgtttgaaagcaaggtaatttctaataagaaaataaggtaaattatatcaaatagatctaatggattttttttagtgaacttccatgtgatatttatgaactcatttattaattatagatgttatccaaaatgatgcccatacaataatttagtcattctaagcatctcacacattgtcatgttggaaccaaatagcccaagcttctcctta

SEQ ID NO: 230515 - DNA, 582 bp, Homo sapiens
gattttttttagtgaacttccatgtgatatttatgaactcatttattaattatagatgttatccaaaatgatgcccatacaataatttagtcattctaagcatctcacacattgtcatgttggaaccaaatagccyaagcttctccttacatctctctgtagctagtgtttgcttctgattcagtagagggtcttgagagagtgatgagaagtacatatatggttgctgataagaatgggccttcttaccttccaattaatataacacaaatgtattggttgttatgtgattccaaacaatagatacaatctaatgtgtataattcttactgatctttagtcaacaatctaatgtgtataattcttactgatttttagtcacttattttgaggaatgtactgttttacttttaccatgtttaattcacaaattatttaatcttttctctattatctaacagtactccaccaaaactacaaacccaccatcaagagttaactagtttaactcaaagatgagagtgatttaggcaactagtaagtgataatagaaagtgtagagaattaatacccgtatttgaa

SEQ ID NO: 230516 - DNA, 582 bp, Homo sapiens
gattttttttagtgaacttccatgtgatatttatgaactcatttattaattatagatgttatccaaaatgatgcccatacaataatttagtcattctaagcatctcacacattgtcatgttggaaccaaatagcccaagcttctccttacatctctctgtagctagtgtttgcttctgattcagtagagggtcttgagagagtgatgagaagtacatatatrgttgctgataagaatgggccttcttaccttccaattaatataacacaaatgtattggttgttatgtgattccaaacaatagatacaatctaatgtgtataattcttactgatctttagtcaacaatctaatgtgtataattcttactgatttttagtcacttattttgaggaatgtactgttttacttttaccatgtttaattcacaaattatttaatcttttctctattatctaacagtactccaccaaaactacaaacccaccatcaagagttaactagtttaactcaaagatgagagtgatttaggcaactagtaagtgataatagaaagtgtagagaattaatacccgtatttgaa

SEQ ID NO: 230517 - DNA, 260 bp, Homo sapiens
tacttgggattctcaagactcacactggccaccaccttctaccccttgactgctaaatcacggagggttagtcctcaaccagcacaactgaaacattaggggagatcagaactttgaatatctgctcaagctagctctgtaaatggycaaacaaccatatctaaaaagccccaagtttgtctccacataaaatcttacacctggcttataggctactacaaatctctaactcttgaaagaagcacaaaaccaaagacacc

SEQ ID NO: 230518 - DNA, 613 bp, Homo sapiens
tctcctgcctccgtttcctgagtagctgggattacaggcacccaccaccactcctarctaatttttgtatttttagtagggacagggtttcaccacattggccaagattgtctcgaactcctgacttcaggtgatctgcctgcctcaggttcccaaagtgctgggactacgggcgtgagccaccatgcccggcctattttcttatcttcagatttctaacagcatttgccaatgttgactacaacttctgtcatgaagcttacattccttggtgtcataatgctgcattcttgttattctcccacttcccaaatcccaattttatggtctcctacccctttttcccaaatatagctcagtattctatatttgattcagttctctctctacactgtcttttgtagaaatcctctccagtctcaaggctttaatacctgcctccaaaatctacaccttctgcgatcctcatctgcatttcataacctagataggactccattttcaaccgcagtgtctaccatcctctcatttaaatatatttattttccctctattctggtcccatgacatcagcaccatctttgtcatcacacggactttcaatctggaagaa

SEQ ID NO: 230519 - DNA, 597 bp, Homo sapiens
atcaggcagggcacacttggggagcagtccgtttcttcattgacgcgctttgtgtcagttgcctgtcctcactcctcttagatgtttctttgcctcatgtgtagattcagtgggtgctctgaggacttcttccatagcctgtccaatacaagattgatttcttaggttatttcgtgggctttaaagtgacatgggatttagcatgatagaggaagatgctccgttggcttgttttattatcagtcgtagattacataagggagtttcagaaatcataggasgaagtaagtgtgatagtttgaagacaacattgaaaaatgtactagattacaattttcctggtcacataaacctcctaaataaatgcaattgaaattgggaagatgtagcactgggtttatttaaaaccattacataaaatgaatccttgattatataaggctacactggagaatatagtttcattgctgaaaataacttgtgggttttagttaatttgacttgttgaaagtatacacattttcttactggaaatgctatatatcttgacacggtagtggttactagggtatataaaaatgtaaaaccattgaactg

SEQ ID NO: 230520 - DNA, 574 bp, Homo sapiens
aacggcaggatttttatggtggtaatatggcttctttgattgtcgggaagataggattaggatcatacttgtgaagttgcctaaagatgttgatcatttataaaccttggctgccttttcttatttttagtgaatttggggagagtggactttttttcaaaggggactttaaccaaggaaagtgatagaaggtcaaattatgaagcaggtgaaatttatcatcacatcgtatgtatcccttttctggtaacttttactcctctctgtaccttttccagacccttctacccatcaaaaccaagraaagttataaacatatttgtagcaataataaatggcttgggaaaccataagttaaagtggttgagagtcagatctgagattgaaaccgggctctgccatatactgtgggaccttggacgagtttatctttctgatcctcagttttttaaacaggaaaatggaaataatgagatcatcttagtgctcttgctacagttgagtgagttaatgcatctgaaacactgagcacagtagctgggatggagtaactgcttatataaatgatagtgtt

SEQ ID NO: 230521 - DNA, 574 bp, Homo sapiens
aacggcaggatttttatggtggtaatatggcttctttgattgtcgggaagataggattaggatcatacttgtgaagttgcctaaagatgttgatcatttataaaccttggctgccttttcttatttttagtgaatttggggagagtggactttttttcaaaggggactttaaccaaggaaagtgatagaaggtcaaattatgaagcaggtgaaatttatcatcacatcgtatgtatcccttttctggtaacttttactcctctctgtaccttttccagacccttctacccatcaaaaccaagaaaagttataaacatatttgtagcaataataaatggcttgggaaaccataagttaaagtggttgagagtcagatctgrgattgaaaccgggctctgccatatactgtgggaccttggacgagtttatctttctgatcctcagttttttaaacaggaaaatggaaataatgagatcatcttagtgctcttgctacagttgagtgagttaatgcatctgaaacactgagcacagtagctgggatggagtaactgcttatataaatgatagtgtt

SEQ ID NO: 230522 - DNA, 585 bp, Homo sapiens
gtacacacaagacagtgagttcgcccttatgcataacacacggttcgttaaattataatgaatgaagtaagatcaattgtctatggcatgctgatgctgagtaacatttcacaccttgatcagatgtggtgaagataggctgcgcagaaggtgaaaacagtgcctgtgactagaagaccagartgtagagcgaacacggccataaagcaagaacagaggatcattgacttatactttttttttatttattcagagagtactcccagcaccaatgtaggggaattagatattgatgagaaatcacaagcagagtttttatgtaggtgtcatgtaggaatggtgtcagcccttgctcctgtacttgccccatccttgctgctacccaggcatcaagcaagctatcattccttccctttaagtcagtcagcagggagtaatcaggatatttttcatccccctccaccccacagcgagtcctttgtagggactgactgatcaaggggatctgattacagatcactgactttgaaaattattttcaaaaatataaaccatttgtattttatacttttttgatgctaattc

SEQ ID NO: 230523 - DNA, 585 bp, Homo sapiens
gtacacacaagacagtgagttcgcccttatgcataacacacggttcgttaaattataatgaatgaagtaagatcaattgtctatggcatgctgatgctgagtaacatttcacaccttgatcagatgtggtgaagataggctgcgcagaaggtgaaaacagtgcctgtgactagaagaccagagtgtagagsgaacacggccataaagcaagaacagaggatcattgacttatactttttttttatttattcagagagtactcccagcaccaatgtaggggaattagatattgatgagaaatcacaagcagagtttttatgtaggtgtcatgtaggaatggtgtcagcccttgctcctgtacttgccccatccttgctgctacccaggcatcaagcaagctatcattccttccctttaagtcagtcagcagggagtaatcaggatatttttcatccccctccaccccacagcgagtcctttgtagggactgactgatcaaggggatctgattacagatcactgactttgaaaattattttcaaaaatataaaccatttgtattttatacttttttgatgctaattc

SEQ ID NO: 230524 - DNA, 533 bp, Homo sapiens
cagttttggacctccagcctgggtatttgtactggtctcttcagttcagaggtcaagaccaaaacccaggtcacttgatccccatcctagcactctagccttcacagtaggcacctgactgtcttctgcatcttctgtggtggctgcttctaggaggcaagggagagttgaacctcactaggctcattgcaaactggaaataacaatacctaaatgatcaagttcttccaacaattgaattacataatgtacaagttattcctatttgttatgctcttttctaaattcttaatatgcaccaattcctttattagtaaccrtaatgaattccagctcagttattatccccacttcattgaaagtgagaatgaggtacagagatggcaactgacttgccccagaggttaattaattcaatgtttgacaaggcgctaatgaatggaggaattagaattttaacactagccctcttgctggagaaactcagttcattatcagagccctctcccaatgcctaatacatagcagcactt

SEQ ID NO: 230525 - DNA, 571 bp, Homo sapiens
tctcaaaagagtaacatttacatgaattaacaccaaatgactcagaaacataaggattgaattcccacaggaaatttacacatggacattgtacttaatgtattcaatggcgtgcatgttacaatttatctggaaaaatcatttattactcatcgtgactccacagggttcttcgtgctccatgagccctgggccaggagtcaaggctgaaagtccctgctctgctaactcagcaacatttctcaagtcacttaaactcgtcacctcgatatttgcgttgtgcccagtaaggcccatgctagctctgaaaagcagaattaggtgaatttgcccaagatcacccaaagctgagcagaaccaagagtcagccttggccttttgatcccaagtgaaaggctttttgcaattttttgagctgcccctgtaagtaaaaaccatgtctttattatcttgttcttgaaagaccagtaaaaaaggtacccagtccaatttgacctaaacctataaccccaaacatttttcagttgctatgctattttctgcygtaacatttggaaatcactattgtgga

SEQ ID NO: 230526 - DNA, 556 bp, Homo sapiens
tacataggtatacatgtgccatggtggtttgctgcactcatcaacctatcacctacattaggtatttctcctaatgtgctccctcccctattccctcaccctccaacaggccctggtgcgtgatgttcccctccttgtgtccatgtgttctcattrttcaactcccatttataagtgagaacatgtggtatttggttttctgttcttgtgttagtttgctgagaataatggtttccagcttcatccatgtgcctgcaaaggacatgaactgatatctttattctactgaacttccggggcagcatttagcactgtggaccactgtctccttgaatcactcattttatttcacctcaggccacctcattctcttagggtttctctttttcctatctctctgtccatttttgccacttctccttccttttgttctcctaaaccttatgtttacacacggtcctgccctctaccattttctcttctctggaaagcttccctgcccaagggatccgtccactccttcgtctccaaataccgacgggagctgatgactctc

SEQ ID NO: 230527 - DNA, 556 bp, Homo sapiens
tacataggtatacatgtgccatggtggtttgctgcactcatcaacctatcacctacattaggtatttctcctaatgtgctccctcccctattccctcaccctccaacaggccctggtgcgtgatgttcccctccttgtgtccatgtgttctcattgttcaactcccatttayaagtgagaacatgtggtatttggttttctgttcttgtgttagtttgctgagaataatggtttccagcttcatccatgtgcctgcaaaggacatgaactgatatctttattctactgaacttccggggcagcatttagcactgtggaccactgtctccttgaatcactcattttatttcacctcaggccacctcattctcttagggtttctctttttcctatctctctgtccatttttgccacttctccttccttttgttctcctaaaccttatgtttacacacggtcctgccctctaccattttctcttctctggaaagcttccctgcccaagggatccgtccactccttcgtctccaaataccgacgggagctgatgactctc

SEQ ID NO: 230528 - DNA, 563 bp, Homo sapiens
gagaggatcaaatgaataaggataaggaaagcacttagaacagtataaggcacaaagcaactgtgtggtaaagggtggatattattaaagggagacatgtcttcaagtaggagccaagaagtgaatgttcccatcactaataccaacctaaaatagcattagtccaaatgtatcatgcacgtggtcagcatagccaaaggttgcctcactgcaaggttaaagaagaagctaaacaaatttcacttccttacaagggcaacaggactggactccatccttcttgacatgggttgtttcctctttcctatttaagaatgagcacattgggtgcaattctccaaggctccccactggtttattctgccctcctggcctttgcccttagaaaggtttatagccttctccctaataactcagtacataatcattaagaagcatgagtaaaatgggaytttaattactttattaaaggtaataaatatgtctatgcccttgagatcatataaaaatagcttaaaatcattggccatagttatattttccacgagctgagttttaaaata

SEQ ID NO: 230529 - DNA, 450 bp, Homo sapiens
aaaatattaactagattctatagttggcatttcctctttttaaagtcctttcagctactgacatatttcccttcaatgaacaattggctttttccgttacattacaaaattctctttggttagtcaactgtctgggcaactsttagaagctcatattactagtgcatcagaaaaataattatagtttaaagtagaaataagttaaccaaacctaatcagcttgaggtttttatttctccagagaaccagataagggaagaaggagagaagtttgaaaatcatgagcaatttcacttatgtgctctccactatataagacttctatgaatagttgctagtgtcttttatttctatgtagttattgcaatttgaaagcattcatttccactcaaggagcctctaacaaggtagaactacttgtggaggtcattttgatctaaggttggtcct

SEQ ID NO: 230530 - DNA, 647 bp, Homo sapiens
cttgaattcatgatcattatttagtgtacaagaattaaaattcaggtgggaacagaagacaatttgtagagctttttttctccttgagtttatggggtgaaaaaggggacatacattacagccaatgtcttgtaagggcctgaaagaacagttgatataacattttcttcattgtatggtacaagagaaactctagtrtttcatattttgtttctcactttccttacccactttggtaggtgctaaagtggatgtgatttcggggtgggggagtgggcagtattgacattttaattgctttaatttacaagtcttctatataatgaagggtagttaaataaaagacaaaatcaattttatggccttgttgaatgatgacagattagcatgactttctacacagttactgaaggacaacaggaataatatcacactagtagttgtttaacatttgtgaatgtaagtgcggtgtaaaagcctgtaggctttctattgatccttgttgccacatttgtatacattaaactagcaattcagcagcagaatctttgatagcaaatacttgggctgtaactgtagatgagactttaatatacatcttggttttgagataattctgaactttatcaatatgttcatttgccatt

SEQ ID NO: 230531 - DNA, 647 bp, Homo sapiens
cttgaattcatgatcattatttagtgtacaagaattaaaattcaggtgggaacagaagacaatttgtagagctttttttctccttgagtttatggggtgaaaaaggggacatacattacagccaatgtcttgtaagggcctgaaagaacagttgatataacattttcttcattgtatggtacaagagaaactctagtgtttcatattttgtttctcactttccttacccactttggtaggtgctaaagtggatgtgatttcggggtgggggagtgggcagtattgacawtttaattgctttaatttacaagtcttctatataatgaagggtagttaaataaaagacaaaatcaattttatggccttgttgaatgatgacagattagcatgactttctacacagttactgaaggacaacaggaataatatcacactagtagttgtttaacatttgtgaatgtaagtgcggtgtaaaagcctgtaggctttctattgatccttgttgccacatttgtatacattaaactagcaattcagcagcagaatctttgatagcaaatacttgggctgtaactgtagatgagactttaatatacatcttggttttgagataattctgaactttatcaatatgttcatttgccatt

SEQ ID NO: 230532 - DNA, 577 bp, Homo sapiens
gtgaatatttgcttcaggcatcaacttggcatttaaaaaaaaatttaaaaccacatggatgtttcactttgccagaatatctacttctcatattacgcttaaaaataccaaactttgacaaaaatacctaatatttttcccattctacaagtcagaaatcacttcttgtttggtgagctcatcttttctttttttcatttctagggtagaacatagttgtcactcactttggattgattggttcatcaatttggtaattaagattactgcccagaaagtatattctaaactccaacaacagtttcctcttaggatttgagcttaagggtttcactctgggaatctaaagagtacatctggaaggaaaaagaacgagagagtaagatgggtacaaataaaggtgttcaactggaaggtcacagagttaataaaatttaaaatattggtagtagtgttttgttcagatatsatggatacatagtttgtattggaaatattctttattttagcctttcatatgtttttggtattagtagctatctttgtgtataatattcatgattaatgtttgcttaac

SEQ ID NO: 230533 - DNA, 549 bp, Homo sapiens
agaattaactgacaggttcttcccacactctttgaagaatttaagtatcacagaagctagagacctggaaattgttgttctaaagttgagttcaaaatgacagctggttcaggcgtacaagagcaaagctcttcaaggtccatcatcatcagccttggtaaaagcagtcattttgtttgtttcttctacttcagaaccacgtaactgaacccttgtggcagarcaaggcatgcttgaaaccatagtcatgtataaaaatattccatctataaaattacatatttcataactcctggttaaatcactgatagtagtgaattttgggaaacagagagcagcaaggacactatgccctaccttctattactgagggaaaattataagttttgtataaattcagagaggctaggaaatacactgttaaagcaggagcaaaatactgccagggaaaatatttcaatcactgaagcaatggaaagtcaggaccattttccaactgactgaaaaagagatgatttgaatggaaagttcttataaaatattagaatt

SEQ ID NO: 230534 - DNA, 549 bp, Homo sapiens
agaattaactgacaggttcttcccacactctttgaagaatttaagtatcacagaagctagagacctggaaattgttgttctaaagttgagttcaaaatgacagctggttcaggcgtacaagagcaaagctcttcaaggtccatcatcatcagccttggtaaaagcagtcattttgtttgtttcttctacttcagaaccacgtaactgaacccttgtggcagagcaaggcatgcttgaaaccatagtcatgtataaaaatattccatctataaaattacatatttcataactcctggttaaatcactgatagtagtgaattttgggaaacagagagcagcaaggacactatgccctaccttctattactgagggaaaattataagttttgtataaattcagagaggctaggaaatacactgttaaagcaggagcaaaatactgccarggaaaatatttcaatcactgaagcaatggaaagtcaggaccattttccaactgactgaaaaagagatgatttgaatggaaagttcttataaaatattagaatt

SEQ ID NO: 230535 - DNA, 606 bp, Homo sapiens
cccaagttccctacctcatcagctgatgtaactaagtggtgatatttccaatttctaccacttagcgagatgagggctttgctttgcagaaatgaaaatctagaggccatggtcaggagagaaatattatcttatcagagttatttctaaggattttgaatgacttagtgatgatatacaaaatcacctatttttaatgaggacctcataggtgatggagaggaacgaaatataataaatgagaataaattcatcaggacactgagaatatattgggctgtaaaattttatttcaccttgattcactgttctgatttttagwtggaaaaagattccaacattaattttgcaatagttgttattatccttacctatcaaaatattaataaagtgagaaattagttaatttatttaaggatatccataaatctgacagagaaaagtggccaaggccttgtctgggtgcccattgtgcccagaatattctagtgatcatttctaagaacacaaaagaaatctaaatcattgcctctgccttctaggagctaataattctggagggagataagatacgtaagagaaccctaaagtaacaagaggaggcag

SEQ ID NO: 230536 - DNA, 582 bp, Homo sapiens
agaatcttaaggaaagtgaagaactaggtttgggaaaggattagaatccatctctgtaggtcccttccatcaggctaaatcaggagatttatccagcttgatgttgaaattccaggaagagagccttgctggtttagcttggtcacctgcctgatccttggccatgtgtgggtgggacaacttggttgacagttctgtcaagattggatcaaatgggggaagactaatttccccctttaaaatcagtgtgctgttattaaaagaaggcasaatgaataatgagaaggcaaacacgatagacatcctattcagtcatcatgcaacccacattcattgagcactaattatatgtcatgcattgggatacacaggggaggtggcaggataaggacagtcatgtaagcaattttgtataataggaaagacaaatgtcccagagatttatacaaaatgctatgggaacacagaaaaatgtgtgactgcttccgtctgcagaaggagaaggaagcaggtagaagtttttagaggacatggacatgttttttgaatgaggatattaacaatctcaaccttcagccttct

SEQ ID NO: 230537 - DNA, 394 bp, Homo sapiens
aatgcttatctattcattcgcatattgaaggatatgttgattgcttccagtttttggtgagtataaataaagctgtgataaacatctctgggcatgcttttgctttgaatttagcttggtaaatacctagaacttcaactgctagattatatgatatggttatgtttaggtttgtaagactcaaactttcctctagagtggctgtatcattttgcatttccacagcaatacataagagttcctattgttctacatcctcgcaagaacttaatattgtcagtattttgaattctagccattctaataggtgtgtggtggtatctcatttgtcgtttaatgttttattccctagtggcatataatgttgarcatttttgtgtgtgcttatttgcta

SEQ ID NO: 230538 - DNA, 538 bp, Homo sapiens
aatatttatgtaattaaaataagatataaaaattaatattgatttatcaagtcatcagataatcacattaagaggattgagaaatagagtttatatggatggtggtataaattagttaaattatactcttgcaaagtaaaaggtttatataagtcatagagtatatagtatagttatataatataaacttcataaatcaataactaacagcatagctataytatttattagatggaaatacatgtcagaaaaaatagcctaaatgtttgtaggtagctgcatgtgaggtggaagaattgaggtttgagaagggtggacaggagtctgctgatttttactacaaattttgagatattatttgaatttttaacctatgtacttgtattgcttttataaaaataaagcctaattatttacaaccctaagaagtttgtagttcattatgcaattttttttgacaaacattattgaaattaaaatgtgtattgcctaaaggaagaaaacattcagaaaagagccatgttgaataattcaaagc

SEQ ID NO: 230539 - DNA, 538 bp, Homo sapiens
aatatttatgtaattaaaataagatataaaaattaatattgatttatcaagtcatcagataatcacattaagaggattgagaaatagagtttatatggatggtggtataaattagttaaattatactcttgcaaagtaaaaggtttatataagtcatagagtatatagtatagttatataatataaacttcataaatcaataactaacagcatagctatattatttattagatggaaatacatgtcagaaaaaatagcctaaatgtttgtaggtagctgcatgtgaggtggaagaattgaggtttgagaagggtggacaggagtctgctgatttttactacaaattttgagatattatttgaatttttaacctatgtacttgtattgcttttayaaaaataaagcctaattatttacaaccctaagaagtttgtagttcattatgcaattttttttgacaaacattattgaaattaaaatgtgtattgcctaaaggaagaaaacattcagaaaagagccatgttgaataattcaaagc

SEQ ID NO: 230540 - DNA, 605 bp, Homo sapiens
gcagagaccacattccctcagaaaccacttcaaagccccaactgagctcccagccaacagagcgtatcaactgccagccaggtgagtgagccaccttaaacatctagcccaactgaactgtcagatgtttgcagttgcaatcaacaccagagagcgacagtatgggagctcctaaattataactgtccagctaagcccaggtaaccaaacaaccctgttttaaaacataaaatttggggtagtttgttaaacaacagtaattaaaacaactggcatattcttccttattcaagacaaaagaccataagatataattccatttatatgaaatgtctagagtagacaaatctacaaagacaaaaattagattagtagctatctaggttagaagatagtggtgggaagtgatagataatgggcatgggcatttttatgaggtgataaaaatgtgctaaaattgattgtcacaatacytgcagagaattgtgaatatactaaaaatcattcaattgtacactacaaatatgtaaattttgacatgtgaatgttaattatatttcaggacagccattacttaaaaaaaattagactgaaaaaaattagga

SEQ ID NO: 230541 - DNA, 444 bp, Homo sapiens
ggaaagttacagcccaggaactaaagcccagtaaaaactgacataattataagattatggaatgttttcctctccaagatcatcacatcagcagggcttcagtataaggatggtagattaaaatcaagagaccttaaagacataggctctatttaaaaattcttaggaacacaaagaaagcagggaatgaaagaaataagaaactgatggagcctaaatcctctattacattcatctatagcaacatgaaaaacaggcaagctyctggatagattaatataaagcttcacactaaatgcctagttacctcagttgctattatctgatccataatgtccagcttccaacaaaaaatgacaaggcatgtgaaaaggcaagaaaaactcagtctgaagagacaatgcaagcatcaaaaccagactcagatataacacagattgtgta

SEQ ID NO: 230542 - DNA, 444 bp, Homo sapiens
ggaaagttacagcccaggaactaaagcccagtaaaaactgacataattataagattatggaatgttttcctctccaagatcatcacatcagcagggcttcagtataaggatggtagattaaaatcaagagaccttaaagacataggctctatttaaaaattcttaggaacacaaagaaagcagggaatgaaagaaataagaaactgatggagcctaaatcctctattacattcatctatagcaacatgaaaaacaggcaagctcctggatagattaayataaagcttcacactaaatgcctagttacctcagttgctattatctgatccataatgtccagcttccaacaaaaaatgacaaggcatgtgaaaaggcaagaaaaactcagtctgaagagacaatgcaagcatcaaaaccagactcagatataacacagattgtgta

SEQ ID NO: 230543 - DNA, 444 bp, Homo sapiens
ggaaagttacagcccaggaactaaagcccagtaaaaactgacataattataagattatggaatgttttcctctccaagatcatcacatcagcagggcttcagtataaggatggtagattaaaatcaagagaccttaaagacataggctctatttaaaaattcttaggaacacaaagaaagcagggaatgaaagaaataagaaactgatggagcctaaatcctctattacattcatctatagcaacatgaaaaacaggcaagctcctggatagattaatataamgcttcacactaaatgcctagttacctcagttgctattatctgatccataatgtccagcttccaacaaaaaatgacaaggcatgtgaaaaggcaagaaaaactcagtctgaagagacaatgcaagcatcaaaaccagactcagatataacacagattgtgta

SEQ ID NO: 230544 - DNA, 444 bp, Homo sapiens
ggaaagttacagcccaggaactaaagcccagtaaaaactgacataattataagattatggaatgttttcctctccaagatcatcacatcagcagggcttcagtataaggatggtagattaaaatcaagagaccttaaagacataggctctatttaaaaattcttaggaacacaaagaaagcagggaatgaaagaaataagaaactgatggagcctaaatcctctattacattcatctatagcaacatgaaaaacaggcaagctcctggatagattaatataaagcttcacactaaakgcctagttacctcagttgctattatctgatccataatgtccagcttccaacaaaaaatgacaaggcatgtgaaaaggcaagaaaaactcagtctgaagagacaatgcaagcatcaaaaccagactcagatataacacagattgtgta

SEQ ID NO: 230545 - DNA, 402 bp, Homo sapiens
gagagtctgtcctgatcatctcacgtaaaagtgaaaagtgccacagcccaccatcatscctgattgcccttatcctgatctaataattcttctttctgttttccataggacttttccataccatataaattacttaatgacttatatgtttattgtctatttcccccaggagaatgcaagctcctgggagaggacagatatttttatctgttttgtttactcttcacagttcccaaatggctagacactgcctggtacctagaaggtgttccattaaaatttgttgacgttcatttgaatgttgaataaataaaataaacagctacagtatgcatttttctctcatagatacgtgttttccaagtgcccaggtaaagtcgtttttctcttctaagaagtgaa

SEQ ID NO: 230546 - DNA, 498 bp, Homo sapiens
tacgtgttttccaagtgcccaggtaaagtcgtttttctcttctaagaagtgaacattatgcctgaacactttaaaaccttgagtgagatctacagagaagtaaagcatattgtcctcaggacacaagtctttctacgcccaaacttacattgaggagataatatctggcacattgtaaatgtgaataagtaactgtatttcagctcttaaaatagattgggagaatagatagccaacggtggacctggaaatatgtatgaaggaaagtgttgaaattaactaataaaaagtagcctttgagataacaaaatggctgtttcctaaatagagcgatttcttatgttcatattaagtgattaatgggacaggcatgcagaaayatttataagtagctgtgtttttactgtgctttaacttgaatatgggatgaaaaatgtggacatctacagaaagcactatgaaggaattatcagaaatattgagatcaatgaagcctaa

SEQ ID NO: 230547 - DNA, 571 bp, Homo sapiens
cattttgaataacctttaccaagtattatcagaatttgaataaataacctcttgaatatgatagamttttcttcttgtaaaacctaaaatatgaccagctagaaaaaaacaaaaatgggaatttttttaacttcaaaaataataccactgtgacatccagtaacattaatgaccctggacagacatataaaacaagaataaaagaaaaaagtaccctcagtatgaggaaaaaatatcataaagctcatgaacttttttttccataaaagaattatcatcaagcaatatagttcttaaaagtaaggcagtagattaaaaacagatggtaatacacaaaaaaagaacaaaaaatgagagagaaaattaacatccacaataaatctttacccaaatgtaggaaaatactttatccattcaaaagcctctgaaagcatcaatgcccatatgtggctgacactatttgttgactgttattataggcattaccagcccctattgcatttgttaccttctaccataaaggctagaaaaacccattactcattttcccagcattcctggcagtaagaag

SEQ ID NO: 230548 - DNA, 571 bp, Homo sapiens
cattttgaataacctttaccaagtattatcagaatttgaataaataacctcttgaatatgatagaattttcttcttgtaaaacctaaaatatgaccagctagaaaaaaayaaaaatgggaatttttttaacttcaaaaataataccactgtgacatccagtaacattaatgaccctggacagacatataaaacaagaataaaagaaaaaagtaccctcagtatgaggaaaaaatatcataaagctcatgaacttttttttccataaaagaattatcatcaagcaatatagttcttaaaagtaaggcagtagattaaaaacagatggtaatacacaaaaaaagaacaaaaaatgagagagaaaattaacatccacaataaatctttacccaaatgtaggaaaatactttatccattcaaaagcctctgaaagcatcaatgcccatatgtggctgacactatttgttgactgttattataggcattaccagcccctattgcatttgttaccttctaccataaaggctagaaaaacccattactcattttcccagcattcctggcagtaagaag

SEQ ID NO: 230549 - DNA, 609 bp, Homo sapiens
tttgtttgtctgataaattaattctttttcacttctgcaggtaagttcagtgattatagaattttagsttggtggttcttttttttttttctttcaacattttaaatatttcaccttgcttttttcttgcttgcatggcttcagaagggaagtctgtaattcttattctgtagttttgatttttttaaagaattctctagcttcttcaatttttttcttttcttttttttattttttgagacagggtatcactctgtcacccaggctggagtgcagtggcacaattatgccttgacttctggggctcaaccattcctcccacctcagtctccctagtagctgggactacagacatgcaccatcatgcctggctattttttatttatttatttattttgagatggagtctctctgtcacccaggctggagtgcagtggtgcaatctcagctcactgcaacctttgcctcctgggttcaagcgattctccttcctcagcctccccagtagctgggattatagttgcacaccaccatgcccagctaatttttgtattttggggtttcaccatgctggccaggctggtctcaaactcctgacctcatgatcct

SEQ ID NO: 230550 - DNA, 609 bp, Homo sapiens
tttgtttgtctgataaattaattctttttcacttctgcaggtaagttcagtgattatagaattttagcttggtggttcttttttttttttctttcaacattttaaatatttcaccttgcttttttcttgcttgcatggcttcagaagggaagtctgtaattcttattctgtagttttratttttttaaagaattctctagcttcttcaatttttttcttttcttttttttattttttgagacagggtatcactctgtcacccaggctggagtgcagtggcacaattatgccttgacttctggggctcaaccattcctcccacctcagtctccctagtagctgggactacagacatgcaccatcatgcctggctattttttatttatttatttattttgagatggagtctctctgtcacccaggctggagtgcagtggtgcaatctcagctcactgcaacctttgcctcctgggttcaagcgattctccttcctcagcctccccagtagctgggattatagttgcacaccaccatgcccagctaatttttgtattttggggtttcaccatgctggccaggctggtctcaaactcctgacctcatgatcct

SEQ ID NO: 230551 - DNA, 609 bp, Homo sapiens
tttgtttgtctgataaattaattctttttcacttctgcaggtaagttcagtgattatagaattttagcttggtggttcttttttttttttctttcaacattttaaatatttcaccttgcttttttcttgcttgcatggcttcagaagggaagtctgtaattcttattctgtagttttgatttttttaaagaattctctagcttcttcaatttttttcttttcttttttttattttttgagacagggtatcactctgtcacccaggctggagtgcagtggcacaattatgccttgacttctggggctcaaccattcctccyacctcagtctccctagtagctgggactacagacatgcaccatcatgcctggctattttttatttatttatttattttgagatggagtctctctgtcacccaggctggagtgcagtggtgcaatctcagctcactgcaacctttgcctcctgggttcaagcgattctccttcctcagcctccccagtagctgggattatagttgcacaccaccatgcccagctaatttttgtattttggggtttcaccatgctggccaggctggtctcaaactcctgacctcatgatcct

SEQ ID NO: 230552 - DNA, 609 bp, Homo sapiens
tttgtttgtctgataaattaattctttttcacttctgcaggtaagttcagtgattatagaattttagcttggtggttcttttttttttttctttcaacattttaaatatttcaccttgcttttttcttgcttgcatggcttcagaagggaagtctgtaattcttattctgtagttttgatttttttaaagaattctctagcttcttcaatttttttcttttcttttttttattttttgagacagggtatcactctgtcacccaggctggagtgcagtggcacaattatgccttgacttctggggctcaaccattcctcccacctcagtctccctagtagctgggactacagacatgcaccaycatgcctggctattttttatttatttatttattttgagatggagtctctctgtcacccaggctggagtgcagtggtgcaatctcagctcactgcaacctttgcctcctgggttcaagcgattctccttcctcagcctccccagtagctgggattatagttgcacaccaccatgcccagctaatttttgtattttggggtttcaccatgctggccaggctggtctcaaactcctgacctcatgatcct

SEQ ID NO: 230553 - DNA, 572 bp, Homo sapiens
acataagctgtgtggaaatcctatggattccagcctgttgacttgtaaattagtargtgctgagattatatccaagtctgagaagttactggaaggcatgaaatgcagttcgtagttcaaaccaagcatagcttggtgttggtgactttcttgtcttgaatgtcatggcatgacttttaataatattcaagattaatcaaaaattttctgtaaatctgtgtagagattatcaaacaggttgttttattgaattgcttgaatgactcagtccaaacactcagtttgaatgttttgtgttgatacaatcccatttgaagatatatgaagatttcatataaaggctgcaccattttatttcttttctatatatatatatatattttattatactttaagttctagggtacatgtgcacaacgtgcaggtttgttacatatgtatacatgtgccatgttggtgtgctgcacccattaactcaccatttacattaggtatatctcctaatgctatccctccctccttcccctgacccacaacaggccccggtgtgtgatgttccccttcctgtgtcc

SEQ ID NO: 230554 - DNA, 572 bp, Homo sapiens
acataagctgtgtggaaatcctatggattccagcctgttgacttgtaaattagtaagtgctgagattatatccaagtctgagaagttactggaaggcatgaaatgcagttcgtagttcaaaccaagcatagcttggtgttggtgactttcttgtcttgaatgtcatggcatgacttttaataatattcaagattaatcaaaaattttctgtaaatctgtgtagagattatcaaacaggttgttttattgaattgcttgaatgactcagtccaaacactcagtttgaatgttttgtgttgatacaatcccatttgaagatatatgaagatttcatataaaggctgcaccattttatttcttttctatatatatatatatattttattatactttaagttctagggtacatgtgcacaacgtgcaggtttgttacatatgtatacatgtgccatgttggtgtgctgcacccattaactcaccatttacattaggtatatctcctaatgctatccctccctccttcccctgacccacaacaggcccsggtgtgtgatgttccccttcctgtgtcc

SEQ ID NO: 230555 - DNA, 396 bp, Homo sapiens
tggtcatccaccctccagacctgtgaggaagtaaatttttgttgtataagccacctagtctatggtattttgttagggcagttcaaactgactataatacagatgattatagtcaaccgctataattatagcagttttttacataatagccccaacctggaaataaccaggatgtctttcaataggtgaatggttaaataaactgcggtgcatctataccataaaaaatttctgagcattaaaaaaaaaccccaaagtattratacaaggaacaacttcactgaatcctcagagatccatcctggagtgatggagaatgtgctgtgttttcaacgtatcgatgtcaatatcctactgtgatattgtgctataatttctcaagatgttaccattagg

SEQ ID NO: 230556 - DNA, 396 bp, Homo sapiens
tggtcatccaccctccagacctgtgaggaagtaaatttttgttgtataagccacctagtctatggtattttgttagggcagttcaaactgactataatacagatgattatagtcaaccgctataattatagcagttttttacataatagccccaacctggaaataaccaggatgtctttcaataggtgaatggttaaataaactgcggtgcatctataccataaaaaatttctgagcattaaaaaaaaaccccaaagtattgatacaaggaacaacttcactgaatcctcagagatccatcctggagtgatggagaatgtgctgtgttttcaacgtatcgatgtcaatatyctactgtgatattgtgctataatttctcaagatgttaccattagg

SEQ ID NO: 230557 - DNA, 478 bp, Homo sapiens
gtgagtgagaccactgctaaaacactccccaaattcatggacagggtgcatttgtactcttaccgatcaaattcaggaagtaaaatgacatttttctgcaaaatatgtcttactctttattgtgattctaaatkacaggagcagcagccacactccagagaattccagtgaattgcactatttgtgcacaaaaagctgcttagaatgaagggttagtcttttccatcataaaaacattttatgtgattggcaaatcagaaagtggtcaatcagcagacggttatagagatgtttttcatctctagtaacagcaggatgctaacgggagagttaagacgaaaaggaaaaaaaaatacattgatttgttgacagaggcctagcagctgtcacagtaaaacatggttctcttgcacttaatcaatgtcagtctctaacccagtcattttgtagcccagatgagaagcaatcaagaggaaca

SEQ ID NO: 230558 - DNA, 579 bp, Homo sapiens
ctaatttggaacctatctggcttaacattgcattgattacattgaacccacttacatgaactcttcaatccaaagaatttgcatgtgcttcaggagaaccctgtgatgagggtactaggagcctacctgtgagtaaaaaccagatccatttttgctttcccaggaacstcaaaattccacaaaaccacatcatttcctctagttgtatcttaggagccttgaggtaggtagttgtgtcaaggcatactttatttcctgctgtcccacctgctcactccatctagttagacatctcgacttctttactgttccttcaacatacccagcacaatccagtctcagagcctttgcattagctgatttatatgaccagacctctcccctctcccctatatccactttggtcatttcttagtctgtttaggctggtataacaaaataccatggatagggtgtcttaaaaacaacagaaatctctcacagttttggaggctgaaaagtccaagatgaaggctctggctgatttggtgtctagtgaggacctgcttcctcatagatggccatcttttcacggcaacc

SEQ ID NO: 230559 - DNA, 521 bp, Homo sapiens
tgttttttttttagaactaatccaatgtcagcttgatcttgtgtgtatatcatagtaagtcttgaaaaatttgtgtgtcctctgttctgtgtcttagaggttcttgacctagactatttggtagtcctgtaaatttttagtaatgtttrtttcaatgtaagagattatatcatacccaaagattgaaattataagcccacttaacatcccatttagtagaaaggaagaaatgtcaaaagtgataaaatatgtcagtatctagaaaataataaaaattttacatttatatggtgacttggagtgttcccaagatgctttaacatgtattgtcttatctgctatagacctataaaccaggcagcaggagtcatggtctcacctttcataggaggacttaaaattacaatgatgttaagtgatgtatctatggccacatgcctagaaacaacacaaaagtgtacttcatctgactcctaaactagaaggccttcctataaagtatatatcaaatgctaaagggt

SEQ ID NO: 230560 - DNA, 302 bp, Homo sapiens
gggaacaaattaattgatgccacagtcactagatagaatattatgcagcctttattaagaaggctatgtgagaatctgaaaacatagttataatttggtaktaaattgaatggcaaattaaacattgtgtgcctattattaattcattttatttatatatatatcaataatatatccctatatatcaataatatatcattatatatatcacaatggaaaattatttgaaagggttatatcaaatttactaagctctttagtttcaagagtgacattatagataatttatctctatatttcaa

SEQ ID NO: 230561 - DNA, 584 bp, Homo sapiens
ggtttaatgagtcgggcttgcgtcccccctgctgctctgtgcaacctcaggacttggtgtgctrcatcccagtcatgctataaggggacaacatacagctcaggctgttgcttcagaggctgcaagccccaagccttggcagcttccatgtggtgttggtcctgtgggtgcacagaagacaagcaatgagttttgtgaacctccacctagattttcagaggatgtatgaaaatgcctagatgtcaaggcagaaatctgctgcagggtaggagaacctctgttatggcagtgcagagggaaatgtggggttggaacccccacacatagtccccactggggcactgcctaggagagctgtgagaagagagccaccatcctccctaccccagaatgatagatccactgacagatagcagtatgtgctgggaaaggggctgtaccctgcaaagccacaggggcaaagccgcctgaggccatgggagctcacctcttgcttcagtgtgccctggatgtgagacatggagtccatgggagacatgggatcattttggaactttaaagtttaatgacttccctattggatt

SEQ ID NO: 230562 - DNA, 584 bp, Homo sapiens
ggtttaatgagtcgggcttgcgtcccccctgctgctctgtgcaacctcaggacttggtgtgctgcatcccagtcatgctataaggggacaacatacagctcaggctgttgcttcagaggctgcaagccccaagccttggcagcttccatgtggtgttggtcctgtgggtgcacagaagacaagcaatgagttttgtgaacctccacctagattttcagaggatgtatgaaaatgcctagatgtcaaggcagaaatctgctgcagggtaggagaacctctgttatggcagtgcagagggaaatgtggggttggaacccccacacatagtccccactggggcactgcctaggagagctgtgagaagagagccaccatcctccctaccccagaatgatagatccactgacagatagcagtatgtgctgggaaaggggytgtaccctgcaaagccacaggggcaaagccgcctgaggccatgggagctcacctcttgcttcagtgtgccctggatgtgagacatggagtccatgggagacatgggatcattttggaactttaaagtttaatgacttccctattggatt

SEQ ID NO: 230563 - DNA, 569 bp, Homo sapiens
taaatctcttttctttataaattacccagtctcaggtatttctttagcacaatgcaagaacagcctaatacaggcctcaagggaaggtaaatcatgagaaagtgactacaaaacaaatgggagaggttccaagatggccaaataggaacagctccagtctacagctcccagcatgagcaacacagaagacaggtgatttctgcatttccaactgaggtaccaggttcacctcactggggcttgtcagacagtgggtgcagcccatggagcagggtggggcatcacctcacccaggaagacaaggggtgggggaattccctttcctagccaagggaaaccatgacagacggtacctggaaaatcgggacactcccaccctaatactgcrcttttccaatggtcttagcaaaccacacaccagtggattatatcctgtgcctggctccgagggtcccacacccacggagcctcactcactgctagcacagcagtctgagatcaaactgcaaggcggcagtgaggctgggggaggggcatgcaccatttgctgaggcttgagtaggtaaaca

SEQ ID NO: 230564 - DNA, 634 bp, Homo sapiens
aatgaagtaattggtaacttgtatttatctattttttttaacttatattgttttctattttcagttcctccaacattttattttccatctagggaaatattctcagactgagatgataatctcataaatctcttttatcaaacttcataggagaattattctttgtttctctggtatcattttttctgctttaatcttcaaatatggaaagaacttttcagtgaaacaattttgaaaagagctacttttggaatacaatatgacaactatgttttctatgtttaccaaaatttcaaataaacagccccctctttcaccagaatcctcaaattacataaacattaaaacaggctttttttggaatctaactttttagataaaaggggcaagttgtaaactaaactacatattagataattacaaatccaacttccaggttatatcctgagtgaacacggactaaagacttcctccaatgtcctctataggaatcactgatgtgcagtatgaacagtctgaggccctgaaagatcattagtcttcaaatgaagattcaattatgttgagaatataaggcagagaaatgggctcatatrttttaaaaatattgtccagtaagtgtgttgaaactgaa

SEQ ID NO: 230565 - DNA, 414 bp, Homo sapiens
acttggcaggctgaggctagaggatcaattgctgaagtttgacactgcagtgagcctatctcttaaaaacacaattagtccttctcttcccccttactgtgatttcataggagatggtcataccctagctgcagggtgggcatggggccgyggcctgaggtaagctaaacaatacaaatcaggctcagaacttctgtgcaattttgctgaagaagagatattttctttccataaagatactaaaaacttaaaagccattgttggagctgctggctgccattttgtcaccataaggagaaagtatgcctgagtatggaaccattacagaagaaagagaaaaacaataagatgaatcagaagagttcctgtgaacctgtttatagtcatgacgagtgcattggaccattttgaact

SEQ ID NO: 230566 - DNA, 536 bp, Homo sapiens
cccctaacctttggcaaccaccatcctgatcaatcagcagccatcaacattaaggtaagacactccaccagcgaaaagattatgacatggtaaaggctcagatgattgttagtactttttagcaaaaaagtatttttaaattatgtacatagatttttttagrcataatgctattgcacacttaatagactgtagtggaaacataacttttatatgcattgggaaaccagaaaatttgtatgacttgctttattgtgatatttgctttatcgcagtagtctggaacagaacctacaatatctgcatggtatgcctgtaattaattcctctcttttccatttgtgactactttgtaacctctttctagcatgcacaatccttattaaatttaaaaagtcttaaattttctagttgttaatgctttcaaatataatttctatcataaagtagattcaaaaaatatggaatatgctccctctcccttcttttttagactgccacctttctattttccttaggttagaatctggtattct

SEQ ID NO: 230567 - DNA, 536 bp, Homo sapiens
cccctaacctttggcaaccaccatcctgatcaatcagcagccatcaacattaaggtaagacactccaccagcgaaaagattatgacatggtaaaggctcagatgattgttagtactttttagcaaaaaagtatttttaaattatgtacatagatttttttagacataatgctattgcacacttaatagactgtagtggaaacataacttttatatgcattgggaaaccagaaaatttgtatgacttgctttattgtgatatttgctttatcgcagtagtctggaacagaacctacaatatctgcatggtatgcctgtaattaattcctctcttttccatttgtgactactttgtaacctctttctagcatgcacaatccttattaaatttaaaaagtcttaaattttctagttgttaatgctttcaaatataatttctatcataaagtagaytcaaaaaatatggaatatgctccctctcccttcttttttagactgccacctttctattttccttaggttagaatctggtattct

SEQ ID NO: 230568 - DNA, 583 bp, Homo sapiens
gaccctgaaaatattgatgctttagtgctaaatttttgtttgtaaatgagtttaaacttttgtttgttgctcagtcgatgtcactgggatttatttggctgccagctttgagttgctatttgaaacgagcagcaccatatgtgcacatgcatattcagtggtgcagttctttttctaaagggaggggggaatgccaggactcatggttcacaatatgaatttgcatcccactttgcataaatttgcatgtagacttcataagcctctaatttcaagtatgtaaaatgaaatgaatcaatgcaatctactgcaattgttttccaaggcattaatcacatgaaatacatcccagctttccttaaccaattaatttaatcacactcaaggttaggagagacaggaaagtagtgaataatggctgctatgcccctggcctcaggttaggaggctatatacagccttagtacttgcccagtacatctcccttccaattctwtgtctcttgtgaaagattatattagagtttacttagtattttcttttatttcagtgcccctctctgcaggaggattatacaacccta

SEQ ID NO: 230569 - DNA, 454 bp, Homo sapiens
cttggactactttcgcattctctggatttttttttttttttttttttttttggaactggttgtaactttttttgtggttccctctttaattaatgaattaaacaaaatcttttatacatattcattttatatctgcataacagtcatgattaaacctttaaaaaataattagcctgtaacaatgtattctgcaacagtatacccaggaaatataggcamcttcctaattctaggacataaatcatgaaaaatctgctacaactatgataaaggtaatattattctcttttgcctctgattggtttggaggttatcatgtgactacattctggtcaatgagaaatatatcaggaggttctgagagaagtgtacttccctgataaataaagtgaatgagagctagcagaggaaagtaggaaatgcattttctctcttgcccttagatgttgtcttg

SEQ ID NO: 230570 - DNA, 454 bp, Homo sapiens
cttggactactttcgcattctctggatttttttttttttttttttttttttggaactggttgtaactttttttgtggttccctctttaattaatgaattaaacaaaatcttttatacatattcattttatatctgcataacagtcatgattaaacctttaaaaaataattagcctgtaacaatgtattctgcaacagtatacccaggaaatataggcaccttcctaattctaggacataaatcatgawaaatctgctacaactatgataaaggtaatattattctcttttgcctctgattggtttggaggttatcatgtgactacattctggtcaatgagaaatatatcaggaggttctgagagaagtgtacttccctgataaataaagtgaatgagagctagcagaggaaagtaggaaatgcattttctctcttgcccttagatgttgtcttg

SEQ ID NO: 230571 - DNA, 300 bp, Homo sapiens
tggttatttaattacatgcatctataagcattttaacaaatctagttacagattccgaaagaaaaagtacctaggcaatctgacatggtctaaacagtcctatggtaagtcatgtgtgcagtgaytgtaacggtaggtagaaaaaggtggctgtggtgggttggacaagggaaggacattgatcaacaggatagaagggtgggatgtgataggaagacagaagcagtggttagaagagttttagtggagcagcagtgctatggtctgaatgtttgtgtttccccaaaatttataggttga

SEQ ID NO: 230572 - DNA, 450 bp, Homo sapiens
tccagtttcattctcctacatatagctagtcagttatcccagcaccatctattaaataaggagtctttccccattgcttactattgttgattttgtcaaagatcagatgattgtaggtgtgtggcttcggattttctagtctgttccattggtgtatgtgtagcagtaccatgctgttttggctactgttgccttatagtacagttagaagttaggtaatgtgatgcctctggctttgttcttttaacttagcattgttatggctattcaggttcttttttggytccatatgaattttagagtagttttttaaaattctgtgggaaaaaatgatgttggtagtttggtaggaatagcattgaatccgtagattgctttgggaagtatgaacattttaatattgattctttcaatccttaagtatggtatgcttttcaatttgtttgtctc

SEQ ID NO: 230573 - DNA, 594 bp, Homo sapiens
tgaatttgtagaaaaacatcagagttacagatctcgtcaccacatttagaaacttcaacaacctcattaacagcagaggtttgcaacaactataggcaaagccaaggaactctaatacccagttttctctttaattttccatctcaaaacttccctgcttagagaaattcttaaaggaatattcttcttgagcatatttggaaaggacctctaattaagtaaaatggaagggcatacaagaggaagggaggagagataatatagttcatacacaacaacagcacatggaaaactaccatgacaggaatactccaagaagtgcatcatctgtcagtatttcaggagaaatggcagattcatgactttaggaaacagtcacygtgaaatatgaggcataaccaattcattgactcaagctaaggtgttcagatttgctagacattaaactcagaaattcagcttatcctattataaaacaaatgactacggaaataccttttcaagaagcaattatttttctttactcagggttataaatttataaaatatgttttatgtaataattaatctataatgtcataaaagatagctcaa

SEQ ID NO: 230574 - DNA, 613 bp, Homo sapiens
taagcaaaactggttcaggccctaagtaagcaagtgtgaaattgagttaaggaaaaaaggactttcttaccaccacccatacttagcctaggtctcaaagcagycatgacaccccgaggactcagcaagtcttccagaggagaaggtctgggcccagtgaaacagcaggagtgcatgcagcacacagcactggtagacaggccacaattctcccagatgcccagcaagtagtttggtcaggtctaatgcaagcatgagtgaacttgtccttgcacgtgtgtgagctgcttctttctccttagttctctcagaaataaccagtagagtattctgggtgctgacagccaaggccctgcaatgatcaggtaggagccacaattaatccaaatctgggcatcaacattcatacgtcagcatttatattcagaagataatggagtcaaagatgttccatttatttcagattggcttgcacagagctaagctctgagaggagaagaaatagagcaactaacacatttttggctaacctgctggaaaactttggacaaatcattttgccttgttgggcttcagcattctcaaatattaaatgggataaaaggtggaaaaa

SEQ ID NO: 230575 - DNA, 613 bp, Homo sapiens
taagcaaaactggttcaggccctaagtaagcaagtgtgaaattgagttaaggaaaaaaggactttcttaccaccacccatacttagcctaggtctcaaagcagtcatgacaccccgaggactcagcaagtcttccagaggagaaggtctgggcccagtgaaacagcaggagtgcatgcagcacacagcactggtagacaggccacaattctcccagatgcccagcaagtagtttggtcaggtctaaygcaagcatgagtgaacttgtccttgcacgtgtgtgagctgcttctttctccttagttctctcagaaataaccagtagagtattctgggtgctgacagccaaggccctgcaatgatcaggtaggagccacaattaatccaaatctgggcatcaacattcatacgtcagcatttatattcagaagataatggagtcaaagatgttccatttatttcagattggcttgcacagagctaagctctgagaggagaagaaatagagcaactaacacatttttggctaacctgctggaaaactttggacaaatcattttgccttgttgggcttcagcattctcaaatattaaatgggataaaaggtggaaaaa

SEQ ID NO: 230576 - DNA, 609 bp, Homo sapiens
ggcaacccaccctttcatccttcagtgtcttggtattatccttctgatagtcatcatagtagtctgcctggtacactgtattctctcaagggtcttaaatgcttgtgcgtagccattcactgtgtatcaaatggtctcactttggtttgaacaacaaaaacacaaagagaacaaatcattcagctgactcgatactgtaccttgtgagttccatactgagaccaaatatatccactatgatggtgacaaaccttagcatcaatgcccaaggtttgcatcaayctctcaagattgagaggctgaccagaaaagggaattgtcaaagtaaataaccaagaggccattaccctgaagtcttctttgtactttgagttcctagataaccaactgcaacctaacttagtacagaaataaaccaaaaccaaatttaggagtataaaagacaaatttcagccagtcacaggcagccaactcatcacaccatacccaaatgaggcagatgcctagctatagtcaatcagataatttctctaacttgcttgtttttggctcataaacgcttgttgctcacactgaagggtggagctctctgaaccacttttggttctg

SEQ ID NO: 230577 - DNA, 609 bp, Homo sapiens
ggcaacccaccctttcatccttcagtgtcttggtattatccttctgatagtcatcatagtagtctgcctggtacactgtattctctcaagggtcttaaatgcttgtgcgtagccattcactgtgtatcaaatggtctcactttggtttgaacaacaaaaacacaaagagaacaaatcattcagctgactcgatactgtaccttgtgagttccatactgagaccaaatatatccactatgatggtgacaaaccttagcatcaatgcccaaggtttgcatcaacctctcaagattgagaggctgaccagaaaagggaattgtcaaagtaaataaccaagaggccattaccctgaagtcttctttgtactttgagttcctagataaccaactgcaacctaacttagtacagaaataaaccaaaaccaaatttaggagtataamagacaaatttcagccagtcacaggcagccaactcatcacaccatacccaaatgaggcagatgcctagctatagtcaatcagataatttctctaacttgcttgtttttggctcataaacgcttgttgctcacactgaagggtggagctctctgaaccacttttggttctg

SEQ ID NO: 230578 - DNA, 513 bp, Homo sapiens
aatttacacataatttaaagaataaaagctaaagaggaaaaaaaaggaatgtctgaagaggggctaccaaggagctggacattcataacttcgtgttttcagggaactaatgctaataaatatgtctgatgtcttgttctgctgaggtagatgaagatgtttgatcaagtggttcttcctctccatggttaccgagagcacaactatgcatcagttaatctaaaattaactttgmaaaacaactaacagtttatagatagatcattaacatccttgacaaaacaacaacaaatctgacacccacagattcatgtaacttctgtattgaaaggggtggagaattcacacctaattaatggaatttcgtatctttttgatgactaaagaagataagtccttctcaaggttagtctttgactctcagtgatgtcttagtgatttgaaatcaaagggatggttaattaaattaaaaattaaaggaaaggtggtctatctgactcctagcaatattac

SEQ ID NO: 230579 - DNA, 643 bp, Homo sapiens
atacaactttttcccaaataactagccatttttttaaaccatttaaataatacctctcttttttccaattgacatctttatctatttctagagtttttagtatttaataagggtaaataaatacaagaatgtatttttctgcatttccaactgaggtactgggttcaactcactggggcttgttggacagtgggtgcagcccacagagtgtgagctgaagcagggtggggcatcacctcacacgggaaccacaagcgactggggaattccatttcctagccaagggaagccatgacagacggtacatggaaaatcaggacactcccacgctaatactgcacttttccaatggtcttagcaaatggcacaccaggaaattatatcccacgcctggctcggagrgtcccacgcccacagagcctcactcatggctagcacagcagtctgagattgaactgagaggctgaaggaggggcatccaccaccgctgaggcttgagtaggtaaacaaagcgaccaggaagctcaatctgggtggagcccaccacagctcaaggaggcctacctgcctctgtagactccacctctaggggcagggcatagctgaacaaaaggcagcagaaacttttgcagacttaaacgtc

SEQ ID NO: 230580 - DNA, 538 bp, Homo sapiens
agcttcttctctcttttaactttatttgtacattgccttaatctttcagaacaatgtttaacaatgaacataataatggctrttttatgtaatttttaaattaaattttaattaaaattataatttttaaaaacaattacaaattaaaatgcaacagattggtagttttcaagtataatctgtgagaattttgaggaaattagcatcttgtaaacatatctatgacctcatcatgctcctagttccctgatggagacacatatctatgatagtaaacagccagcggattcaagaaaaagcatcggttgccagtgaatcttggatgaacggtacccatgctacaggcactgagttcagaagagcctgggatagatcctgtggaaaacatttttactgaacattattcacactgcagtctacaaagaaggcttgtctgtctgagctgtggggtctggtgggcacaagaaaaaaagtcactcactactcaagagaacccaatagcttgtatgaacactaaagtaaaccatcaaaatcacac

SEQ ID NO: 230581 - DNA, 538 bp, Homo sapiens
agcttcttctctcttttaactttatttgtacattgccttaatctttcagaacaatgtttaacaatgaacataataatggctgttttatgtaatttttaaattaaattttaattaaaattataatttttaaaaacaattacaaattaaaatgcaacagattggtagttttcaagtataatctgtgagaattttgaggaaattagcatcttgtaaacatatctatgacctcatcatgctcctagttccctgatggagacacatawctatgatagtaaacagccagcggattcaagaaaaagcatcggttgccagtgaatcttggatgaacggtacccatgctacaggcactgagttcagaagagcctgggatagatcctgtggaaaacatttttactgaacattattcacactgcagtctacaaagaaggcttgtctgtctgagctgtggggtctggtgggcacaagaaaaaaagtcactcactactcaagagaacccaatagcttgtatgaacactaaagtaaaccatcaaaatcacac

SEQ ID NO: 230582 - DNA, 538 bp, Homo sapiens
agcttcttctctcttttaactttatttgtacattgccttaatctttcagaacaatgtttaacaatgaacataataatggctgttttatgtaatttttaaattaaattttaattaaaattataatttttaaaaacaattacaaattaaaatgcaacagattggtagttttcaagtataatctgtgagaattttgaggaaattagcatcttgtaaacatatctatgacctcatcatgctcctagttccctgatggagacacatatctatgatagtaaacagccagcggattcaagaaaaagcatcggttgccagtgaatcttggatgaacggtacccatgctacaggcactgagttcagaagagcctgggatagatcctgtggaaaacatttttactgaacattattcacactgcagtctacaaagaaggcttgtctgtctgagctgtggggtctggtgggcacaagaaaaaaagtcactcacyactcaagagaacccaatagcttgtatgaacactaaagtaaaccatcaaaatcacac

SEQ ID NO: 230583 - DNA, 517 bp, Homo sapiens
agtcttccaattacccaagatccctcccatctcaggacatttacaggaaatactctttgtctttccccatttcaacctccttgatttctacacatttcagcggaatcacgtcctcatgggagccttcactgaccccctcaacaaaggcatgcctccctgccatacactctgcgagcaggatatacttctccttcttagcacttactayacttatatacagttttcccctggtatgataacctgataaatatctgtctctttgatgagataaaaataatataatgataggcaaaatctgataaggagtacctaacacagtgccctgcacatagtaagtgttcaataaataactgcaagtggaatagctgtatctatatatacatatatgtgtgcagacgcattacaagtgtattacgtaagagataatgagtgtgcatggaatgtaaagaatgtaattttaaaatgtgtttattataaagcatccaaagttattcagtttcctctttgaaatgttcac

SEQ ID NO: 230584 - DNA, 517 bp, Homo sapiens
agtcttccaattacccaagatccctcccatctcaggacatttacaggaaatactctttgtctttccccatttcaacctccttgatttctacacatttcagcggaatcacgtcctcatgggagccttcactgaccccctcaacaaaggcatgcctccctgccatacactctgcgagcaggatatacttctccttcttagcacttactacacttatatacagttttcccctggtatgataacctgataaatatctgtctctttgatkagataaaaataatataatgataggcaaaatctgataaggagtacctaacacagtgccctgcacatagtaagtgttcaataaataactgcaagtggaatagctgtatctatatatacatatatgtgtgcagacgcattacaagtgtattacgtaagagataatgagtgtgcatggaatgtaaagaatgtaattttaaaatgtgtttattataaagcatccaaagttattcagtttcctctttgaaatgttcac

SEQ ID NO: 230585 - DNA, 583 bp, Homo sapiens
ttcaacactgttagttgagggcgcacatcacaaataagtttctgagaatgcttctgtctagttttcaggggaagatatttcctttttcaccataggcctgaaagcgctccaaatgtccacatccagatactacaaaaagagtgtttcaaacctgctctatgaaagggaatgttcaactctgtgacttgaatgcaaacatcacaaagaagttactgggaatgctgctgtctgctttttatatgtaatcccgtttccaacgaaatcctcaaagctagacaaatatccacttgcagattccacaaaaagagtgtttcaaaactgctctctcaaargaaaggttcaactctgttagctgagtagatacatcatgaaaaagtttctgacattgcttctatctagcttttattggaagatatttcctttttcaccgcagtcctgagagcgttccaaatgtccacttccagatactacaaaaagagtgtttcaaacctgctctatgaaagggactgttcaacactgtgacttcaattgaaacatcccaatgaagcttctgagaatgcttctgtctagagtttatatgaag

SEQ ID NO: 230586 - DNA, 501 bp, Homo sapiens
gctccaaatgtccacatccagatactacaaaaagagtgtttcaaacctgctctaygaaagggaatgttcaactctgtgacttgaatgcaaacatcacaaagaagattctgggaatgctgctgtctgctttttatatgtaatcccgtttccaacgaaatcctcaaagctagacaaatatccacttgcagattccacaaaaagagtgtttcaaaactgctctctcaaaagaaaggttcaactctgttagctgagtagatacatcatgaaaaagtttctgacattgcttctatctagcttttattggaagatatttcctttatcatcgtagtcctgagagcgctccaaatgtccacttccagatactacaaaaagagtgtttcaaacctgttctatgaaaggaactgttcaacactgtgacttcaattgaaacatcccaatgaagcttctgagaatgcttctgtctagagtttatatgaagacaatcccgtttccaacgaaatc

SEQ ID NO: 230587 - DNA, 501 bp, Homo sapiens
gctccaaatgtccacatccagatactacaaaaagagtgtttcaaacctgctctatgaaagggaatgttcaactctgtgacttgaatgcaaacatcacaaagaagwttctgggaatgctgctgtctgctttttatatgtaatcccgtttccaacgaaatcctcaaagctagacaaatatccacttgcagattccacaaaaagagtgtttcaaaactgctctctcaaaagaaaggttcaactctgttagctgagtagatacatcatgaaaaagtttctgacattgcttctatctagcttttattggaagatatttcctttatcatcgtagtcctgagagcgctccaaatgtccacttccagatactacaaaaagagtgtttcaaacctgttctatgaaaggaactgttcaacactgtgacttcaattgaaacatcccaatgaagcttctgagaatgcttctgtctagagtttatatgaagacaatcccgtttccaacgaaatc

SEQ ID NO: 230588 - DNA, 501 bp, Homo sapiens
gctccaaatgtccacatccagatactacaaaaagagtgtttcaaacctgctctatgaaagggaatgttcaactctgtgacttgaatgcaaacatcacaaagaagattctgggaatgctgctgtctgctttttatatgtaatcccgtttccaacgaaatcctcaaagctagacaaatatccacttgcagattccacaaaaagagtgtttcaaaactgctctctcaaaagaaaggttcaactctgttagctgagtagatacatcatgaaaaagtttctgacattgcttctatctagcttttattggaagatatttcctttatcatcgtagtcctgagagcgctccaaatgtccacttccagatactacaaaaagagtgtttcaaacctgytctatgaaaggaactgttcaacactgtgacttcaattgaaacatcccaatgaagcttctgagaatgcttctgtctagagtttatatgaagacaatcccgtttccaacgaaatc

SEQ ID NO: 230589 - DNA, 501 bp, Homo sapiens
gctccaaatgtccacatccagatactacaaaaagagtgtttcaaacctgctctatgaaagggaatgttcaactctgtgacttgaatgcaaacatcacaaagaagattctgggaatgctgctgtctgctttttatatgtaatcccgtttccaacgaaatcctcaaagctagacaaatatccacttgcagattccacaaaaagagtgtttcaaaactgctctctcaaaagaaaggttcaactctgttagctgagtagatacatcatgaaaaagtttctgacattgcttctatctagcttttattggaagatatttcctttatcatcgtagtcctgagagcgctccaaatgtccacttccagatactacaaaaagagtgtttcaaacctgttctatgaaaggaactgttcaacactgtgacttcaattgawacatcccaatgaagcttctgagaatgcttctgtctagagtttatatgaagacaatcccgtttccaacgaaatc

SEQ ID NO: 230590 - DNA, 615 bp, Homo sapiens
  misc_feature (1)...(615): n = A,T,C or G
nnnnnnncgtttccaacgaaatcctcaaagctatccaaatatcctcttgcagatattacaaaaagagtgtttcaaaactgctctatcaaaagaaagcttsaacactgttagttgagggcgcacatcacaaataagtttctgagaatgcttctgtctagttttcaggggaagatatttcctttttcaccttaggcctgaaagcgctgcaaatgtgcacatccagatactacaaaaagagtgtttcaaacctgctctatgaaagggaatgttcaactctgtgacttgaatgcaaacatcacaaagaagtttctgggaatgctgctgactgctttttatatgtaatcccgtttccaacgaaatcctcaaagctagacaaatatccacttgcagattccacaaaacgagtgtttcaaaactgctctctcaaatgaaggttcaactctgttagctgagtagatacatcatgaaaaagtttctgacattgcttctatctagcttttattggaagatatttcctttttcaccgcagtcctgagagcgctccaaatgtccacttccagatactacaaaaagagtgtttcaaacctgctctatgaaagggactgttcaacactg

SEQ ID NO: 230591 - DNA, 615 bp, Homo sapiens
  misc_feature (1)...(615): n = A,T,C or G
nnnnnnncgtttccaacgaaatcctcaaagctatccaaatatcctcttgcagatattacaaaaagagtgtttcaaaactgctctatcaaaagaaagcttgaacactgttagttgagggcgcacatcacaaataagtttctgagaatgcttctgtctagttttcaggggaagatatttcctttttcaccttaggcctgaaagcgctgcaaatgtgcacatccagatactacaaaaagagtgtttcaaacctgctctatgaaagggaatgttcaactctgtgacttgaatgcaaacatcacaaagaagtttctgggaatgctgctgwctgctttttatatgtaatcccgtttccaacgaaatcctcaaagctagacaaatatccacttgcagattccacaaaacgagtgtttcaaaactgctctctcaaatgaaggttcaactctgttagctgagtagatacatcatgaaaaagtttctgacattgcttctatctagcttttattggaagatatttcctttttcaccgcagtcctgagagcgctccaaatgtccacttccagatactacaaaaagagtgtttcaaacctgctctatgaaagggactgttcaacactg

SEQ ID NO: 230592 - DNA, 221 bp, Homo sapiens
ctgtgacttgaatgcaaacatcacaaagaagtttctgggaatgctgctgactgctttttatatgtaatcccgtttccaacgaaatcctcaaagctagacaaatatccacttgcagattccacaaaamgagtgtttcaaaactgctctctcaaatgaaggttcaactctgttagctgagtagatacatcatgaaaaagtttctgacattgcttctatctagc

SEQ ID NO: 230593 - DNA, 221 bp, Homo sapiens
ctgtgacttgaatgcaaacatcacaaagaagtttctgggaatgctgctgactgctttttatatgtaatcccgtttccaacgaaatcctcaaagctagacaaatatccacttgcagattccacaaaacgagtgtttcaaaactgctctctcaaakgaaggttcaactctgttagctgagtagatacatcatgaaaaagtttctgacattgcttctatctagc

SEQ ID NO: 230594 - DNA, 555 bp, Homo sapiens
aagtctttgataccttttctgttttccttaagtgatcccagattgttagaaatccttttaagatctactcatgtggcataaaggatggcaagaaggagggacagaccgaagtaaatggacaaacaccgagaaatcagtcaactgagttgttttacaaagtgagagcagaagccttaaaacaatacatatgcatacacacatwgcccaaatatcaggtttaaccaatttgactatagagtctttgacttttgactatagaggtcttttaaaaaatatatctctcctaatggtaattcctcctcaagctgttttattttgcttctgctgctgagagaggaggaaggaagaaactggtcaggcagacagttagggtggctccttggtaaaactccttcaaagaacagcctgaaaatcactgcaggccccacatccttgaatggaaatgtctactctgaaacaagatgaacaaattccactcgttttttggctctgacttttcacctactttacatatgcctacctttctgtgattggccacaggccaagtcttcattt

SEQ ID NO: 230595 - DNA, 504 bp, Homo sapiens
cctcagcctcccgagaatgacttacratgatctgtgatatcaaatgtttttaaaccttcgatatttgacaaactttctaaaatcaaattataaattaagtctttttttgatctaattaatcctttaagatattggtttccctaaagtccaaaaatgacataatttggcttatttggtataaaaattacacaggaagcattgtcaaatatgaaatggtgtgtggttactcccataccattactatctgcctaagtgatttcttcttaattcctgaatcaatagcatttctgatgttagaattataaggcttttgtttaaggattaatttacatccccattgctcttatagataggatctctgatgttagaataataagaaatttgtttaagaattgcttaatatggttttcagagcctgaatttcagtggaatagctgatgccaaccggtttgaagatgctgggcaacatgatgaaaccccttctttacaaaaatacaaataata

SEQ ID NO: 230596 - DNA, 582 bp, Homo sapiens
gataagaacctggttaaatggtaacaaaactagttttatttatcaatgattactaaagtcatgtgaactaaaagtcatttgagtctagtggccaacgccatttggccctttggaggttcatcgaaaaatcactgacatgaggtatatgaatgggagaaaaggcatatacatttatttaacatgtatacacaggatccttcagaatgaaggcccaactccccagtgagttttacaagcttacataccatcctggcaaaaacaagttatggaaggggagagaaaacaaatgctgttgagaggattactagggagaatgatttacttgtaaatagttctttttgacagtggaaagatctgttcaggtgtggttgcattcttkgtcttacagggagggatgaaaaaaaattttttttaccatcatgctttatgtccatgtaaagaaaaaacaatttttttctctgctgggtctggactttaggcagataaaggaacttcagcttctttgagagagaccttgggtggtggggaggtcagagaggccttgatcaaggcttcttcagttcagcatggcaatgcaccata

SEQ ID NO: 230597 - DNA, 392 bp, Homo sapiens
tgccccagcctaaccagtgttttcttacttttttgtgtacaggctacatcactggtcttcttttatttgtggctaaataaatgttgtgttagaagagtaaagagttcccagttacatgggatctatagttctacaaaatgaatgtatacataatccatgtaaatccttcacttattttaaaacaactttttaatttttaaattaaatttaatttgtgcatgtgtgtgagaccagagtgagaacagagatggcggyggtgaggggcagtggtctcaccatgttgcccaggcaagtcttgaactccccttcaagtgccaccctcctcacctggcctccctcaccttgcctcttcccctctcactcctatgccagctcctgccattccccacccc

SEQ ID NO: 230598 - DNA, 501 bp, Homo sapiens
atcttaacacaaattgcatactaccttttcaaaaagcaagttaagcctgattctaattgtgggatgaaaagttttttccctatgaagaaattttaaatatcatcaagcatgttgagaggtgctagtgagggcatggagcaaggaatcaaattccataggtgattgttttctctatctttgtataaaaatgtccttgccccaattaaagcctccaccaagtataaaaagaaagcgtttggtgatattagcaagcaacagtttcccaaatctaccttgcccacctctttggcctaaactctgcaggtaatttattcaaaaaagagaagtgtcctttgrgtaacaaatgtatcacttcctactctcttaaaccaaactccgatgctgcatcttagataaaagccctcaaatctggcctcctgaagtcatgctgtcatttaacttggctgcagacccctgatactcccctgcagggagagagtctgctctttgccccagccttta

SEQ ID NO: 230599 - DNA, 219 bp, Homo sapiens
atgccctgcctttgggcctccagtcgatgcctcagggctcctatggcactgcgggtytcttggttgcctagctgcagaccacaggctgtattgaggaggactttatgttcaagtgcagaaagtagtcaggattaccatccaggggactctgccttctgtggtcctctccagacttagaatttggcccaaggcaggacaagctgactcggagcagattgt

SEQ ID NO: 230600 - DNA, 219 bp, Homo sapiens
atgccctgcctttgggcctccagtcgatgcctcagggctcctatggcactgcgggtctcttggttgcctagctgcagaccacaggctgtmttgaggaggactttatgttcaagtgcagaaagtagtcaggattaccatccaggggactctgccttctgtggtcctctccagacttagaatttggcccaaggcaggacaagctgactcggagcagattgt

SEQ ID NO: 230601 - DNA, 585 bp, Homo sapiens
ttctgtccagcaaacaactgagtgaagaaaaaacctgtagaataggagaaaatattgtcaagctattcacctaataagggactaatatacaaaatatacaaaaaaactcaaacaacttcacagtaawaaaaatctgagttcaaatttgggcaaaatatataactatacttttttttagaaaaagaaatacaaataaccaataaataaattttaaaatgctcagtatcactaatcctcagggaaatacaaatcaaatctacaatgtgatataatcttgcttcaatttgaataaattgctgtcattgaaaagacaaaaaaaataacaaatgctcgtgaggctccagagaacagtaaactcttacatgctgttggtgggaaggtaaattagtgcagccactatagagaacaacaggaggttttctcaaaaaaactaataatgggactgccgagggatccagcaaccccactactggggtattcaggcaatagaaaagaaaacaatagatctaaaggatacctgtcctcatatgtttactgtagcactatccacaacagcttgtgtatggaatcaacctacatgtccat

SEQ ID NO: 230602 - DNA, 634 bp, Homo sapiens
acaccacatttctatctgctgtagacattcttcccagtgtctcaaaatgttttggcatctttcagtaaaaatcttcaagtttgtcagtccttgatttaaaaaaaaaaaaaagcagcaaaatttttagagctcccttgaaccttctattttaatgtgcctttgtagataattcccaacatcttgtgtccttcatttttataatttatctttatcaaacttgtcataaaccccaatactttgatctcttgtagaagagtccgtactcctatccaatccagtgttgtttatcttcaaacttggacttcccctgctcattccattcttatctacttcyattgggttcaccagctaattccattctcattctatccacaggctcactcccatatgtattattaaaacacacaccaataggacataaaaagaagcaagagtactgggctttaccatgagttcaaatctcatttctgccaattcctatgtctaaaaaaaaaagcttcctaatctctttgagcctcacattctctatctagagaatcacttgaccagaatgttcaacgcagataaaaatactagaaggtattttaattcattctaagattccttaaaattctgtaattctatgtcctcttga

SEQ ID NO: 230603 - DNA, 634 bp, Homo sapiens
acaccacatttctatctgctgtagacattcttcccagtgtctcaaaatgttttggcatctttcagtaaaaatcttcaagtttgtcagtccttgatttaaaaaaaaaaaaaagcagcaaaatttttagagctcccttgaaccttctattttaatgtgcctttgtagataattcccaacatcttgtgtccttcatttttataatttatctttatcaaacttgtcataaaccccaatactttgatctcttgtagaagagtccgtactcctatccaatccagtgttgtttatcttcaaacttggacttcccctgctcattccattcttatctacttctattgggttcaccagctaattccattctcattctatccacagrctcactcccatatgtattattaaaacacacaccaataggacataaaaagaagcaagagtactgggctttaccatgagttcaaatctcatttctgccaattcctatgtctaaaaaaaaaagcttcctaatctctttgagcctcacattctctatctagagaatcacttgaccagaatgttcaacgcagataaaaatactagaaggtattttaattcattctaagattccttaaaattctgtaattctatgtcctcttga

SEQ ID NO: 230604 - DNA, 634 bp, Homo sapiens
acaccacatttctatctgctgtagacattcttcccagtgtctcaaaatgttttggcatctttcagtaaaaatcttcaagtttgtcagtccttgatttaaaaaaaaaaaaaagcagcaaaatttttagagctcccttgaaccttctattttaatgtgcctttgtagataattcccaacatcttgtgtccttcatttttataatttatctttatcaaacttgtcataaaccccaatactttgatctcttgtagaagagtccgtactcctatccaatccagtgttgtttatcttcaaacttggacttcccctgctcattccattcttatctacttctattgggttcaccagctaattccattctcattctatccacaggctcactcccatatgtattattaaaacacacaccaataggacataaaaagaagcaagagtactgggctttaccatgagttcaaatctcatttctgccaattcctatgtctaaaaaaaaaagcttcstaatctctttgagcctcacattctctatctagagaatcacttgaccagaatgttcaacgcagataaaaatactagaaggtattttaattcattctaagattccttaaaattctgtaattctatgtcctcttga

SEQ ID NO: 230605 - DNA, 445 bp, Homo sapiens
tccttgtttcttcttaacgtaatgtgtaagtctatatgtaagtactatatacacatataagttctaaatgtatgctcatagaaatacaaatactrtatgtaagtatatataatactatgtataactgctatacttattataagtactacttaaatatagtttccttaccccatttttaacagtcattgattaaccaattgaagattatcctatagtttatttttttcattaccttcaatgtaatgatgccattctagttttataaaaccaggtgacaatattacattctctaaaatttctttagacaaatactgaatggggacaaatactgaatggggaaaaactgaaagcttttcctctaagatctggaacactacaaggatgcccactgtcaccactgttattcaacatagtattggaagtcctagctagagcaatcagacaa

SEQ ID NO: 230606 - DNA, 363 bp, Homo sapiens
gggagcatatgtggactctctgcacttttctctctattttttctaaaactgctaaaaaaaagtctattgtttttaaaataaaatgatccctagcaggaaaaaaatgacaaaagatctcaacaaatatttccccaaagaagatatacayatggccaataagcatgagaaaagacactggacattaccttcaataggaaaatacaaatcaaaaccacaaggagatacaatttcacatacattataatggctacaattaaaaagtcacacagtaagtgtttgtgaagatgtggagaaactgaaattttagtacactgatggagggaaaaaaaaataatgcagccatttcaaaaagtagtttggcag

SEQ ID NO: 230607 - DNA, 363 bp, Homo sapiens
gggagcatatgtggactctctgcacttttctctctattttttctaaaactgctaaaaaaaagtctattgtttttaaaataaaatgatccctagcaggaaaaaaatgacaaaagatctcaacaaatatttccccaaagaagatatacacatggccaataagcatgagaaaagacactggacattaccttcaataggaaaatacaaatcaaaaccacaaggagatacaatttcacatacattataatrgctacaattaaaaagtcacacagtaagtgtttgtgaagatgtggagaaactgaaattttagtacactgatggagggaaaaaaaaataatgcagccatttcaaaaagtagtttggcag

SEQ ID NO: 230608 - DNA, 363 bp, Homo sapiens
gggagcatatgtggactctctgcacttttctctctattttttctaaaactgctaaaaaaaagtctattgtttttaaaataaaatgatccctagcaggaaaaaaatgacaaaagatctcaacaaatatttccccaaagaagatatacacatggccaataagcatgagaaaagacactggacattaccttcaataggaaaatacaaatcaaaaccacaaggagatacaatttcacatacattataatggctacaattaaaaagtcacacagtaagtgtttgtgaagatgtggagaaactgaaattttagtacactgmtggagggaaaaaaaaataatgcagccatttcaaaaagtagtttggcag

SEQ ID NO: 230609 - DNA, 363 bp, Homo sapiens
gggagcatatgtggactctctgcacttttctctctattttttctaaaactgctaaaaaaaagtctattgtttttaaaataaaatgatccctagcaggaaaaaaatgacaaaagatctcaacaaatatttccccaaagaagatatacacatggccaataagcatgagaaaagacactggacattaccttcaataggaaaatacaaatcaaaaccacaaggagatacaatttcacatacattataatggctacaattaaaaagtcacacagtaagtgtttgtgaagatgtggagaaactgaaattttagtacactgatggagggaawaaaaaataatgcagccatttcaaaaagtagtttggcag

SEQ ID NO: 230610 - DNA, 557 bp, Homo sapiens
ctcagcactcttcctgcaaggcgaggtcgagagtcaccttgtgttgaaaatcttactagtataggactcaacgaaaatatattccccaaatgcccrtaagaattcctacttcaagcctcagacttcaaataattgccagaactacttgactgaggttagttatatgaccgtttctctttagggtttcatttctctagcgtaattcttgtttataatttggtgaaatactgagttgttctgttgacttttgcatgtgaagtaaagatcataattagctgtgttaacacagaaaggaaatgggaactttacattttttaattccctggagctctcattttcaagagatatccatttgctaactttattcaataaatgtgactaaactgacacgtttgaaatgtctttaaaagctgcatttaagttaggttttagaaattgcatgttattgcctgataactgatgatatactttgagatgctttggcttactctctaattgattatagtttagctgtggttcataccacattttttttttctttttttttgaggcagtgt

SEQ ID NO: 230611 - DNA, 557 bp, Homo sapiens
ctcagcactcttcctgcaaggcgaggtcgagagtcaccttgtgttgaaaatcttactagtataggactcaacgaaaatatattccccaaatgcccataagaattcctacttcaarcctcagacttcaaataattgccagaactacttgactgaggttagttatatgaccgtttctctttagggtttcatttctctagcgtaattcttgtttataatttggtgaaatactgagttgttctgttgacttttgcatgtgaagtaaagatcataattagctgtgttaacacagaaaggaaatgggaactttacattttttaattccctggagctctcattttcaagagatatccatttgctaactttattcaataaatgtgactaaactgacacgtttgaaatgtctttaaaagctgcatttaagttaggttttagaaattgcatgttattgcctgataactgatgatatactttgagatgctttggcttactctctaattgattatagtttagctgtggttcataccacattttttttttctttttttttgaggcagtgt

SEQ ID NO: 230612 - DNA, 557 bp, Homo sapiens
ctcagcactcttcctgcaaggcgaggtcgagagtcaccttgtgttgaaaatcttactagtataggactcaacgaaaatatattccccaaatgcccataagaattcctacttcaagcctcagacttcaaataaytgccagaactacttgactgaggttagttatatgaccgtttctctttagggtttcatttctctagcgtaattcttgtttataatttggtgaaatactgagttgttctgttgacttttgcatgtgaagtaaagatcataattagctgtgttaacacagaaaggaaatgggaactttacattttttaattccctggagctctcattttcaagagatatccatttgctaactttattcaataaatgtgactaaactgacacgtttgaaatgtctttaaaagctgcatttaagttaggttttagaaattgcatgttattgcctgataactgatgatatactttgagatgctttggcttactctctaattgattatagtttagctgtggttcataccacattttttttttctttttttttgaggcagtgt

SEQ ID NO: 230613 - DNA, 557 bp, Homo sapiens
ctcagcactcttcctgcaaggcgaggtcgagagtcaccttgtgttgaaaatcttactagtataggactcaacgaaaatatattccccaaatgcccataagaattcctacttcaagcctcagacttcaaataattgccagaactacttgactgaggttagttatatgaccgtttctctttagggtttcatttctctagcgtaattcttgtttataatttggtgaaatactgagttgttctgttgacttttgcatgtgaagtaaagatcataattagctgtgttaacacagaaaggaaatgggaactttacattttttaattccctggagctctcattttcaagagatatccatttgctaactttattcaataaatgtgactaaactgacacgtttgaaatgtctttaaaagctgcatttaagttaggttttagaaattgcatgttattgcctgataactgatgatatactttgagatgctttggcttactctctaattgattrtagtttagctgtggttcataccacattttttttttctttttttttgaggcagtgt

SEQ ID NO: 230614 - DNA, 415 bp, Homo sapiens
tctactactggcctaatcttggggaattggagcatcagaatcatgagctttccttctcccttatttattggttttatttctccatgtagaacaaagaaaagaataagaaaataatcatctggcaaccatcatagtaataattkttcaaacacaagtcatccatgaaatgctaaatctagtgggttctgaggagtaaccagatatttacagagcctcaaagtatctccatacaaaatacggtgagatggtgcaaataaactttttttaattttttttattttcaagatggagtcttgccctgtcacccaggttggagtgcaatggtgcaatctcagctcctgcaacctccgtctcccaggttcaagcaattctctgcctcagccttcctagtagctgggatttcaggtgcccacca

SEQ ID NO: 230615 - DNA, 436 bp, Homo sapiens
tttcatatggcagaagttggaacaagacagagagaggaaagagrttccacagccttttaaactactagatctcatgagaactcactcactatcaggaggatggcattaagggcttcgtgctttgccatttgtgaaggatccactcccactcctttatgattaaagctttttccacctaggccccgactctaacattagggagtgtactttcacatgagttttggaaggggcatagagaaaaaccgtattattctgtccctgaccccacaaatctcatgtccttctcacattgcaaaatacagtcatgccttgccagcagtctcccaaagtcttaactcacttcagcattaactcaaagttacaaagtccaaagtctcatctgggtcaaggctacattctcttttgcctacgagtctctgaaataaaaggcaagttc

SEQ ID NO: 230616 - DNA, 436 bp, Homo sapiens
tttcatatggcagaagttggaacaagacagagagaggaaagagattccacagccttttaaactactagatctcatgagaactcactcactatcaggaggatggcattaagggcttsgtgctttgccatttgtgaaggatccactcccactcctttatgattaaagctttttccacctaggccccgactctaacattagggagtgtactttcacatgagttttggaaggggcatagagaaaaaccgtattattctgtccctgaccccacaaatctcatgtccttctcacattgcaaaatacagtcatgccttgccagcagtctcccaaagtcttaactcacttcagcattaactcaaagttacaaagtccaaagtctcatctgggtcaaggctacattctcttttgcctacgagtctctgaaataaaaggcaagttc

SEQ ID NO: 230617 - DNA, 549 bp, Homo sapiens
attttcataatgccgtcacatggtgattatgtgtgactggattatgaaaattattgtagtgtgtgtgggcacccgagattgccctgtaagcaggtgtggccagacaggggtcctgggagaggcaagcagactaaggagcgctgaggtcacaccagttccatctcatgtgcaagaccacccagcagaatagaccaagcwgaggaaagaatcccagagcttgaaaactggctttctgaaataaaacaggcagacaagaatgggggaaaaaagaaggaaaatgaataaacaaaacatccaagaaatatgagattatataaacgaccaaatctatgactgattagtgtacgtgaaagagatgaggagaatggagccaacttggaaaacatacttcagaatatcattcatgagaatatccccaacctatccagacagaccaacattccaattcaggaaatccagagaatctcagtaagataagccacgagaagatcatccccaagacatataatcatcagattctccaaggtcaaaatgaaagaaacaatgtta

SEQ ID NO: 230618 - DNA, 592 bp, Homo sapiens
acatcatttaactataagaagaaataaactactcatgtgtgctaaaacatgcatgaattctgaaagcattatgctaagtgaaaaagccagtcacaaaggactacatattgtataacgctatgtatacgaaatatacagaacaggtaaatatatggagacaaaagtagatagatggtggttgcctacaacasgggtaggtggagggacatggaggaaggctgcagtcatgcctaggagatgtggggttgcttttcagggtgatgaaaatgctgtgaatatactaatagatactcagttgtacattttaaatggttgaactctctcaaatgtgaatgatatctcagtgaaactgtttttaaaatccaaaggcaggatcaagataattttctcaactctcaatttttgacttacatgctatatcaaatctaaatatttttagagttttatagtatattttaaattaaagataaagaaaatgcctaaattttcaaatagtttgtaaattaacctaaaacatgcacatttcaaagaatagtataatggcctttctgtacaagttaacctgcagtctgtgaaataaatagacacagat

SEQ ID NO: 230619 - DNA, 612 bp, Homo sapiens
cttaattaaattttaatttgaaaatactcatttcaggtgtaaacatttccatttatacctacattatggtcttaacatgtggcaacataaagtcattaaaattatttcagcagtacagaactatctatcttaaaatatgactctgtgcctaataaaatttcataggtgacacaatgtcttttctcaaagtaaatcatctctcatctctaccttttatttcctagaaatgaggcatgtttctaagctgatatagtaaacacatttttcctttttttattaaaacagctttgttgaaatataatttacatactatagaatgtatctgttttaacttaaagttaaaagatttttagtccatttactgagttgtgcagccatctctacaatccaactttacagcatttccatcactgcaagatccctcatgcccattagcagtcactaycagcttctagtcccagccctttgcaaatattaatctactttttgtccctatacgtttatcttttctggatgcttcacgtacatggaattatacagtatggtaaacacactttttatctattgatttttatattcaactaagttcaacatgtatccagaaccaaatgt

SEQ ID NO: 230620 - DNA, 561 bp, Homo sapiens
gtttaaattttctttctagaagtttgaaaatatttatcttccttgatacttactactctttctgctttctctctctcatatgaaagagactttcttttaaatgatcacattcattcattaccttctaatttttctcttctarcatgaggtctttccactctcaataaagcttctttggatattagttattatctctttatgatactctttctgatgaacatcatctagttgctgttcaatgcacggattttcatgttggagttgacatattctctcttctacacagctccactttccagtggaattattctctttagcttctgcattttcatacatctctttcatttcctttatttgctgctgtgtttggcttaggttgttatgtacagtttctaaagccaataacttttttctgagagtatctcttgtcttacggaacttatcttttaaggtattgaatttaatttgtggtttagaaagttgttcagtaagaaactcattcttatcttctacttcggaaatatcagaactcatttttacttgtacggaaacatcttgagt

SEQ ID NO: 230621 - DNA, 551 bp, Homo sapiens
ttctctctctcatatgaaagagactttcttttaaatgatcacattcattcattaccttctaatttttctcttctagcatgaggtctttccactctcaataaagcttctttggatattagttattatctctttatgatactctttctgatgaacatcatctagttgctgttcaatgcacggattttcatgttggagttgacatattctctcttctacacagctccactttccagtggaattattctctttagcttctgcattttcatacatctctttcatttcctttatwtgctgctgtgtttggcttaggttgttatgtacagtttctaaagccaataacttttttctgagagtatctcttgtcttacggaacttatcttttaaggtattgaatttaatttgtggtttagaaagttgttcagtaagaaactcattcttatcttctacttcggaaatatcagaactcatttttacttgtacggaaacatcttgagttctctctaaagcaagttttaggtttctttctgttttcacactttcactgtgtttac

SEQ ID NO: 230622 - DNA, 498 bp, Homo sapiens
tttatcttccttgatacttactactctttctgctttctctctctcatatgaaagagactttcttttaaatgatcacattcattcattaccttctaatttttctcttctagcatgaggtctttccactctcaataaagcttctttggatattagttattatctctttatgatactctttctgatgaacatcatctagttgctgttcaatgcacggattttcatgttggagttgacatattctctcttctacacagctccactttccagtggaattattctctttagcttctgcattttcatacatctctttcatttcctttatttgctgctgtgtttggcttaggttgttatgtacagtttctaaagccaatracttttttctgagagtatctcttgtcttacggaacttatcttttaaggtattgaatttaatttgtggtttagaaagttgttcagtaagaaactcattcttatcttctacttcggaaatatcagaac

SEQ ID NO: 230623 - DNA, 460 bp, Homo sapiens
gattaagaggatgtgaccttgtagggcttcaggaacagtaaagaagttttcccttttctacactgagctattcttttccccactgccttttatctcttttttttttaattctgggatatcaaaaaagtgaaagttctccctgaactatgggaaccaaagtttgccacaacacaagaagcagagtgaaactgctgtgtttccagtgcagaattctggaaaacgacatgcttcccagatttcacattcaattatcagaaaagtttataggtggaaaacatacggtacagttatctactttagccccattatctactgaaaatgggagtcaaactaacaaagacatatgaaatgtttcatcgagagctcttgaggtggcattctctagcatttcatkgcaccaaataacatgatacaattccatattgctgaattacataaattaccaaataaatttatcgaa

SEQ ID NO: 230624 - DNA, 520 bp, Homo sapiens
gggaaccaaagtttgccacaacacaagaagcagagtgaaactgctgtgtttccagtgcagaattctggaaaacgacatgcttcccagatttcacattcaattatcagaaaagtttataggtggaaaacatacggtacagttatctactttagccccattatctactgaaaatgggagtcaaactaacaaagacatatgaaatgtttcatcgagagctcttgaggtggcattctctagcatttcatggcaccaaataacatgatacaattccatattgctgaattacataaattaccaaataaatttatcgaattagtcagatatattaaaagtgtaagttgagcaaagcaatttaacrcctcagagggtggaaaaaggcctcatctgcttttactttgaagaagaaaatctctagattttgtctatctttaggacacaatgtacagaactcaactttctactaaagaatcaaaggataaatttttatctaagaaattatgcttcttacatgataaaaatc

SEQ ID NO: 230625 - DNA, 418 bp, Homo sapiens
tacagaactcaactttctactaaagaatcaaaggataaatttttatctaagaaattatgcttcttacatgataaaaatcacacatgccaaaacttatgatactttattaaacaacataatgtaaggactgattcaacagaaatattggagtggtgaytttttaaaatatgtggaagtatatatttgttttcaaaatattggaaataaccatgatggaactataagttcaaacagtttgagctaagcagatgaacttgcatgcatgaaaatacattaaacagactcatttggctgggaatattcatagcaactctcaaggctagacgtgtttttgtggctcgtctcagtcattgctttcctcccattgtattcccaatctatcattaaataaatgtaattcatctctaaatgaatacag

SEQ ID NO: 230626 - DNA, 418 bp, Homo sapiens
tacagaactcaactttctactaaagaatcaaaggataaatttttatctaagaaattatgcttcttacatgataaaaatcacacatgccaaaacttatgatactttattaaacaacataatgtaaggactgattcaacagaaatattggagtggtgattttttaaaatatgtggaagtatatatttgttttcaaaatattggaaataaccatgatggaactataagttcaaacagtttgagcyaagcagatgaacttgcatgcatgaaaatacattaaacagactcatttggctgggaatattcatagcaactctcaaggctagacgtgtttttgtggctcgtctcagtcattgctttcctcccattgtattcccaatctatcattaaataaatgtaattcatctctaaatgaatacag

SEQ ID NO: 230627 - DNA, 396 bp, Homo sapiens
tcaactttctactaaagaatcaaaggataaatttttatctaagaaattatgcttcttacatgataaaaatcacacatgccaaaacttatgatactttattaaacaacataatgtaaggactgattcaacagaaatattggagtggtgattttttaaaatatgtggaagtatatatttgttttcaaaatattggaaataaccatgatggaactataagttcaaacagtttgagctaagcagatgaacttrcatgcatgaaaatacattaaacagactcatttggctgggaatattcatagcaactctcaaggctagacgtgtttttgtggctcgtctcagtcattgctttcctcccattgtattcccaatctatcattaaataaatgtaattcatct

SEQ ID NO: 230628 - DNA, 416 bp, Homo sapiens
taggacacaatgtacagaactcaactttctactaaagaatcaaaggataaatttttatctaagaaattatgcttcttacatgataaaaatcacacatgccaaaacttatgatactttattaaacaacataatgtaaggactgattcaacagaaatattggagtggtgattttttaaaatatgtggaagtatatatttgttttcaaaatattggaaataaccatgatggaactataagttcaaacagtttgagctaagcagatgaacttgcatgcatgaaaatacattaaacagactcatttggctgggaatattcatagcaactctcaaggctagacgtgtttttgtggctygtctcagtcattgctttcctcccattgtattcccaatctatcattaaataaatgtaattcatct

SEQ ID NO: 230629 - DNA, 450 bp, Homo sapiens
atctgtgttagaaacaagctgtgtgtctggtttgttatcatttttatagtctgatttattttaaattaaatgaagcttagaagatgactggtaagtgtatttcagggacctggagtgtgaatggaataaaaagacatttgacatgggcttcctctgttcaggcgctgcctggactgccacagagctagaccctccagatacatttttctcctcacaatcagggacatgattcatcagactagagggcactccttttttgttcatccctctttagagttaccatgtaggagctcttcctcagggcaagtagtaattttggagttttcagaacttttaccaatattcagcttgaacttgtttgtaatraattttaaagaaagtcatgaatatatagattgattccctttatcactgttcttacccagttctggttcttgagactttttttgg

SEQ ID NO: 230630 - DNA, 456 bp, Homo sapiens
attgttcacaccctgacaccaaaggtcccattctgcaaggtaggattctcttaataggcaactgcattgacttttatgaccccattcactccctgaacacagacacagaagtcaactggtgaccacaaaacagaataaatctttaacctcggcactggtgaccagcaatataaaactgcaacatttgaagcactggcaatgatgactcctttaacactagtttaactcagtggccattgttgttaaactgttcataatttmtattcctcagtaatatgacccaatacttcatgttaccttgtgtattatgagtaaggttatataaataaaacagcaagataattctgaaaatttcttgcctcaattctaagggtaaatacagctatgaattactagagatactaagaattactagaataactaatagttactagagatagtaagaatatcttaagt

SEQ ID NO: 230631 - DNA, 456 bp, Homo sapiens
attgttcacaccctgacaccaaaggtcccattctgcaaggtaggattctcttaataggcaactgcattgacttttatgaccccattcactccctgaacacagacacagaagtcaactggtgaccacaaaacagaataaatctttaacctcggcactggtgaccagcaatataaaactgcaacatttgaagcactggcaatgatgactcctttaacactagtttaactcagtggccattgttgttaaactgttcataatttatattcctcagtaatatgacccaatacttcatgttaccttgtgtattatgagtaaggttatataaataaaacagcaagataattctgaaaatttcttgcctcaattctaagggtaaatacagctatgarttactagagatactaagaattactagaataactaatagttactagagatagtaagaatatcttaagt

SEQ ID NO: 230632 - DNA, 584 bp, Homo sapiens
taactcagtggccattgttgttaaactgttcataatttatattcctcagtaatatgacccaatacttcatgttaccttgtgtattatgagtaaggttatataaataaaacagcaagataattctgaaaatttcttgcctcaattctaagggtaaatacagctatgaattactagagatactaagaattactagaataactaatagttactagagatagtaagaatatcttaagtttcataactggttaagatgttttaaaaattamatataaaattatgatctattggattctaaaggtatagtctgaaaggtcatgtcatttggactatgctttgttagtaaagcaaaaaaaacccctaatattaaacaagaacttaaattttcatatacctgtgattgcttcttttcacttctttcacacctttcttgctcttcctctaaagccactggtaaggtttgttctgttgacaaagtcattgatttagttcaaatgaactaagaagagttagataagcactataatctttataaaaataaatagagaataacatttctttgtattttatattttgagagtttgaat

SEQ ID NO: 230633 - DNA, 584 bp, Homo sapiens
taactcagtggccattgttgttaaactgttcataatttatattcctcagtaatatgacccaatacttcatgttaccttgtgtattatgagtaaggttatataaataaaacagcaagataattctgaaaatttcttgcctcaattctaagggtaaatacagctatgaattactagagatactaagaattactagaataactaatagttactagagatagtaagaatatcttaagtttcataactggttaagatgttttaaaaattaaatataaaattatgatctattggattctaaaggtatagtctgaaaggtcatgtcatttggactatgctttgttagtaaagcaaaaaaaacccctaatattaaacaagaacttaaattttcatatacctgtgattgcttcttttcacttctttcacacctttcttgctcttcctctaaagccactggtaaggtttgttctgttgacaaaktcattgatttagttcaaatgaactaagaagagttagataagcactataatctttataaaaataaatagagaataacatttctttgtattttatattttgagagtttgaat

SEQ ID NO: 230634 - DNA, 629 bp, Homo sapiens
tggcttatatttagtaataggttattttacctagcataccaacatggatatgagtagtttatttacaaaaagtgtacagttaggccaggtgtggtggctcacacctgtaatcccagcactttgggagagcaatgtgggtggatcatttgaggtcaagagttcaagaccagtctgaccagtgaaacctcatctctactwaaaatacaaaatgagccagacgtagtggtacacacctgtaatcccagccacttgggaagctgagacaggtgaatcacttgaattcaggaggcagaggttgcagcgagctgagatcactccattgcactttggcctgggcaacaagaatgaaattccatccaaaacaaaacaaaacaaaacaaaaacactgtatgtttataatatcactttacctgccatatatgacataaaattgttcttcatattatttatctaagattataatttcatatagaatgcttttaaactatgttcagttgaaactgaaaggaacatagtttatagatttgtttccttgatatgccataacatatatttaaacaattattaaatatttactcttaaaaatacttgacttactaattctgtacatttctgcagatataaacgcc

SEQ ID NO: 230635 - DNA, 629 bp, Homo sapiens
tggcttatatttagtaataggttattttacctagcataccaacatggatatgagtagtttatttacaaaaagtgtacagttaggccaggtgtggtggctcacacctgtaatcccagcactttgggagagcaatgtgggtggatcatttgaggtcaagagttcaagaccagtctgaccagtgaaacctcatctctacttaaaatacaaaatgagccagacgtagtggtacacacctgtaatcccagccacttgggargctgagacaggtgaatcacttgaattcaggaggcagaggttgcagcgagctgagatcactccattgcactttggcctgggcaacaagaatgaaattccatccaaaacaaaacaaaacaaaacaaaaacactgtatgtttataatatcactttacctgccatatatgacataaaattgttcttcatattatttatctaagattataatttcatatagaatgcttttaaactatgttcagttgaaactgaaaggaacatagtttatagatttgtttccttgatatgccataacatatatttaaacaattattaaatatttactcttaaaaatacttgacttactaattctgtacatttctgcagatataaacgcc

SEQ ID NO: 230636 - DNA, 629 bp, Homo sapiens
tggcttatatttagtaataggttattttacctagcataccaacatggatatgagtagtttatttacaaaaagtgtacagttaggccaggtgtggtggctcacacctgtaatcccagcactttgggagagcaatgtgggtggatcatttgaggtcaagagttcaagaccagtctgaccagtgaaacctcatctctacttaaaatacaaaatgagccagacgtagtggtacacacctgtaatcccagccacttgggaagctgagacaggtgaatcacttgaattcaggaggcagaggttgcagcgagctgagatcactscattgcactttggcctgggcaacaagaatgaaattccatccaaaacaaaacaaaacaaaacaaaaacactgtatgtttataatatcactttacctgccatatatgacataaaattgttcttcatattatttatctaagattataatttcatatagaatgcttttaaactatgttcagttgaaactgaaaggaacatagtttatagatttgtttccttgatatgccataacatatatttaaacaattattaaatatttactcttaaaaatacttgacttactaattctgtacatttctgcagatataaacgcc

SEQ ID NO: 230637 - DNA, 629 bp, Homo sapiens
tggcttatatttagtaataggttattttacctagcataccaacatggatatgagtagtttatttacaaaaagtgtacagttaggccaggtgtggtggctcacacctgtaatcccagcactttgggagagcaatgtgggtggatcatttgaggtcaagagttcaagaccagtctgaccagtgaaacctcatctctacttaaaatacaaaatgagccagacgtagtggtacacacctgtaatcccagccacttgggaagctgagacaggtgaatcacttgaattcaggaggcagaggttgcagcgagctgagatcactccattgcactttggcctgggcaacaagaatgaaattccatccaaaacaaaamaaaacaaaacaaaaacactgtatgtttataatatcactttacctgccatatatgacataaaattgttcttcatattatttatctaagattataatttcatatagaatgcttttaaactatgttcagttgaaactgaaaggaacatagtttatagatttgtttccttgatatgccataacatatatttaaacaattattaaatatttactcttaaaaatacttgacttactaattctgtacatttctgcagatataaacgcc

SEQ ID NO: 230638 - DNA, 466 bp, Homo sapiens
ggggagagattgggctaccttaatgagggccatttcaatctcttgtcctgcagcagccatttcaaaatacgtcaaaaaatatatttgggggtaaaatattttgatttccttcagcctcttctctctgtgatgctgcaccagaatcagattagaaaggaagccacattataagtgttaataaaacccatctgatgagatttgatagtttgaagggtgtgtttcccagaccctttagatagaatgtggggccaaagaaaacaaggtcttattcctctatataaatctgtcagtgctttaagcagtgaaagaaagatttttcatttaattttacagacttgaaactaatgaaaaggatagcttgtaaaatataaatctctttttctataaaaaggacatgttgttgattctcttagaccttgaaccctggccagkgatttgaaaccaagcagtacctatctccggatct

SEQ ID NO: 230639 - DNA, 456 bp, Homo sapiens
tacaattcattaactttagtattttcagagttatgccgtcatcattacaattaattttagaacattttcatcaccctaaaaacaaaccccacatcatttagccatcttcactagttttcccttcctccctcagccctagggaaccacccascttctttgtatagatttgcctataagcctctgaaataaaaagcaagtggtctgctgggactggcttatttcacttagcataatttttcatgctgcatctgtgctgtagcaggtatggatgccgggtttttgctccttagttcagctacatctgggttcttctctcgtgaccaggaaaaattaagcatgcagacacattgaggagggcagaatttattatgtgaaaggacagctctcagcaaagagaggggtcctgcaaacaggtttccacctcacaattgaataccaggagcacatgagctgaag

SEQ ID NO: 230640 - DNA, 457 bp, Homo sapiens
atacaattcattaactttagtattttcagagttatgccgtcatcattacaattaattttagaacattttcatcaccctaaaaacaaaccccacatcatttagccatcttcactagttttcccttcctccctcagccctagggaaccacccagcttctttgtatagatttgcctataagcctctgaaataaaaagcaagtggtctgctgggactggcttatttcacttagcataatttttcatgctgcatctgtgctgtagcaggtatkgatgccgggtttttgctccttagttcagctacatctgggttcttctctcgtgaccaggaaaaattaagcatgcagacacattgaggagggcagaatttattatgtgaaaggacagctctcagcaaagagaggggtcctgcaaacaggtttccacctcacaattgaataccaggagcacatgagctgaag

SEQ ID NO: 230641 - DNA, 456 bp, Homo sapiens
tacaattcattaactttagtattttcagagttatgccgtcatcattacaattaattttagaacattttcatcaccctaaaaacaaaccccacatcatttagccatcttcactagttttcccttcctccctcagccctagggaaccacccagcttctttgtatagatttgcctataagcctctgaaataaaaagcaagtggtctgctgggactggcttatttcacttagcataatttttcatgctgcatctgtgctgtagcaggtatggatgccgggtttttgctccttagttcagctacatctgkgttcttctctcgtgaccaggaaaaattaagcatgcagacacattgaggagggcagaatttattatgtgaaaggacagctctcagcaaagagaggggtcctgcaaacaggtttccacctcacaattgaataccaggagcacatgagctgaag

SEQ ID NO: 230642 - DNA, 456 bp, Homo sapiens
tacaattcattaactttagtattttcagagttatgccgtcatcattacaattaattttagaacattttcatcaccctaaaaacaaaccccacatcatttagccatcttcactagttttcccttcctccctcagccctagggaaccacccagcttctttgtatagatttgcctataagcctctgaaataaaaagcaagtggtctgctgggactggcttatttcacttagcataatttttcatgctgcatctgtgctgtagcaggtatggatgccgggtttttgctccttagttcagctacatctgggttcttctctcgtgaccaggaaaaattaagcatgcagacacattgaggagggcagaatttattatgtgaaagsacagctctcagcaaagagaggggtcctgcaaacaggtttccacctcacaattgaataccaggagcacatgagctgaag

SEQ ID NO: 230643 - DNA, 453 bp, Homo sapiens
tcatcattacaattaattttagaacattttcatcaccctaaaaacaaaccccacatcatttagccatcttcactagttttcccttcctccctcagccctagggaaccacccagcttctttgtatagatttgcctataagcctctgaaataaaaagcaagtggtctgctgggactggcttatttcacttagcataatttttcatgctgcatctgtgctgtagcaggtatggatgccgggtttttgctccttagttcagctacatctgggttcttctctcgtgaccaggaaaaattaagcatgcagacacattgaggagggcagaatttattatgtgaaaggacagctctcagcaaagagaggggtcctgcaaasaggtttccacctcacaattgaataccaggagcacatgagctgaagcggccaggctcctcctctgcataaggcgtgaattc

SEQ ID NO: 230644 - DNA, 427 bp, Homo sapiens
agctgccagtttgttttccaaagtggctgcatcactttacattcccagcagcattagataagggttttaatttctttacatttttttctaaccctcttttttcttgaacaaagattttatcctgtggtgtgaagtgataccacatgtggttttgatttacattttcctaatgactaattacattaagcatctattaatgtgcttatccatctttatatctkctttgcagatatatctattcaaaatcttttaccattttttaaaattggcttatcttgttatttattaattgcaagagttatttatatttcctatatatgtaagtcccttatcagatacacgcttttcaaatactttcttctacttggcgtcttaccttttcacttcttcatactgtcttctgaggcacagtagttttcaattttga

SEQ ID NO: 230645 - DNA, 427 bp, Homo sapiens
agctgccagtttgttttccaaagtggctgcatcactttacattcccagcagcattagataagggttttaatttctttacatttttttctaaccctcttttttcttgaacaaagattttatcctgtggtgtgaagtgataccacatgtggttttgatttacattttcctaatgactaattacattaagcatctattaatgtgcttatccatctttatatctgctttgcagatatatctattcaaaatcttttaccattttttaaaattggcttatcttgttatttattaattgcaagagttatttatatttcctatatatgtaagtcccttatcagatacacgcttttcaaatactttcttctacttggcgtcttaccttttcacttcttcatrctgtcttctgaggcacagtagttttcaattttga

SEQ ID NO: 230646 - DNA, 580 bp, Homo sapiens
aaatgctcagtggttcccattaatattgggaaaatcaacactataaaacagaaagccatagacattatttaatatttggttttgggaggtatttttagtgacactgcatacagttgtacctaataattgctaaattagagacgtaaaagtaaaacaaaggcacattgtgtttgagtaggaaatctatagacatctagctggttttcccatccagccacaaaattctaaatataatcatggtacctgyactcaaatttatgttaaataccaacctcaatgaaatcactctttcttctcattccctttcttatttatatgttgctttccttaagggaagaatacaaatgccttgctaagaaccattctgtttggttgtaggctgcataaggggagtgaacacaaagtatatttgaccacaaaatgactctttaaaagtcagaactatggtagcatgaagccaaacgaggtaatctagaataaaattttctatgcttctttcccttctttgctctctttctactctaataactgcgattcacacaggtaatgaagagtgtaattccttgatagaaacacagct

SEQ ID NO: 230647 - DNA, 544 bp, Homo sapiens
ttttaaattgctctccagtggttctttttccagatttctctaaaggaaggctattcccttgctattcagagctgtgtccaaggaccagcacaaacatcacctgagtgctcatgagaaatgcagactccaatacctgctaagtcagaatgtgcactttccagaagctcctcaacgaattcatgacaatttgaatgccctgttcyacactggtgtgcttccatattggtttaccctaattggcctttttggcctagcctcaacttctttcctattatgtccctgaatttaatactacgttataagccataatgtttctaatgaacttttaatcaggcaaagcttctctaattaatttcttcccaataaatcacccaacactattcttttcattttctataaaaacaaattatagccatacatggctgaccatttacggtgatgttcatctatggtagataaaacacaggtctgcatggtaaagtacctcaatccttaatgcctccccagtagcaagaatgacagcaagagaaggaaaatgttactg

SEQ ID NO: 230648 - DNA, 544 bp, Homo sapiens
ttttaaattgctctccagtggttctttttccagatttctctaaaggaaggctattcccttgctattcagagctgtgtccaaggaccagcacaaacatcacctgagtgctcatgagaaatgcagactccaatacctgctaagtcagaatgtgcactttccagaagctcctcaacgaattcatgacaatttgaatgccctgttctacactggtgtgcttccatattggtttaccctaaytggcctttttggcctagcctcaacttctttcctattatgtccctgaatttaatactacgttataagccataatgtttctaatgaacttttaatcaggcaaagcttctctaattaatttcttcccaataaatcacccaacactattcttttcattttctataaaaacaaattatagccatacatggctgaccatttacggtgatgttcatctatggtagataaaacacaggtctgcatggtaaagtacctcaatccttaatgcctccccagtagcaagaatgacagcaagagaaggaaaatgttactg

SEQ ID NO: 230649 - DNA, 544 bp, Homo sapiens
ttttaaattgctctccagtggttctttttccagatttctctaaaggaaggctattcccttgctattcagagctgtgtccaaggaccagcacaaacatcacctgagtgctcatgagaaatgcagactccaatacctgctaagtcagaatgtgcactttccagaagctcctcaacgaattcatgacaatttgaatgccctgttctacactggtgtgcttccatattggtttaccctaattggcctttttggcctagcctcaacttctttcctattatgtccctgaatttaatactacgttataarccataatgtttctaatgaacttttaatcaggcaaagcttctctaattaatttcttcccaataaatcacccaacactattcttttcattttctataaaaacaaattatagccatacatggctgaccatttacggtgatgttcatctatggtagataaaacacaggtctgcatggtaaagtacctcaatccttaatgcctccccagtagcaagaatgacagcaagagaaggaaaatgttactg

SEQ ID NO: 230650 - DNA, 430 bp, Homo sapiens
gttctgtaatcctatgtgagggacaaacattcagaccscaagagcagtgttctgaaatcctatgttaagggaaacattgagaccccagcatgaatgttctggaatcctatgtgagggacaaacattcagaccacggcaggagtgttctggaatcctatgtgaggaacaaacattcagaccacagcaggagtattctggaatcccatatgagggataagcattcagaccctcgtagcagtgttctggaatcctatgtgagggagaagcattcagagcacagcaggagtgctctggaatcctatgttagggacaaacattcagaacctcgtaacattgtgctggaaacctatgtgagggacagacatttagaccctcgcagcagtgttctgaaatcccatatgagggtcaaatattcagatcctcgcagcag

SEQ ID NO: 230651 - DNA, 486 bp, Homo sapiens
tcttccacttctgcctcccaaaatgttgagataagcattgtgcaccaccacacccagccctaatcaatttctttaaatcaatctcaatgttgcccaggcayggtggctcacacctgtaatctcagccctttgcaaggccaaggtgggtggattgcttgagttcaggagttggagaccagcctgggcaacataatgaggacacatctctacacaaaaaataccaaaaggagtcaggcatgatggtgtgtgcctgtagtcccagctgcttgggaagctgatgtgggaggatcacttgagcctgagaggtggatacagcagtgagccaagatcatgccactacactgcagcatggacaacagagctagaccctgcctccccaaaaatttcaatttaaaatgtgagaacaaagagagatacaaacaaaaaacaagcctaattagtcaatgaaatatgagcttaagccaagaaagaaaacgaaaaacatga

SEQ ID NO: 230652 - DNA, 479 bp, Homo sapiens
cgttgtgcacatgtaccctagaacttaaagtataataataataataaagagtaatgtatggcttgaaatggtatatttaatggaacatgagttgggtctaataaaaagcttaagaaatgttaatctaaaatctcaatgttaagattccagttgaatgatactagaaaatatwttgtaaccctctttgctaccgatgacctatttctcttttatttcctttttaattatggcataatttctcaacataacatgtcaaaacttatacacccttaaatattaaaaaataatacaatgtaagcaatattttaaatacaatatttaatgattagatacattaggtttattatattacttataacattccattatataaaaattcatttgtttatttattcagattaaacaactattaaggctgaatgtctcatgtctgtaaccccagcactttgagaggctgaggcgagcagaacacttgagcc

SEQ ID NO: 230653 - DNA, 479 bp, Homo sapiens
cgttgtgcacatgtaccctagaacttaaagtataataataataataaagagtaatgtatggcttgaaatggtatatttaatggaacatgagttgggtctaataaaaagcttaagaaatgttaatctaaaatctcaatgttaagattccagttgaatgatactagaaaatattttgtaaccctctttgctaccgatgacctatttctcttttatttcctttttaattatggcataatttctcaacataacatgtcaaaacttayacacccttaaatattaaaaaataatacaatgtaagcaatattttaaatacaatatttaatgattagatacattaggtttattatattacttataacattccattatataaaaattcatttgtttatttattcagattaaacaactattaaggctgaatgtctcatgtctgtaaccccagcactttgagaggctgaggcgagcagaacacttgagcc

SEQ ID NO: 230654 - DNA, 447 bp, Homo sapiens
taaatattaaaaaataatacaatgtaagcaatattttaaatacaatatttaatgattagatacattaggtttattatattacttataacattccattatataaaaattcatttgtttatttattcagattaaacarctattaaggctgaatgtctcatgtctgtaaccccagcactttgagaggctgaggcgagcagaacacttgagcccaacagttaaagaagagcctgggcaacaaggcaaaaccctatctctacaaaactcagcccagcatggtgacacaggtctatggtgacatagctctattgtttcaactacttggatggctgaggtgtgaggatcacctgagcctaggaaatggagatcggagtgagccaagatctcaccagtgccctccagcctgggtgacagagtgaaaccccatctcaaaaaacaacaagtaaaatg

SEQ ID NO: 230655 - DNA, 447 bp, Homo sapiens
taaatattaaaaaataatacaatgtaagcaatattttaaatacaatatttaatgattagatacattaggtttattatattacttataacattccattatataaaaattcatttgtttatttattcagattaaacaactattaaggctgaatgtctcatgtctgtaaccccagcactttgagaggctgaggcgagcagaacacttgagcccaacagttaaagaagagcctgggcaacwaggcaaaaccctatctctacaaaactcagcccagcatggtgacacaggtctatggtgacatagctctattgtttcaactacttggatggctgaggtgtgaggatcacctgagcctaggaaatggagatcggagtgagccaagatctcaccagtgccctccagcctgggtgacagagtgaaaccccatctcaaaaaacaacaagtaaaatg

SEQ ID NO: 230656 - DNA, 447 bp, Homo sapiens
taaatattaaaaaataatacaatgtaagcaatattttaaatacaatatttaatgattagatacattaggtttattatattacttataacattccattatataaaaattcatttgtttatttattcagattaaacaactattaaggctgaatgtctcatgtctgtaaccccagcactttgagaggctgaggcgagcagaacacttgagcccaacagttaaagaagagcctgggcaacaaggcaaaaccctatctctacaaaactcagcccagcatggtgacacaggtctatsgtgacatagctctattgtttcaactacttggatggctgaggtgtgaggatcacctgagcctaggaaatggagatcggagtgagccaagatctcaccagtgccctccagcctgggtgacagagtgaaaccccatctcaaaaaacaacaagtaaaatg

SEQ ID NO: 230657 - DNA, 488 bp, Homo sapiens
atgacaggtaaaccactgctaaatttgaaaagtaaatactatgcaaaactacactcagagtgagaagattaattttacaagagaccactttaccttagtagcaacactcaagtcttcatcatccaatgtaggcaatgaatccacacacagttcatgcaaaatgcttgagagcaaaaatacacaatgaaaatgagcaagttgatttctttacaatttttttaactgccagtttatatccagcttccccctcaaaaaaaggaaaacataatctggggaaargtcagtgatctatatattaaattatgattcttgatataattaaaatatgtcctctgttctaaaaatagattttagttacctatttctgcctccacctgtctaaatctataaaatattcaatgaaaactaaccttgaggtttataacaaatagtgacagtcaatatattggcagagcctgacaataatgtgccctcacaaattatctgtc

SEQ ID NO: 230658 - DNA, 488 bp, Homo sapiens
atgacaggtaaaccactgctaaatttgaaaagtaaatactatgcaaaactacactcagagtgagaagattaattttacaagagaccactttaccttagtagcaacactcaagtcttcatcatccaatgtaggcaatgaatccacacacagttcatgcaaaatgcttgagagcaaaaatacacaatgaaaatgagcaagttgatttctttacaatttttttaactgccagtttatatccagcttccccctcaaaaaaaggaaaacataatctggggaaaggtcagtgatctatatattaaattaygattcttgatataattaaaatatgtcctctgttctaaaaatagattttagttacctatttctgcctccacctgtctaaatctataaaatattcaatgaaaactaaccttgaggtttataacaaatagtgacagtcaatatattggcagagcctgacaataatgtgccctcacaaattatctgtc

SEQ ID NO: 230659 - DNA, 446 bp, Homo sapiens
gaattctatgtgactgacaaacattcagactccagcagcagtgttctgtaatcctatgtgagggacaaacattcagaccgcaagagcagtgttctgaaatcctatgttaagggaaacattgagaccccagcatgaatgttctggaatcctatgtgagggacaaacattcagaccacggcaggagtgttctggaatcctatgtgaggaacaaacwttcagaccacagcaggagtattctggaatcccatatgagggataagcattcagaccctcgtagcagtgttctggaatcctatgtgagggagaagcattcagagcacagcaggagtgctctggaatcctatgttagggacaaacattcagaacctcgtaacattgtgctggaaacctatgtgagggacagacatttagaccctcgcagcagtgttctgaaatcccatatgagg

SEQ ID NO: 230660 - DNA, 267 bp, Homo sapiens
cattgaaaaaagctcagtgctaatagccaagagaatgggggaaacgcctagaagtcatttcataacttcacagcattaattttctgtatctacataaagaaaagaggtctaattgackcacagttcttcaggctgtaaagaaagcgtagtggtttctgcttgtaggaggactcaggaagccccccaattataccaaaaggccaagcggcaatgaaatgtttcatatggcaggagtagaagcaagacagagagaggaaagaggtgaga

SEQ ID NO: 230661 - DNA, 267 bp, Homo sapiens
cattgaaaaaagctcagtgctaatagccaagagaatgggggaaacgcctagaagtcatttcataacttcacagcattaattttctgtatctacataaagaaaagaggtctaattgactcacagttcttcaggctgtaaagaaagcrtagtggtttctgcttgtaggaggactcaggaagccccccaattataccaaaaggccaagcggcaatgaaatgtttcatatggcaggagtagaagcaagacagagagaggaaagaggtgaga

SEQ ID NO: 230662 - DNA, 267 bp, Homo sapiens
cattgaaaaaagctcagtgctaatagccaagagaatgggggaaacgcctagaagtcatttcataacttcacagcattaattttctgtatctacataaagaaaagaggtctaattgactcacagttcttcaggctgtaaagaaagcgtagtggtttctgcttgtaggaggactcaggaagccccccaattataccaaaaggcmaagcggcaatgaaatgtttcatatggcaggagtagaagcaagacagagagaggaaagaggtgaga

SEQ ID NO: 230663 - DNA, 430 bp, Homo sapiens
atgtgagggacaaacattcagaccgcaagagcagtgttctgaaatcctatgttaagggaaacattgagaccccagcatgaatgttctggaatcctatgtgagggacaaacattcagaccacggcaggagtgttctggaatcctatgtgaggaacaaacattcagaccacagcaggagtattctggaatccyatatgagggataagcattcagaccctcgtagcagtgttctggaatcctatgtgagggagaagcattcagagcacagcaggagtgctctggaatcctatgttagggacaaacattcagaacctcgtaacattgtgctggaaacctatgtgagggacagacatttagaccctcgcagcagtgttctgaaatcccatatgagggtcaaatattcagatcctcgcagcagtgttctggaattc

SEQ ID NO: 230664 - DNA, 617 bp, Homo sapiens
tgttctttgctacagcaaaacaaaagtaaccttggctcctgttcccagtaatttcctcattttcatctgagaccttgtaagcctggccttcactgtccatccttctgccagacttttaatcacaactattcaacaagtgcctacgatggtccaaaatttctttcatcttcctgtcttctttcaagctctccaaactctccaacctctggctgttacccacttctgaatctgctttacattttcagctatctttgttgcagcctgacaatgtataagaaaaagaagtccattttcagggggaaacttcaagacggcttcagatatttgcattaaaaagaagtccagtgctaatagccaagacgatggggaaatgtcactgaagatatttcatagctccacttcgcagtattttattttctgtatgatcataatgaaaaggggtttaattggctcatggttctgcaggctgtaaagaaagcatagtggcttctgcttctgcttctgggaggactcaggaagcctcccaatcacaccagtaggaaaamagcaatgaaatgtttcatacggcaggagtaggagcaaggctgagagaggaaagaggtgccacaccgttatat

SEQ ID NO: 230665 - DNA, 430 bp, Homo sapiens
atgtgagggacaaacattcagaccgcaagagcagtgttctgaaatcctatgttaagggaaacattgagaccccagcatgaatgttctggaatcctatgtgagggacaaacattcagaccacggcaggagtgttctggaatcctatgtgaggaacaaacattcagaccacagcaggagtattctggaatcccatatgaggkataagcattcagaccctcgtagcagtgttctggaatcctatgtgagggagaagcattcagagcacagcaggagtgctctggaatcctatgttagggacaaacattcagaacctcgtaacattgtgctggaaacctatgtgagggacagacatttagaccctcgcagcagtgttctgaaatcccatatgagggtcaaatattcagatcctcgcagcagtgttctggaattc

SEQ ID NO: 230666 - DNA, 430 bp, Homo sapiens
atgtgagggacaaacattcagaccgcaagagcagtgttctgaaatcctatgttaagggaaacattgagaccccagcatgaatgttctggaatcctatgtgagggacaaacattcagaccacggcaggagtgttctggaatcctatgtgaggaacaaacattcagaccacagcaggagtattctggaatcccatatgagggataagcattcagaccctcrtagcagtgttctggaatcctatgtgagggagaagcattcagagcacagcaggagtgctctggaatcctatgttagggacaaacattcagaacctcgtaacattgtgctggaaacctatgtgagggacagacatttagaccctcgcagcagtgttctgaaatcccatatgagggtcaaatattcagatcctcgcagcagtgttctggaattc

SEQ ID NO: 230667 - DNA, 391 bp, Homo sapiens
actccctgtcataatctaatccctccaaacccttccaatctttgtttgctacccactactgagcctccttctactttttcagaaatctgtatagcaggttggctgtgtagcaataacaaaaatcccatttaaggggaaacattcaagaagatttcagaaatttgcatataaagaagccctgtgctaatagccaaaacaaagggaaaaaggccttgaagacattycacagctcctctctgcagttctaattttctgtattattgtaaataaaagaggtgtaattgactcatggttctgcaagctgtgaaggaagtatagtgtcttctgtttctgggaggaatcaggaagcctcctcattatatcagaaagccaagggacaatgagatgtctc

SEQ ID NO: 230668 - DNA, 430 bp, Homo sapiens
gttctgtaatcctatgtgagggacaaacattcagaccgcaagagcagtgttctgaaatcctatgttaagggaaacattgagaccccagcatgaatgttctggaatcctatgtgagggacaaacattcagaccacggcaggagtgttctggaatcctatgtgaggaacaaacattcagaccacagcaggagtattctggaatcccatatgagggataagcattcagaccctcgtagcagtgttctggaatcctatgtgagggagaagcattcagagcacagcaggagtgctctggaatcctatgttagggacaaacattcagaacctcgtaacattgtgctgraaacctatgtgagggacagacatttagaccctcgcagcagtgttctgaaatcccatatgagggtcaaatattcagatcctcgcagcag

SEQ ID NO: 230669 - DNA, 430 bp, Homo sapiens
atgtgagggacaaacattcagaccgcaagagcagtgttctgaaatcctatgttaagggaaacattgagaccccagcatgaatgttctggaatcctatgtgagggacaaacattcagaccacggcaggagtgttctggaatcctatgtgaggaacaaacattcagaccacagcaggagtattctggaatcccatatgagggataagcattcagaccctcgtagcagtgttctggaatcctatgtgagggagaagcattcagagcacagcaggagtgctctggaatcctatgttagggacaaacattcagaacctcgtaacattgtgctggaaacctatgtgagggacagacatttagaccctcgcagcagtgttctgaaatcccatatgagggtcaaayattcagatcctcgcagcagtgttctggaattc

SEQ ID NO: 230670 - DNA, 574 bp, Homo sapiens
gagcaagtcccatcttacatggatggcagtaggcaaagagagaatgaggaggatgcaaaagtggaaacccctgataaaaccatcaggtctcatgagacgtattcactaacacgagaacagtatggggaaactgcccccatgattcagttatctcccaccaggtccctcccacaacatgtgggaattatgggagttcaattcaagatgagatttgggtggggacacagagacaaaccatatcaaccrtatgaactctttgggtctgtagaataaatagctattgttttttaaatctagcatgatcccagttagctaggattgctaatataaaagaaataaagatagtgaatatgaaattaattatccagattttcagttcatagatttttatgtaaaccactgtccttttgtagctctgtatttaattaagcatttccttctggtaagatagttttctttcaaacagagaggcaatataatgtagcagaaagattgtaggcttggaattagacccatttgggcttgagtctttgctttacctgtgggaccgtggaccagctgcttaatcttcata

SEQ ID NO: 230671 - DNA, 570 bp, Homo sapiens
agtgttattctcattttaaaagtaaggaattagagcctcagaaagtttcagttacttctccaagactacacagctagtaagttgtgggtcctaggtctcttatgattctgtgctcctccatttgggggcccactttgaacacatgatgtttgagagtttttcaggaacttgagagcatcgcttcaagcagtattgcggaataaaggggcaggagtttagcagcagaggttagttcccatatgaggatatacatttggaagccatcagcccatggacattgaagccacaggagtgggtgaaatcacacaggctagggatatagtgggagagtaatgagaatgttgagactagcatcccagcctcaacacatctggacatcttattccagtctaaccagtgtctgttarcagagccagtggtttacgagtatagacttggagtttaccaatgtggtggtaactttaatattcttacttttacatatacttgcatacacaccttatttatttttgtttaacagcttttttgagatataacttacataacgtatttcatctacttaatacacac

SEQ ID NO: 230672 - DNA, 548 bp, Homo sapiens
ataaatacatcagaatccccaataactgttgagatttcatttccaccccacctaactattgctcatctcattctyactcaagcaattcctcctccctccccacccatacacagcaatgctgcttttgcaatttgtcaacctgaaggcaataacagttgtcaaactgaccgtgcaactttttggcaacccacacaaatcactgtgtatctctgtacttctctctccttttatcaatgatttgggagtaatcatcctggttgcctgctttgttctcgtgagtttggagggcactgacattcatggaacattgtgaactaagaagaaagttgcttataagtgtctcgaactaccattttcacatgtcttaactgccataacagggaggaaagtcttcacaatttgaaaggctgcctgaaacttagtcccactgcaccaaacctttgatcttttggtcacaccgtcagtctcttgaaaactcagttctcttgtaaaattttcagtctgctcccaaaacaattgttgcataagttctgaaagccaggcccaca

SEQ ID NO: 230673 - DNA, 548 bp, Homo sapiens
ataaatacatcagaatccccaataactgttgagatttcatttccaccccacctaactattgctcatctcattctcactcawgcaattcctcctccctccccacccatacacagcaatgctgcttttgcaatttgtcaacctgaaggcaataacagttgtcaaactgaccgtgcaactttttggcaacccacacaaatcactgtgtatctctgtacttctctctccttttatcaatgatttgggagtaatcatcctggttgcctgctttgttctcgtgagtttggagggcactgacattcatggaacattgtgaactaagaagaaagttgcttataagtgtctcgaactaccattttcacatgtcttaactgccataacagggaggaaagtcttcacaatttgaaaggctgcctgaaacttagtcccactgcaccaaacctttgatcttttggtcacaccgtcagtctcttgaaaactcagttctcttgtaaaattttcagtctgctcccaaaacaattgttgcataagttctgaaagccaggcccaca

SEQ ID NO: 230674 - DNA, 548 bp, Homo sapiens
ataaatacatcagaatccccaataactgttgagatttcatttccaccccacctaactattgctcatctcattctcactcaagcaattcctcctccctccccacccatacacagcaatgctgcttttgcaatttgtcaacctgaaggcaataacagttgtcaaactgaccrtgcaactttttggcaacccacacaaatcactgtgtatctctgtacttctctctccttttatcaatgatttgggagtaatcatcctggttgcctgctttgttctcgtgagtttggagggcactgacattcatggaacattgtgaactaagaagaaagttgcttataagtgtctcgaactaccattttcacatgtcttaactgccataacagggaggaaagtcttcacaatttgaaaggctgcctgaaacttagtcccactgcaccaaacctttgatcttttggtcacaccgtcagtctcttgaaaactcagttctcttgtaaaattttcagtctgctcccaaaacaattgttgcataagttctgaaagccaggcccaca

SEQ ID NO: 230675 - DNA, 548 bp, Homo sapiens
ataaatacatcagaatccccaataactgttgagatttcatttccaccccacctaactattgctcatctcattctcactcaagcaattcctcctccctccccacccatacacagcaatgctgcttttgcaatttgtcaacctgaaggcaataacagttgtcaaactgaccgtgcaactttttggcaacccacacaaatcactgtgtatctctgtacttctctctccttttatcaatgatttgggagtaatcatcctggttgcctgctttgttctcgtgagtttggagggcactgacattcatggaacattgtgaactaagaagaaagttgcttataagtgtctcgaactaccattttcacatgtcttaactgccataacagggaggaaagtcttcacaatttgaaaggctgcctgaaacttagtcccactgcaccaaacctttgatcttttggtcacaccgtcagtctcytgaaaactcagttctcttgtaaaattttcagtctgctcccaaaacaattgttgcataagttctgaaagccaggcccaca

SEQ ID NO: 230676 - DNA, 653 bp, Homo sapiens
ctacattcttcttttcaacctcatcttccagtaagtcttgttgtttttctcctgaatgtctcttttctctatcttcttcttttcacgttgtcaactgtccaaatcctcttaattaatctccccgtcccgcacccatcctccgcactgctaccagagtgatgcttgtaatcaaggaataataattatcattacagctaacattttatctgggcttactaggtgccaggcgccatgctaataactttgcctctatccttttatttactttgataacatcacatcctgctctgcagtttttaatgattccttttaccagaagaataaaattgtaattctttaatacagtatcatgatctggcccactccttactgtgattcatctgctgccactgtcaccctttcacttggcatctgcttgatcaggckctactcacagctcccttcacacgctctcattttctgtgtttttagacttgctggctcttgtcctctacctgcacacccccctaccccaacttttaaccttttttacaggatcactttcttagatgagacagtttcaccactgaacaccttggagaatagtaagatctatattctggaactttactactaaacttcattgccacaaattagcaccctcaacagactat

SEQ ID NO: 230677 - DNA, 396 bp, Homo sapiens
cccatttctgcttcaatttcttcatctgcaaaattataaaaagaattgtgcytatttcaaatggtggttgtgaggattctatgttataatgcctgtaaagctcttaacacagttcattgcatattgtaagaccttaatcaaagctagtttttataatcatacaagatttagcttggagataaagatgtccacctgtattggaattaataatccatgtttattaccctaaaaataataatgagatatgatgttgtgtagccctaggaggggagctaaagctcacatggaaactgaagaacatcaggtaaatccaattatctgagcactgagcagcaggaggtgtttgatatacattagttggacatagcaagctgtaaaggagatggtacttttaaa

SEQ ID NO: 230678 - DNA, 396 bp, Homo sapiens
cccatttctgcttcaatttcttcatctgcaaaattataaaaagaattgtgcctatttcaaatggtggttgtgaggattctatgttataatgcctgtaaagctcttaacacagttcattgcatattgtaagacyttaatcaaagctagtttttataatcatacaagatttagcttggagataaagatgtccacctgtattggaattaataatccatgtttattaccctaaaaataataatgagatatgatgttgtgtagccctaggaggggagctaaagctcacatggaaactgaagaacatcaggtaaatccaattatctgagcactgagcagcaggaggtgtttgatatacattagttggacatagcaagctgtaaaggagatggtacttttaaa

SEQ ID NO: 230679 - DNA, 522 bp, Homo sapiens
ctggtggtctgaaaggtttaatgtctcttcctggagtgattaatttaaagcagggcaagactggctcaacattattatttcatcttaactgcatctggaaatccagagtgagccattatttaactctgttgaagaaaaagaaatgcatgttcataattsttacctattattaaagcaattcctccattgttcctcgtacctaggaggcaaagctcatatcaccttgaacaggagacaggaagtggcagagtcatttctgtctattgatgaggcagggacttagggagcagagtaattggagtttagttgaggcatgaggcttctataattttataaattgagcaaaaagctgataatttatttctaaagaaaaaataaatcccaagaattaacaactaaaaaaattcgccaatattataaacatcacaaaatgaagaaaaatagcataatattttaaattaattaactctctcacttaccactatgcattctttttacgtttttgactgcatactctttgat

SEQ ID NO: 230680 - DNA, 522 bp, Homo sapiens
ctggtggtctgaaaggtttaatgtctcttcctggagtgattaatttaaagcagggcaagactggctcaacattattatttcatcttaactgcatctggaaatccagagtgagccattatttaactctgttgaagaaaaagaaatgcatgttcataattcttacctattattaaagcaattcctcmattgttcctcgtacctaggaggcaaagctcatatcaccttgaacaggagacaggaagtggcagagtcatttctgtctattgatgaggcagggacttagggagcagagtaattggagtttagttgaggcatgaggcttctataattttataaattgagcaaaaagctgataatttatttctaaagaaaaaataaatcccaagaattaacaactaaaaaaattcgccaatattataaacatcacaaaatgaagaaaaatagcataatattttaaattaattaactctctcacttaccactatgcattctttttacgtttttgactgcatactctttgat

SEQ ID NO: 230681 - DNA, 596 bp, Homo sapiens
atacttgttacaaaatcaatatataagtttaggtctaagaataggttatacagcccatgtaaaaatatgtgtaagcaatttactaacataaaaaaarcctcctgattcataaatgtggctataaaaagacctttgggaaatcctggcagggactttctttaggactcaacattcagcatcttatttaattcctgcttatattgattttttttactaaaattgtttatttcctaagttatttatacacgttaactaacttagccacctaataagcccatgaggtagctaatattattatcattttacagatcatggaacatgagtggcaaagacaagacaaaacaatataagtcaaaagacccagcacttttgagtcctcaactgtaagagaccccactgtctttaagaatggtccagaaaagctgtgtgtgttcccacagactagcaattattgattctagctcgtatgacaggtgtcttggcaaacaggaaatggatgacagagccttataacaactgtaattttaagagacaaatcaagaagacatgagtattggatgaggaacagatggctttcatcttccattactacagca

SEQ ID NO: 230682 - DNA, 596 bp, Homo sapiens
atacttgttacaaaatcaatatataagtttaggtctaagaataggttatacagcccatgtaaaaatatgtgtaagcaatttactaacataaaaaaaacctcctgattcataaatgtggctataaaaagacctttgggaaatcctggcagggactttctttaggactcaacattcagcatcttatttaattcctgcttatattgattttttttactaaaattgtttatttcctaagttatttatacacgttaactaacttagccacctaataagcccatgaggtagctaatattattatcattttacagatcatggaacatgagtggcaaagacaagacaaaacaatataagtcaaaagacccagcacttttgagtcctcaactgtaagagaccccactgtctttaagaatggtccagaaaagctgtgtgtgttcccacagactagcaattattgattctagctcrtatgacaggtgtcttggcaaacaggaaatggatgacagagccttataacaactgtaattttaagagacaaatcaagaagacatgagtattggatgaggaacagatggctttcatcttccattactacagca

SEQ ID NO: 230683 - DNA, 515 bp, Homo sapiens
atagagtaattggttcatcattctgcaggctgtacaggaagcatggtgctataatctgcttggcttctagtgaagcctcggggagctcacaatcatgacagaaggcaaagggggaaaaggcatgtcacacagtgaaagcaagaacaagcaagagagaatgtggtgtgtgttgggagtgccacacacctttaaccatatctcatgtgaactcagagcaaaagctcacttatcaccaagggaataacccaaatcattcatgagggatccacttccacgatccaaatacctcccaccaggctgtatgtccaacactggaaattacaattcaacatgagatttgggtgggaacaaatatccaaaccatattattccaccccagccccacccaaatcccatgttcttctcacattgcaaaatataattatgccttcccaatagtcccccaaagcctcccccygcccaaagtcttaattcattccagcattaactcaaaagtcccaagtcccaagttcaaa

SEQ ID NO: 230684 - DNA, 549 bp, Homo sapiens
ttattttttgtgggtacatagtaagtgtatatatttattgggtacatattttgatactgtcatgtgatgtgaaataagcacatcatggagaatgaggtatctgtcccctcaagcatttatcctttgagttacaaacaatccaattacactatttattttaaaatatacaattattattgattataatcactccgttgttttttttaatacatwctttctattttttgtaacccattaaccatcttattcattctttctattttttgtaacccattaaccatcctcagcttcccccaggcccccactacccttctcagctgatggtaaccgtctttctactctctgttcatgagttcaattgttttgatttttagatcccataaatgaaagagaacttatttgtctttctgtgccttgcttatttcaattaacataattatctccaattccattcatgttgttgcaaatgacaggatgtgattcttttttgtggctaaatagtactccattgtgtatatgtaccacattttatccattcatctgttgatg

SEQ ID NO: 230685 - DNA, 549 bp, Homo sapiens
ttattttttgtgggtacatagtaagtgtatatatttattgggtacatattttgatactgtcatgtgatgtgaaataagcacatcatggagaatgaggtatctgtcccctcaagcatttatcctttgagttacaaacaatccaattacactatttattttaaaatatacaattattattgattataatcactccgttgttttttttaatacatactttctattttttgtaacccattaaccatcttattcattctttctattttttgtaacccattaaccatcctcagcttcccccaggcccccactacccttctcagctgatggtaaccgtctttctactctctgttcatgagttcaattgttttgatttttagatcccataaatgaaagagaacttatttgtctttctgtgccttgcttatttcaattaacataattatctccaattccattcatgttgttgcaaatgacaggatgtsattcttttttgtggctaaatagtactccattgtgtatatgtaccacattttatccattcatctgttgatg

SEQ ID NO: 230686 - DNA, 422 bp, Homo sapiens
gtgagtgctctaatttcaattgaatagtaatagacattgggtgattttttgttgtagagtgatactttgttacaaaggccatgtgactaaagtgaccacctggacataggaatagtctaaaaatcatgacstgatctagaaatatcttggatgatgaagaattaccgtatacttttgtactagattcaatcctgcaccttgtccccagatcttcatatttggctttattatagtttgtactctttctataatcatgagaccatgttgtctctgcatctgctgtattcagactgaagcacctacgataatggatcctcgtctctcatatgacttgctggtataccctagagatcctctctatccaactgacagttctgggcacctcaattcttatctaggcctttcctttttatatggctaga

SEQ ID NO: 230687 - DNA, 422 bp, Homo sapiens
gtgagtgctctaatttcaattgaatagtaatagacattgggtgattttttgttgtagagtgatactttgttacaaaggccatgtgactaaagtgaccacctggacataggaatagtctaaaaatcatgacgtgatctagaamtatcttggatgatgaagaattaccgtatacttttgtactagattcaatcctgcaccttgtccccagatcttcatatttggctttattatagtttgtactctttctataatcatgagaccatgttgtctctgcatctgctgtattcagactgaagcacctacgataatggatcctcgtctctcatatgacttgctggtataccctagagatcctctctatccaactgacagttctgggcacctcaattcttatctaggcctttcctttttatatggctaga

SEQ ID NO: 230688 - DNA, 493 bp, Homo sapiens
cagatctctttctgccaacaaactcccagagtgaagaaattgtccagggctagagaaaaataagtggaatagctgttccaatacaagcccccaagtctttccacagagtccagagtctgatttttcaaaattatttgccaaaagggtgttctcaaaattattccaacttaagttgggattatggtaattataaagtcaacaataacaaaaaaattccaatgaggcacccagttcgcaaactccaatgacaactgttttcaacattcagtggctgacagggcagaaaatctgaagctgagagacaagtagcacctctgaagccctttaggctaaaaaaggtatttgacagagaaggagtctctaatacttcatgaaatatattctgatgtcatctagaatggaggttgcaatctgctgcatttgggsgtttgcttcactgtgttcctggatgtcacataacaagccgtaatctttcttcaaataacattttgca

SEQ ID NO: 230689 - DNA, 575 bp, Homo sapiens
tgcctgattctttccttaaaagaggaaaattttgcaaatgaagtttttttcccctgcagagttgaaagccaaactataaaaatttattggtttctgaaatttattggttcctaaaattttctcgttttcccagattcatgtttcatatgacaagttaaaccatgcaaaagtatataaagtgttcagaaatagaaagtaaatagcatcaagtaatcttctagctgcattattcacagagatattgctgtgcataaaatgaaatggtaacagtcagatccaggatgagtgtgaggtacaagagtcratccctaatatttggtactgatatctgcaaaagtttgtatagacttttgtcctctgaaaagcacattgctttcaagtggtatcaatatttagttaaaaaaaaacttcatgaattcatgatttctgactacttctcagatttctctcttgaaaaaaggggtcttacaccacattttaaatgttgacaatataaaaaatgataaatctgagccaagtctctcttctgatgaaaaataggttctcctccatactctcaaattcctcctatctgt

SEQ ID NO: 230690 - DNA, 546 bp, Homo sapiens
ttgtctgcaagttgagttacggataatgtcagtcactgctgttctattgccagacttcatgcctacctggctctatgaaacgtcggagaaagcaactcattcctctttacacaaatgatagaccgaatataggaaatgcaaagcctaacaagaatgggtggcagcactgggaatagcatattgtgtaatcttgtctagtagcctgtaggggaaatgaaaatgcatcatgacttgcagccacttacaagacaaagagcaattgttatacttaaaaaaaaaaagactcatatgtttcctccaaccccgcacaaaaatctaagacaaataatttttattttgtattaatgtacttaatcttactttgcatgattacacccttattgtctttccatcattgaagagcaaagatcacttaaaatctgaacaccatatatgttattttttcttcgttttattttaacatggttatacacaayatatcatgatttccaaagagttaatacatcacttaaattcagttaattaaaaattatgtgcccatgtttt

SEQ ID NO: 230691 - DNA, 488 bp, Homo sapiens
tcctgtagctctctcaggctatggttgcacactggtggctctaccattctgcagtcttagtagtagcctcactcccatgggtccactaggccttgccctagtgaagcctctctgcagcagctttgcccctgggacagttctcttcctgggccttgagtctgtcccaggcatgttttgaaatctaggtaagggtagccatgcctcyacagctcatacactctgcacacctgcagagttagcaccatttggatgccaacaaagtttaccaccaattcatgtgtggtccggagagatggcctgagcggcactagggtctgtgtaagccacacctggatcatctgaggaacgctgccagaatgtgggaaacacaatcttcaggtggccctgggcagtgagccccaaggtcctgtgtgttccttgggaccctcctttgaaaccattctgccctcaaggctgtggcactctgggcctatcatggaattggcagc

SEQ ID NO: 230692 - DNA, 483 bp, Homo sapiens
accttgattcttgttcctgtagctctctcaggctatggttgcacactggtggctctaccattctgcagtcttagtagtagcctcactcccatgggtccactaggccttgccctagtgaagcctctctgcagcagctttgcccctgggacagttctcttcctgggccttgagtctgtcccaggcatgttttgaaatctaggtaagggtagccatgcctctacagctcatacactctgcacacctgcagagttagcaccatttggatgccaacaaagtttaccaccaattcatgtgtggtccrgagagatggcctgagcggcactagggtctgtgtaagccacacctggatcatctgaggaacgctgccagaatgtgggaaacacaatcttcaggtggccctgggcagtgagccccaaggtcctgtgtgttccttgggaccctcctttgaaaccattctgccctcaaggctgtggcactctgggc

SEQ ID NO: 230693 - DNA, 488 bp, Homo sapiens
tcctgtagctctctcaggctatggttgcacactggtggctctaccattctgcagtcttagtagtagcctcactcccatgggtccactaggccttgccctagtgaagcctctctgcagcagctttgcccctgggacagttctcttcctgggccttgagtctgtcccaggcatgttttgaaatctaggtaagggtagccatgcctctacagctcatacactctgcacacctgcagagttagcaccatttggatgccaacaaagtttaccaccaattcatgtgtggtccggagagatggcctgagcggcactagggtctgtgtaagccacacctggatcatctgaggaacgctgccagaatgtgggaaacacaatcttcaggtggccctgggcagtgagccccaaggtcctgtgtgttccttgggmccctcctttgaaaccattctgccctcaaggctgtggcactctgggcctatcatggaattggcagc

SEQ ID NO: 230694 - DNA, 606 bp, Homo sapiens
acaaggtatgagcgtgcactttggtatatgagactaaacatccactaccacaaaacctgcagcctctgtgtgcaagtaccagctgtactgaaatagtggaagtgggcagraaaggaagttctgaggatcctcacggccaaataacacagaagtagacataaatactcatctggagggagagtaaaacccactgactgcaaggaggtctgaagaaagcctgggagattaataatagaggactacacaggttccaatttgcataggcaatccaaaacaaccagcagcacccactagatcagagagctatgggggtagcctaggccctcaggacctcagaaataaaataaaagttattttaaaatcttctaaaacatggagatgaattcaaagtttgaagaattgttattaagcagagtcagcccaggttaaaggaaagaaaagattcagatacagccaaagaaccaggaccaggggcagtagagggcagatcacaaactgttatttggaactccttaaattacgcgtgtgtgtttactcatattgtaagtatacagatcaattaatatcacaaattaaacacatctgctgctatgggctaaattgtgt

SEQ ID NO: 230695 - DNA, 606 bp, Homo sapiens
acaaggtatgagcgtgcactttggtatatgagactaaacatccactaccacaaaacctgcagcctctgtgtgcaagtaccagctgtactgaaatagtggaagtgggcagaaaaggaagttctgaggatcctcacggccaaataacacagaagtagacataaatactcatctggagggagagtaaaacccactgactgcaaggaggtctgaagaaagcctgggagattaataatagaggactacacaggttccaatttgcataggcaatccaaaacaaccagcagcacccactagatcagagagctrtgggggtagcctaggccctcaggacctcagaaataaaataaaagttattttaaaatcttctaaaacatggagatgaattcaaagtttgaagaattgttattaagcagagtcagcccaggttaaaggaaagaaaagattcagatacagccaaagaaccaggaccaggggcagtagagggcagatcacaaactgttatttggaactccttaaattacgcgtgtgtgtttactcatattgtaagtatacagatcaattaatatcacaaattaaacacatctgctgctatgggctaaattgtgt

SEQ ID NO: 230696 - DNA, 606 bp, Homo sapiens
acaaggtatgagcgtgcactttggtatatgagactaaacatccactaccacaaaacctgcagcctctgtgtgcaagtaccagctgtactgaaatagtggaagtgggcagaaaaggaagttctgaggatcctcacggccaaataacacagaagtagacataaatactcatctggagggagagtaaaacccactgactgcaaggaggtctgaagaaagcctgggagattaataatagaggactacacaggttccaatttgcataggcaatccaaaacaaccagcagcacccactagatcagagagctatgggggtagcctaggccctcaggacctcagaaataaaataaaagttattttaaaatcttcyaaaacatggagatgaattcaaagtttgaagaattgttattaagcagagtcagcccaggttaaaggaaagaaaagattcagatacagccaaagaaccaggaccaggggcagtagagggcagatcacaaactgttatttggaactccttaaattacgcgtgtgtgtttactcatattgtaagtatacagatcaattaatatcacaaattaaacacatctgctgctatgggctaaattgtgt

SEQ ID NO: 230697 - DNA, 606 bp, Homo sapiens
acaaggtatgagcgtgcactttggtatatgagactaaacatccactaccacaaaacctgcagcctctgtgtgcaagtaccagctgtactgaaatagtggaagtgggcagaaaaggaagttctgaggatcctcacggccaaataacacagaagtagacataaatactcatctggagggagagtaaaacccactgactgcaaggaggtctgaagaaagcctgggagattaataatagaggactacacaggttccaatttgcataggcaatccaaaacaaccagcagcacccactagatcagagagctatgggggtagcctaggccctcaggacctcagaaataaaataaaagttattttaaaatcttctaaaacatggagatgaattcaaagtttgaagaattgttattaagcagagtcagcccaggttaaaggaaagaaaagattcagatacagccaaagaaccaggaccaggggcagtagagggcagatcacaaactgttatttggaactycttaaattacgcgtgtgtgtttactcatattgtaagtatacagatcaattaatatcacaaattaaacacatctgctgctatgggctaaattgtgt

SEQ ID NO: 230698 - DNA, 482 bp, Homo sapiens
taatatttctaattttgtattcattgtcattgataatttcttaaatattcatagtttaattatacattctttaagttattctagttttactgagtggaaaacataatactgtaaagatatcaatttcctcctaggtgatttatagtttcattgtaatcaaaagctgtaagtaggtttttgtggatattggcaagctgtttgttgaytttctgtcaaaaagcaaaatactataaagagtcgaggtaaccataaaaaggaatgaaagctttaggatttatactaacacatatcaagatttattatcaagcaagtaaaattagggcagtgtgaaatttgcattaactatatagacaaatggagtgatgatgcagaatagagaatctggacagatagctactaatacatggatccttgacttttgagagacttgccaatgcaattcaatgggaaataaaatggacttttctttcataagtagtgct

SEQ ID NO: 230699 - DNA, 482 bp, Homo sapiens
taatatttctaattttgtattcattgtcattgataatttcttaaatattcatagtttaattatacattctttaagttattctagttttactgagtggaaaacataatactgtaaagatatcaatttcctcctaggtgatttatagtttcattgtaatcaaaagctgtaagtaggtttttgtggatattggcaagctgtttgttgattttctgtcaaaaagcaaaatactataaagagtcgaggtaaccataaaaaggaatgaaagctttaggatttatactaacacatatcaagatttattatcaagcaagtaaaattagggcagtgtgaaatttgcattaactatatagacaaatggagtgatgaygcagaatagagaatctggacagatagctactaatacatggatccttgacttttgagagacttgccaatgcaattcaatgggaaataaaatggacttttctttcataagtagtgct

SEQ ID NO: 230700 - DNA, 454 bp, Homo sapiens
gtagctccctttatacaggtgattcaaggtacttgttagtttttatgatgatgtttattagagttatttttattataaattgggtcttacttttgcttgcattttctataagataatttasatgtataagaaaactgtagattgtgtacatttattttgtaactactcatttcgcttttatgtctgatagtgtaacttaaagcagataatgttatcatcttcaagtcataattataatgccatttcttgtaaattataggtcattacttttcataatttattgtattatctggagcataaatttataaattatggtgatgatagtgaacgtatttaaatggaatttttgtttcactcaaaggttttgattttataattttatttttaaacgaattaagttttactgctcttaagttttaaaattaattatgtttaaatggaaaattatatttac

SEQ ID NO: 230701 - DNA, 509 bp, Homo sapiens
ttattggccatttgtttgtctactttgaaaaatacttctatttaaatgctttgcccttttacaattggactatttgtcttaaactttgagttgtaagtggtcttttatttcctgcatacaagttctttattgaagatattaattgcaaatattttctcccatttcttagattgtctatttctaagaatagatctaattctaaaaattaatagattttatttcttaaagttagatttacagaaaaatttttaaaaagtacagaattccctctcctggtttatagtttctcctattgttcatgtcttacattggtatggctcatttgtggaaattaatgatacaaaagtgatatatcattattaagcaaagtccattgtttacactagagttcactctgagttgtgtagttctgtgggttttgccaaatgcattgtgtcatgttgcattaaagtgttyctgggattttggttttactgagatgtggtgagggcagcagatcagtagatgat

SEQ ID NO: 230702 - DNA, 502 bp, Homo sapiens
ggaattcagcgatatctctcttacttgcacgtccatttataggctctctgcaagaaraaaaatatggctgtattctgcccaaccccgcaggaagtcataccttatggttatattcccatgttccctgaaaatcactgttattctgttctttttcaaggtgcactgatttcataccgttcaaacacacatgttttacaatcaatttgtacaacagtggtcctgaggtgacatacattctcagcttatgaagataatgggattaagagattaaagtaaagacaggcataagaaattataagagtattattagggtgtgataaatgtccatgaaatcttcacaatttatgttcagagactgcagtaaagacaggtgtaagaaattataaaagtattaatttggggaactgataaatgtccatgaaatcttcacaatttatgttcttctgctgcagttctggccgtttcctccattcggggtccctgacttcccacaacacctgtt

SEQ ID NO: 230703 - DNA, 552 bp, Homo sapiens
caacccaaatgcccatcaatgatagactagataaaggaaatgtggcacatattcaccatggaatactacacagccataaaaaagaatgagttcatgtcctttatgtcctttgcagggatatggatgaagctggagaccgtcatcctcagcaaactaacacagaaacagacaccaaatgctgcatgttctcactcataaatgggagttgagcaatgagaatacatggacacagggaggggaacatcacacaccaaggcctgttggggggtggggggaaaggcgagggagagcattaggacaaatacctaatgcatgcagggcttaaaacctagttgacagtttgataggtgtggtaaatcaccatggcatatgtatacttatgtaacaaacctgcatgttcatcacatgtatcccagaacctaaagtaaaacacgcacacacacatacacgcacacacgaacacacacacacacacacacacacacacacacrcacacacacacagagacagagagagacagagaaaaaaatgtggtacttctacacaatgga

SEQ ID NO: 230704 - DNA, 575 bp, Homo sapiens
agtggcagctgtgggcctttggtgaggtccagtactagtgtcggtctggaaagccctgggcttcaagtgcaacccagcacggtgacaggtgcagtggycataggagtgcctgtgtcacctctcccccaactccaggcagcccagcacagagagattccatctgattagcagaaagagaggtaacagagcaagagactttgcttggaaaaccagggaattctctcttatcttttccaagtccacaaaggctgtgtatctaggagaatgcaagagttgcagcataccagggctcaggctgccacctagtgctgaaatcgctacagtcaccacaggcttaggtcacttaatactgtatcctctgaattcttggaaaaccatttccagaagattcagtatgaacaaggccagactgcaaagactgaaataaatacataactcttcaatgcccagatactgaagaatatccacaagcattaagaacatccaggagacatgatatcactaaatgaactaaataagacactagaaaccaatcctgaagtgccagagatatagaacctctcagaggcagaatt

SEQ ID NO: 230705 - DNA, 575 bp, Homo sapiens
agtggcagctgtgggcctttggtgaggtccagtactagtgtcggtctggaaagccctgggcttcaagtgcaacccagcacggtgacaggtgcagtggtcataggagtgcctgtgtcacctctcccccaactccaggcagcccagcacagagagattccatctgattagcagaaagagaggtaacagagcaagagactttgcttggaaaaccagggaattctctcttatcttttccaagtccacaaaggctgtgtatctaggagaatgcaagagttgcagcataccagggctcaggctgccacctagtgctgaaatcgctacagtcaccacaggcttaggtcacttaataytgtatcctctgaattcttggaaaaccatttccagaagattcagtatgaacaaggccagactgcaaagactgaaataaatacataactcttcaatgcccagatactgaagaatatccacaagcattaagaacatccaggagacatgatatcactaaatgaactaaataagacactagaaaccaatcctgaagtgccagagatatagaacctctcagaggcagaatt

SEQ ID NO: 230706 - DNA, 468 bp, Homo sapiens
ggaatcagggatggtttagcataagcaagtcaataaatgtgatacaccccataaacagaattaaatacaaaaatcacctgattgtctcaatagatgaagaaaaagcatttgacaaaagccagcagcrctttatgattgaaatcctcagcaaaatcagcatagaagagacatacctgaatgtaataaaagccatctatggcaaacacacagccaacattatactgaatggagaaaagttgaaagcatttcctctgagaactggaacaagacaaggatgcccactctcaccacttctgttcaacatagtactggaagtcctagcaagagcaatcagacaagacaaagaaataaatgctgtccatattggtaaagaggaagtcaaactgccactatttgctgatgatatgatcagatacctagaaaaccctaaagactttcaaaaagctccaagaactgataaatgaattc

SEQ ID NO: 230707 - DNA, 576 bp, Homo sapiens
actctccttgggtcaactaccagttgttaaagktgtggataggcacttaaggtctttgctctttttatagttcaagagtaacaaggagaggcctactgcaaaggcagtggcagagaggctttcagttgcccctggcggctccgtccagagaggcttgacagctctggcagagagtggctgtaggcccaggcatggaggacctgcctggtgaggagatatgggaatgggcactcatgtagcagtctggtcacttttccatagggtcgctgggtatgctgagcatccactccagtccctagttgtctcaggttttccaatgcctggaagtatcaccagttaaggctgccaaacaacaaagatagcagcctgctcctccctctcagagcttcatcccagggaggcagaggcctgttgccagcccgaacacacctgtaggaggtggctaaagacccctgttgggaggtcttgttcagtcaggaggaatgggatcacggagttggttaaaaaagtagtctggccatgttttcatagagcagctgtattgtgagtccacatcagcccccagtcacctcaaac

SEQ ID NO: 230708 - DNA, 582 bp, Homo sapiens
gttgaaagccaagataggccaaaattcaactgcttgtgccraaaagccaagttatgaaagcaaaggaaaagttcttgaaggaaattaagtgctactccagtgaacacactaatgataagaaagtgaaatagccttattgctgacataaagtaagttttaggagtctggtcagaatatgaaggcaactatagcattcccttaagtcagtctggtcagaatatgaaggcaactatagcattcccttaagtcaaataataatccagaacaaggcctaactcttcaatgctaagaagactgagagaggtgaggaagctgcagaagtaaagttggaagctagcagaggttgcctcatgaggtttatggaaagaaatcatctctgtattacaaaagtgaaaggtgaggcaacaaatgctaatgtagaagctgcagcaagttatccagtcgatctggctaagatcattgatgaagggagctacactaaacaacaggttttcaatgtaggcaaaaaagccttatattagaagacggtattgtctaggtctttcatagctggagagaagtcaatgcctggcttcaaagctt

SEQ ID NO: 230709 - DNA, 587 bp, Homo sapiens
ataataattctaatttttagctttaaacatgagaccttttcttctttctacgatatgcaataaaatttctaatagttgaatgaaagataaaaacaagaggtaaaataatcatatctatacacaatatttcatttatattwtaatagcagatatatcttaatatgctttcataggtttattttgcattgtgaaaggaaaataaaatcttgggaccacagacacactacattttgccaaagggaaaagttcagcttggaaacagtcacgcaaaaacagcgtttcttttattcccaagcagatagctgtaatttcacatgcttactttatcttatgtaaaatgtagttttattgagtgcaagagacatgcgtaattgaccctccactcctttcttttcatgtgtaaaatgtagattcactgggtgctaatcagagcttcacaagaaagtaacaacttgccccattgcctaccaacttaccgccccccaatttttcttccccttccacttgctcttcaatttttaattattaaatttcccaaaacattctttgcaacaagcacaagacatagatcctagtaacttgtgttt

SEQ ID NO: 230710 - DNA, 587 bp, Homo sapiens
ataataattctaatttttagctttaaacatgagaccttttcttctttctacgatatgcaataaaatttctaatagttgaatgaaagataaaaacaagaggtaaaataatcatatctatacacaatatttcatttatattataatagcagatatatcttaatatgctttcataggtttattttgcattgtgaaaggaaaataaaatcttgggaccacagacacactacattttgccaaagggaaaagttcagcttggaaacagtcacgcaaaaacagcgtttcttttattcccaagcagatagctgtaatttcacatgcttactttatcttatgtaaaatgtagttttattgagtgcaagagacatgcgtaattgaccctccactcctttcttttcatgtgtaaaatgtagattcactgggtgctaatcagagcttcacaagaaagtaacaacttgccccattgcctaccaacttacygccccccaatttttcttccccttccacttgctcttcaatttttaattattaaatttcccaaaacattctttgcaacaagcacaagacatagatcctagtaacttgtgttt

SEQ ID NO: 230711 - DNA, 603 bp, Homo sapiens
agactctttaggaaatcatgatggtgaaggatttcttaagtcagaaaaacaaagaccataaaggaaaagattgaaaatgtctgcattagaatttgaaaacttatgcatgatcaaagatatcagaaacaaaatttaaaaagaaaaacaactatctggaagaagacatctgtaatttgttaacaaaaaatgggttggtattcagaatatacaaataatatctaccaattctcacgcctgtaatcccagcactttgggaggccraggcaggcggatcacttgagatcaggagtttgagaccagcctggccaacatggtgaaaccccgtctctactaaaaatacaaaaattaaccagatgtggtggcacgtgcctgtaatcccagccactcgggagactgaggcaggaaaatcgtttgaacctgggaggtggaggttacaatgagccaagatcgtgccactgcactccagcctgggtgacagagcgagattctgtctcaaaaaaaaaaaaaaactaccaattaattggaaaaagaccaataacatacaaaaaaggagggggacaaaagatttggaataggcaaatcatggaacaggtagcccaaaag

SEQ ID NO: 230712 - DNA, 499 bp, Homo sapiens
tacatatttcctctctatcatttcatagctctaactattcaacctgctgtatcaatactagacaaactcatttccacactctgttttatcatgtcaactccagctctaaataaatttatttacaagtcttttaaaccatctggtatcatctatcaaaattatattttctatttgtaacaatccagatccatatattgaaatgcaatattgcattgtccattgtacctrtgttcttagccaccttaagattaatatcttcaaaattgaatgaatgactcatctcccatcctgccgcttccccattccagtcctacaacctagctcctaacaacttagtgaagcaatttagtctgtgtttagactccctgtgtctcttcatttcaataaattttatttcatctaacaagttggttcttcctaaaagctaggggattgattatctttgaataatcttatctgtcaatttcctccctactttggtattcgaaatattaccatt

SEQ ID NO: 230713 - DNA, 499 bp, Homo sapiens
tacatatttcctctctatcatttcatagctctaactattcaacctgctgtatcaatactagacaaactcatttccacactctgttttatcatgtcaactccagctctaaataaatttatttacaagtcttttaaaccatctggtatcatctatcaaaattatattttctatttgtaacaatccagatccatatattgaaatgcaatattgcattgtccattgtacctgtgttcttagccaccttaagattaatatcttcaaaattgaatgaatgactcatctcccatcctgccgcttccccattccagtcctacaacctagctcctaacaacttagtgaagcaatttagtctgygtttagactccctgtgtctcttcatttcaataaattttatttcatctaacaagttggttcttcctaaaagctaggggattgattatctttgaataatcttatctgtcaatttcctccctactttggtattcgaaatattaccatt

SEQ ID NO: 230714 - DNA, 572 bp, Homo sapiens
gtttttcccctcgtggagttacataaatcctttttgaatggtctggcttctcaaaatttttctctttgttagatactatatttttccattaatctgtactattgataatataagtacaaagaggtaccttcagagaattttctggtttccagagatattctttcttttggcttgactgatcttctacacaacatacctatttgccatggacactttgaatattattacatagtttggaaaataatgtccagttgagagtgaagcttgcattacagcctggatttgcttcagagccttttcttgctctggttcctgcttgcaattggtagtctcatgagtgactttgtgatgagttgaagtctcaaaagtcttactgtattatattgacaggtacaaaaacttttcttgactatagagatggcatcttagtgtgcttcagaccactgaaaaccaagcaactttatgtagctaacargcccctaaggttttgtggtatttatttttcattccttatttcaaaggatggaaacttcttttgtaaaggacaatataataaatattttaacatctgt

SEQ ID NO: 230715 - DNA, 572 bp, Homo sapiens
gtttttcccctcgtggagttacataaatcctttttgaatggtctggcttctcaaaatttttctctttgttagatactatatttttccattaatctgtactattgataatataagtacaaagaggtaccttcagagaattttctggtttccagagatattctttcttttggcttgactgatcttctacacaacatacctatttgccatggacactttgaatattattacatagtttggaaaataatgtccagttgagagtgaagcttgcattacagcctggatttgcttcagagccttttcttgctctggttcctgcttgcaattggtagtctcatgagtgactttgtgatgagttgaagtctcaaaagtcttactgtattatattgacaggtacaaaaacttttcttgactatagagatggcatcttagtgtgcttcagaccactgaaaaccaagcaactttatgtagctaacaggcccctaargttttgtggtatttatttttcattccttatttcaaaggatggaaacttcttttgtaaaggacaatataataaatattttaacatctgt

SEQ ID NO: 230716 - DNA, 635 bp, Homo sapiens
tgactttgtgatgagttgaagtctcaaaagtcttactgtattatattgacaggtacaaaaacttttcttgactatagagatggcatcttagtgtgcttcagaccactgaaaaccaagcaactttatgtagctaacaggcccctaaggttttgtggtatttatttttcattccttatttcaaaggatggaaacttcttttgtaaaggacaatataataaatattttaacatctgttgtacagagtggtgctgctgcaactactctacttttgcaatatcaaagtatccatagataatatggaaagaaacgwgcttgactttgttccaatgaagttttatttacaaaatatttagcctgcaggctatagttttccaatccctcttctagttggcataggtcatattgaggcacccaagtactcttgactctttttctcctaaaattcagtcaaaatgatgcagtcgataaggagcaacataatgttttgtggaattctgtaaagttttgtagaccatattatggcagagagcatagccctgaggcaaagttgtgaagttgtactattggtcttactaggtaaaggaaaactgcttctaataatctttgcatattgatatgaaatacatatatatata

SEQ ID NO: 230717 - DNA, 635 bp, Homo sapiens
tgactttgtgatgagttgaagtctcaaaagtcttactgtattatattgacaggtacaaaaacttttcttgactatagagatggcatcttagtgtgcttcagaccactgaaaaccaagcaactttatgtagctaacaggcccctaaggttttgtggtatttatttttcattccttatttcaaaggatggaaacttcttttgtaaaggacaatataataaatattttaacatctgttgtacagagtggtgctgctgcaactactctacttttgcaatatcaaagtatccatagataatatggaaagaaacgtgcwtgactttgttccaatgaagttttatttacaaaatatttagcctgcaggctatagttttccaatccctcttctagttggcataggtcatattgaggcacccaagtactcttgactctttttctcctaaaattcagtcaaaatgatgcagtcgataaggagcaacataatgttttgtggaattctgtaaagttttgtagaccatattatggcagagagcatagccctgaggcaaagttgtgaagttgtactattggtcttactaggtaaaggaaaactgcttctaataatctttgcatattgatatgaaatacatatatatata

SEQ ID NO: 230718 - DNA, 645 bp, Homo sapiens
agctacaaaatagtgaaattaagctggtttacttggtaaataaagtgaataaaatgatggacttatttgattagatattaattaattcaaaggattatgactttgaggatcccagagcacatgagcaggaataatagatgatggctctccaaaagtgagatatttgaaatggagactttggagatggtattgttatcagtgatcatgaattctgtggctcttcaaaagtgagatatttgaaatagagactttggaggtggtatcgttaatagtgatcatgaattctgtagcttgtcctttggcatggtagtcaagagagtgtagaggaaatgttggaactgaaaaaaacaaactcttgtatgaatcctcaacattaatgttgaagacactgagaatgatatcataggtttagtggagaagaggatgaatacataagagattctcaagttttcaatataaagattacaatgaatcagaaggtatgcatattacagcagtgaggagagggcatggaaatggagtttgaaagcatgagcttcaagtrtcacaattttacagaatcaaggtgaagaataactgaaactaaaaaggataacttcttcaacgttggctgtgaggtacatgggatataggagattttaaaat

SEQ ID NO: 230719 - DNA, 595 bp, Homo sapiens
gcctctctgggtgagtcagtgagggagtggtgagtgaatgtgaaggcctaggacattacactactgtaggctttataaatactgcacacttaagctacattgaatttatagaaaatacttgtattccttcaatagtaaattaactttaacatttttatttataaactttttaaaaacattttgacttttgtgatagcattgagctgaaaacataagtatattgtacatctgtatggaaaaaatattttcattatatccttatttcataagcttttttctattttaaaatgtatttacttttactttttaatcttttttgttaaaaaccaagacacaaagacacaycttagcctaggactacccaggctgaggatcatcaatatcactgtcttccacctccacatcttgtcccactggaagttcttcatggtaataacattcatggagctgtaatctcctccgataacaataccatcctctgaaatacatcctgaaggatctgcctgagactgtattgcagttaatttatttttttataagtagaaagattacattctaaaatgataaaaagcatagtataggccgggcacggtgg

SEQ ID NO: 230720 - DNA, 490 bp, Homo sapiens
aagaattgtatatctttgggaaagacatttattaactaacattgacttacaaatcctgtaaaacaggttattaataggaaatattaacataatattatcagaaattaaatggtaagtactttatatatggttgtattttaaaatgtttcaaaraatctgtaactcatttattctaatttactagagcctatattctgatactttataaagaaacaagattatggaagaattagtgttgttctaagaaaagttttagaagacatttaattataaattattaaatgctttaatataaataattattttaaataaaagtaatcttaaatctcaaaattcttaatattaaatttacaaaactattttaagaacacagaaaagtctacttaatcaactcacttggttatctatctcactcagactcatatgtggacatcaagattgaacaatgaaatcaacatcagttgctccagatggactccttagggataag

SEQ ID NO: 230721 - DNA, 628 bp, Homo sapiens
gtgcaaatatatagtattatactacataatggtatgttacttagcagtaatttttttataaactacagccaatagtttataaagatttataaagcttaagtgcaataaatatttttgaactgaactattaatattctataaaacattttcagaatataataaaaattacatttttgtaaaggctatttttgaacaataagatgtgttctacacatacttgcatttttgctttcttgacctaaaccagaaggttaatataagcaacacatttcaactytaaagaagatttcaaataaaaaaaaataccgttacataaaactgcaagatattcattaataaactgtcttttgttgttcatcagtttcatctgtaagtttgacaagttactacaaatgatagatttgagtggcacaggaccgttatgttttcaaaagtctctttcagaaagatttctacatagtaaattgtcactagagacttgtgtttgaattcttcatacttaatgatccatggtgctgcattaaattttatgtaagaaaatagcatactcaaagaagctatctactgtagagtagatctcagttttgataattttatatgaaaatcacctccaaggagtcttaaaagc

SEQ ID NO: 230722 - DNA, 628 bp, Homo sapiens
gtgcaaatatatagtattatactacataatggtatgttacttagcagtaatttttttataaactacagccaatagtttataaagatttataaagcttaagtgcaataaatatttttgaactgaactattaatattctataaaacattttcagaatataataaaaattacatttttgtaaaggctatttttgaacaataagatgtgttctacacatacttgcatttttgctttcttgacctaaaccagaaggttaatataagcaacacatttcaactctaaagaagatttcaaataaaaaaaaataccgttacataaaactgcaagatattcattaataaactgtcttttgttgttcatcagtttcatctgtaagtttgacaagttactacaaatgatagatttgagtggcacaggaccgttatgttttcaaaagtctctttcagaaagatttctacatagtaaattgtcactagagacttgtgtttgaattcttcatacttaatgatccatggtgctgcattaaattttatgtaagaaaatagcataytcaaagaagctatctactgtagagtagatctcagttttgataattttatatgaaaatcacctccaaggagtcttaaaagc

SEQ ID NO: 230723 - DNA, 598 bp, Homo sapiens
agaacatacactttatgacaatattactttaaaaattgttgagacttgctctatggcttatcatggagttattttcagatgaatatataatcagtggctattgggtgtcatctcatttagctgttagatcaaatttggtcaataatgcctttcaaatctgcaatatctctagtaatttgtagtcaaataagtagcaatgtgctcccactatctmattaattctttgtaacaatgcactttgagtaataacagagcacataattgctttattcaaaatgtcttctggaggtcatgacttttagcagaggtaactattttctattttggtctggctttaatttgggtaatagtgtgattgaacatagatatttatgacatttattagaaggttttattactaattttccccagaaaaaaattctaatggaggtgtattggagattagtgattttttaatgttaatgagaaaaatgtattaaaattaacaacaatgaatggagtttaattttctaattttcttttagttctacccattttccctttataaagctatattattgggaatatatagatatcaaataattttatcttacttatg

SEQ ID NO: 230724 - DNA, 580 bp, Homo sapiens
tttataggacgatatacataggttataggcaaatactataccattttatattaagaacttcagaatatgcagatgttgttacccctgggggagatggtggaatgaaacctccatggttactgaggaacaactgtatatatatatwtttttttttgagacagagtttcactcttatggcccaggctggagtgcagtggcatgatcttggctcactacaaccttcacctcctgggttcaagcgattctcctgcctcagcctcccgagtagctgggattacaggcacccgccaccaagcctggctaattttttgtagagacagagtttcgccatgttgggtacgctggtctcaaactcctgacctcaggtgatctgcccccctcggcctcccaaagtgctgggattacaggcatgagccaccgtgcctggccaacaactgtattcttagcatggattttgagcagacaaggacaatcttaattctcaggctgctgatcttgaactacaagttggcttaacattgtagactaagctaaggctgactgagacaaatttacgtattagttggcagctgtaatcgtt

SEQ ID NO: 230725 - DNA, 561 bp, Homo sapiens
tttttggaaaaattcttaactatctctcaacacataaattgatgaagctaaacacaatcacagaggcaacgataaggtamataaatttatttgataatggtgacttatgaaatacatggagtaaaaaaataaatacagggaaatatcaggggaaatgacagtgtactgactcccaaaatgctcttttccatatgagaccactgataaaaattgcctaaacttattttttcagaaatgaactcaaatcttgcaaaaattcaagaggcattcattcaagaaaaatgggtgtctcagtaagaacagtgagctttgtagcatttaactagcccctttccaaccctcctttcagcagttcaacagtaaccttgaaaacatacagacttgtaatcataatgaaaatcaccagcctagtagccactgaaactagaaaaagcagattggatttccctaaagcaccactcctgagaattgtcattacttgacctgtctggcagtttcatggaaacccccattcagaaggagtgtcttcatttcacctatcttagagctcttccagtgttc

SEQ ID NO: 230726 - DNA, 561 bp, Homo sapiens
tttttggaaaaattcttaactatctctcaacacataaattgatgaagctaaacacaatcacagaggcaacgataaggtacayaaatttatttgataatggtgacttatgaaatacatggagtaaaaaaataaatacagggaaatatcaggggaaatgacagtgtactgactcccaaaatgctcttttccatatgagaccactgataaaaattgcctaaacttattttttcagaaatgaactcaaatcttgcaaaaattcaagaggcattcattcaagaaaaatgggtgtctcagtaagaacagtgagctttgtagcatttaactagcccctttccaaccctcctttcagcagttcaacagtaaccttgaaaacatacagacttgtaatcataatgaaaatcaccagcctagtagccactgaaactagaaaaagcagattggatttccctaaagcaccactcctgagaattgtcattacttgacctgtctggcagtttcatggaaacccccattcagaaggagtgtcttcatttcacctatcttagagctcttccagtgttc

SEQ ID NO: 230727 - DNA, 561 bp, Homo sapiens
tttttggaaaaattcttaactatctctcaacacataaattgatgaagctaaacacaatcacagaggcaacgataaggtacataaatttatttgataatggtgacttatgaaatacatggagtaaaaaaataaatacagggaaatatcaggggaaatgacagtgtactgactcccaaaatgctcttttccatatgagaccactgataaaaattgyctaaacttattttttcagaaatgaactcaaatcttgcaaaaattcaagaggcattcattcaagaaaaatgggtgtctcagtaagaacagtgagctttgtagcatttaactagcccctttccaaccctcctttcagcagttcaacagtaaccttgaaaacatacagacttgtaatcataatgaaaatcaccagcctagtagccactgaaactagaaaaagcagattggatttccctaaagcaccactcctgagaattgtcattacttgacctgtctggcagtttcatggaaacccccattcagaaggagtgtcttcatttcacctatcttagagctcttccagtgttc

SEQ ID NO: 230728 - DNA, 577 bp, Homo sapiens
ttataggacgatatacataggttataggcaaatactataccattttatattaagaacttcagaatatgcagatgttgttacccctgggggagatggtggaatgaaacctccatggttactgaggaacaactgtatatatatatttttttttttgagacagagtttcactcttatggcccaggctggagtgcagtggcatgatcttggctcactacaaccttcacctcctgggttcaagcgattctcctgcctcagcctyccgagtagctgggattacaggcacccgccaccaagcctggctaattttttgtagagacagagtttcgccatgttgggtacgctggtctcaaactcctgacctcaggtgatctgcccccctcggcctcccaaagtgctgggattacaggcatgagccaccgtgcctggccaacaactgtattcttagcatggattttgagcagacaaggacaatcttaattctcaggctgctgatcttgaactacaagttggcttaacattgtagactaagctaaggctgactgagacaaatttacgtattagttggcagctgtaatcg

SEQ ID NO: 230729 - DNA, 626 bp, Homo sapiens
actacaatttgggactcagatttaaatttactgtgctttgaagagtaggcaaatattagttgtcccaggtctcaatacttctctttgactgatacatccatctatcaatacatttgcatatgcttctttgtacaaggcctaagatcctgtcagcaatcaataaacatgcattaaatcctctttttccctttaggtttggggaatgtgagtcatacgctttcccaggcatggaaaaggaaaaatattagctaacatttggtggtactttatcattcacatacatttgtcatttggttgttttgtgagataactactgtcagactcagtttattagtgaggaaactgaggactggagaagctgaatgacatctacatgggcattcagatgataaataaataagctggatgggactccaacctggggatctaccttcacatctgtagtcttatacataaaagagcgattrctccccagagactcttctgtttattgctataacacagcttatacccacaagacacaaaaaaagtatttggaaagtgaaaaaagaaacggaatatgttactatataaagcccaagcattactacatatacgattaaagcaacattaaatgactcaaaact

SEQ ID NO: 230730 - DNA, 549 bp, Homo sapiens
gaatttctatagcttgttaaagtcacatcctcagagtttggaaacctctgagctcactatgtctcaggaagatgggaaattcttcttctwcttcttcttccccttaattaggaatacattgtaataataatattttctatgtgacctttgaatacagtagtaaaataacaagtgggggctacttacttttctcagggatgattcatcctgggatggtgtttagacagtggcctttgagtattggatattctataaacatcgtgtgagttgttcttcttgatgactccctttagtggatctccgaagaccctttagaagcttgctgagggtgggatggaggaagaggctaaagcccccataactgactctcagcaactgtcctctctcacagaatctctcttttgcggtgacccttaaaggcacttggcccatctgctacttatcacttgttcatgtacaactatacattaggccaatatattaggttggtacaaaaataaatgtggtttttgccattatttttaatctaaaaaacctgcaattactttt

SEQ ID NO: 230731 - DNA, 639 bp, Homo sapiens
tatcttcagccttgccctcatctcacttctcctccctctctctatccatcagcttttctgcttgtattctcatcacttcctgagaagtgatgctaaatttatataactgatgaaattattttatatacataagttagtgtgtgtctctaagttttatttccatgactttttagagcttccttttaatttmttttatgatattatcttgtggaatcatcttctgtgtaattttaagatccaatttaattttaacctgtgataataagagaaagatcacataaaaagacctcatttctgtgacagcctgaagaaactattttccaatagatttttgtactcaaatacttaattagagatatgtcaagaaaataatagtcattacaaaaatattcaaccaatgttataactgaaaaactctgtaatcacatgacatagagaaatctcagctaacgtttgtaatggttgtcaaggaatggagattatataaatatataaattaaaaatagaaaagcctatagaaattagagcatagagtcaaaaaagggcgtggtaactctaaagcaaatgttaccatctaaaatgctttctaagcaatataagccttcaatacaaatgggtaaacaattcctggtaatttta

SEQ ID NO: 230732 - DNA, 639 bp, Homo sapiens
tatcttcagccttgccctcatctcacttctcctccctctctctatccatcagcttttctgcttgtattctcatcacttcctgagaagtgatgctaaatttatataactgatgaaattattttatatacataagttagtgtgtgtctctaagttttatttccatgactttttagagcttccttttaatttattttatgatattatcttgtggaatcatcttctgtgtaattttaagatccaatttaattttaacctgtgataataagagaaagatcacataaaaagacctcatttctgtgacagcctgaagaaactattttccaatagatttttgtactcaaatacttaattagagatatgtcaagaaaataatagtcattacaaaaatattcaaccaatgttataactgaaaaactctgtaatcacatgacatagagaaatctcagctaacgtttgtaatggttgtcaaggartggagattatataaatatataaattaaaaatagaaaagcctatagaaattagagcatagagtcaaaaaagggcgtggtaactctaaagcaaatgttaccatctaaaatgctttctaagcaatataagccttcaatacaaatgggtaaacaattcctggtaatttta

SEQ ID NO: 230733 - DNA, 587 bp, Homo sapiens
attcatttgtaattataactttttttctttaaatatattggctttttaaattttagaaggttatatacttcygttcagaaaaaaagcttttgtgagacctcatttttcaatttttatttttattccaacttggagactgcaaaagcataagcctgaaaaaactaaaaggtggtgagccagaagatggatattaaacagccaaaattaataaaaacattcacagaaaataatctgcacagaaatcacaacctcttaataaagaaattagcacgacaaatatttcttctagcccaaaacattccttggttagctttcatagaacagattttggatctcctaaaattaagccattaatacctttttcttaagtgtcataaatattgtattacattaattaaaatttaattcttgactctactaatttatattcttcaaccacttgccctctccctatccctttcccctccccgaaacctcatcctggtatttggacaaagtagattatgattacactactggggaactccatttggaaaaaaaatctacaaaaatactaagggaggaagtataataaaagttcaggggtg

SEQ ID NO: 230734 - DNA, 574 bp, Homo sapiens
cggccatctgctcctgagaccgttgctagagaaacaagacaacatccaagttctccasatcatggttttccgggcgccagccaaggcgctccgggggcgtggttacgtgggcgacgcacggagggggcgggtcagaaacaaccgggcggaggcgcaccccagggcgcatgcgtgctgtgcggcgcggtctcagggaaggtggggctatggcagctgctagggaccctccggaagtatcgctgcgagaagccacccagcgaaaattgcggaggttttccgagctaagaggtaccagagaaggcaccggagttctcctgggcaatgcagagggagggtgcttttacgtgccaggaggtttgctggactgtcacttcccgtttacttctcatctgcaggcctatgacgctccccaggagtagctagctaataatccttttgagttttttattcttttcactgtccctgcttgacatgcttgttgcttactttattcttagtagtatagatattaaaaatgagggcggaggaagaagaagaaaatcttactagtgaagttatgcattgattagctcat

SEQ ID NO: 230735 - DNA, 618 bp, Homo sapiens
ctgaaataaatatatagtgaaaaatttaatgttttctttctgggtttcccatttattctccatcatagactgggttctttatatcagtagaaataggcatacaatatgcatacaaagagaaatgtcctaataaagtaaatggaaggtgcatgaaagagaaattctggaagacaaatcaataatatytagcttggatattagagtcacatggtcagaactgattccagacttccaacttactagtaactttgtgttttctcatccataatttgtgaataatatctacctagcagcactgtatgtatgagattaaataatgagatatatgtaaagcatgtaaactagggtctgacacatagcaaatgctcaattttcttaatcttactgttcttgtcatttattattttacgaattgctatttgtagaacttaatgttttacattctgatctatgattcttatggtcggaataatccacaatagtataaatcttggtctatgttgagaatttcttcatacaaacataattatgtagctcttatacaggccaaacctgcattcatttctattagttatatgctagaggtaatgaatttttattatttatttatgtatgtag

SEQ ID NO: 230736 - DNA, 432 bp, Homo sapiens
tctgtgatatagtggttgcttatcttggctttatccatagcaataatcacagagctaacaataaggcaggatattaagtaagcattgttttagagttttatggctagtacagagttgcagttactaccattacaaaatatttttatccatttacatacattttgggagatctattctacctcaaattctatttctcaaggatatagctggagygcttttttgtctaagcctcattcttccacacatggattttcttctgcttaaaaataataaatatgacacacacaaatacattacaaagagcttatttatctcacacttatagggtgcctctgtgtgtcacattgaataataatgctttaaatttggctagagagtgcataaaggaaacttgtcagtttccacaagactcttttctaaacaagtcttaag

SEQ ID NO: 230737 - DNA, 522 bp, Homo sapiens
ttgaaacaccagatatgctcaatcaatatttgtttagcatataaagggtatattgaaaagagaaatgcataatcaaaactgggtgtaggaaaatgtatctaattgtatgcaggatggactgcaatgggaaaaagtattagtcgaggagactagttaggaagctgcgtaatacagaggatgatgctagaaataagaagaaatgtgagaagtataagtcagttaaaaccagtagaattctgaaactgagctgaagggactctaggtcccttggaataaaaaagtgccattcatataaataaggaatgttagatgacaagtcagcctgggaaaattataaacgataattataagaacaatttcaaattttgcatttgagatgccattgataggcaaaatayatgggactcagacttagcagagaagtcaggaccaaagatgcatttatcagattgtatagtaattaccaaagtggcatttaggaatgggaaagcagcttagggctacatttccaaatcatacact

SEQ ID NO: 230738 - DNA, 522 bp, Homo sapiens
ttgaaacaccagatatgctcaatcaatatttgtttagcatataaagggtatattgaaaagagaaatgcataatcaaaactgggtgtaggaaaatgtatctaattgtatgcaggatggactgcaatgggaaaaagtattagtcgaggagactagttaggaagctgcgtaatacagaggatgatgctagaaataagaagaaatgtgagaagtataagtcagttaaaaccagtagaattctgaaactgagctgaagggactctaggtcccttggaataaaaaagtgccattcatataaataaggaatgttagatgacaagtcagcctgggaaaattataaacgataattataagaacaatttcaaattttgcatttgagatgccattgataggcaaaatacatgggactcagacttagcagagaagtcaggaccaaagatgcatttatcagattgtatartaattaccaaagtggcatttaggaatgggaaagcagcttagggctacatttccaaatcatacact

SEQ ID NO: 230739 - DNA, 621 bp, Homo sapiens
ttacaagttggtttattttttagctactgaacacattggggtaaaatttagctgtataaatgagctttggatagtcaattcagtcaattttctaacagtgtatttaatcatcarttaacataaaggtagctagatatacagaggctttatagcagctcagtttccacaacttgctattttaaccttggggaagttactgaatctcatgacctccctcttttcttcacttataaaataggaatattagtaagcctattataatgattaagttagataatttatataaatcactttgtagtttgcttaatgcagagtaaggacaaaatgaaaaatcattcactcattcatctacttatgtattacttgaatgaatatttattcatcacctattatgcaccggatactgttttagatgctgggatgacagtagcaagaaagtcaggcaaaattttcattttatagagtttagctgtaaagaataaaatagacaataaagacaagaaaatattacataattttaattagtagtgagtaccataaaaataataaagtgaggtaaaatgaaaacaacgagagagaagggggcactatttaaaataagctgtacagtaaatatctctg

SEQ ID NO: 230740 - DNA, 477 bp, Homo sapiens
ttttactaaaaactaaaaagctaaaacttttaaattgactttctaaagaatgtaatttaagaccaaagatttttgcagcttaataccaaggacaataattatttttgctacaataatcacaagcctatcattatcctcattatcattttcatcatattaccattagtataaatgtttcttcaagtgtcttttatgatttccaatcattcacattgactttgcttaattctaataaatgggatatatggttaaaaatatgtgagacgatccagtaaatttaaatatrgattaaatattagattagattaaaatattgttaattttgtaagttatggtgataacagttcatacataaaatatgttctttcagttagaaatgcacagtgaagtatttatgggtgaaattatgcagtgtttagaatctgcctaaatacttcaaaaaaaaagtgggaaactaaatgaaataagattgtcaaa

SEQ ID NO: 230741 - DNA, 554 bp, Homo sapiens
taaaatttgttgtgaggataaaataaaattaaatgacatacgtaaagtcctcaataaataatagctcttattaccattgctatggttactatcactatttctgtattttcttttgccattcctcaygcttgaatatgaatctcatgggtagagtttcccaaagcatgatatgtgtagtactactaaaggcaagattttgggtgcatacagacaaaaaaataatttagtagtaacatatttatattaaagtatatttaaaaatttttaactagcacatcaacctagtgatgtaacagctactgttattactaaacaaatttaattaagttgaaaatcatagtatattttcagaagcataatagtataggtggtatgtgaatagcataatcatgaagatggcacataaataactaaagtttggaaaacaatgaaataaagcgtaaacaactgctttcacaacctaaggagtggggaagtagagtcacattttgaaagaagcaaatctttcacctgctagattataaattcctgaggacacatagtcttcatctagg

SEQ ID NO: 230742 - DNA, 554 bp, Homo sapiens
taaaatttgttgtgaggataaaataaaattaaatgacatacgtaaagtcctcaataaataatagctcttattaccattgctatggttactatcactatttctgtattttcttttgccattcctcatgcttgaatatgaatctcatgggtagagtttcccaaagcatgatatgtgtagtactactaaaggcaagattttgggtgcatacagacaaaaaaataatttagtagtaacatatttatattaaagtatatttaaaaatttttaactagcacatcaacctagtgatgtaacagctactgttattactaaacaaatttaattaagttgaaaatcatagtatattttcagaagcataatagtataggtggtatgtgaatagcataatcatgaagatggcacataaataactaaagtttggaaaacaatgaaataaagcrtaaacaactgctttcacaacctaaggagtggggaagtagagtcacattttgaaagaagcaaatctttcacctgctagattataaattcctgaggacacatagtcttcatctagg

SEQ ID NO: 230743 - DNA, 560 bp, Homo sapiens
ttgctatttaacctatcaaaraattgtgtcttacagtattattcaaatgtagtgtgtaaagacttatactattggtcctaagcactactggttgttttaggctttttctctttctctgtagctactttgcaagcattatcttcatgtttacagcattcaatctaattagcccatgcacaatataatttcaattcaaaaggagaaaagtgaattttgacccacgttttattattaaatggattccctgccctgtatcagcctaaggtagatctgttctcatttgtctttattcttcatgataagaaaggagagagaaaaagaaaggtgaaaaacggggctcaagaaaatagaggagggaaggactgatcatcccttccaatagtggaaactgaaagttgtctgttaactgtagcccttacatctgtggctaagccaacacctcaggccctgtcctgtggcatctccttcaccgtgattgatgcaattctcctttagtcaaaaaattctctttaattcagtacatgtctacaatgactcaggatcctcagatgtgatcatgg

SEQ ID NO: 230744 - DNA, 497 bp, Homo sapiens
ttgctatttaacctatcaaagaattgtgtcttacagtattattcaaatgtagtgtgtaaagacttatactattggtcctaagcactactggttgttttaggctttttctctttctctgtagctactttgcaagcattatcttcatgtttacagcattcaatctaattagcccatgcacaatataatttcaattcaaaaggagaaaagtgaattttgacccacgttttattattaaatggattccctgccctgtatcagcctaaggtagatctgttmtcatttgtctttattcttcatgataagaaaggagagagaaaaagaaaggtgaaaaacggggctcaagaaaatagaggagggaaggactgatcatcccttccaatagtggaaactgaaagttgtctgttaactgtagcccttacatctgtggctaagccaacacctcaggccctgtcctgtggcatctccttcaccgtgattgatgcaattctcctttagtc

SEQ ID NO: 230745 - DNA, 534 bp, Homo sapiens
aaagctcagaatgcaagggaatataatctaatctaggagatcgtgggaaatatcactggggaatttggaactgaaagaaaaataagatttgattaggggaaattgaaggatcagggagtcaggcggagaagaatgtcccggcagatgagacactatgtaccaagcccgagtttgacagagagcgtggtttacagaaggaatctaaaaggtgtagtttctgtagcagaagtgtaagggtgttactcgtaggaggcctctattgaactcttttccagtgacgtagtgtgtggtctttaagtggctttgcartgatagtaagatcagcattgcattactgaatgagctcctttagtaaacgtggatatgtgctttctgaatctatttgtttgtttttcccaagtcataaacagtgaatcaagcaaatgaaacataatcaagcttggatagtatcttccactaatttccttggtcttaagtaagactgacagtaaactgatggtcaacctgttcaatgggctttaacaagtagtagcc

SEQ ID NO: 230746 - DNA, 537 bp, Homo sapiens
tattacagtacaaagaagggtgaggacaggaagcagtggtgatcttgctctttttggaagagtttgtgtctgtccttttaaagtcaggtatgattgataggaaagtcaagtactggcatcctcagattggagaggttttattttattttatttttttyaatggagtcttgctcttgtcatccaggctggagtgcaatgccacgatttcagctcactgcaacctctgcctcccgggttcaagcaattctcctgcctcagcctcccaagtagttggattacaggcacctgccaccacgcctagcttaatttttgtatttttagtagagacagggtttcaccatgttggccaggctggtcttgaactcctgacctcaggtgatccacccgcctgggcctcccaaagtgctgggattacaggtgtgagccaccacacctggcctgagtttaacataaacaaagaaataaaaataatataatctctcaaaatagcaaagaacagggttgtctaatcaaaatatataactatttatttttaat

SEQ ID NO: 230747 - DNA, 537 bp, Homo sapiens
tattacagtacaaagaagggtgaggacaggaagcagtggtgatcttgctctttttggaagagtttgtgtctgtccttttaaagtcaggtatgattgataggaaagtcaagtactggcatcctcagattggagaggttttattttattttattttttttaatggagtcttgctcttgtcatccaggctggagtgcaatgccacgatttcagctcactgcaacctctgcctcccgggttcaagcaattctcctgcctcagcctcccaagtagttggattacaggcacctgccaccaygcctagcttaatttttgtatttttagtagagacagggtttcaccatgttggccaggctggtcttgaactcctgacctcaggtgatccacccgcctgggcctcccaaagtgctgggattacaggtgtgagccaccacacctggcctgagtttaacataaacaaagaaataaaaataatataatctctcaaaatagcaaagaacagggttgtctaatcaaaatatataactatttatttttaat

SEQ ID NO: 230748 - DNA, 555 bp, Homo sapiens
tgccatttaggacattaaattgccaatggaaataatattcagattttataacatttgcagttgaaaaagtagatacatgtatccaagttgctctcaacatacttaaagttttccaataactgaattaaatatcagtttatcagtttaatataaacaattagggtaaatgaaaataaaatttcagytctttggttccattagccatggttcaggagcagaatagtcacctgaggctagtgacaacgcttttggatcacaggaaagaagaaaaaaaatcaaaataatttttcttggtcacatttagctccttttcttccaggatgattacggagctaggaatttcctacgaagctgggtgataaaaggacattggacaaaaacacagatagcttcattctataccaggatccatcactgattagctgtattatatttgtctctactgtaatttgaggagaatgatacctgcttctctatcttgttgggttttacagatgatgtattgaaagttcaataaaatctataaacaatagatctctgtggcttgaatggtcc

SEQ ID NO: 230749 - DNA, 524 bp, Homo sapiens
tggcaatataattttgactccttttaaaactgtagcttatatcataagtctatttgatgttgttttgaagttgtcatgtacattttgtcatacaagtttttaatgactgtttttatggggttgtgccccaagttacttattcattcccatgttatcagatattttgttctttagctttttttttttttttttttacattataactaatgaggcaatgtgtcttgagtattttgaattaactctctaraatcgattcttggggaggttatttactttgaagtgatggacagagtgtaggagatttatgagtgaactcttgtctgatttggaaatatagagttgtttaggctaggtattaccaacccaaagttgacacttgagtcacctaagttcttctctactccagagacttggccctgcctggcctgatcccaggaaaagagattttagggattacagaaatgggaacaagttgtgggtctgagcacagcatgcaaattaattcaacacagcccctgggacag

SEQ ID NO: 230750 - DNA, 620 bp, Homo sapiens
cccaaatagtgatttatcaggctttattgtggggaacctaaagtggattgcaactgctatggtccctttgaagggagctggtgcaagattttccatgcctaatcacactcattttcccttgctctcccaatgacctcccatctttccttctatttggtctgataaacaccaacaataggatcctttctgcagcttccatcctaacttgtattctagccttaacactgcaacaaactcactgttacctagaagtcaattgacttccctgaatgttagcttctttagctgtaaataagtaattgtatgaggtgatggttaaggtgatttactaattttacaattctattattttatgaatagaccctagttaggatagyttgaaatagatacttaatccactattattctctcttctaagatatagttactagttgatcatacttttccttaaaggctgaactgaattctctgatatcagcaactaaacatctcatatttgtcagtatgaacatccactgggtgcctgttatttaaccaggtagaattcttagctgtgattgaaaatctaggtatctcttctggtactatcacttggatgagtaaagtttgaaaaccattaa

SEQ ID NO: 230751 - DNA, 502 bp, Homo sapiens
ttagctaatgtgtgctgggctttgaacttagatgatgggttgatatgtgccgcagtttttttttatttcaaatttttattttaagttccaggttacatgggcatgatgtgcatgtttgttacataggtaaatgtgtcctattgtggtttgctgcacagatcatcccaacacccaggtattaagcccagcatccattagctctgcatcctgatgctctcyctcctcccacctcagtgtgtgttgttcatcccgatgtgtctatgtgttctcatcattcagctcccatttataagtgagaacacgtggcatttggtatttctgttcctctgttagttctctaaggataatggcctccagctccatccatgtccctaaaaatgacatgatctcattcctttatatggtggcatagtattccatggtgtatatgtatatatgtactacattctctttattgagtctatcacagatgggcatttagattgattccatgtctttgcta

SEQ ID NO: 230752 - DNA, 538 bp, Homo sapiens
acaggaaactcatgatatagatattattttctccattttgtggtggagaagacagaatcagagaagttaagtactttttctaagaacacagagtcagtaaagaaataaamccagcttttgaatctttgtacacttaccccagaatctctcctctctctcctagagcatacagcttttgtatagatgctgacaaaatatggggtgatatagatgatgttcatggaaatgaatttattgtctttgcaataatagtctcttgcccttaccttttatctctcattttttcccagttcatttaacaagtctattcaccagttacaaaatcatagtaatgtggtacaggcacaacattcaacagtaagaggaagtcatgttatcaggaaggtaagaaacatgccagagtatatatatagagatctattaggtcaggtgatatcttaaatcagtaagaaaaagaaaaaaatgattggcttactatttagaaaataataaactaagatcccaactgatcccataagccatacaacaaaatgaattc

SEQ ID NO: 230753 - DNA, 607 bp, Homo sapiens
tttaagaacctcaaagaggccgggagctgtggctcatgactgtaattccagcactttgggaggcagaggtgggtggattgcttgagcccaggagtttgagaccagccagggcaacatagtgaaaccctgtctctacaaaaaatacaaaaattagctggatgtagaggtatgtgcctgtactccagactacgtggaaggctgaggtcagaggatctgttgagcctggcrgcaggccgaggctgcagttagctgtgatggcaccgctgtactccagcctggaaaaaagagggagaatctgtctcaaaaaaaaaaaaaaaaaaaaattccacccccaaaaaccacaaaaccccaaaacaaaaaaataaaaacctcaaagaacttcatgtctttgacttataatgctccttccttaaatatactctatgattttagttgaaatttcaaacaaacaacaacaaaatataaatatataatatacatatatttgtattttgatattttaaaaaagctttttattattgacattttccatcaacataaaagtagaaagagtattataataaatctctatgtactcactacccagttttgaaaattgttaatattt

SEQ ID NO: 230754 - DNA, 607 bp, Homo sapiens
tttaagaacctcaaagaggccgggagctgtggctcatgactgtaattccagcactttgggaggcagaggtgggtggattgcttgagcccaggagtttgagaccagccagggcaacatagtgaaaccctgtctctacaaaaaatacaaaaattagctggatgtagaggtatgtgcctgtactccagactacgtggaaggctgaggtcagaggatctgttgagcctggcggcaggccgaggctgcagttagctgtgatggcaccgctgtactccagcctggaaaaaagagggagaatctgtctcaaaaaaaaaaaaaaaaaaaaattccacccccaaaaaccacaaaaccccaaaacaaaaaaataaaaacctcaaagaacttcatgtctttgacttataatgctccttccttaaatatactctatgattttagttgaaatttcaaacaaacaacaacaaaatataaatatataatrtacatatatttgtattttgatattttaaaaaagctttttattattgacattttccatcaacataaaagtagaaagagtattataataaatctctatgtactcactacccagttttgaaaattgttaatattt

SEQ ID NO: 230755 - DNA, 574 bp, Homo sapiens
caggagatccccttgtgaactcactccattaggsccttcacacacagccacgtggagtctcagcagagcagccactcaggcatgcatggagacccaagagctttagctactccagctttctgggtgtctgggcaaaagtagctgcgactttggcaaagctggaggttagacccccaaacataccccaggaggttagactcccatacataccccagaaaagaggctgaatccagcgagatcagcagagaaggtctacaggccccacttccacagcgcctcacaggataagacccactggcttggaattccagctagccaccagtagcaacattgtgcctccctggtacaaagctcccaggaggaggggcaggcccccatctctgctgtttgggcaacttagccattatggcctttgggctttggagagtccaaactaaccaggggccaaagagatcccccagcacagcacagttgctctattaaaatgtggccagactgctgctttaagttggtccccgatcccattcatccttacaggcgggacctcccaactggggcctccagccacacctgc

SEQ ID NO: 230756 - DNA, 567 bp, Homo sapiens
tccccttgtgaactcactccattaggcccttcacacacagccacgtggagtctcagcagagcagccactcaggcatgcatggagacccaagagctttagctactccagctttctgggtgtctgggcaaaagtagctgcgactttggcaaagctggaggttagacccccaaacataccccaggaggttagactcccatacataccccagaaaagaggctgaatccagcgagatcagcagagaaggtctacaggccccacttccacagcgcctcacaggataagacccactggcttggaattccagctagccaccagtagcaacattgtgcctccctggtacaaagctcccaggaggaggggcaggcccccatctctgcygtttgggcaacttagccattatggcctttgggctttggagagtccaaactaaccaggggccaaagagatcccccagcacagcacagttgctctattaaaatgtggccagactgctgctttaagttggtccccgatcccattcatccttacaggcgggacctcccaactggggcctccagccacacctgc

SEQ ID NO: 230757 - DNA, 466 bp, Homo sapiens
ttgggaggccaaggcaagaagatggctggaggcccagagctcaagactagcttgggcaacatagcaaaacctcatctcaactagctagctaagtaactaactaaataaatatctagctaacattatatttcacacagtctttatataaagtctctactataatacagatcactgggaatgagaagttagaaatctggaatgaccatgatattcacacgcttatgatccagaaggtagtatctgtatcctcaggccagatcagagtttctcaaccatggcactactaattattcattgcaggtgactgcttgctgtcttgtggatgtttagcaaaatctccgacatctacgcctactagatacccatagtaacttcccacccctcccctgacccagctgtgacaaccaaaaatgtctccagacactrccaaaaattctttggggggcaaaattgcccccagttgaga

SEQ ID NO: 230758 - DNA, 521 bp, Homo sapiens
gccataaagttttaaaatacaattatgatttttaaattgcattatccaaagtgggacatcatagcatgcaatgtctcaagtttcagtaacttaacgtttactgatcatgtagtaggcaggtccccttagaatccatgacccccgtacattcttattatggcataattttaaaagggtatgttatgtacgaactaattaaaagtgaattgggccaggcacagtggctcacacctataatcccagcactttgggaggctgaagcggatggatcacctgaggtaaggagttcgagaccagcctagtcaacatggtgaaactcagtctctatcgaaaagtacaaaaattagctgagtgtggtggcacgygcctgtagtcccagctactggggaggctaaggtgggggaattgcttgaagcctgggaggcagaggttgcagtgagtcgagatcgtgccactgcactccagcctaggcaacagagtgagacactgtcaaaaaaaaaaaaaagtgaattgcatatggt

SEQ ID NO: 230759 - DNA, 544 bp, Homo sapiens
catacaaataggaaaagaagtcacgttaccccttgtcactgatgatatgattctatacatagaaaaccctacaaattccaccaaaagtctcctagggaatacataatttcagtaaagtttcaggatacaaaaatcaatgcacaaaaatcagcagcatttctaaatcccaataatgttcaagctgcaaagcaaatcaaacacaatcccatttacaatagccacaaaaaataacaaaatacccaggagtacatctaaacaagaaggtgaaagatctttacaagaagaagtacaaaacactgataagagaaatcatagatgacacaaaccaattgaaaaatatgccatgctcatggattggaagaatcaatatcattaagatggccctactccatgaaggaatctacaaattcgatgctattcttaccaaactaccaacgtcayttttgacagaattacaaaaactattccaaaatttatatgaaaccaaaaagcccaattagacaaagcaatcctaagcaaaatgaacaaagccagatgcatcaca

SEQ ID NO: 230760 - DNA, 405 bp, Homo sapiens
tgttggcggggagtggggggaaccttataaagggctttgagataaaacctgaagctcactccaagctgttaaagaaatggttaacatttaaacaccagagaaagccaagttgagctaagcaaagaaagamtaatcaatataaatgatcattggaaaacatttcaaaattttggagaattgctcatttgtaacgtgggttgacagctaattagcagcagaaaattctgccatccatgttgaatattctgtcatacttcatactccttttctgttcctttaaaaaaattctcagttgcctgggaagtaactcatgttactgtttcttcctgtcccctgccccaccctgtcacaaaattgccccttcctgtcacaaaaaattgtgactgagtgcacattcctacttaa

SEQ ID NO: 230761 - DNA, 405 bp, Homo sapiens
tgttggcggggagtggggggaaccttataaagggctttgagataaaacctgaagctcactccaagctgttaaagaaatggttaacatttaaacaccagagaaagccaagttgagctaagcaaagaaagactaatcaatataaatgatcattggaaaacatttcaaaattttggagaattgctcatttgtaacgtgggttgacagctaattagcagcagaaaattctgccatccatgttgaatattctgtcatacttcatactcmttttctgttcctttaaaaaaattctcagttgcctgggaagtaactcatgttactgtttcttcctgtcccctgccccaccctgtcacaaaattgccccttcctgtcacaaaaaattgtgactgagtgcacattcctacttaa

SEQ ID NO: 230762 - DNA, 539 bp, Homo sapiens
aagcttctagcgctcatttttccaacaaagatagccaaataacacacaaacaatcatgttttaataaaaayaactaaagaagagtggctgagtatggcaaaggagtaatagaaaccccagtgaacacggaaactgaggttgaccacacagagagcaaaaggaaacacctggtcttcaccaccccacctcccaaccagaatcagctagaaaccaggaggaacctctttttatggtgcaaaggtagacaagaggatcccagtaactgccatcaactctttggacacctacacttctcatcactggggtccccctgaagtcctcacatgcactaagtccagctgagggagctgcctggagtctgcaaatctgtgttccccccagagaaggagctgccactaggccccatcccctgtggcctgcatagctactgtcttaccccatttcggaactggaactactgctggagtgtcttgctccaagggagagtagccatggctcttgtccatccctgaggctaaaccacctttgatccatccctg

SEQ ID NO: 230763 - DNA, 566 bp, Homo sapiens
agacttcttaccttggctttcagagttctttatgacgcctaacttcacctccactattcttatcacattccgggagtgcctgctacaatgagcttctcatatgccaaaaagagtggcatatgctctgtaaggctgaggagagagttttttgggaaagagagcatttcaggatcaaacatgtcataccacacctgcacctacccacttgcttgagcccagccctctcagttctatttcacccagaccccagggagcttaatgcttgagtaaggagttggtggactaggtgacctttggggttccatctggactaaaaatagaacagcaggctttctatgttcacttctgcccatgtctgtggacagtcctggatggagtaaggatcgctttctttatatatcacctaaagaccawgacatttctctctaaaagccttccagccctcagaagtccatatacacaatctctctctcagactaagggaggtacgtaggggccagtgaaggaatgaagcagagtgaagctcttagggatggtgtactcctcaagaacttttatacagactg

SEQ ID NO: 230764 - DNA, 566 bp, Homo sapiens
agacttcttaccttggctttcagagttctttatgacgcctaacttcacctccactattcttatcacattccgggagtgcctgctacaatgagcttctcatatgccaaaaagagtggcatatgctctgtaaggctgaggagagagttttttgggaaagagagcatttcaggatcaaacatgtcataccacacctgcacctacccacttgcttgagcccagccctctcagttctatttcacccagaccccagggagcttaatgcttgagtaaggagttggtggactaggtgacctttggggttccatctggactaaaaatagaacagcaggctttctatgttcacttctgcccatgtctgtggacagtcctggatggagtaaggatcgctttctttatatatcacctaaagaccaagayatttctctctaaaagccttccagccctcagaagtccatatacacaatctctctctcagactaagggaggtacgtaggggccagtgaaggaatgaagcagagtgaagctcttagggatggtgtactcctcaagaacttttatacagactg

SEQ ID NO: 230765 - DNA, 566 bp, Homo sapiens
agacttcttaccttggctttcagagttctttatgacgcctaacttcacctccactattcttatcacattccgggagtgcctgctacaatgagcttctcatatgccaaaaagagtggcatatgctctgtaaggctgaggagagagttttttgggaaagagagcatttcaggatcaaacatgtcataccacacctgcacctacccacttgcttgagcccagccctctcagttctatttcacccagaccccagggagcttaatgcttgagtaaggagttggtggactaggtgacctttggggttccatctggactaaaaatagaacagcaggctttctatgttcacttctgcccatgtctgtggacagtcctggatggagtaaggatcgctttctttatatatcacctaaagaccaagacatttctctctaaaagccttccagccctcagaagtccatatacacaatctctctctcagactaagggaggtacrtaggggccagtgaaggaatgaagcagagtgaagctcttagggatggtgtactcctcaagaacttttatacagactg

SEQ ID NO: 230766 - DNA, 585 bp, Homo sapiens
caatgctcacaagtcaattaacagttaactagtaactctctgtcacaggatataaacagcaaagtgagattgaactagaaccacttatcaagggagcctgaagcccaagtgctagaacagtccacattccccacagtgccctggctctaagcaaagattcaggttcactttgctattgaggcccagacaacaactaaaataatctttgagaaactaatctgtagctggtgtttgtatayactattttaaaatatttatctttacctaaaatttgtacaatgtgagtaatatatttatttaatattcgcatgtctattttaaagtaatgctttctagaaaagctaagaagcagggttgtgtggtacacactgcctctgtctgtgatatgcacatgaggacaacttggctggttaggcacagaagcataatttttcccctgaaggcaaagtccctgaggaagataaccaacctctaacagctggccttgggaacccaattcttaagaacaactgcaaacttcaaggtaatatcattgattttttgttctcattatttcctgcaaataattattatctactatgtgat

SEQ ID NO: 230767 - DNA, 585 bp, Homo sapiens
caatgctcacaagtcaattaacagttaactagtaactctctgtcacaggatataaacagcaaagtgagattgaactagaaccacttatcaagggagcctgaagcccaagtgctagaacagtccacattccccacagtgccctggctctaagcaaagattcaggttcactttgctattgaggcccagacaacaactaaaataatctttgagaaactaatctgtagctggtgtttgtatacactattttaaaatatttatctttacctaaaatttgtacaatgtgagtaatatatttatttaatattcrcatgtctattttaaagtaatgctttctagaaaagctaagaagcagggttgtgtggtacacactgcctctgtctgtgatatgcacatgaggacaacttggctggttaggcacagaagcataatttttcccctgaaggcaaagtccctgaggaagataaccaacctctaacagctggccttgggaacccaattcttaagaacaactgcaaacttcaaggtaatatcattgattttttgttctcattatttcctgcaaataattattatctactatgtgat

SEQ ID NO: 230768 - DNA, 585 bp, Homo sapiens
caatgctcacaagtcaattaacagttaactagtaactctctgtcacaggatataaacagcaaagtgagattgaactagaaccacttatcaagggagcctgaagcccaagtgctagaacagtccacattccccacagtgccctggctctaagcaaagattcaggttcactttgctattgaggcccagacaacaactaaaataatctttgagaaactaatctgtagctggtgtttgtatacactattttaaaatatttatctttacctaaaatttgtacaatgtgagtaatatatttatttaatattcgcatgtctattttaaagtaatgctttctagaaaagctaagaagcagggttgtgtggtmcacactgcctctgtctgtgatatgcacatgaggacaacttggctggttaggcacagaagcataatttttcccctgaaggcaaagtccctgaggaagataaccaacctctaacagctggccttgggaacccaattcttaagaacaactgcaaacttcaaggtaatatcattgattttttgttctcattatttcctgcaaataattattatctactatgtgat

SEQ ID NO: 230769 - DNA, 585 bp, Homo sapiens
caatgctcacaagtcaattaacagttaactagtaactctctgtcacaggatataaacagcaaagtgagattgaactagaaccacttatcaagggagcctgaagcccaagtgctagaacagtccacattccccacagtgccctggctctaagcaaagattcaggttcactttgctattgaggcccagacaacaactaaaataatctttgagaaactaatctgtagctggtgtttgtatacactattttaaaatatttatctttacctaaaatttgtacaatgtgagtaatatatttatttaatattcgcatgtctattttaaagtaatgctttctagaaaagctaagaagcagggttgtgtggtacacactgcctctgtctgtgatatgcacatgaggacaacttggctggttaggcacagaarcataatttttcccctgaaggcaaagtccctgaggaagataaccaacctctaacagctggccttgggaacccaattcttaagaacaactgcaaacttcaaggtaatatcattgattttttgttctcattatttcctgcaaataattattatctactatgtgat

SEQ ID NO: 230770 - DNA, 583 bp, Homo sapiens
atgccagagacgtggagtcatgaggaggtcctggctaagaggccattcatttctctaatatctgaaagaacaggataattttgccacttcatgataaaccctccctggagttctgcacgtgtctctctgatgcctttaaagggcatccaggttcctgggaagagactcgtgctgtttcttacattccccctggctgggccagcactgggaaattccacaggggagaagagaggatacagaacaagatggtctggttttgaagatgagaaatggagatagaggttgtgccttgttgataactacctgaaaatacctccaaccatgtttctctgtcttctaggggtggtgggaatattgggaagctggtgccagacggtgaagtgaggggttctttggggcctgccaagccatcaggggaattaccctaggcccagtgagggtgcattgccagggcaggaggcaacatcattgtcagaaacagcacctcatgcccaggcaggcattggggcacatctgaactgaagggtaaagctaggccagaattggatatccaaggagwgcagaggcaaatagtgagggggtt

SEQ ID NO: 230771 - DNA, 547 bp, Homo sapiens
tagaaccctgattatgaccatcccctgaacccagacacctgcacacacttccagaagacttccacattgccctgtcccaggcctgcttgtcctaaatagatcatcgtggagaggaattaattcgtgacttcttgttcttttccagggggargttgactcaactcagaaaaatggggcattaatgctgttatttaatgtcatttatcaatgcagcattatgattaggagttcagattttaaagacagtcaaacctaagtttccctaagtttcactgtgccacttagctagctgtgtgggcaacttatgtagaccacattttctctgactgagagtagaacagtggttaccagagactggggaggggataaaagaggagtacatagggaaagattgatcaacaggcacaaagtcacaattagatgggaggaataagttctgaggttctagtgcacagtagggtgacaatgattaacagtgagacatgatatattacaaatagaagacaggtttttgaatatcctcaccacaaagaaatgataaatatgt

SEQ ID NO: 230772 - DNA, 565 bp, Homo sapiens
gctggtctggtttgtatggttcccagagcacctaaggagtaatggagaatacgcaggaaagtggagtggagactgcattgtccaagggttcacagcaagcattggtagaaccagaagcagaatgcaagtttcctgactcctggaccataccaggaagcagagtcaataatcagaacagcagtcatggggcatgatgaagaagctgagtyagagactcttcttcatctggttaaatcccagtgacccagggcagatataagctgggaaccagaaaacacttgtcagttttattggtttgaagagaatgaagtgatctgattcctttgggaacacagggattaggaaatggtttgaccatcaagatgatggtaaatgaccatcttaaatataatggaaaccagaaattaatttactttttctaagccacataggtaggaatttgcctgatttcaaagtcagtgtttttcccacttaatttaaattctcctttgtctggtacccccattctgggtgtatactatactccatacagtctgtgcatagctctgtattttacaaccatctt

SEQ ID NO: 230773 - DNA, 283 bp, Homo sapiens
taataaattaaaacatacatcagtgaaaaatacttatccacctagagagacattaagaaaggaagaaggaaacagaggagttacaatacaaccagaaaacaaacaaaattgcagaaataagtttttacttaataataacactgaagttaaatgaactcagttctcctattaaaaggcacagagtgggygaatggataaagaaacaagacccaagtatgtattacctgtaagaaacccacttcacttgtaaagacatcatagactgaaagtgaagagaaaaagt

SEQ ID NO: 230774 - DNA, 593 bp, Homo sapiens
tttaaaaattttgtactttaatctttgtttaaattgacctgaaaacctgaaggacatcattaaaagttgagtgttaaacaacaagggagtgtggatttgtttagacttacctggttttaatgagaaaatgacccaatgataatgtatatgtaattaagatttcatttgcttccctatacaccrtgagagttaataaatataatcctctatgggcaatttctttaaatcacaagaatattggtccctgagggagtgtgagtgatcgagcagttccaggtaaggacatttccttctttgaaaagtctattactcttatttcaaatggatacataccatccacttagacatgtggcagcaggccagataattcctctgatactcatgccagatggcagtgaagtcaccagattcactcagcactggtctccagttccccaggacatgcatcactcactacagccaataacttggtggatgaatagagcagaatgtggctatcaggttttcttgttttgtggggcaaaccacatccaaaccgtagtactcataaaagttaaagaggcagggcaggcgcacttccagaagctcagcac

SEQ ID NO: 230775 - DNA, 626 bp, Homo sapiens
tctggctttgttcacaaagattggtagaatttctatatgccaacagtgaacatgctgaaagaaaaattaaaaaagcaatctcatttacagtagctacataaatacatagaaatacatttaaccaaggaagtgaaagatctctacaatacaaactatacagccaggtgyggtggcacatgcctataatcccagcactttgggaggctgaagcgggtggatcaagaggtcaggagatcgagaccatcctggccaacacggtgaaaccccatctttattaaaaatacaaaaattagtcaggcgtggtagtgtgtgcctgtagctccagctactcaggaggctgaggcaggagaattgcttgaacccaggagacagaggttgcagtgagccaagactgagccactgaactccagcctggtgacacagtgagactccatctcagaaaaaaacaaacaaacaaacacacaaacaaaaaaaactataaaatgctaatgtaaaaaattgaagaggacaccacaaaaaaaaagagaagataccccttgttcatggattggaagaattaatattgttcttccatactacccaaagtgatttacagattcagtgcaattcctattaaaataccaacg

SEQ ID NO: 230776 - DNA, 494 bp, Homo sapiens
aaagaaacctaaaaggactaaataagaaaataaatatccctctctaggagaaaaaatacctaaagttgtttcatcccttgctgagaggcaggaaaaggaggaatatgccatagacctcaagaaataaggaaaaaatcacaakgctggttcacattgaaccaaccctcctaggctagaatgtgacttgctttggtcaaggccaagttagaagtgttatgccagcagaatcttgaagagtgcttgcacaacggggcttatcttttaaaaaccttctgtattcaagcccagctaccattaaataagatccagaggccatattgaggaggcctggaagatgaaacatcatgtgaatataaaagccacatagagagacatataaaggccccagaaataggagagagggaggttatttgggaatttccagcccagcccagctaccaggtgaattaagccacataagcgatctcaatcaatataatatggagcagaactgc

SEQ ID NO: 230777 - DNA, 629 bp, Homo sapiens
gccagttacactctagaatcatgactactactggcagccattcttttaaccacttgaagggggttggtgtgtggatggtgctcagataaagaggggctggagggataacccaacagatgcacactatgaaagttgctcacgtttgtcttaaatttcttgttgaaaaaaataaagctattctttattatattttatttacttgaaatttcagaatagatttctaatgtagattttcattaggcattgcaacagaatggtaagagatgggtaaagaggcaggacatgttcaccgcagcttttcatattatacttgtagaaaattacatagtctactaaaaattatttgttaaaatttcatgctggttttaattttccttgttggaaagaagtttcaggaatattccaatactctcattaaaggtagggcatttattattaattcagttccttgaataaaaagttatcgaatacctagatagtgtattagataaagacacagagatgctgaagatagtctttccctgaaggagcccatagttaattttggragactaatgataaaaatattatcctacatagtgctaagtgcaataatagaaggaattactaggaacaatggtggcacacaa

SEQ ID NO: 230778 - DNA, 516 bp, Homo sapiens
attgaatggtcttggcaaccttgtcaaatatcatttggccatatatgctagggtttctttctgggctctctattctattgtatyagtttgtatgtctgatcttatgccagtagcacactgctttgtgtactgtaactttgtagcaagtcttgaaatctggatatctgagtcttcaagcttagttctttttcatggtggttttggctatttggagtctcttgagattccatatgaattttaaaatgggtttttctatttctgcaaataaatatcattgggattttgatagatattgcattgaatctataaatcactttgggtagtattgacatcttaacaatattaagcctttcaatccataaacatgagatgtctttccatttatttaagtctcgtttaatgtctttcagaaatgttttgcaaggagtctcacttccttgactaagttaattcctaagtgtgttattctttttggtgctattgtaactggaatttttaattttacttttcatattg

SEQ ID NO: 230779 - DNA, 590 bp, Homo sapiens
aaatctaacacacacgtaactggagctgcagaaggagaaaagggagaaaaaattggtaagaagtagtaattgagaaacaatggctgataatattttccaaaactgatgaaaaacatcagaccagagaattcagaacctgtacaaaccataagcaagataagatgatgaaaagccacttaggccccatacaattgctggaaatcaaagacaaagagaaaatcttaaaagtttccagagattatggctgacttctcaacaaacaatggtatcatatatacaaagtgtaaatagaaaataactgccaaactagaattctatactcatcaaaaatattccttgaaaataaatgtaaaataaagrtttttttagaaaagcaaaaactaagagaattcattacaagcatactaaagaaattcattaccagtacactaaagaatatattacccaagctaaaaaaaaaactgaaagaaaattctttgagcagaaggaaaattatcctggctggaagccctctgatttcttaagaaattgagagcaatagaaagggtaattatgtgggtaaatctaacaactattggacatattattta

SEQ ID NO: 230780 - DNA, 473 bp, Homo sapiens
ggaaggaatgataatggtgactcaggggaagaagaaacagccctcctctgaaagcctggactgtccggctgtgaactggctggcaggttctgcacgtgggtgggggccagggcctgggctttactcaattgcagagaaaaaactttctccctgcatctcatacctttacctctggccagttggccaccagggggagtgggctgaagggagagtagatggtgcaaagcaagcccatctctragtagaaaaatcacccagagcacatgctgacctgataactggggtgttgagaccagctttgtccatggtatgatgtttgatttatgaagacgcattgttagaaatccatttggcttcttcatagaagtggcttcccagaggaagaggcctctcagaaaccatgttctatttaagttctgagtcctgatgagtgttccccaggatgcacattgaagggagggctcaggcagctg

SEQ ID NO: 230781 - DNA, 568 bp, Homo sapiens
tgacatggttgtcaagatcatctaatgagaagagaataatcttcaaaaactaatgctgggacaactagatgcaaaagaatgaagttggaccccatacacaaaaattaaccccaaactgattaaagacctcaatttaagcactaaaactttatttaaacataaatatcttaaaagaaaacatagaaataaatcttaattactttggatttggcaaatggtttctcagctatgacatcaaaagcacaagcaaggaaagaaaaataggtaaattggatttcgtcaaaatttaaaacttctgttcattaaagaacattatcaagagagtgaaaatacaatcccagaatggaaaaaatatgtgcacattatatgtgtaatgagagtttkgtatccagaatatataaagaactcttacaaatcaacaaaaaatagacacaacccagtttttaaaattggtaaagtgcttggatagacagttctccaaaaatataaaaaatagccaacaagcacatgaaaagatgctaaatgccattagacattggggaaatgcaaattaaaaccacacaagata

SEQ ID NO: 230782 - DNA, 505 bp, Homo sapiens
ttcaaaaaatgacatcctttgattttgtggaggaatggaatattggagttccttctctgccgcttttggtgatgacacctattcgtacttttctttgttaaacaggaattttttaaaacatcctatattatgctgaatagtgacattcaaagatataagattctaatccctggaccctgtaaattttgccatgtaaggaaaaagggtctttctaratgtgattaatgatcttgacaagaaaataatatcctgaattatccagaaggactttaaatgccatcacatgcatccatgtaagaggacaacaaaggaagatttaaaagacacacacagaggagaaggcaatgtatccacagagaaggatattgaagtgatgtggccacactcaaggaatgccagagccaccagaagctggagaagtcaaaatccaaattctttctcagagattcctgaggcagtgctgctcagccataaccttgattttgactcagtaaagctgatttca

SEQ ID NO: 230783 - DNA, 609 bp, Homo sapiens
tcgttcactcttactctttgggtatagccctctgtggtaccaacctcaacactgatggattttakgtatacccgctttctaataggagggacgtgaacttcatgttctcttagttccttgagttttattgtgagctctgctcagcttctcagccttttagctgccatttatggaatcagaagatgcctccagggaacaacagtcagaaatgctgatctcacctctctgaatttccttcttccagatattggccccataatttttcactgctttataaactctctgataactttaacaatgtgcttttacatgttgttcatttttcttctagctatttttagtgggaggattggttagcatgtcttaacctggattttcattacataattagaattccttcgatgattttttatctcaacaattaaggggatgctgtagaatgaaagtgttctgtttccagatcacaaactctctggagtcaggaatcatgccttatacatgaagaggccctgcctcttcaggggctggattgcagtgggactcagtaaggactgaataattgatgaagacagtatatgtcctccttgtaggtttagtaatgattttttc

SEQ ID NO: 230784 - DNA, 609 bp, Homo sapiens
tcgttcactcttactctttgggtatagccctctgtggtaccaacctcaacactgatggattttatgtatacccgctttctaataggagggacgtgaacttcatgttctcttagttccttgagttttattgtgagctctgctcagcttctcagccttttagctgccatttatggaatcagaagatgcctccagggaacaacagtcagaaatgctgatctcacctctctgaatttccttcttccagatattggccccataatttttcactgctttataaactctctgataactttaacaatgtgcttttacatgttgttcatttttcttctagctatttttagtgggaggattggttagcatgtcttaacctggattttcattacataattagaattccttcgatgattttttatctcaacaattaaggrgatgctgtagaatgaaagtgttctgtttccagatcacaaactctctggagtcaggaatcatgccttatacatgaagaggccctgcctcttcaggggctggattgcagtgggactcagtaaggactgaataattgatgaagacagtatatgtcctccttgtaggtttagtaatgattttttc

SEQ ID NO: 230785 - DNA, 558 bp, Homo sapiens
gaattctctaaggaagacatttctatttcccctgagatagactggttagctgagtcaccatggaccctgccctcgtggagtttttatcttgcccttcctaatttttgtgcagagagtccttctgtgcaactcagccactttagcacgaggacccaagacctacaaaatcaatataaaccagagactcccttagctacatttcccatacatattcacgagatctttataagtctgggacaggggactcagacaggggcatttaaaggttagcggccatctgggaatcaaaggttcataaacccctgcccaaaccatgctttcatcaagcttcrgtgagtcaaggtcattccagtaaatcccacttctgatgccaactacaaatttcatgagtccccaggaccacccatttctgagacaaattgcaagtttgaggtccccaagaccatcttcaggtttgataattaactagaatgactcacaaaactcactgaaagctgttttacaaatgttttactcaagccttcacaaagaacccaactgatcttataggtatagtca

SEQ ID NO: 230786 - DNA, 618 bp, Homo sapiens
acaacccttatggaaaacagtatggagatttctcaaagaactaaaaaatgaactaccatttawtccagcaattccagtactgggtatatactcaaataaaaagaagcaattatatcaaaagatacctgcacttgtatgcttattgcaacacaattcacaatagctgtgtcatagaatcaaatcaacctaagtgtccatcaaccaatgagtggataaaagaattttttaatgtggagatatatatatatatatatatacacacacatacatatatctatatatgtgtatatatatgtgtgtatatatacaccatgatataccactgagccataaaaaaggaataaaatcatgtcttctgcagcaacatggatggatctggaggccattatcttaagtgaaatgactcatatacagaaagtcaaacactgcatgttctcacttgtaagtgggaattaaacagtgggtatacatgaacatacagagtgtaataatggatactggagatactaaaaggcaagtaaatagagaggatgagggttgaataattacctgttggatacgatattcactattcaagtgatgagtacactcaaagcccagacttcaccactacacaat

SEQ ID NO: 230787 - DNA, 618 bp, Homo sapiens
acaacccttatggaaaacagtatggagatttctcaaagaactaaaaaatgaactaccatttaatccagcaattccagtactgggtatatactcaaataaaaagaagcaattatatcaaaagatacctgcacttgtatgcttattgcaacacaattcacaatagctrtgtcatagaatcaaatcaacctaagtgtccatcaaccaatgagtggataaaagaattttttaatgtggagatatatatatatatatatatacacacacatacatatatctatatatgtgtatatatatgtgtgtatatatacaccatgatataccactgagccataaaaaaggaataaaatcatgtcttctgcagcaacatggatggatctggaggccattatcttaagtgaaatgactcatatacagaaagtcaaacactgcatgttctcacttgtaagtgggaattaaacagtgggtatacatgaacatacagagtgtaataatggatactggagatactaaaaggcaagtaaatagagaggatgagggttgaataattacctgttggatacgatattcactattcaagtgatgagtacactcaaagcccagacttcaccactacacaat

SEQ ID NO: 230788 - DNA, 547 bp, Homo sapiens
ccccagcactacaattaacccgttctccacagagccctggtttgtttaattgaaaaatggcatttagaaactaatgtatgagtgtcatgattatagctattgcagtttcactgtttctggtcctttatagtggatagagtttgggaatatagagagagatacgtacgtaaacaaatacaagcttacacgtgaatattctttaatctacctatgttgtgtgtgtgttccaataaaacataaaagtcagcaagtcttataatgtgatgtgatgaaaatgcaatagcatatatatatatcctatatataataccatataatatatagtattataatatagatatactatmtatagtattataatatatttagatatatatctctctatataatgctatactatatataccccaaatgcatataataccatatatttactatatataatactatacattttgaagacatatagtattatctatttattaatatatatttactacaatatagtatgtatatatctatacatagatacagatatacgtatata

SEQ ID NO: 230789 - DNA, 367 bp, Homo sapiens
tatatgtgtgtatatgtgcccatgtgcatgttcatgcataaaactgcttgaagatgttaattatgagctgcatcccatagataatagcaagcagttccagtagttgcaattaattcctctagaagcttttaaaagagcatgacaataggtgattataagtctatcttttcrtgccccactaactattattgagatctcatgcctattggatgtctatagaatttgtaccatatactttattatcaactttttaaagcaacactttgacaaggatatgtaggtctctgtattagttagggttctcctgagaaacaggactaactgaagatattaatatttttatgtctatataaaatgttttattttt

SEQ ID NO: 230790 - DNA, 367 bp, Homo sapiens
tatatgtgtgtatatgtgcccatgtgcatgttcatgcataaaactgcttgaagatgttaattatgagctgcatcccatagataatagcaagcagttccagtagttgcaattaattcctctagaagcttttaaaagagcatgacaataggtgattataagtctatcttttcgtgccccactaactattattgagatctcatgcctattggatgtctatagaatttgtaccatatactttattatcaactytttaaagcaacactttgacaaggatatgtaggtctctgtattagttagggttctcctgagaaacaggactaactgaagatattaatatttttatgtctatataaaatgttttattttt

SEQ ID NO: 230791 - DNA, 343 bp, Homo sapiens
gtttagtgtaattctcaaaacttaagcaagactaaaattcaaaaaagatatagaaagatgtttctttcactatagcattgaaaacatgcattttatgtgtcagatgagagtgaaatatagtatttacttgagattatgatgaaattaaaagttctttaaaaggaatatttayagatgactatttcctttttacatggcaaaagtttgcaaaaataccacatgaaatattttaatgacatctttttaaaaaatagacagctcttccttcctcgataaaataaattaaacatggcatgttttttagtgataactcaagtttgtatcagcaaatattactgtgagt

SEQ ID NO: 230792 - DNA, 643 bp, Homo sapiens
aagtccccactcgacccaggaagcccagctggactcactgctcaacttcacctaagaaagtatgttttacagaaatactatgttttacagaaatacagaaatattgggtatctttttattattcataatttagtgttatttaatttactttgaaatgagatttttgtaaaagtatagaggattaataaattaaaatgacaatttaacaaatagctgtaatatttaaggtgagtgtttgagaaagtaattgggcatggtttgaggttgttagtaagcaccatcatttaagaagttgtaaaaattgaaggtgctcagtagtggcaagtagaatacttgctgtcttctctccaaggaatttggcaaaggtagcagagcagtgctcactttagggttcctcagcattacagtgatggaatgttctttctagtaataaagccagtggaaattttgcagaaactatgaaaataccgstttaaaatcaatttttcttcaaagcgtagacagtttatctgaactttgcaatcacataggactagattcagattctgattctctcgctcgacaatgcaatatacccttagcaaggtgatcacattctttgaacttcatttttattaacctataatgtgggactatctttact

SEQ ID NO: 230793 - DNA, 597 bp, Homo sapiens
ttaagccttaaattctggggtagatgtttacacaggactagataactgatacaactggaaaatagagagtttccttcagcatccaagtattgaccataagagagaatgagaaacagcagctggaaagagggggggaaaatgatgatatttacatgtgaatgattgacagtagatggaagcagaaagttcagatatatcctgcctgataaattctattatctgcatgaaatgagaggttgggtcttctgagaatcaggtggtgagatagtgagatgcatgagagtaataaaagtttgaaatatatcttgagggaaagggaaacagagatgwcaagggactcttgaaaatgcttaatgtcctactgaattcagggaatctgaaattgttgggggatttgtcatagattaacatgagccattccctagaagttattacacttttgaagtcccagagaaagtaaaaaggaagacagctagcagaatctaggggtcttacttcagcaaatattatacccccaagcaattgaattcagtgaaaatctgagtccataatttggctcaaaaagagaaatctttaaaatgatttcctaaaccaaaa

SEQ ID NO: 230794 - DNA, 569 bp, Homo sapiens
tagtgtttttaggtttattaattattccttaaggtatttgaagctgtgttatgtgttacatcaccataaataacaattatctcttatttacaaattgattttctcattattgtacaatattttctttatctcttgaaatgctatttgtcctggagtatgtattggctcatagtattattctttctgccttatttgtgcattgtatttgcttggtatagatcttaccatccacctacttccaacctgtttgtgactttttttatatagtgtgtctcttgtaaatgagacatagctttctatttgggctgacattgcctttcattggagtgtataatacagttcattttttaatttacagaacctattgctagggcagtctttaastctataatcttgctctttgttgtgtactggtcccctccaatctttgttacttattttattctttcctgaattattttgttttaattatttaatttagtattttattttatctaattgcttgacttgtagtcagttttttgtatttttagtggctcttacagagatgacaatactaccattaattt

SEQ ID NO: 230795 - DNA, 569 bp, Homo sapiens
tagtgtttttaggtttattaattattccttaaggtatttgaagctgtgttatgtgttacatcaccataaataacaattatctcttatttacaaattgattttctcattattgtacaatattttctttatctcttgaaatgctatttgtcctggagtatgtattggctcatagtattattctttctgccttatttgtgcattgtatttgcttggtatagatcttaccatccacctacttccaacctgtttgtgactttttttatatagtgtgtctcttgtaaatgagacatagctttctatttgggctgacattgcctttcattggagtgtataatacagttcattttttaatttacagaacctattgctagggcagtctttaagtctataatcttgctctttgttgtgtactggtcccctcyaatctttgttacttattttattctttcctgaattattttgttttaattatttaatttagtattttattttatctaattgcttgacttgtagtcagttttttgtatttttagtggctcttacagagatgacaatactaccattaattt

SEQ ID NO: 230796 - DNA, 621 bp, Homo sapiens
attccattctatttgctgcgtggtatttcattgtgtggataccccactgcttgtttatccatttatttgttgatgcacatttggatcatttcwttttttttcttgggttaatacttaggagttggatagttgtatcatagagtaggtatatgtttacatttaaagaaactgccaaaatattttccaaagtggttatgccacttcacttttttttttcaagttgagaaaaatttactcatgtgttagcaaaggatgcataatatgaaattagagcctattaatctttatttttttaacttttaagttaaaggtacaagttcaggtttgttacataggtaaacttatgccatgggggtttgttgtacagattatttcatcacccaggtattaagtctagtgctcattaattatttttcttcatcctctccctcctcccacccttcaccctctgaaaggccaccatgtatgttgttctcctctacgtgtccatgtgttctcaccatttagcttctactaatgagaatatgctgtatttggttttctgttcctgcattagtttgctaaggataatggtctccagctccatccatgtccctgcaaaggacataatctcattctttt

SEQ ID NO: 230797 - DNA, 440 bp, Homo sapiens
gttttcattggcccatataaatggaaaagcaaagctatttaaacacacacagtcataagtcaaggacatccattgtgatggagggggtggggctggttggggcaatgcaaaaaggatgggcaggtgggtgggttcaggctgacatctgttacatttgtgcagttttttggcttaagtacagttactcacattcattgacagtaattcttgaaatacttcattcattgctagcaattctgagataatttrtttcaaagatttatttctaagacagaaatattgatatttctatgcagatcatgaacttgtaataacttctatttgtttgatttattttactcagcctcctgcattcctttggtagctttttgtattgacacgattggtgtgagcaactaagtatgtgtaagtaaatttaaatatatgtttgatcaaaaccc

SEQ ID NO: 230798 - DNA, 440 bp, Homo sapiens
gttttcattggcccatataaatggaaaagcaaagctatttaaacacacacagtcataagtcaaggacatccattgtgatggagggggtggggctggttggggcaatgcaaaaaggatgggcaggtgggtgggttcaggctgacatctgttacatttgtgcagttttttggcttaagtacagttactcacattcattgacagtaattcttgaaatacttcattcattgctagcaattctgagataatttgtttcaaagatttatttctaagacagaaatattgatatttctatgcagatcatgaacttgtaataacttctatttgtttgatttattttactcagcctcctgcattcctwtggtagctttttgtattgacacgattggtgtgagcaactaagtatgtgtaagtaaatttaaatatatgtttgatcaaaaccc

SEQ ID NO: 230799 - DNA, 629 bp, Homo sapiens
ggagatactagatttgtcattaacggtttttctttaacctggaacatcctacttttattctctctcagtctgaagtttctgagtggatatgtacctaactgtgttgcttgttttcaaagagggatattaaaaagtttcattatgtagcccatgaaaaatgtgtattttcttagtagtaaatattgatcattatcaatttatgaagaagtatttatatttttaacatatttaaaatttgggttactcacaaacagaaaatactattaaagaaagtttggcaaatgtctttaaacttttcactgccttaagtatgtaagattcatagtttttattctcccacaatgatgtagttacagttaatatcttgttgtatatatcatccratatgtaggaatgtggcattttcttttttctttcttaaatctttctacattttaagtcaattattaaaagactattagactagtcttttaaaattcttccacagtaccgaaaaacctgaggatgagctttttgtttttgtcaagctgctttatctctaatgttaaacaacttattagtttagggatagtgtttatttttctggtaaataatgttcattcacccagaagtatttattaggtgcctac

SEQ ID NO: 230800 - DNA, 629 bp, Homo sapiens
ggagatactagatttgtcattaacggtttttctttaacctggaacatcctacttttattctctctcagtctgaagtttctgagtggatatgtacctaactgtgttgcttgttttcaaagagggatattaaaaagtttcattatgtagcccatgaaaaatgtgtattttcttagtagtaaatattgatcattatcaatttatgaagaagtatttatatttttaacatatttaaaatttgggttactcacaaacagaaaatactattaaagaaagtttggcaaatgtctttaaacttttcactgccttaagtatgtaagattcatagtttttattctcccacaatgatgtagttacagttaatatcttgttgtatatatcatccaatatgtaggaatgtggcattttcttttttctttcttaaatctttctacattttaagtcaattattaaaagactattagactagtcttttaaaattcttccacartaccgaaaaacctgaggatgagctttttgtttttgtcaagctgctttatctctaatgttaaacaacttattagtttagggatagtgtttatttttctggtaaataatgttcattcacccagaagtatttattaggtgcctac

SEQ ID NO: 230801 - DNA, 629 bp, Homo sapiens
ggagatactagatttgtcattaacggtttttctttaacctggaacatcctacttttattctctctcagtctgaagtttctgagtggatatgtacctaactgtgttgcttgttttcaaagagggatattaaaaagtttcattatgtagcccatgaaaaatgtgtattttcttagtagtaaatattgatcattatcaatttatgaagaagtatttatatttttaacatatttaaaatttgggttactcacaaacagaaaatactattaaagaaagtttggcaaatgtctttaaacttttcactgccttaagtatgtaagattcatagtttttattctcccacaatgatgtagttacagttaatatcttgttgtatatatcatccaatatgtaggaatgtggcattttcttttttctttcttaaatctttctacattttaagtcaattattaaaagactattagactagtcttttaaaattcttccacagtaccgaaaaacctgaggatragctttttgtttttgtcaagctgctttatctctaatgttaaacaacttattagtttagggatagtgtttatttttctggtaaataatgttcattcacccagaagtatttattaggtgcctac

SEQ ID NO: 230802 - DNA, 353 bp, Homo sapiens
attaaaaatatagtcagcatatatttttctggaatataaaattgaggaactagaataattcaacttgaataagtgtaactaattcattttctgcaaaatattacccagagtttgagtatttttctatttattctatyggaaaaaaatgatataccactgtactggaaatattcagaaaagtttgtctattttttaaaattgtacttattatacctttataaccgtaagataatatatttattatttgaatgagaattaaatgtttatgatttatacaaaaatgcctgacacagactactatgcccacaaaagttgaatggttgtttttagcttatatatacctatacaggtta

SEQ ID NO: 230803 - DNA, 353 bp, Homo sapiens
attaaaaatatagtcagcatatatttttctggaatataaaattgaggaactagaataattcaacttgaataagtgtaactaattcattttctgcaaaatattacccagagtttgagtatttttctatttattctatcggaaaaaaatgatataccactgtactggaaatattcagaaaagttygtctattttttaaaattgtacttattatacctttataaccgtaagataatatatttattatttgaatgagaattaaatgtttatgatttatacaaaaatgcctgacacagactactatgcccacaaaagttgaatggttgtttttagcttatatatacctatacaggtta

SEQ ID NO: 230804 - DNA, 353 bp, Homo sapiens
attaaaaatatagtcagcatatatttttctggaatataaaattgaggaactagaataattcaacttgaataagtgtaactaattcattttctgcaaaatattacccagagtttgagtatttttctatttattctatcggaaaaaaatgatataccactgtactggaaatattcagaaaagtttgtctattttttaaaattgtacttattatacctttataaccgtragataatatatttattatttgaatgagaattaaatgtttatgatttatacaaaaatgcctgacacagactactatgcccacaaaagttgaatggttgtttttagcttatatatacctatacaggtta

SEQ ID NO: 230805 - DNA, 353 bp, Homo sapiens
attaaaaatatagtcagcatatatttttctggaatataaaattgaggaactagaataattcaacttgaataagtgtaactaattcattttctgcaaaatattacccagagtttgagtatttttctatttattctatcggaaaaaaatgatataccactgtactggaaatattcagaaaagtttgtctattttttaaaattgtacttattatacctttataaccgtaagataatatatttattatttgaatgagaattaaatgtttatgatttatacaaamatgcctgacacagactactatgcccacaaaagttgaatggttgtttttagcttatatatacctatacaggtta

SEQ ID NO: 230806 - DNA, 506 bp, Homo sapiens
aagttttgtgtattaattacctgatttatactttagtccctttaagtaaargaacgtaacaaatagaaggatagttattaatatatttggaggagaaagaaagataaaatgaaagatacaatgttcttaaaaaccgagagttttatcttttttcagaagtctaaaaaatatttaaacatcttcctttatgttagcgcatatttatgttatacatttcatttacaagtaattgtatggtaaatagttacaaaaacaacaaggaaaagctttgagttaaggagctcatgattttcagtgtaaaatacatgttatttgagtaatttgggaaactgacagaagctttcttgcagtcaagaatgctgctcaaaaattaattttaaaataaaaataaaagaaaaaaaatcctgaaagcttatgtagcaaaacaagtattgtagtccattacaaaaattagccttttctgaaatcatgttaaaaagcaaaaagatcttagagcagaatttcat

SEQ ID NO: 230807 - DNA, 506 bp, Homo sapiens
aagttttgtgtattaattacctgatttatactttagtccctttaagtaaaggaacgtaacaaatagaaggatagttattaatatatttggaggagaaagaaagataaaatgaaagatacaatgttcttaaaaaccgagagttttatcttttttcagaagtctaaaaaatatttaaacatcttcctttatgttagcrcatatttatgttatacatttcatttacaagtaattgtatggtaaatagttacaaaaacaacaaggaaaagctttgagttaaggagctcatgattttcagtgtaaaatacatgttatttgagtaatttgggaaactgacagaagctttcttgcagtcaagaatgctgctcaaaaattaattttaaaataaaaataaaagaaaaaaaatcctgaaagcttatgtagcaaaacaagtattgtagtccattacaaaaattagccttttctgaaatcatgttaaaaagcaaaaagatcttagagcagaatttcat

SEQ ID NO: 230808 - DNA, 592 bp, Homo sapiens
ttcttaaaaaccgagagttttatcttttttcagaagtctaaaaaatatttaaacatcttcctttatgttagcgcatatttatgttatacatttcatttacaagtaattgtatggtaaatagttacaaaaacaacaaggaaaagctttgagttaaggagctcatgattttcagtgtaaaatacatgttatttgagtaatttgggaaactgacagaagctttcttgcagtcaagaatgctgctcaaaaattaattttaaaataaaaataaaagaaaaaaaatcctgaaagcttatgtagcaaaacaagtattgtagtccattacaaaaattagccttttctgaaatcatgttaaaaagcaaaaagatcttagagcagaatttcatgtacagttcattttggractgatcttacttccttggtaggtggtcttacttcatcctgttggagcccatcatggagagctgttttacaaatattcttagctctactacccacataaaaattcaacctatgactcctgtttctgataaagtagctatttaaattcattaagaatgtttcatcattttagtatgcaaaatgcattgttaga

SEQ ID NO: 230809 - DNA, 592 bp, Homo sapiens
ttcttaaaaaccgagagttttatcttttttcagaagtctaaaaaatatttaaacatcttcctttatgttagcgcatatttatgttatacatttcatttacaagtaattgtatggtaaatagttacaaaaacaacaaggaaaagctttgagttaaggagctcatgattttcagtgtaaaatacatgttatttgagtaatttgggaaactgacagaagctttcttgcagtcaagaatgctgctcaaaaattaattttaaaataaaaataaaagaaaaaaaatcctgaaagcttatgtagcaaaacaagtattgtagtccattacaaaaattagccttttctgaaatcatgttaaaaagcaaaaagatcttagagcagaatttcatgtacagttcattttggaaytgatcttacttccttggtaggtggtcttacttcatcctgttggagcccatcatggagagctgttttacaaatattcttagctctactacccacataaaaattcaacctatgactcctgtttctgataaagtagctatttaaattcattaagaatgtttcatcattttagtatgcaaaatgcattgttaga

SEQ ID NO: 230810 - DNA, 592 bp, Homo sapiens
ttcttaaaaaccgagagttttatcttttttcagaagtctaaaaaatatttaaacatcttcctttatgttagcgcatatttatgttatacatttcatttacaagtaattgtatggtaaatagttacaaaaacaacaaggaaaagctttgagttaaggagctcatgattttcagtgtaaaatacatgttatttgagtaatttgggaaactgacagaagctttcttgcagtcaagaatgctgctcaaaaattaattttaaaataaaaataaaagaaaaaaaatcctgaaagcttatgtagcaaaacaagtattgtagtccattacaaaaattagccttttctgaaatcatgttaaaaagcaaaaagatcttagagcagaatttcatgtacagttcattttggaactgatcttacttccttggtaggtggtcttacttcatcctgttggagcccatcatggagagctgttttacaaatattcttagctctactacycacataaaaattcaacctatgactcctgtttctgataaagtagctatttaaattcattaagaatgtttcatcattttagtatgcaaaatgcattgttaga

SEQ ID NO: 230811 - DNA, 370 bp, Homo sapiens
agaccctagcgtccctggctcgaaaccagggtgcgcttcaggcccgctagtggtacctcaaggygggcagaaagcccatgaggggaaggtgaggcacctggggaaaagcgaaaaaaacaaaaacaaaaacgtcgcagagaagcagagcctgggtccccgaggaagaaagtgtcttcgcatcagcccttgcgctgggccccggggaccctggtgtcccagtttcgaacccagggtgtgcgtctggccactaggggtaccccaagtcggacagaaggcccatgaggggaaggtgaggtttgagggaggagacgtgaggcaactgtggcaggaaaaaaaaaaaaaaaaaaaaacacgccgcggagaagcgggg

SEQ ID NO: 230812 - DNA, 370 bp, Homo sapiens
agaccctagcgtccctggctcgaaaccagggtgcgcttcaggcccgctagtggtacctcaaggtgggcagaaagcccatgaggggaaggtgaggcacctggggaaaagcgaaaaaaacaaaaacaaaaacgtcgcagagaagcagagcctgggtccccgaggaagaaagtgtyttcgcatcagcccttgcgctgggccccggggaccctggtgtcccagtttcgaacccagggtgtgcgtctggccactaggggtaccccaagtcggacagaaggcccatgaggggaaggtgaggtttgagggaggagacgtgaggcaactgtggcaggaaaaaaaaaaaaaaaaaaaaacacgccgcggagaagcgggg

SEQ ID NO: 230813 - DNA, 370 bp, Homo sapiens
agaccctagcgtccctggctcgaaaccagggtgcgcttcaggcccgctagtggtacctcaaggtgggcagaaagcccatgaggggaaggtgaggcacctggggaaaagcgaaaaaaacaaaaacaaaaacgtcgcagagaagcagagcctgggtccccgaggaagaaagtgtcttygcatcagcccttgcgctgggccccggggaccctggtgtcccagtttcgaacccagggtgtgcgtctggccactaggggtaccccaagtcggacagaaggcccatgaggggaaggtgaggtttgagggaggagacgtgaggcaactgtggcaggaaaaaaaaaaaaaaaaaaaaacacgccgcggagaagcgggg

SEQ ID NO: 230814 - DNA, 563 bp, Homo sapiens
aagagatgagggagctctctatggtgccttcaataggggctactaatcccactcatgtggtccctgccttcatgatctaatcattccccaaggccctacctccaaatatcatcacatagggaattagatttcaacacttgaatttgagagggacaataacatttggtctatagcatcaggttacccagagccttatgcattcggaggaaatccaaaatcttctataagtatttgctggtcccctctgggcttagggaaatctttaattgcagctcttgattcagcttggtccaagccgaaattctacgtttgcctgagtaacttgttcatgggacagaggcaactgaccatttggagttttaggaaattgatggaagagggcttggcatctggatgagaagtggagggagaatagaacaaaggcacaggagagagcacartgagaaaggggaagagggacatctggacataagggccaactggagggcagggaaggtaattttccttgcattttaaactcagaccacatatcacatcagaatcacctgagggagacgttttca

SEQ ID NO: 230815 - DNA, 503 bp, Homo sapiens
gagggacatctggacataagggccaactggagggcagggaaggtaattttccttgcattttaaactcagaccacatatcacatcagaatcacctgagggagacgttttcaatgcatattcctgggtttcttctcttggaaatttttattaaatcttgagttgtgctgatttatccatatttatcataagaattttggataattcytactttgagaggcccaggcagtggatcacttgaggtcaggaattcaaaaccagcctggccaacatggtgaaacctcatctctactaaaaatacaaaaattagccaggcatggtggtacatgcctgtagtcccagctacttgggaggctgaggcaggagaatcacttgaatcagggaggcagagatgacagtgagctgagatcacaccactgcactccagcttgggcaacagtaagactccatctcaaaaaaaaaaaaaaaaaaaaaaaaagaattgtggataattctgatgcaattag

SEQ ID NO: 230816 - DNA, 503 bp, Homo sapiens
gagggacatctggacataagggccaactggagggcagggaaggtaattttccttgcattttaaactcagaccacatatcacatcagaatcacctgagggagacgttttcaatgcatattcctgggtttcttctcttggaaatttttattaaatcttgagttgtgctgatttatccatatttatcataagaattttggataattcttactttgrgaggcccaggcagtggatcacttgaggtcaggaattcaaaaccagcctggccaacatggtgaaacctcatctctactaaaaatacaaaaattagccaggcatggtggtacatgcctgtagtcccagctacttgggaggctgaggcaggagaatcacttgaatcagggaggcagagatgacagtgagctgagatcacaccactgcactccagcttgggcaacagtaagactccatctcaaaaaaaaaaaaaaaaaaaaaaaaagaattgtggataattctgatgcaattag

SEQ ID NO: 230817 - DNA, 503 bp, Homo sapiens
gagggacatctggacataagggccaactggagggcagggaaggtaattttccttgcattttaaactcagaccacatatcacatcagaatcacctgagggagacgttttcaatgcatattcctgggtttcttctcttggaaatttttattaaatcttgagttgtgctgatttatccatatttatcataagaattttggataattcttactttgagaggcccaggcagtggatcacttgaggtcaggaattcaaaaccagcctggccaacatggtgaaacytcatctctactaaaaatacaaaaattagccaggcatggtggtacatgcctgtagtcccagctacttgggaggctgaggcaggagaatcacttgaatcagggaggcagagatgacagtgagctgagatcacaccactgcactccagcttgggcaacagtaagactccatctcaaaaaaaaaaaaaaaaaaaaaaaaagaattgtggataattctgatgcaattag

SEQ ID NO: 230818 - DNA, 490 bp, Homo sapiens
atatatacatatattaaatatatatacacatatatrttagaagttgtactgctgaaaacaagagctaccaataaaaaaatttcaggaaacctagtgtgattatttttaatagaaatggatattttaatacagtctcttgctttttcttgtggaaataaatgacaagatggaatttctgggtgtttggtatctgaatatttaagtatagcaggtatggtcagtttttcaaaggcattttaccatcttacttgtccatcggtaactcataagatatgtggaacaacgtcctctccaacaacctctagtatcagtctttgtaaagtttgtcaattaaatgggtgtttttttgtttttgtttttctttttgagaccgtctcaccctgtcacccaggctgtagtgctgctgcgtgatcttagctcactgcagtctttgccttccaggttcaagtgattctcctgccttggcctctcaagtagctgggactacagg

SEQ ID NO: 230819 - DNA, 490 bp, Homo sapiens
atatatacatatattaaatatatatacacatatatgttagaagttgtactgctgaaaacaagagctaccaataaaaaaawttcaggaaacctagtgtgattatttttaatagaaatggatattttaatacagtctcttgctttttcttgtggaaataaatgacaagatggaatttctgggtgtttggtatctgaatatttaagtatagcaggtatggtcagtttttcaaaggcattttaccatcttacttgtccatcggtaactcataagatatgtggaacaacgtcctctccaacaacctctagtatcagtctttgtaaagtttgtcaattaaatgggtgtttttttgtttttgtttttctttttgagaccgtctcaccctgtcacccaggctgtagtgctgctgcgtgatcttagctcactgcagtctttgccttccaggttcaagtgattctcctgccttggcctctcaagtagctgggactacagg

SEQ ID NO: 230820 - DNA, 300 bp, Homo sapiens
agggttacctgaatctggcttaatagtgaattaatcagtatttatctttaaacattttttcctttatgaattgtgtcacacttttaaagagcccttcctacattacaagcatrtataaaatatattcttatactattttagaataatttcagaagttagattgttttctagatttagtgttttcattgataccaaatttatttttatgtacataaatgtatgattttaagttagattatttcaaactggtatccctgcaattatctgaacaaaatttttaagtagtcacattgacttttt

SEQ ID NO: 230821 - DNA, 537 bp, Homo sapiens
tcacattgactttttttttcaaaagttagttttaagctatttgataacatatggatctacttcactaaagttgtatttttgtgtgtaattctttaayccatctggagatattttggttgtttttcgatcagatagccagttaaaccagaaagaaaaatcttaccaaaaagtttccacttagaaaatttaatagccaaaaaaactaatatatgcaagaatgaacaaaaacatattgataaaagttatacatcatatttttattgaaatatttcataatgaaatgtttcacatggttaaagaactacaaattcatccagtgtaaataaaaacttcatgggaaatgtataatatatgagggattatttgatatctgaaaaaattagatagaaaataaatgcttaaaaacttctagaaggtaatccagtagaatatttatcagcttaggctaacaaatgatataaacatgattaaagaagagctaaacttgaataaaaatattaagttgatgacaagtgtaaaacaccattcttcaaaata

SEQ ID NO: 230822 - DNA, 457 bp, Homo sapiens
tacataccgtttttctctctgtctcccttttttataaaacctctaactttctctttatgttttgtacatactaaagacacccattctgcatgtatgtgtgaarttgtaatacttgtatctcaaataaaacattttaatttcagatgtttgtctatatttatttgactttgacaatctgatattatttagcattatttccagtctcccaaataatgtcaaaattttgttatgttagataggaatatcttgttattcaacttgaaggtaaactgcttgatcaatgcatgtaattccttgacagattgtcagcacctctaagacaacatgtagatattgctcattattaactcatttcatcttttcatgataaattacaaaaatttaattttcatttttaaaatgcaaaccattatgccttgtattatggcattcttgcattactataaaggaataccta

SEQ ID NO: 230823 - DNA, 323 bp, Homo sapiens
catgacctgagctctatctgcagccctttgaaccaaggctggagctagaagggccaggatgcaaggaacaccctcctgggggtggtacaggrcagtgatgccctggccctggtccaagtggaacaggaattaaaagaaattaaagaatgtgtaagcagaaactcagttgtatgtgagaaaacccagttccccctgagaaagagaaagagctggagccctttaaaaattaactgcctgtttttctgtggctagtgagcttcatctctcctcctttcccaggcattgtaaagaccctgtttccctaactgtgcagctgcaaggtc

SEQ ID NO: 230824 - DNA, 323 bp, Homo sapiens
catgacctgagctctatctgcagccctttgaaccaaggctggagctagaagggccaggatgcaaggaacaccctcctgggggtggtacaggacagtgrtgccctggccctggtccaagtggaacaggaattaaaagaaattaaagaatgtgtaagcagaaactcagttgtatgtgagaaaacccagttccccctgagaaagagaaagagctggagccctttaaaaattaactgcctgtttttctgtggctagtgagcttcatctctcctcctttcccaggcattgtaaagaccctgtttccctaactgtgcagctgcaaggtc

SEQ ID NO: 230825 - DNA, 323 bp, Homo sapiens
catgacctgagctctatctgcagccctttgaaccaaggctggagctagaagggccaggatgcaaggaacaccctcctgggggtggtacaggacagtgatgccctggccctggtccaagyggaacaggaattaaaagaaattaaagaatgtgtaagcagaaactcagttgtatgtgagaaaacccagttccccctgagaaagagaaagagctggagccctttaaaaattaactgcctgtttttctgtggctagtgagcttcatctctcctcctttcccaggcattgtaaagaccctgtttccctaactgtgcagctgcaaggtc

SEQ ID NO: 230826 - DNA, 323 bp, Homo sapiens
catgacctgagctctatctgcagccctttgaaccaaggctggagctagaagggccaggatgcaaggaacaccctcctgggggtggtacaggacagtgatgccctggccctggtccaagtggaacaggaattaaaagaaattaaagaatgtgtaagcagaaactcagttgtatgtgagaaaacccagttccccctgagaaagagaaagagctggagccctttaaaaattaactgcctgtttttctgtggctagtgagcytcatctctcctcctttcccaggcattgtaaagaccctgtttccctaactgtgcagctgcaaggtc

SEQ ID NO: 230827 - DNA, 638 bp, Homo sapiens
ccatttctgagaaatccacccccatgatccaatcacctccctccagacctaccaccaacattggggrtatcacaattcaacatgagatttagagggaacaacatctgaggtatctcatgcctcatgttgtgacttggtataatgtccataagattacactgactttacacatcatattgcagtttttgctagctcttctgtagtaagaaaatggaattcatcagcaatgccttctaagtctggctctgttttcccatgcagacttttccctgagctctgcttgtcagtcttgctagaacctcaccctaggcagcaacctccagtctgagattgcccttgacagtggctgaggtttgcattgttggaatggattagaaaaaacaaagggaagacagaccaaaacagatttaaatacagatcccatttgttgaagttttaagtaattttaaatgtttatttgcaccagctgcccactcccattgtactctcctcacccaaaaaggtgacttgatattctagtaaaaagccaaactgtgctttagagaaacccacttgttacttctttaaatccatattattttgccaaagtgaatttttcttaatatgctctggcagaatcagtaaactaattatttaca

SEQ ID NO: 230828 - DNA, 539 bp, Homo sapiens
tgcagtttttgctagctcttctgtagtaagaaaatggaattcatcagcaatgccttctaagtctggctctgttttcccatgcagacttttccctgagctctgcttgtcagtcttgctagaacctcaccctaggcagcaacctccagtctgagattgcccttgacagtggctgaggtttgcattgttggaatggattagaaaaaacaaagggaagacagaccaaaacagatttaaatacagatcccatttgttgaagttttaagtaattktaaatgtttatttgcaccagctgcccactcccattgtactctcctcacccaaaaaggtgacttgatattctagtaaaaagccaaactgtgctttagagaaacccacttgttacttctttaaatccatattattttgccaaagtgaatttttcttaatatgctctggcagaatcagtaaactaattatttacaccagagtcacttaacctttcctcttggtcatttgcatgtaaattatttttatatgtataaaatttgcttactcaagaa

SEQ ID NO: 230829 - DNA, 569 bp, Homo sapiens
gtagtaagaaaatggaattcatcagcaatgccttctaagtctggctctgttttcccatgcagacttttccctgagctctgcttgtcagtcttgctagaacctcaccctaggcagcaacctccagtctgagattgcccttgacagtggctgaggtttgcattgttggaatggattagaaaaaacaaagggaagacagaccaaaacagatttaaatacagatcccatttgttgaagttttaagtaattttaaatgtttatttgcaccagctgcccaytcccattgtactctcctcacccaaaaaggtgacttgatattctagtaaaaagccaaactgtgctttagagaaacccacttgttacttctttaaatccatattattttgccaaagtgaatttttcttaatatgctctggcagaatcagtaaactaattatttacaccagagtcacttaacctttcctcttggtcatttgcatgtaaattatttttatatgtataaaatttgcttactcaagaaagctcttgctatatatatatttttttctttttgtggtatcttaacatactct

SEQ ID NO: 230830 - DNA, 406 bp, Homo sapiens
aaacccacttgttacttctttaaatccatattattttkccaaagtgaatttttcttaatatgctctggcagaatcagtaaactaattatttacaccagagtcacttaacctttcctcttggtcatttgcatgtaaattatttttatatgtataaaatttgcttactcaagaaagctcttgctatatatatatttttttctttttgtggtatcttaacatactctagtcttgtcttgaattccttaagactttgaggtaaagaactctattgtaacaagtttccaaatcaaagtgggaaagaggaagattaggttaagcattaggtcatcaggtatgtaggacagctaattccattatcagaatggtagtgatagccagtttgcattttgtatattagttgtaacga

SEQ ID NO: 230831 - DNA, 406 bp, Homo sapiens
aaacccacttgttacttctttaaatccatattattttgccaaagtgaatttttcttaatatgctctggcagaatcartaaactaattatttacaccagagtcacttaacctttcctcttggtcatttgcatgtaaattatttttatatgtataaaatttgcttactcaagaaagctcttgctatatatatatttttttctttttgtggtatcttaacatactctagtcttgtcttgaattccttaagactttgaggtaaagaactctattgtaacaagtttccaaatcaaagtgggaaagaggaagattaggttaagcattaggtcatcaggtatgtaggacagctaattccattatcagaatggtagtgatagccagtttgcattttgtatattagttgtaacga

SEQ ID NO: 230832 - DNA, 592 bp, Homo sapiens
ttttgattttaagttttcatggaggggctatctacacaataatttttatacatcattatatgcatcaatgattaaaaaggagtagaaatttttacactaattgagaaatattatagacctaactaaatgagggcaaactataagcaatttggggaaactataaggatgtaattaaatagtcactgtttttagaaaccattaactgcatattgaaatcttgacacttgttgggaaaatgaggtggtaaatcaacttgtcagcrtgagtactaaataaaacaaaatatggttaagagtgtccctttaaagttcagatagtagttctgcaatttctgattttaaatgtttctgcaaaatagtttatctgaatgattaaactattattccgtgttcaccaaccattaagaaaatctgctgtatgaccaggttaaacctgaaaatggtataattcaaaacttgatgtaggcaataggtatgtagaatgtgtttattctaatatgagagggcatatcaaagtaattttcttggagcacactgtcaaaacaaagcaatgggatttggccatggacatttcattattatcaaagagacct

SEQ ID NO: 230833 - DNA, 613 bp, Homo sapiens
acttccaacactatgttgaatatgagtggtgagagagggcatcccagtcttgtgccagttttcacagggaatgcttccagtttttgtccattcagtatgatatttgctgtgggtttgtcatagatacctcttattattatgagatatgtcccatcaatacctaatttattgagagtttttagcatgaagtgttgttgarttttgtcaaaggccttttctgcatctattgagataatcatgtggtttttgtctttggatctgtttatgtgctggattatgtttattgattttatgcaagaataatctaaatttctctggtgaaaaaacctaaacatgccttttaaaaatttatatatcattccttttgtaaaatctaatgaaaataacaattttgtctattgtaaaaggcaagtgattgcaacagatggaaatcactttatttcctatatctttgtaaagataatgactgctaataaacaacatgaagaattttcaggtataattttgataaaaatttaatggttttgggcttctaggccaaatctgcaatacaacccttcataagattgtactttgaaactctcgttgtcatctgacatatgcagatagtaca

SEQ ID NO: 230834 - DNA, 613 bp, Homo sapiens
acttccaacactatgttgaatatgagtggtgagagagggcatcccagtcttgtgccagttttcacagggaatgcttccagtttttgtccattcagtatgatatttgctgtgggtttgtcatagatacctcttattattatgagatatgtcccatcaatacctaatttattgagagtttttagcatgaagtgttgttgagttttgtcaaaggccttttctgcatctattgagataatcatgtggtttttgtctttggatctgtttatgtgctggattatgtttattgattttatgcaagaataatctaaatttctctggtgaaaraacctaaacatgccttttaaaaatttatatatcattccttttgtaaaatctaatgaaaataacaattttgtctattgtaaaaggcaagtgattgcaacagatggaaatcactttatttcctatatctttgtaaagataatgactgctaataaacaacatgaagaattttcaggtataattttgataaaaatttaatggttttgggcttctaggccaaatctgcaatacaacccttcataagattgtactttgaaactctcgttgtcatctgacatatgcagatagtaca

SEQ ID NO: 230835 - DNA, 613 bp, Homo sapiens
acttccaacactatgttgaatatgagtggtgagagagggcatcccagtcttgtgccagttttcacagggaatgcttccagtttttgtccattcagtatgatatttgctgtgggtttgtcatagatacctcttattattatgagatatgtcccatcaatacctaatttattgagagtttttagcatgaagtgttgttgagttttgtcaaaggccttttctgcatctattgagataatcatgtggtttttgtctttggatctgtttatgtgctggattatgtttattgattttatgcaagaataatctaaatttctctggtgaaaaaacctaaacatgccttttaaaaatttatatatcattccttttgtaaaatctaatgaaaataacaattttgtctattgtaaaaggcaagtgrttgcaacagatggaaatcactttatttcctatatctttgtaaagataatgactgctaataaacaacatgaagaattttcaggtataattttgataaaaatttaatggttttgggcttctaggccaaatctgcaatacaacccttcataagattgtactttgaaactctcgttgtcatctgacatatgcagatagtaca

SEQ ID NO: 230836 - DNA, 613 bp, Homo sapiens
acttccaacactatgttgaatatgagtggtgagagagggcatcccagtcttgtgccagttttcacagggaatgcttccagtttttgtccattcagtatgatatttgctgtgggtttgtcatagatacctcttattattatgagatatgtcccatcaatacctaatttattgagagtttttagcatgaagtgttgttgagttttgtcaaaggccttttctgcatctattgagataatcatgtggtttttgtctttggatctgtttatgtgctggattatgtttattgattttatgcaagaataatctaaatttctctggtgaaaaaacctaaacatgccttttaaaaatttatatatcattccttttgtaaaatctaatgaaaataacaattttgtctattgtaaaaggcaagtgattgcaacagatggaaatcactttatttcctatatctttgtaaagataatgactgctaataaacaacatgaagaattttcaggtataattttgataaaaatttaatggttttgggcttctaggccaaatctgcaatacaayccttcataagattgtactttgaaactctcgttgtcatctgacatatgcagatagtaca

SEQ ID NO: 230837 - DNA, 583 bp, Homo sapiens
aaactcaaatttagtatgtctgaaatcaagctgactgctgcacgtgttcgcactgaaacgaagcaaaacaaaattccttcaacagcttttctcatcccaataaatggtactacactgtgcctgtatgactcatgcccaaaacctagaggtcgacctaggttctttttttccccatgactctccatttccaagatttccatttcttccgtgaacacttctcaaagccacacccatctctctgtcagaataccacaatgcattgcaaatctgcctcccytcttgtcatctcctccctaaatgctctattttcacagtagtcagagtggcttttttttttttaaagcacacaagatcttgactcttcattccctactttctgctttaagtccttgtttggctttcctctgctaatataaagaaaaatttccaacttctttttaatgaccatagatcctgacttgatgttttctacctacctctccaaccacatgtcatacacttcccttcttttcttatcacacccaaaacattcttaattatttccacagtctttgtatatgccaaccctttttctgcctctaga

SEQ ID NO: 230838 - DNA, 542 bp, Homo sapiens
gtcagctttccatgtgtccaagcattacaggacttttcattaagcctaatcctcacaagaacattgctttgagcgatgttccagagtggtagtcctttaaggcattagaacgatttgtgaaatccctaaaaatactaggggaaatattcaaaaaatgacaatagtgccattattcctcctcctcaaagagactatcagaactaaaactctttgcttcatgttcctgtttacttctgtcactttcaagtcacagaggtattatcagactgtcatcattatatgactctgcttttccaacagaatcaattacctatyccttatctcacaacttgatagtgatagatattgaatgcttatgttctgattagcaaactctttttgcgtttttaataacaacttgaactcctgatatgtctggaaaatataaccccttcaacagccctttcaatgggttgctactattttgctcaccccatcttcacctgcctaatcatgaggaggcggggtatatacaatttcagttaatttgtagttatcagtct

SEQ ID NO: 230839 - DNA, 542 bp, Homo sapiens
gtcagctttccatgtgtccaagcattacaggacttttcattaagcctaatcctcacaagaacattgctttgagcgatgttccagagtggtagtcctttaaggcattagaacgatttgtgaaatccctaaaaatactaggggaaatattcaaaaaatgacaatagtgccattattcctcctcctcaaagagactatcagaactaaaactctttgcttcatgttcctgtttacttctgtcactttcaagtcacagaggtattatcagactgtcatcattatatgactctgcttttccaacagaatcaattacctattccttatctcacaacttgatagtgatagatattgaatgcttatgttctgattagcaaactctttttgcrtttttaataacaacttgaactcctgatatgtctggaaaatataaccccttcaacagccctttcaatgggttgctactattttgctcaccccatcttcacctgcctaatcatgaggaggcggggtatatacaatttcagttaatttgtagttatcagtct

SEQ ID NO: 230840 - DNA, 558 bp, Homo sapiens
tctcattttagtattatcattctcattaatgaataattccctttttgttaaaagtttacattgacctaccgttgtccttcagttatcaacttactttgtattctttctttgaaagaaatcaatcaaacaatagacagtctccttcaatatttcctgtactgtcttcaacccacttagctgagtactttcttttttctctacttactcactttttcccctgagtgttctcaagcattttcatgrgtttaaaggccagttacatgatagcatctcagaatatttccaattttggtatcttctctgagttagagctttgcatagtcatctacttacttaatatcaaatgtggattgttttatagacaactgaaattcataatgttttaagtagagttttgttattttctctgcttcccagtttgtgtgtgtatgcttgtttgtttacttcagctggtgttcccattgattttatcttatctaatacaccaaaaccctatcagtagctcttttcttcaaacttgcacatatattaaatatgtatttcattattttgaacaag

SEQ ID NO: 230841 - DNA, 558 bp, Homo sapiens
tctcattttagtattatcattctcattaatgaataattccctttttgttaaaagtttacattgacctaccgttgtccttcagttatcaacttactttgtattctttctttgaaagaaatcaatcaaacaatagacagtctccttcaatatttcctgtactgtcttcaacccacttagctgagtactttcttttttctctacttactcactttttcccctgagtgttctcaagcattttcatgagtttaaaggccagttacatgatagcatctcagaatatttccaattttggtatcttctctgagttagagctttgcatagtcatctacttacttaatatcaaatgtggattgttttatagacaactgaaattcataatgttttaagtagagttttgttattttctctgcttcccagtttgtgtgtgtatgyttgtttgtttacttcagctggtgttcccattgattttatcttatctaatacaccaaaaccctatcagtagctcttttcttcaaacttgcacatatattaaatatgtatttcattattttgaacaag

SEQ ID NO: 230842 - DNA, 591 bp, Homo sapiens
acgaatcttaatgactatctcgggagtatctaactgccattaaaaaatatggaattaaagtaaataaatgttaagcmaaaagagagaagaaaggaaagagagtttactagagaacagtattactactcattgaagaaaacaatagatagtattcaaacacactagaggactagtatattttattataatattattataagataataataagaataaacatagaaacatttataaataccagatgagtatatcccgcgcctcaaattaaagtgtaaatacagggcaagattttatataaattatttatatagcaaaaacttatataacagaacttaacaccagcataacaggtatatcaaagacacaaatgggcttaactcaccattaaatggcgtacttttagattggctaatggagcagaatccaatctattctgtgtgcaagaaacatattgaacaaggcaattcagaatggtttaatgtaaaaggaagagcaaagatagatcttgtatgatagcaagatcctgaaatagttgtcagaattttgctattgagacaagatagaatttaagacaaaataaatttaacagga

SEQ ID NO: 230843 - DNA, 415 bp, Homo sapiens
aaaaacttacgaggtactattttccagatgaaagtgaaagtgatgacagattttatttcttcacttaaattattaagatatacctttattatgtgagcataatcgattttattgcagggaagtcccttaattcagtaaaaaagacaggattgcttcttgaatattaaaacattttcatcttttcagttttgcttttcttgattatctatttttctttttactgagtaatgtatatcatttttwaattaaatataatttaaataatattttacaataatctaaaatgcttctgaatacttcgtcaataacttttggatgttcaataacattaagaacgattacatttttcaaatattatttttgcattatttatatgtttgcatttttacaagtgttctaatcgcatattgcaagg

SEQ ID NO: 230844 - DNA, 587 bp, Homo sapiens
aaaacaggtcctcaaataaagttgttttattcaatgttgttttgctataatgtagatgaraataaatattgattcctggacagggctaccatctgtgtagggtctgcatgttctccccatgcctgcatgggttttctccaggaactcctgcttcctctcacatccccaagatgtgcatgtctggttaattggcatttccccactgtgtgtcccaatgtgagtgaatgtggttgtgccctgccatggaatagcatcctgtgcagggtttattcctgcattgcatgctgagtaagaataggttcttgccacccgagactctgaactggaataattgggtaaataatcatcttacttgtttttatcaatctttttaaaaatgtatgtatacctcacacttatttcagtgttgaatgttataagtgttttagtctccatttagaagtacagtgataatattgtgaccagaaatatgcagtaggaacttatatcttgttgtatcaattggcctatggtaaaatttgtttcattgttcaccattttgctgatagttgcagtttccaataatctactgatattaaatgtggact

SEQ ID NO: 230845 - DNA, 405 bp, Homo sapiens
tattaagtctgaagaaatatttacttgaatatgacatctaagaatgatggacaaaagctttttaaattttctttccactcctttttctgaaagctttgatacaaaaatcatttgacacaaatgatttttttttttttttstgacaggatcttactatgttgcccaggctgaagtgcagtgtgctcatgcaatcctcccatctcagcctcctgagtaactgggactacaggcacatgccaccatgcccagctaatttttgtatctttagtagaaacaaggttttgccacattgcccaggctggtctccaactcgtgggctgaagtgatctgcccaccttggcctcccagtgttctgggattacaggagtgagccactgtacccggctgatgcaaatgatttctatt

SEQ ID NO: 230846 - DNA, 405 bp, Homo sapiens
tattaagtctgaagaaatatttacttgaatatgacatctaagaatgatggacaaaagctttttaaattttctttccactcctttttctgaaagctttgatacaaaaatcatttgacacaaatgatttttttttttttttgtgacaggatcttactatgttgcccaggctgaagtgcagtgtgctcatgcaatcytcccatctcagcctcctgagtaactgggactacaggcacatgccaccatgcccagctaatttttgtatctttagtagaaacaaggttttgccacattgcccaggctggtctccaactcgtgggctgaagtgatctgcccaccttggcctcccagtgttctgggattacaggagtgagccactgtacccggctgatgcaaatgatttctatt

SEQ ID NO: 230847 - DNA, 405 bp, Homo sapiens
tattaagtctgaagaaatatttacttgaatatgacatctaagaatgatggacaaaagctttttaaattttctttccactcctttttctgaaagctttgatacaaaaatcatttgacacaaatgatttttttttttttttgtgacaggatcttactatgttgcccaggctgaagtgcagtgtgctcatgcaatcctcccatctcagcctcctgagtarctgggactacaggcacatgccaccatgcccagctaatttttgtatctttagtagaaacaaggttttgccacattgcccaggctggtctccaactcgtgggctgaagtgatctgcccaccttggcctcccagtgttctgggattacaggagtgagccactgtacccggctgatgcaaatgatttctatt

SEQ ID NO: 230848 - DNA, 405 bp, Homo sapiens
tattaagtctgaagaaatatttacttgaatatgacatctaagaatgatggacaaaagctttttaaattttctttccactcctttttctgaaagctttgatacaaaaatcatttgacacaaatgatttttttttttttttgtgacaggatcttactatgttgcccaggctgaagtgcagtgtgctcatgcaatcctcccatctcagcctcctgagtaactgggactacaggcacatgccaccatgcccagctaatttttgtatctttagtagaaacaaggttttgccacattgcccaggctggtctccaactcgtgggctgaagtgatctgcccaccttggcctcccagtgttctgggattacaggagygagccactgtacccggctgatgcaaatgatttctatt

SEQ ID NO: 230849 - DNA, 602 bp, Homo sapiens
cccaaatatttttgatatgctgttggttttattcacatatgaagaacccatggatttggagggttgactgtatatccttttaaaagacactttaaatatgttttggaacaaagtagactgtaaatgagatatatgctatttagatacctggttaaggatacttgttattttaagctttaaaaaaatttttaatttaattttgtattttgaaaatttaaaacatactgaaaaacaaagtacagtatactcacatttagtcatcaccaatattcaacagctgttaatattttgctatatttgttgtattaatttatcagtttaccagttcatccatccagtctacccatttagttgaactttatcatgtatcttcccaaaaaggacttatatataacaataccataactacacctaagaaacaatttccaggtatcatctaatatcctgtccatgttcaaattagtcatttgtccccaagctattatttycacccggtttgttcaactcaggttgtaatcaaggacctagtttggcatttagttgtatttccgaagtctctgcactcctttttccattgatacattttgaacaggtaagaccaa

SEQ ID NO: 230850 - DNA, 602 bp, Homo sapiens
cccaaatatttttgatatgctgttggttttattcacatatgaagaacccatggatttggagggttgactgtatatccttttaaaagacactttaaatatgttttggaacaaagtagactgtaaatgagatatatgctatttagatacctggttaaggatacttgttattttaagctttaaaaaaatttttaatttaattttgtattttgaaaatttaaaacatactgaaaaacaaagtacagtatactcacatttagtcatcaccaatattcaacagctgttaatattttgctatatttgttgtattaatttatcagtttaccagttcatccatccagtctacccatttagttgaactttatcatgtatcttcccaaaaaggacttatatataacaataccataactacacctaagaaacaatttccaggtatcatctaatatcctgtccatgttcaaattagtcatttgtccccaagctattattttcaccyggtttgttcaactcaggttgtaatcaaggacctagtttggcatttagttgtatttccgaagtctctgcactcctttttccattgatacattttgaacaggtaagaccaa

SEQ ID NO: 230851 - DNA, 288 bp, Homo sapiens
gatttattaacaaccctgtaaatgagagttattctcatctaaaaatagccaacacggtcagtactttcggtttcttgtgagttcaatttttttctctctcctttttttaatcatatgagattcttcaaagaagagcccatatgggaaaatgtaatcagtttactgcaataatttagaaacccaggataaaaaaaaaaaaagctatwctgcagtttaaaaaaaaaagctattacttatttggtacctagtcagtcaaatggttggctaaatgccaacaagagaaagcag

SEQ ID NO: 230852 - DNA, 332 bp, Homo sapiens
gaattgttaggaatcttaaaggtcacttagtgatcttatttagtgggacaccttagatatccaaaggacaagcaatgacatcaagattagcaactcacataattgtggtgagccacccagggcaggccttccctgaggcttccagcctgaagtctccagcactgcragcggagagatcagaaagtcaggagtaggcctacgctgggagagaagcagggggctgcgcacaggaaaatgaagggagatcagatggtatatggagagcaaagagggagtggaagaggaatgtgggtgagaacaatcttccagtgcactcaaacacaaaggaattc

SEQ ID NO: 230853 - DNA, 533 bp, Homo sapiens
aagtaatacacctcccaggcacactcctgacctgctgttccagctgttcaaatcagaaaggcatctcttttcatctgcaggaatactgatgttccatgtagactttccccctatgagcccagcackgcacctgtgcctctgatgaaaaacaacttcccacaagtggaaagttcagggactcaaggcctgcagactggtttcttttgtcccacacggtgcctccgtaatgtgcggcactccccctttacctggagggccagactactgtgaatcctgctactcctctgggtctagctgctcagtgggactcccacactccaggatggtactggagaatatccgccaaggatccagtgatgtgacctgtcctctactctcccagcagcgggtaccagcaccagttctgatgggggtaggagaggagtgacgtagactctgagatttccttagttacaaataaccttagtgttggctttctcagatgccagcagtagcagtaatgtactgggcacatggacagactcaagacctcc

SEQ ID NO: 230854 - DNA, 567 bp, Homo sapiens
atcagtaaccacatggcaaggtttagctacctggaattttgtacctagaaggcattgctagatttgaaagaggcgtcaaggtgcataggtaaaataaagtagacctatatgtattaactttgaaagaaatttatactgtattgatgatttttcaaaaaacaaattgcagaataatttctgtttctctgtttgggttttaatatatttgtgtgtgtgcatgtacccagcatatacagagaggatgggattgtgtttctgtttaaacatacagaaaatgaaaaaaatctgaaaatatgtcatgcaaaggggacacaaataccactagtcatggattagcaatatgaaatgagctttattggtataaagtaagtacttgaagtaataaaacatttatctctgccccttgagttgcctgacccattcttctgcctctaacaactgctaggagtgttcttccagcatccccagtgagctcagtctcttggaaagagtctgtggcacatacaactcacaggaccmcacctcaacattataaaggaggagactcacatacctaccatgtggccc

SEQ ID NO: 230855 - DNA, 563 bp, Homo sapiens
tccccaggggagaagccctggggcagctcctgctagtgccactcccttaacccagccaaggaacagggagggaggagcggtgctcagccaatgaggcgacgccctggagcctttttctacccatgctggccccaggtaccggggccccaggccagaccctccagtgctcctgctgaccttccctgtctgcagcccagctctggactgtggagatgccctcagcctctactcagtggctccagcctcatatttgcgtgctatacctttaacctcaagttctcttgctgctaacttaagctgtgactgtccaggacctgcacacacacatayatgcacgcatgcacacacacacacacacacacacacacgcagaaggtgaacacacaggatgaggccctgaaaactcatttcacccgtgtacctcacccaaaaattcccctttgtactcctatctttatctctaacagacagcatgaaggtagcccgaagtcccctcaccctgtctgtcctcctgattctctagcccagttccctctagctccagcacagactcttatctccag

SEQ ID NO: 230856 - DNA, 563 bp, Homo sapiens
tccccaggggagaagccctggggcagctcctgctagtgccactcccttaacccagccaaggaacagggagggaggagcggtgctcagccaatgaggcgacgccctggagcctttttctacccatgctggccccaggtaccggggccccaggccagaccctccagtgctcctgctgaccttccctgtctgcagcccagctctggactgtggagatgccctcagcctctactcagtggctccagcctcatatttgcgtgctatacctttaacctcaagttctcttgctgctaacttaagctgtgactgtccaggacctgcacacacacatatatgcacgcatgcacacacacacacacacacacacacacgcagaaggtgaacacacaggatgaggccctgaaaactcatttcacccgtgtacctcacccaaaaattcccctttgtactcctatctttatctctaacwgacagcatgaaggtagcccgaagtcccctcaccctgtctgtcctcctgattctctagcccagttccctctagctccagcacagactcttatctccag

SEQ ID NO: 230857 - DNA, 387 bp, Homo sapiens
aactcatctccatgtgatgactgtttagtaggtcargggtgactattgtttattttggaggttctcgttaagagaaggcagtgttatgtgcatgtttgggaaaagcattgctatttgcaggcaaagcagcagctgtagaaaccgctttccaagactattaatatccgggacccagcaaggtagtctggagaaaggctctgcgactaggctcttagtcatgttgttcactcattctggagtcagtcaagaagcaaagggttcctttgtgttggtttatgaatcatggttatttgatctgcaactacattacaagagctaagatgaggtcactatttaagcttcttgtttttaaggacaaaagtctatgtctgacccagagttccaaag

SEQ ID NO: 230858 - DNA, 387 bp, Homo sapiens
aactcatctccatgtgatgactgtttagtaggtcaggggtgactattgtttattttggaggttctcgttaagagaaggcagtgttatgtgcatgtttgggaaaagcattgctatttgcaggcaaagcagcagctgtagaaaccgctttccaagactattaatatccgggacccagcaaggtagtctggagaaaggctctgcgactaggctcttagtcatgttgttcactcattctggagtcagtcaagaagcaaagggttcctttgtgttggtttatgaatcatggttatttgatctgcaactacattacaagarctaagatgaggtcactatttaagcttcttgtttttaaggacaaaagtctatgtctgacccagagttccaaag

SEQ ID NO: 230859 - DNA, 441 bp, Homo sapiens
tacagggcattggcaggccagagaaacgctaattaattcatgtcataaatgtttattgtgcagctactatgtgtactggatagaaagtagtatctgacagacatgttccttgccctctgaaactcagtttagaaaagagaatacaggttcaaatataatgaacatttgttttattttatattacrtaatatctttttttgttgttgtttctatcttcattttcaccaggggaagggaatctgtgtctattggaactcttttcctatatttgttttaggattgccatacctctggtttcccaggtatagttcatcaaaactagggacagatctagtctttatgggaactgcaacttataaaatgtggagttcctctttaggaaaaaggatatgcagccctagaaaatgaaaggatccaaatttttgaagaaaatgaacttag

SEQ ID NO: 230860 - DNA, 441 bp, Homo sapiens
tacagggcattggcaggccagagaaacgctaattaattcatgtcataaatgtttattgtgcagctactatgtgtactggatagaaagtagtatctgacagacatgttccttgccctctgaaactcagtttagaaaagagaatacaggttcaaatataatgaacatttgttttattttatattacataatatctytttttgttgttgtttctatcttcattttcaccaggggaagggaatctgtgtctattggaactcttttcctatatttgttttaggattgccatacctctggtttcccaggtatagttcatcaaaactagggacagatctagtctttatgggaactgcaacttataaaatgtggagttcctctttaggaaaaaggatatgcagccctagaaaatgaaaggatccaaatttttgaagaaaatgaacttag

SEQ ID NO: 230861 - DNA, 441 bp, Homo sapiens
tacagggcattggcaggccagagaaacgctaattaattcatgtcataaatgtttattgtgcagctactatgtgtactggatagaaagtagtatctgacagacatgttccttgccctctgaaactcagtttagaaaagagaatacaggttcaaatataatgaacatttgttttattttatattacataatatctttttttgttgttgtttctatcttcattttcaccagggkaagggaatctgtgtctattggaactcttttcctatatttgttttaggattgccatacctctggtttcccaggtatagttcatcaaaactagggacagatctagtctttatgggaactgcaacttataaaatgtggagttcctctttaggaaaaaggatatgcagccctagaaaatgaaaggatccaaatttttgaagaaaatgaacttag

SEQ ID NO: 230862 - DNA, 441 bp, Homo sapiens
tacagggcattggcaggccagagaaacgctaattaattcatgtcataaatgtttattgtgcagctactatgtgtactggatagaaagtagtatctgacagacatgttccttgccctctgaaactcagtttagaaaagagaatacaggttcaaatataatgaacatttgttttattttatattacataatatctttttttgttgttgtttctatcttcattttcaccaggggaagggaatctgtgtctattggaactcttttcctatattygttttaggattgccatacctctggtttcccaggtatagttcatcaaaactagggacagatctagtctttatgggaactgcaacttataaaatgtggagttcctctttaggaaaaaggatatgcagccctagaaaatgaaaggatccaaatttttgaagaaaatgaacttag

SEQ ID NO: 230863 - DNA, 583 bp, Homo sapiens
gagcacagcagctgtggcagatcatggccagactgcttttttaggtggaacctggatccatccctactcattgggtggggcccccttgtgggaatttcaccaactccagccagaggtttatggacagaactctgatcttcctgggcagaactcctgtggggagggacagccacagtctctgcggttcagcagacttagtctttcctgcctgctggctctraagggtctggacattctggacaagggagattccctccagtgcagtgcaccctctctgccaaggggcagccagagtgctttgttaagtggtccccgatcctgtacatactccctaactgattgagaccaccaacaggggtctccaggcaccttatacaggagtgttcctgctggcatcacatcagtgcccctctgggatggagctcaaaaaagaaggagcaggcagccatccttgctgttctgcagcttccactggtgacacctccaggtaggggagggaccaagtgaatagggtctggagtggacccccagcaaactgcggcagccctaaggaagaggggtctgactgttgaaagaaaaacaa

SEQ ID NO: 230864 - DNA, 560 bp, Homo sapiens
ctggatcaagtgcatagtgtgaacaacaaagccttccacgatcggtctcattatatttttctgacctcattttctagtccaactacatcaaaatattgttatttcaagaaacaccattctccacctgaaagcatgcctcccgttgagtctagtcaaatctttcagaatttaatactcgagtcattctcaaacctcttccaatatcagcaagtagcaatcatcatttaacagttcctcccctgtaattaaatccatcactcytctcctagtaatcagaaagtccttaaagaaatgcttaattcctttgtataactgttctattaatctaccttgtttgattcactctgcagcacataaggactaaaagccccattattacaggtttaacaatgatagtaaagctacccccactcttctgttctcatcagttgagttttatgcttcccaagagtaagttatgttgtgtccccagctgtacttactttaatgacatgatttaactaaatatataaatgaacaaaataatgccaaatatagagttgcttctagaaaattaagat

SEQ ID NO: 230865 - DNA, 622 bp, Homo sapiens
atcaagctactaattcacatttacctgtgttgttctgtatttacataatttgtcatttttgaatctcgagttcatcattttactttatcccttgaatattgcttttactgaagccgacttttgatggaacactaatctgatttgtctcaattgtttattgcattgagaaatagggattactatggacagaactttcatctggctataaaattgtattgattgcactaattataggtataatggtcatttcaaagaaaggaattgctgtaatgggtcctaaaaactctatgcattcatargagatatgtccctagaatttcccaaattcatacttttgtgaataacaggtcgatttcacaaatgtccagacaacatctagaaggaaactataatgagagcagaagctgagtttaagatacgcatttgtttgttgatttgctatgttggttcattcactatttaaagtcaagttactgatcagcctgccgtggctgtaattcaaaacacatctttagcaaattgataaattataaaatatcatggctctttcatattgctcatacataagttataaatgtcaagggttatctatatggttactaagagcaatgcaattggtttc

SEQ ID NO: 230866 - DNA, 566 bp, Homo sapiens
gatatctgtctctgaggattgttaagataaaattagataacatttttaaagtagtaatcacactgtctgccacatgacagtcacttaataaatgacaggtggtattatatttcacagtgagtttgccctttacatgtaatacataattactgataccagtccaattttggactttagggaatgaatccacatttataaaactgagagaattttcagggaaagagtagaattttcccttgcaacaccttttttctttttcctttagaaatgagtattgcatagctctattgagaattcacctcctattatttaaaacaacgtttgattgggttcaaactctctcctgacatcttctcaaaggacaatccaaactcttcaattatctttttcacatacatctcaaaakgtattctgagtgcctgaaaggcaataattcttttcccttaaagttttgaattccatctgatgaagatattacacttagtggaatagtaccatgtcacagaaacaatagcttaaattaacctctcactgtgttcagtcaggttctttcttttccttcataa

SEQ ID NO: 230867 - DNA, 385 bp, Homo sapiens
ggccacattaagaaaaaaacttgtatttaatgtgaaaactaatagtcatatagtaaatacaataagtaatattattaaaagtctgttcagtacatctttaatctttaattgtataaatgtatgatgatgctattaataacacatattgattcatttttattaaattttgacaaagagttaattttgtcctaggataatcaatacccttaaatggaacaaactcatatataatattgatttgtagagagaaaaaagtcattgaatttttgcttaggggaataagtraaattatctataatataaatattgaaaagtactaattcactttttttctaggaagaaagagacatgggatatttctagtaatattgatttattaaaaatg

SEQ ID NO: 230868 - DNA, 591 bp, Homo sapiens
tcctttaaattacactctagatataatctaggtacgattagtggtaaagtaccatgtaataacatgagactttaataaatgagtaaacaattcaagtgtacaatggaaaatayatttcacttcatatgttcattattataaagaaaataaaaatgtttctgtatctgtcaagaagaaatccaacattgtaccactatttttttagtataaaacgtttattttttactaacattgtatggttttaacaaaaaaaaattgtaaatggttttgataggttgatttaagattttattcttttaggctaactttgtataatgagtgtgcatgtctttacttcaaaatgtatgaagtgtatgaaatgtatgaaaagtgaaaaatattgtgtcaggagacagaattataaaagcttaaaaaaaatcatgagttgtttgttgttgttgctgttgtttccccaagatggctaacttgggacagtggatgccagctatctcagaaagacaaaaatgaccaagtagagtggctcactccttaatcccagcactttgggaggtcaaggtaggtggattgcttcagtccaggaatcctagacct

SEQ ID NO: 230869 - DNA, 591 bp, Homo sapiens
tcctttaaattacactctagatataatctaggtacgattagtggtaaagtaccatgtaataacatgagactttaataaatgagtaaacaattcaagtgtacaatggaaaatatatttcacttcatatgttcattattataaagaaaataaaaatgtttctgtatctgtcaagaagaaatccaacattgtaccactatttttttagtataaaacgtttattttttactaacattgtatggttttaacaaaaaaaaattgtaaatggttttgataggttgatttaagattttattcttttaggctaactttgtataatgagtgtgcatgtctttacttcaaaatgtatgaagygtatgaaatgtatgaaaagtgaaaaatattgtgtcaggagacagaattataaaagcttaaaaaaaatcatgagttgtttgttgttgttgctgttgtttccccaagatggctaacttgggacagtggatgccagctatctcagaaagacaaaaatgaccaagtagagtggctcactccttaatcccagcactttgggaggtcaaggtaggtggattgcttcagtccaggaatcctagacct

SEQ ID NO: 230870 - DNA, 416 bp, Homo sapiens
caccacaagttataagagatgccacaatctrtttatctttaatgtgattcagaagttggtgaataatttacatcttaaaagaagttcagctgatcccaagaagtgtgatagtctaattcccaagatggaagaaccctcaagcaggactactaaaacagaaaaatctgccagataatagagaaaagaatgtagttatgaaattttaaaatatattaaaaatcgcaacagtctcagaccctttgacatgggcataaaaaaacctgatacacctcattactctcagggggcatcattgtgattacagccatctagccaatagctcctggtgacagtgcaatcaaaaattataagttatattcagcttattttgtgaaagacatcagtaaaataagtaataatacattttgaaaaaactt

SEQ ID NO: 230871 - DNA, 433 bp, Homo sapiens
caccacaagttataagagatgccacaatctgtttatctttaatgtgattcagaagttggtgaataatttacatcttaaaagaagttcagctgatcccaagaagtgtgatagtctaattcccaagatggaagaaccctcaagcaggactactaaaacagaaaaatctgccagataatagagaaaagaatrtagttatgaaattttaaaatatattaaaaatcgcaacagtctcagaccctttgacatgggcataaaaaaacctgatacacctcattactctcagggggcatcattgtgattacagccatctagccaatagctcctggtgacagtgcaatcaaaaattataagttatattcagcttattttgtgaaagacatcagtaaaataagtaataatacattttgaaaaaacttccaagaagaagagttaa

SEQ ID NO: 230872 - DNA, 416 bp, Homo sapiens
aagagatgccacaatctgtttatctttaatgtgattcagaagttggtgaataatttacatcttaaaagaagttcagctgatcccaagaagtgtgatagtctaattcccaagatggaagaaccctcaagcaggactactaaaacagaaaaatctgccagataatagagaaaagaatgtagttatgaaattttaaaatatattaaaaatcgcaacagtctcagaccctttgacatgggcataaaaaaacctgatacayctcattactctcagggggcatcattgtgattacagccatctagccaatagctcctggtgacagtgcaatcaaaaattataagttatattcagcttattttgtgaaagacatcagtaaaataagtaataatacattttgaaaaaacttccaagaagaagag

SEQ ID NO: 230873 - DNA, 396 bp, Homo sapiens
gccacaatctgtttatctttaatgtgattcagaagttggtgaataatttacatcttaaaagaagttcagctgatcccaagaagtgtgatagtctaattcccaagatggaagaaccctcaagcaggactactaaaacagaaaaatctgccagataatagagaaaagaatgtagttatgaaattttaaaatatattaaaaatcgcaacagtctcagaccctttgacatgggcataaaaaaacctgatacacctcattactctcagggggcrtcattgtgattacagccatctagccaatagctcctggtgacagtgcaatcaaaaattataagttatattcagcttattttgtgaaagacatcagtaaaataagtaataatacattttgaaaaaactt

SEQ ID NO: 230874 - DNA, 396 bp, Homo sapiens
gccacaatctgtttatctttaatgtgattcagaagttggtgaataatttacatcttaaaagaagttcagctgatcccaagaagtgtgatagtctaattcccaagatggaagaaccctcaagcaggactactaaaacagaaaaatctgccagataatagagaaaagaatgtagttatgaaattttaaaatatattaaaaatcgcaacagtctcagaccctttgacatgggcataaaaaaacctgatacacctcattactctcagggggcatcattgtgattacagccatctagccaatagctcctggtgacagtgcratcaaaaattataagttatattcagcttattttgtgaaagacatcagtaaaataagtaataatacattttgaaaaaactt

SEQ ID NO: 230875 - DNA, 520 bp, Homo sapiens
agtaccctttgaacagcatgcaaagaataggagaatatgctgtctcaaaaaggtcttcaaacaaaagattttccagtagttgtggtcagaaatgtgatttaatttcttgyttgtaaaatagcaacaaaaaaaatcttatagaaaaatctcatatttttctgtatagcctgttcacaggaagaattctgttcagctgaactccagagaaatagtttctctctttggaaagtgcaaattctaaagcattacagaatagaaatgtaaaaggaaatagagaacagagaaatggttgtggtaggtaaagatgttacctgggaaaaaaaaggaaagacataaagactcaagtccaatcaataaatatatttataatgcctttataatgtcaaatatattccaattgcttgagacagggtcaacctaaaatagtctgcactattgccctcttaactgtgtcattttttttttttattttaaaaactattgagcagcacatcctctgatttaataattttattgtggt

SEQ ID NO: 230876 - DNA, 520 bp, Homo sapiens
agtaccctttgaacagcatgcaaagaataggagaatatgctgtctcaaaaaggtcttcaaacaaaagattttccagtagttgtggtcagaaatgtgatttaatttcttgcttgtaaaatagcaacaaaaaaaatcttatagaaaaatctcatatttttctgtatagcctgttcacaggaagaattctgttcagctgaactccagagaaatagtttctctctttggaaagtgcaaattytaaagcattacagaatagaaatgtaaaaggaaatagagaacagagaaatggttgtggtaggtaaagatgttacctgggaaaaaaaaggaaagacataaagactcaagtccaatcaataaatatatttataatgcctttataatgtcaaatatattccaattgcttgagacagggtcaacctaaaatagtctgcactattgccctcttaactgtgtcattttttttttttattttaaaaactattgagcagcacatcctctgatttaataattttattgtggt

SEQ ID NO: 230877 - DNA, 582 bp, Homo sapiens
aatagtctgcactattgccctcttaactgtgtcattttttttttttattttaaaaactattgagcagcacatcctctgatttaataattttattgtggtaccttatagccaaaagacctatatttaatcactttgcttctttccctcattcacttgctacctcacactgctctctgattcttatatggtcttttaaaatcattagccacatttcaggtcttctgaaagctgcaaagggaccttatatatgatttcccaggcatagtgactaacgccattcaaagttctcmccaagctttcctcatttcagacctaatgattacatacaagatcatcctccatgtgacaaaaggtcatgagaagtccacaaacctttaggaataaaaattggtaaaatgaattaaattttatctggctttaaattcaaaggtccatgagtagaagcaggaatttacatttcaacagaagaagaatatttgacatccccaaagtcctaactgaaagagacacttagtgcacatcatcctttattccagacacccataaattctcacagtatttatgaaaccagattgtgctggt

SEQ ID NO: 230878 - DNA, 632 bp, Homo sapiens
ttattgcagcactacacaatagcaaagccttggaaccaacccaaatgcctatcagtgatagactggatgaagaaaatgtggcacatatacatcatggaatactatgcagctataaaaaaggatgagttcatgtcctttgcagggacatggatgaagctggaaactattattctcagcaaactaacacaggaacagaaaaccaaacaccacatgttctcactcataagtgggagttgaacaatgagaacacatggaaacagggaagggaacatcacatacagggaggagaacatcacacactggggcctgttggyggggtagggggctaggggagggatagcattagaagaaatgcctaatgtagatgacgggttgatgggtgcagcaaaccaccatggcacgtgtatacctatttatcaaacctgcatgttctgcacatgtatcccagaacttaaagtataataataaaaaaaaaaaaagtcagagatatacaatttgtgagactgccttggaagatactcaggtaaccacattttgttcaacagcaattttacatcaagattactaggaagtggttttcacaggactcagtatccccaaaaaggctgtactttctttaagcaacagctcta

SEQ ID NO: 230879 - DNA, 595 bp, Homo sapiens
gtaatattttatccataatgtataataagcataattaaaaggttaaaaagagatttaaatagtcacaaaataacataaccctcttctaaagcaaatcttcagtgttctgagaaaagaaattggttacttcatattatagtcttggatttcattccatatcttatatgcacatagtatcatggactttctgatgcaacatctgtttttctgtcttaaacgggaggcatttatccacatattgattatgggctgttaattttcctccatttcagccagtcatccccatcagtcagtatcactttactgtctttagcggtttctrgagtgccttacctcaaattaaatctgttatttttcactctttcctagagtgccatttatctatctctcttactgagactttgtattgctaatgtcttctcacagtcactcctatcttgaaataaatttacatacagcctacccaattaaagtatgtttgctgctgaatgataaaaggcttccaaaatagattagcatgtaaaaaagagtcttcatatttatgattatatatattggtataaattgacctaaaaccaatggtgttattatatcc

SEQ ID NO: 230880 - DNA, 418 bp, Homo sapiens
gctgattttcaaatttgctgtatgtcagtatctcaatgattttaatccatatataaactcatattttagatgaaaaatgtctaaggtttctaatattttttcggcatatacaatacagataacgataagaaactttggtctaacattgaatctaaatattttatttaaaagcatatgaataaatgaaatgtgtaatatgttggcctgtctgactaccatcttttactacctgcaagaagaaaatatgaaacacatttttaataaatgttttatcaaacacatttgtaaggtaatatggcacaatgaaaattatastaaggttcactaagcagccttatacaaattcaataaatgctagatgtctttaaagacagcatcagttgcttagataagtgaagtagccttcctgaccagaggt

SEQ ID NO: 230881 - DNA, 576 bp, Homo sapiens
tggttttgctgtcttatgactcattggtcactagaaaggtctactcaatccaggcagtgtgagatcaggaggatagtagacgaaggatgggaagggtagttttcctcagagagtcggtgtaaaggactggtgtgtactacagatgtaagtgaagtgtgaacagagaccaggaggactccccaatcatttataacaatatttagttttctctcctgctttcttccttactttattttaataattagataatatatttctaaaatgaggattttcaggaataggcttaactttttgtgtataagtttcatgcccagtatatggggttctcaccaaacatagcttttaaataagaaccaaatwcccaatctcaccaccttcttctccgtattgtctatgggtgatgatatgtgagggaaaaaaaaagtaggtcttccaaagtgtcctttttattaaaacatgggaaaaataagaacaaaaggaagaaataaaatatggtgcctctaaatctagaataaataaaacatttttgacattacaaaaaggaattcttatatacctaaatttgagttgattttt

SEQ ID NO: 230882 - DNA, 586 bp, Homo sapiens
cttttgcagtttgaggtacaacagtaaaattaacactaatttcctttttcttctttgcaatttcacagataaaagatcttagcaacctcagcattcagttttttttaaacctaaaggaatcacttaatagttttcatttggcatattcaaatggccagcatcagtactcttgcactttggggtcattattaagtaaaataagggttacttggacacaagcacytgtgatactgccacagttgacctgataactaagaaggctgttaagtgactaattggagggcactgtatacagtgtgcatttgccttatatatggaggattcacatcctgggagggatgacatgaaatttcatcacactactcagaatgttgtgaaatgtaaaacttatgaattgtttatttctggaattttccacttactatttcagatcacagtttaccagagataactaaaaccatggaaagcaaaaccaaggctaaatgaggagtactgtatactaacctgtgtatatacacatacctatttctgtatgtaaccataaatatctgtattaggctaatatgagttcatactcaagaaagta

SEQ ID NO: 230883 - DNA, 586 bp, Homo sapiens
cttttgcagtttgaggtacaacagtaaaattaacactaatttcctttttcttctttgcaatttcacagataaaagatcttagcaacctcagcattcagttttttttaaacctaaaggaatcacttaatagttttcatttggcatattcaaatggccagcatcagtactcttgcactttggggtcattattaagtaaaataagggttacttggacacaagcacttgtgatactgccacagttgacctgataactaagaaggctgttaagtgactaattggagggcactgtatacagtgtgcatttgccttatatatggaggattcacatcctgggagggatgacatgaaatttcatcacactactmagaatgttgtgaaatgtaaaacttatgaattgtttatttctggaattttccacttactatttcagatcacagtttaccagagataactaaaaccatggaaagcaaaaccaaggctaaatgaggagtactgtatactaacctgtgtatatacacatacctatttctgtatgtaaccataaatatctgtattaggctaatatgagttcatactcaagaaagta

SEQ ID NO: 230884 - DNA, 586 bp, Homo sapiens
cttttgcagtttgaggtacaacagtaaaattaacactaatttcctttttcttctttgcaatttcacagataaaagatcttagcaacctcagcattcagttttttttaaacctaaaggaatcacttaatagttttcatttggcatattcaaatggccagcatcagtactcttgcactttggggtcattattaagtaaaataagggttacttggacacaagcacttgtgatactgccacagttgacctgataactaagaaggctgttaagtgactaattggagggcactgtatacagtgtgcatttgccttatatatggaggattcacatcctgggagggatgacatgaaatttcatcacactactcagaatgttgtgaaatgtaaaacttatgaattgtttatttctggaattttccacttactatttcagatcacagtttaccagagataactaaaaccatggaaagcaaaaccaaggctaaatgaggagtactgtayactaacctgtgtatatacacatacctatttctgtatgtaaccataaatatctgtattaggctaatatgagttcatactcaagaaagta

SEQ ID NO: 230885 - DNA, 586 bp, Homo sapiens
cttttgcagtttgaggtacaacagtaaaattaacactaatttcctttttcttctttgcaatttcacagataaaagatcttagcaacctcagcattcagttttttttaaacctaaaggaatcacttaatagttttcatttggcatattcaaatggccagcatcagtactcttgcactttggggtcattattaagtaaaataagggttacttggacacaagcacttgtgatactgccacagttgacctgataactaagaaggctgttaagtgactaattggagggcactgtatacagtgtgcatttgccttatatatggaggattcacatcctgggagggatgacatgaaatttcatcacactactcagaatgttgtgaaatgtaaaacttatgaattgtttatttctggaattttccacttactatttcagatcacagtttaccagagataactaaaaccatggaaagcaaaaccaaggctaaatgaggagtactgtatactaacctgtgtatatacacatacctayttctgtatgtaaccataaatatctgtattaggctaatatgagttcatactcaagaaagta

SEQ ID NO: 230886 - DNA, 597 bp, Homo sapiens
aagcttggtggctcacaatgaaaagctgggtaatcaggaaaataaaatacgtcctttaaaacagatttcaggggaagaatctaaattttatttaaacaaataaagtaaaagttacccttattctaattaacactttctgttgaaaacatacacatattttattacaaggctggaggtaaaattatrtcagaagtatagcaaatgttctaaaaacaacataagaagccaaatgagtgaatctttacagcttactcccttttttaataccatttttttcttgaaaataaagtgtaactgacagttctgtcacaaaaatatactctatcattgtaacataaatatgcagtgtagttctacgtattttaaaatggtagttgttgaggagaaaacagctgttttgaaagtacatgaacaaccaaataactacttgaaacatactttattgcaagggtagctatgtccaaataatgaagagagatttttaagagactattggagcattctttttcttggatccttctgaaggggaaaaaatgacttttctctcaaaagtaattatattttattgtataaccagatggtagtatgtgtcatgac

SEQ ID NO: 230887 - DNA, 407 bp, Homo sapiens
tctcgtaattaacattttaaattgctttttaaataccttgaggtggcaaaaaattttgatagcagaaaagaaaagaaaaaattatggccaggtgcagtggttcacgcctgtaatcccaacacttygggaggccggggcaagatgatcacctgagcctaggagtgggcaacaaagtgagaccccatctctacaaaaaaattttaaaattaaccatgtttggtgacatgcacctgtgttcccagctacatgggaggctgaggcaggaggatcccttcagcccaggaggctgaggctgcagtggacattgattgtgccaccgcactccagcctgggtgacagagcaagaccttgagtctaaataaataaataaatagctagcgtaagcccgggcacagtggctcacgcct

SEQ ID NO: 230888 - DNA, 407 bp, Homo sapiens
tctcgtaattaacattttaaattgctttttaaataccttgaggtggcaaaaaattttgatagcagaaaagaaaagaaaaaattatggccaggtgcagtggttcacgcctgtaatcccaacacttcgggaggccggggcaagatgatcacctgagcctaggagtgggcaacaaagtgagaccccatctctacaaaaaaattttaaaattaaccatgtttggtgacatgcacctgtgttcccasctacatgggaggctgaggcaggaggatcccttcagcccaggaggctgaggctgcagtggacattgattgtgccaccgcactccagcctgggtgacagagcaagaccttgagtctaaataaataaataaatagctagcgtaagcccgggcacagtggctcacgcct

SEQ ID NO: 230889 - DNA, 470 bp, Homo sapiens
  misc_feature (1)...(470): n = A,T,C or G
taaatatgactttgaatactcataaaatcaaccttgaagcaatgtttttcaggtcaaaatcttttcctttcatatccttgctagttgctgcatttaatcaaaccattaatttatgtcatcaccacagcagtcatgttgtcagtgccaggatcawgggaagggggtggagcaatggggtgaagggtaaggctgggagaaccagaagtatgctgacctgacattgaagatgtagtgaggccattggctcatcaacaagggataaggtcagaagttntgatgtaggcacaagcaaggtttaggaagggctgtgcttcagaaacctagcagcatggacaaaaaccaggggacccaaatgctaaaagacacagttgattattctctcctttatcctgttaattaaatcattcattcaacaaacatttatcaggcactttctatgtcccagaccctgtaccaggcactaggaattc

SEQ ID NO: 230890 - DNA, 570 bp, Homo sapiens
aagctttctgaactgtgaaccaattaaacatcttttttttaataaagtacccagtctcaggtattcctttatagcgatgtgagaatagcctaatacagatacatgtgtacataaatacatacatacaacagtatacatataggcataggagtggttgtagatgcacgtgcggacatacatatggatgcatacatacatagaarttgtgagtagtttctggattaacttaaataatgtcagccaatttcaattttaactcttccattaatatagttcaattgaagaaagcatttttttaagatacttacaaatggaaacaaaacccattcccttatttcaaggcaaaagagtctcaaaatctatgaaaacttcatcagcatgagtgtagctaaggagaaattaatcatgactccttttgtacttataatttattctttccaggtgtccatttttccgcctattattactggagatgtgcagtgggactttatgttgggtctcaaaacatcaactaaacaagcaaaattacatggtgacccccatatattgcattgtcatcagtattcttaa

SEQ ID NO: 230891 - DNA, 549 bp, Homo sapiens
aagaataaactctcatttatctgtgtccatttatttattccctacacctcctcgccccaaaaggaagagtggcaaacaaactttacagttttcttttctttttttaacttttactttaggttcagtggtacatgtgcaggttctttagatgggtagattgtgtgtcacaggtgttcagtgtacaggttatttattttcccaggtaataagcatagtacctgataggtatttttttgatcctctccctcctctcaccctccaccctccaagtgcacatgtgtcaacgtgtactcaatatttaactcccaattataagtgagaacatgtagtatttggttttctgtttctgcactattttgcttgggataatggccttyaagtctacccatgtggctgcaaagaacaagatcttgttcttttttgtggctacataatattccatggtgtatatatactactttttttttttaatccagcctaccattgatgggtatttaggttgactccatgtctttactattgtggatagtgctgtgatgaacatatgca

SEQ ID NO: 230892 - DNA, 474 bp, Homo sapiens
taaacttccctctttctactgcttttgtggtatcccatgtattttggtacatggtgttttcattayaatattttttcaacatttaaaaaaatgttattcttaatctgttcattgacccactggtcatttaggtttatatcatttaattttcttgtgttttatagtttccaaaatttttcttgttgttaatttctagttttattccattgtggtcaaagaaaatacttgatgttatttcaatatttttgaatattttaagacttgctttatggttgaacatatcacctatcattgaaaattagccatgtgatgaggagaagaatgtttattctgtagccatttgatgaaatattctgtaaatatctactaagtccatttggcctacagtgcacgttaagtctgatgattttctgtccagatgatctgtccgatactgaaagcgggatgttgaagtctccagatattattgtattt

SEQ ID NO: 230893 - DNA, 562 bp, Homo sapiens
tctgtggtgcctcctgttttacccaaggagtcccaggctgttagagcttgaatatctttttgggtatctttacagcagtggtccactctactggtactaatttactgtatttgtccattttcacactgctgataaagacacacccaggactgggtaatttataaagaaaaagaggtttgatggtctcacagttccacgtggtgggggaggcctcacagttatggtgraaggcaaaaggcacgtcttacatggcagcagacgagagaatgaaaaccaagcaaaagggatttccccttataaaaaccatcaaatctcgtgagacttactcactaccatgagaacagtatgggggaaaccgccaccatgatttaattctctcccactaggtccctcccacaacacatgggaattatgggagctacaattcaagatgagatttagttggggacacaacaaagccatatcacccacccattgcagtgatactgaatcaaaagttcaagtggtcactttttggtcacaaagggaccttttccagctgtcccatcagcccttaaatttc

SEQ ID NO: 230894 - DNA, 562 bp, Homo sapiens
tctgtggtgcctcctgttttacccaaggagtcccaggctgttagagcttgaatatctttttgggtatctttacagcagtggtccactctactggtactaatttactgtatttgtccattttcacactgctgataaagacacacccaggactgggtaatttataaagaaaaagaggtttgatggtctcacagttccacgtggtgggggaggcctcacagttatggtgaaaggcraaaggcacgtcttacatggcagcagacgagagaatgaaaaccaagcaaaagggatttccccttataaaaaccatcaaatctcgtgagacttactcactaccatgagaacagtatgggggaaaccgccaccatgatttaattctctcccactaggtccctcccacaacacatgggaattatgggagctacaattcaagatgagatttagttggggacacaacaaagccatatcacccacccattgcagtgatactgaatcaaaagttcaagtggtcactttttggtcacaaagggaccttttccagctgtcccatcagcccttaaatttc

SEQ ID NO: 230895 - DNA, 519 bp, Homo sapiens
ttaatttctaagaatatggagatttttcatatgtctttgtgttattagtttcttatttaaatttgttgaggtcagagggcatactacatatgatttgaatccattcaacttatttagacttgttttatgtctcagcatatggtctatcttggtaaatgtccaatttgcatgtgaaaaaagtctatcctgccattgttggtatatgtcaattaggtgtcacattggttgataatgttcaagttttctagactgattttctgtcaacctgttttattactaggagagatgtgttattacatccaactataattgtgggcttttctatttctcctgtcatttttattagtttttattttacgtattttttaagctgtattataaagtgcatacacatttaggattgttacatcttttcgatgaattggctcttttgtcrttatgaaatggccttgttattcctgatagtattccttgttctgaactacattttgcctgatattaatatagccatataagctt

SEQ ID NO: 230896 - DNA, 595 bp, Homo sapiens
aagaagaaaggtgagatctttgtggtcctggaacttccattctagataggagaggcaaacacataaaagaacaagatgatttcagggagtggtaagggttatacagaaataaatagactaacagcaggtagctggagggacatcccttgatagagtggtcagggccagactctctggcttggccctcagatctaaagaagattatagtggacaggtaaagagttttccaagtataaagaataggaagtaccaaatccatgagagtgagaagggcaatccattgatctgttctaggaacagaagaaggccagtgtaaccagggaagggaaagtggcaagagatcacagtagacacttattatgagttgaattttgtccttcaaaaagatgttgaagccctatcccctgtgagtgtgatttcatttggaaatagagtctttgcagatkatccagttaagatgagttcattaggacatgccctaacccagtatgagtggtatcctataaaaggaaaaagttggactcagacacatacacagggagaatgcagcgtgaagatgaaggaggatattggggtgatgcatctataagccaag

SEQ ID NO: 230897 - DNA, 595 bp, Homo sapiens
aagaagaaaggtgagatctttgtggtcctggaacttccattctagataggagaggcaaacacataaaagaacaagatgatttcagggagtggtaagggttatacagaaataaatagactaacagcaggtagctggagggacatcccttgatagagtggtcagggccagactctctggcttggccctcagatctaaagaagattatagtggacaggtaaagagttttccaagtataaagaataggaagtaccaaatccatgagagtgagaagggcaatccattgatctgttctaggaacagaagaaggccagtgtaaccagggaagggaaagtggcaagagatcacagtagacacttattatgagttgaattttgtccttcaaaaagatgttgaagccctatcccctgtgagtgtgatttcatttggaaatagagtctttgcagatgatccagttaagaygagttcattaggacatgccctaacccagtatgagtggtatcctataaaaggaaaaagttggactcagacacatacacagggagaatgcagcgtgaagatgaaggaggatattggggtgatgcatctataagccaag

SEQ ID NO: 230898 - DNA, 558 bp, Homo sapiens
cctcctctctgggcagagcacctctgaaataaaggcagtagccccactcaggggcytatagttaaactccccatctccctggcacagagcacctgggggaagggggtggctatgggcacagcttcagcagacttaaacattcctgcctgcaagctctagagagagaagtggatgtcttagcacagtgctcaagctctgctaagagatagactgcatccttaagtgggtccctgatccccatgcctcctgactgggagacacctaccagcaggggtcagcggacaccttatacaggagagctctggctggcatctggcaggtacccctctaggatgaagtttccagaggaaggaacagacagcagtctttgctgttctgcagcctctgctggtgatacccaggcaaacagggtatggagtggacctccagcaaactccagcagacctgcagcagaggcctgactgttagaaggaaaactaacacacagaaaggaatagcatgaacatcaacaaaaaggacgtccaaagaaaaaccccatccgaaggtcaccaacatcaa

SEQ ID NO: 230899 - DNA, 558 bp, Homo sapiens
cctcctctctgggcagagcacctctgaaataaaggcagtagccccactcaggggcttatagttaaactccccatctccctggcacagagcacctgggggaagggggtggctatgggcacagcttcagcagacttaaacattcctgcctgcaagctctagagagagaagtggatgtcttagcacagtgctcaagctctgctaagagatagactgcmtccttaagtgggtccctgatccccatgcctcctgactgggagacacctaccagcaggggtcagcggacaccttatacaggagagctctggctggcatctggcaggtacccctctaggatgaagtttccagaggaaggaacagacagcagtctttgctgttctgcagcctctgctggtgatacccaggcaaacagggtatggagtggacctccagcaaactccagcagacctgcagcagaggcctgactgttagaaggaaaactaacacacagaaaggaatagcatgaacatcaacaaaaaggacgtccaaagaaaaaccccatccgaaggtcaccaacatcaa

SEQ ID NO: 230900 - DNA, 576 bp, Homo sapiens
aattttgatctaagggtgagaagaaggaactaaccatctcatctcatctggagctcttcttgacacatggtaccctaaaaacattttgtattttcctgttttctatggcatccatggacttcctttctgatcattcatcaaagggccatctrctctgtgctcagtctgttccataaatgaaattaaggcatatattatgtggctccagtccagcttccccttcttcatagctgctgtgtccctttgaacagcccatgaggcaaaactgatgtctcaccttactgcaaggtgcatgacccctttgcttccaatcttattttactttgaaaaatacctgcacctcatgctgttcagatgttatgttagtgtatagtgttatttaccatacactaaaccactagttgtttagaccctttggcagtaacccattttaccaatgaaaggttttaatgaaaattcaacatttcagtccaattcttctattacaggaagaataacaactttcaatttccttttatatcccaattccttttaagtgcattactgacatttgctaaccaggctcctttatatttt

SEQ ID NO: 230901 - DNA, 543 bp, Homo sapiens
ttctgggagaaataggggacagaaagcaaatatttaattaaggttcaattttcagcagtgaaaaaggcaggtaaacaattgagaaaaatggatcatttttaaagctgtattgaagtttaattgacacacaataaacatcaagtatttaaagtacacaatttaatagactttgataaatgtatatatgtttgaaaccaccaacataatcaagagagtggagtatgtcagtcacccacaagtgttctctcacccatgcagtctctcctccctcttccttttcccctggcaaccactgatcttttactatagattagtttggattttcttgagttttatataaatataattatacagtacatgttctcttattgttggcttctttcaktcattataattattttgagatacatccttatttttgcatttatcaagacttcatttcttttattcctgagtagtagcccattgtatggctataacgcacattgcttgtccattctcctgttgacggatgtttggattgtttcctggtttttggttatt

SEQ ID NO: 230902 - DNA, 603 bp, Homo sapiens
tttatattaagtcatctttaccctggaaaatgcgcctctgctaacacacaaactttgtgaaatcttcccaagctccatccaatccccggcagagtgaggttcctcttgtctctgaagcaagttcttgcaatatctactatcacataactttgtggtttgtctcctcatgagtctactggagtcagaccagaggccagggcacttgtaccctgtatatcaaagtatgtgaatggatgttgaaaacacaaagcaaaagaatttgagtatatcaagcaacacagagtcagttaactacayagcttagcctaacctttatgatagagtttttaaagtcccctggaccagtcaaaatgtccccagtcgatataatctacattggccctatcttactaatttacttcttttcccacttgtctgccctagattattctcatatttatgctaaaaatgcacaagctaccagagcaacatccaatttccccacaaacgctaacaaaaggtttacttcatttgctaccaaaataaagtatttgaattaaggtaccaagagtgatgtacacttcttacagaaattgtgtgtactaccacgataaccatacagat

SEQ ID NO: 230903 - DNA, 603 bp, Homo sapiens
tttatattaagtcatctttaccctggaaaatgcgcctctgctaacacacaaactttgtgaaatcttcccaagctccatccaatccccggcagagtgaggttcctcttgtctctgaagcaagttcttgcaatatctactatcacataactttgtggtttgtctcctcatgagtctactggagtcagaccagaggccagggcacttgtaccctgtatatcaaagtatgtgaatggatgttgaaaacacaaagcaaaagaatttgagtatatcaagcaacacagagtcagttaactacatagcttagcctaacctttatgatagagtttttaaagtcccctggaccagtcaaaatgtccccagtcgatataatctacattggccctatcttactaatttacttcttttcccacttgtctgccctagattattctcatatttatgctaaaaatgcacaagctaccagagcaacatccaatttccccacaaacgctaayaaaaggtttacttcatttgctaccaaaataaagtatttgaattaaggtaccaagagtgatgtacacttcttacagaaattgtgtgtactaccacgataaccatacagat

SEQ ID NO: 230904 - DNA, 619 bp, Homo sapiens
atgcatggaaagtgtcatgccacccatgtatgtttgaaatgtcagaccatgtgcaaaactttaagttacttttctgcttcctaggctttgcctaccagacctttatttcagcaattattgaagcaattgcatttaaggttacaacatgaatttcatgggaactccctgttcratataaatggaaacatgttccttggaataaaatatctttatgagtgaagtttaatatattttgaatcaggcccaaagagatcttttgctgtgagtgaagaataaagtaaaaattccattaataaaattttatggctgtataggtggagaaaaatcttttccacataaaaatattttcatgtttttctcaaattaaaaaaatggaaagttattgatagtcacttaaaactaagcctaattattagaatatagatagccaaatatttctggagacaatagggcaaaaatattttagagttttaaaatgtctgtaactttaaccaagaaattatgcttttagaagtctactcaggaaatacaacttgaaatgctggatacattttaaaaatcattttgatgacattggagaggtataagccagtcaaaaattgagagttcaagattgtca

SEQ ID NO: 230905 - DNA, 619 bp, Homo sapiens
atgcatggaaagtgtcatgccacccatgtatgtttgaaatgtcagaccatgtgcaaaactttaagttacttttctgcttcctaggctttgcctaccagacctttatttcagcaattattgaagcaattgcatttaaggttacaacatgaatttcatgggaactccctgttcgatataaatggaaacatgttccttggaataaaatatctttatgagtgaagtttaatatattttgaatcaggcccaaagagatcttttgctgtgagtgaagaataaagtaaaaattccattaataaaattttatggctgtataggtggagaaaaatcttttccacataaaaatattttcatgtttttctcaaattaaaaaaatgkaaagttattgatagtcacttaaaactaagcctaattattagaatatagatagccaaatatttctggagacaatagggcaaaaatattttagagttttaaaatgtctgtaactttaaccaagaaattatgcttttagaagtctactcaggaaatacaacttgaaatgctggatacattttaaaaatcattttgatgacattggagaggtataagccagtcaaaaattgagagttcaagattgtca

SEQ ID NO: 230906 - DNA, 468 bp, Homo sapiens
ccttaagttttcactctgcttcaatttctttggttatttattctgttctattgtttgccatgatacacttcattatttccttatgtctcttggggtgactttggagagtayaataaatatacctgtaacatatataaataaaaaatagtgagcaccagtatttgttcctgcttccaagtggctcctgagggaggatgagctaaataggtgtgcagcggaccactctctccatggacctccagaatcctggctgcaggagacctgccagcaacccccatggacatttaagctggcagagagaatggcttggagagttagcagggacaggattacagtctgcaaggaacccacagggtttggcatgggaatggctgcagtggagcatggccagagatgcccatgccttaaggcttgccatgttcctctaggaggctttggtctttgttgactgctgtacctggacagagc

SEQ ID NO: 230907 - DNA, 551 bp, Homo sapiens
tgatacaagtgtggacaaagctttatgtgtagaggtgatgactggaatgttatttctaaaaatgataaactgaaaatctaaataccaaactataagacaaatttttattaaaataataaaggatcatagggatcattaagctagwaaatttctgcaaataattactgatggtatgcatcaagtgcttataaatggtacaggtagagaaacaggcatcaaataatacatagaaaaaatcttgaatatgaattagaaatttgataaaattaggagtaattataacaaaattggatgacagatttatagacttttaaatagatttttctttaaaatcagcatcattggaatataaatgacatacaataaaatgcacatatattaggtgaacaattaataagtattggcaaacatataaactcatataacaatcacttgaattgataaagaatatttttatcacccccaaaatttcccttatgcccatttgctgtcagcatcccttcctttactcagtgaagtatctactgaccttctttctgtcactatgtatg

SEQ ID NO: 230908 - DNA, 582 bp, Homo sapiens
tgcttataaatggtacaggtagagaaacaggcatcaaataatacatagaaaaaatcttgaatatgaattagaaatttgataaaattaggagtaattataacaaaattggatgacagatttatagacttttaaatagatttttctttaaaatcagcatcattggaatataaatgacatacaataaaatgcacatatattaggtgaacaattaataagtattggcaaacatataaactcatataacaatcacttgaattgataaagaatatttttatcacccccaaaatttcccttatgcccatttgctgtcagcatcccttcctttactcagtgaagtatctactgaccttctttctgtcactatgtatgtcttgcctattctagatgtcatataatgcaatgtgtaacagtataatggaatacacatacagtataacagtatgtactgttttgtttttaactttcttaagtcaacataatattgttgaaccttagccttgctgttgcatatgtcagcagttcatttctttctttctttttttttttkttcctttggctaagtagcattcgtagtttgtttag

SEQ ID NO: 230909 - DNA, 402 bp, Homo sapiens
tttaactttcttccttayactttcctgttttcaaaatactctatgatgaacatgttagcttttaaaccagaaaagcataaattgttattctttaaaatatttgcagtttgagcctcccattctaaccttctcccatttccaacaaatgggtattggttaatgaaattaacaggctactaatgcagaaagtcagaccttgaggaacacaacaaaaaaaaacaggtaaatgtcaatatcaaaaaacaaaaatataaactctcaactttaaaaaaagaggaagaagtatgtgtgctgggacaaaaatcaaagaaaagaaaggcaagttctgggtcaactttgataaacacttaaagcaaaagccacctccaatctcatggtagagctgagaggaagaaagataca

SEQ ID NO: 230910 - DNA, 402 bp, Homo sapiens
tttaactttcttccttatactttcctgttttcaaaatactctatgatgaacatgttagcttttaaacyagaaaagcataaattgttattctttaaaatatttgcagtttgagcctcccattctaaccttctcccatttccaacaaatgggtattggttaatgaaattaacaggctactaatgcagaaagtcagaccttgaggaacacaacaaaaaaaaacaggtaaatgtcaatatcaaaaaacaaaaatataaactctcaactttaaaaaaagaggaagaagtatgtgtgctgggacaaaaatcaaagaaaagaaaggcaagttctgggtcaactttgataaacacttaaagcaaaagccacctccaatctcatggtagagctgagaggaagaaagataca

SEQ ID NO: 230911 - DNA, 436 bp, Homo sapiens
ctttcttccttatactttcctgttttcaaaatactctatgatgaacatgttagcttttaaaccagaaaagcataaattgttattctttaaaatatttgcagtttgagcctcccattctaaccttctcccatttccaacaaatgggtattggttaatgaaattaacaggctactaatgcagaaagtcagaccttgaggaacacaacaaaaaaaaacaggtaaatgtcaatatcaaaaaacaaaaatataaactctcaactttaaaaaaagaggaagaagtatgtgtgctgggacaaaaatcaaagaaaagaaaggcaagttctgggtcaactttgataaacacttaaagcaaaagccacctccaatctcatggtagagctgagaggaaraaagatacaaaaacaaatttagcctatatcacagtctcatctgaagtc

SEQ ID NO: 230912 - DNA, 415 bp, Homo sapiens
aaaatcttaatttttaaaatatctaggaaatctccaattatgtcccatgccttgggttcagcttaacatttcaacggaacagagcctggcacatagtactagataagygtctgttattatgatcatcatcatctttttcaaaaaagccctgtgggacaagtaggattaaggccattttagatgagaataaacagactcagagagggtaaaatttttgagaaatttgagaaaatttattttctcaataaatctctcagccagcaactgagtgagctaggatttgaacctatgatagcctggtcaaagagcctaggctgacaccactaagttcttccccagcccaatctattctagaactgctgtgcatacaggtctgatcatttttctgctcactgtgaatgaaatggtaccactt

SEQ ID NO: 230913 - DNA, 415 bp, Homo sapiens
aaaatcttaatttttaaaatatctaggaaatctccaattatgtcccatgccttgggttcagcttaacatttcaacggaacagagcctggcacatagtactagataagtgtctgttattatgatcatcatcatctttttcaaaaaagccctgtgggacaagtaggattaaggccattttagatgagaataaacagactcagagagggtaaaatttttgagaaatttgagaaaatttattttctcaataaatctctcagccagcaactgagtgagctaggatttgaacckatgatagcctggtcaaagagcctaggctgacaccactaagttcttccccagcccaatctattctagaactgctgtgcatacaggtctgatcatttttctgctcactgtgaatgaaatggtaccactt

SEQ ID NO: 230914 - DNA, 586 bp, Homo sapiens
ccaaatctaggtcaattgtgcagaagagttaacatagcagacctgactgctatcttttagaagacctgctatgaggytgtcagatgtctgagaacttggattttgggagtgtttcttaaacactctgattatactgactcactgtgctcaactgtttgcactatcaatgtggtttatgctgtacacctgctttccttgtagtctgggactttggttcatgctaggcaaagggtgccttcatgacccacgcatcctcaatataacccataggcactgagtctacttagtttccccgccagataacattttataggtgttgtcacaactcattgctgggggattaagcacatcctctgtgactctgctgagagacaagtcttggaagcttgtgcctggtttcctccagactttgttccatgtgtctttttcctttgctgatcttgctctgcatcctttcactgtaataaatcctagccaggagaatgaatatatattgagttctcatagtacatcatccaatctgagggtggttttggggaacccccaatacaacagtacatcacaacatcaacaacaaaaagggttt

SEQ ID NO: 230915 - DNA, 586 bp, Homo sapiens
ccaaatctaggtcaattgtgcagaagagttaacatagcagacctgactgctatcttttagaagacctgctatgaggttgtcagatgtctgagaacttggattttgggagtgtttcttaaacactctgattatactgactcactgtgctcaactgtttgcacwatcaatgtggtttatgctgtacacctgctttccttgtagtctgggactttggttcatgctaggcaaagggtgccttcatgacccacgcatcctcaatataacccataggcactgagtctacttagtttccccgccagataacattttataggtgttgtcacaactcattgctgggggattaagcacatcctctgtgactctgctgagagacaagtcttggaagcttgtgcctggtttcctccagactttgttccatgtgtctttttcctttgctgatcttgctctgcatcctttcactgtaataaatcctagccaggagaatgaatatatattgagttctcatagtacatcatccaatctgagggtggttttggggaacccccaatacaacagtacatcacaacatcaacaacaaaaagggttt

SEQ ID NO: 230916 - DNA, 510 bp, Homo sapiens
taaacctacaataaataagaaatgtgatcttggctcaaggagatacaaatcaaccaacagaatagaaggccaagaaatagacaagagaktcatgcacaaatggaccttgatttatgataaagatagcactcaaaacagttgtgagaagatggtttccaataaatgatgctagaacaaatgaatatctatatgtttaaaaaatgaaatttgatctttactttactccatacacagaaatcaattcctggaggactatacagctaaatgtggaaggcaaaacaataaagcttctggaagataatatagaaagtatcctcagaggaaacaactggggaaaggaaaaacttattaaatagagaacaaataccattaaccataaaggaaaagattgatgaatttgattacaataagaactcttcatcaaagataccactgagagtaaaaagcaagccacagaaaaattatttgcaatcatgtaagtgacaaagcgctcacacccagaatatacaa

SEQ ID NO: 230917 - DNA, 510 bp, Homo sapiens
taaacctacaataaataagaaatgtgatcttggctcaaggagatacaaatcaaccaacagaatagaaggccaagaaatagacaagagattcatgcacaaatggaccttgatttatgataaagatagcactcaaaacagttgtgaraagatggtttccaataaatgatgctagaacaaatgaatatctatatgtttaaaaaatgaaatttgatctttactttactccatacacagaaatcaattcctggaggactatacagctaaatgtggaaggcaaaacaataaagcttctggaagataatatagaaagtatcctcagaggaaacaactggggaaaggaaaaacttattaaatagagaacaaataccattaaccataaaggaaaagattgatgaatttgattacaataagaactcttcatcaaagataccactgagagtaaaaagcaagccacagaaaaattatttgcaatcatgtaagtgacaaagcgctcacacccagaatatacaa

SEQ ID NO: 230918 - DNA, 470 bp, Homo sapiens
atacaaatcaaccaacagaatagaaggccaagaaatagacaagagattcatgcacaaatggaccttgatttatgataaagatagcactcaaaacagttgtgagaagatggtttccaataaatgatgctagaacaaatgaatatstatatgtttaaaaaatgaaatttgatctttactttactccatacacagaaatcaattcctggaggactatacagctaaatgtggaaggcaaaacaataaagcttctggaagataatatagaaagtatcctcagaggaaacaactggggaaaggaaaaacttattaaatagagaacaaataccattaaccataaaggaaaagattgatgaatttgattacaataagaactcttcatcaaagataccactgagagtaaaaagcaagccacagaaaaattatttgcaatcatgtaagtgacaaagcgctcacacccagaatatacaaca

SEQ ID NO: 230919 - DNA, 510 bp, Homo sapiens
taaacctacaataaataagaaatgtgatcttggctcaaggagatacaaatcaaccaacagaatagaaggccaagaaatagacaagagattcatgcacaaatggaccttgatttatgataaagatagcactcaaaacagttgtgagaagatggtttccaataaatgatgctagaacaaatgaatatctatatgtttaaaaaatgaaatttgatctttactttactccatacacagaaatcaattcctggaggactatacagctaaatgtggaaggcaaaacaataaagcttctggaagataatatagaaagtatcctcagaggaaacaaytggggaaaggaaaaacttattaaatagagaacaaataccattaaccataaaggaaaagattgatgaatttgattacaataagaactcttcatcaaagataccactgagagtaaaaagcaagccacagaaaaattatttgcaatcatgtaagtgacaaagcgctcacacccagaatatacaa

SEQ ID NO: 230920 - DNA, 510 bp, Homo sapiens
taaacctacaataaataagaaatgtgatcttggctcaaggagatacaaatcaaccaacagaatagaaggccaagaaatagacaagagattcatgcacaaatggaccttgatttatgataaagatagcactcaaaacagttgtgagaagatggtttccaataaatgatgctagaacaaatgaatatctatatgtttaaaaaatgaaatttgatctttactttactccatacacagaaatcaattcctggaggactatacagctaaatgtggaaggcaaaacaataaagcttctggaagataatatagaaagtatcctcagaggaaacaactgrggaaaggaaaaacttattaaatagagaacaaataccattaaccataaaggaaaagattgatgaatttgattacaataagaactcttcatcaaagataccactgagagtaaaaagcaagccacagaaaaattatttgcaatcatgtaagtgacaaagcgctcacacccagaatatacaa

SEQ ID NO: 230921 - DNA, 415 bp, Homo sapiens
gagctcagttctagtctgtttcaccaaaaccacaataacagttagcactcactggtcaaagactgaaatttgcaaagattaaacttcccttttacccaatggggaggtggttctacaagctcacagctgtagcatacagatggaataagggagaagcctatacctccccatgtttcctttccttttctttcttcttttcatttctttaaacagttattccataaatggaggacctgggtttctaggcctatctgtccattaatttatcaagaatgaaatgagtgagtctgactttatcttataactaaaatatgayatacaattctgtgaacacatgaaatctgacaaagttctgaactgcctgagaattagaagacaaatgcaaatcagtaagtacgacacaaacaaaagttgc

SEQ ID NO: 230922 - DNA, 585 bp, Homo sapiens
agacgtgttaaaaaaataaagtcccacctcagactgaatccactaacgctccctctaagctaggatgctaatgagcagaggggttgtgactgccaccctgtgagctacgattctgaccacagccagccccccaacccccatccatgtctagatttgcagtgggcaaatgaattgtggtgaggggtgcaccccctcttctccacacgtctctgaatctgcccattcagcctcaataccagatgggatgcaaagccgaatttagattattcaattacttccttcccagttatcctatttggttcccaatccacaccgatttgctgcaggttgtcactaaatcggaagggtgcatttcaatcccaaagcctctgtggcttgcaggaagtggagacctgaggagttatctggaaaatgggggttgtgtagacatgggggcagactgggggccgtgtagacatagggtcagtcctggggctgtggctaaatcaatccacagaggagtttggctggtacagtaattaaagraaaaaaaaaggttgagttgccacatttttaaaaagtcaggagatttcatataaatacctg

SEQ ID NO: 230923 - DNA, 597 bp, Homo sapiens
tacagaattaactaaaaatgtwttaaagacctcaatgtaagagctggaagtctaaaactcttagaagaaaacataggggtaagccttcataactttagatttggcaaaggtttctgaggtttggcactaaaaacataagcaacaaaagataaattggacttcattaaaattaaaaacttttgttcttcaatgagcagtatcaagaaagtgaaaaaacaactcacagaatgcgagagagtatttgcaaagcatatatctgataagggagttgtatacagaatatataaagaaccctggcaacccaaaaataaaaagacaaagaacatagttttaaatgtaggcaaaggatctgaagatatttctccaaggaaggtatacaaatggccaaaaagcatatgaaaacgtgttttatgtcattagtcatcagtgacatgcaaattaaaaccacaataatataccacttcacactcaacaggttggctagaattaacaagtattgccatagatatgaagaaatcagaactttcatgcactgctggcaggaatgtaaaatgatgcagctgtcttaggaaataatctggcaggtcttcaagcatt

SEQ ID NO: 230924 - DNA, 593 bp, Homo sapiens
agacacaaattaccaatatcagaaacaagagcgataacatcactacagatgctatacatatttaaaaaaataaaatgttaggaacaactttatgccaatagatttgacaactttgatgaaaatggtattctctttgaaagtacaaactaccaaagtttactcaagaagaaattggtagcttgaatggtccctgaatggctagatatggtaggagttctttctggaatttacttccttgtctcttttcaccctcaaacagggacctgaaaagtgtaagagaagggaatttgatctgggacttaacagatgtgtattttagrcaaagctttaccattggcttgtttttctgagacctgaggcaagtcacaacctctcaccctcagtttcctcctctgctaagtgggtattgttgtggaaattaaataaaatggtatagatgcaaggtatccagtataagcagaagctgctgctttgccttgatgctatgtggtgaagggtagaagtaacttgtcaattgccttagtagtaacatcagagctctagtgacagatatttgaaaatatccactgaaatagtgattcaagtgtagtagt

SEQ ID NO: 230925 - DNA, 595 bp, Homo sapiens
caccagatacccagtgttcttgtcctacctctgtcactcactgcctgtgggagcaggagcgtttgactgggttcatsaaaaatgtttccattgtaatatcctacccatgtgcaaaatacttctgagtcataaaaaccagttcaccttctgaatcccattgtgcccatatgtaaaatggagccttctaaaatggatacccattctagagggatgtaaaagtgtatggtataatgtagaggactatatatgcaaaatgttacttacaacaggggtcagcaaactttttaaataaaaggccagatagtgcatgttttaggctttggagatccatgcagtttctatcacgactactcattctgcttttgtagcacaaaagcagccatagaaaatacagaaacaaatgaatgtggttgtgttccaataaaattttatttatgaaattttagtgaaccatgatcacaccactgcattccatctttgttaacagagtgaggcccaatctcaaaaaagaccccaaaaaaacaaaactaaatttttgtatcctttggtcaagatctccctagtctcaccacccttttccccacctccagtccct

SEQ ID NO: 230926 - DNA, 393 bp, Homo sapiens
agcctattatcagtgtcctatagagcagtttcagttgccatatctcccgttgccacagcctagcagttagcaaaggtttatctttgtgagaagtggaaggtggcagcacagcctcacctctctccactctgcccccagccaatcatgcttgagagaatttccttcccccaacggaatgaaaactctgcttcttctcagctcctcgtcattggttcatagaaacaaactcccctgtatgtaagtatcacaagaaatggaagcagactcttctcctkttcattttgaaaggctatcagtcccacatgtacctgaagtgacttttcctgaccctattgagcagggtgttgaagtctgagggtgcttaacagattcccagccattattattttgact

SEQ ID NO: 230927 - DNA, 510 bp, Homo sapiens
attacgttggtttgtatagcagtcctatcacactggtaatttatatcgacctttcagtccaattaaatcatttgctaattttcatgtaaacttctggttaagtcagagctccactcttacttgggttgtcaattattcctaacacatattttgcaaagactgttaaattaattccagttgtattaaagggtagaaagtcattttagaaggcccagagtttattttttaatgatcttcgaactacacaggcacattcaaaaatgtaagcacaccaggacwggcaaaacaagaaatttatcattgaccccttcaaataggttgaaagttttctgcacaatatctttcccagtatttgatgtgacacgcctctctgctttggattattttttacttttttactgtgatacacaatcatgactcagaagaaagttctccagtcaataaaatcctgcttcagctgtcttttactgacttctgccttgtttagtaatattgcacctatttcattct

SEQ ID NO: 230928 - DNA, 534 bp, Homo sapiens
ctttggattattttttacttttttactgtgatacacaatcatgactcagaagaaagttctccagtcaataaaatcctgcttcagctgtcttttactgacttctgccttgtttagtaatattgyacctatttcattcttttataccttacacaatgcttatctacacatttctcagtattctcaaatttttatttacacaaacttttacttatagctaaagtgaaataccacttttacctgaacactgaatattctcgctcctggtattcctaagatgaaaaataggggcattttcacgttctcaagaattttttccttacactttctcaccagtttttcttattcgactatctgccctcactctaaatttataccagttttttattatttacaaacttctaagagacacatcgtccagcattcttcaagagtttctattttcaataaaaattgctcatgatcctgatttcactatactctttcttttatcactatttcataaaatttaacatataggtaaaaaccctaaagcag

SEQ ID NO: 230929 - DNA, 558 bp, Homo sapiens
aaaactgcaataaattatcactcgaaagtgacgttagtgaaagcagagaagacctgtcactaaaaaccaacctctgatttttttcataaataatcatgagtagaggcaagaakaaatagctataggatgtaaagaaaattttcagtaaatatcaattacggaaaaaataaatagcaaaaaaaactttgtaaaatttataatacattgttgaaataaaacaacaaaaaataaaaactaaaggaaattgtggcatttttaattttcctgtgataaatttttttaaaagaggaagtaactggaaatacaagaggaaggttattatgtccaagtagataatcttaagaatattgacatacagcaaataggcatttaagaaagaaaaataagagacaaaaagcatagaaagaagaaaataattaaaatattaagaaaattttataatttaagaaagtcagagccattcacattttagagaatacaagtgtcatataacatgttggagtctcaaaaaaaataaataaacatgttggagaatatgggtgttatgttctaactaga

SEQ ID NO: 230930 - DNA, 575 bp, Homo sapiens
ctcttagtgatatatacagataatttcacttgatcttcacgacagtcttatgtgaatgttttcattacttcctcttaacaattgtaatcaagcaagttaggatagaatttggtatcagaaattagtacaatttataaaacctacatgtagagcttactgtatgtataataaaacaatgttagtgaatggatagccatccccagctgaaagttggtatctcattttatgtggtggcaaaacatttcatcaagctattactgctatacattggatctcagaatataggctgaagaagcatgtagtactagaatgtataataagaaaaataaatataaaacattggagtgtgtaagttataagtgatcaayctgaaatcaaggattaaggaaaataagatcttatgaaatagtcaatctctgcctatagccttgcagggttgaaaaatccacattttataaagcaagctgaacatagtaaatgcctcagcagaaaataatcctaagcaaaaagaacaaagctggagacatcgcccaacttcaaactatactgtaagactacagtagccaaaacagtat

SEQ ID NO: 230931 - DNA, 575 bp, Homo sapiens
ctcttagtgatatatacagataatttcacttgatcttcacgacagtcttatgtgaatgttttcattacttcctcttaacaattgtaatcaagcaagttaggatagaatttggtatcagaaattagtacaatttataaaacctacatgtagagcttactgtatgtataataaaacaatgttagtgaatggatagccatccccagctgaaagttggtatctcattttatgtggtggcaaaacatttcatcaagctattactgctatacattggatctcagaatataggctgaagaagcatgtagtactagaatgtataataagaaaaataaatataaaacattggagtgtgtaagttataagtgatcaatctgaaatcaaggattaaggaaaataagatcttatgaaatagtcaatctctgcctatagccttgcagggttgaaaaatccacattttataaagcaagctgaacatagtaaatgcctcarcagaaaataatcctaagcaaaaagaacaaagctggagacatcgcccaacttcaaactatactgtaagactacagtagccaaaacagtat

SEQ ID NO: 230932 - DNA, 587 bp, Homo sapiens
gattatccaggtagaagagacaaacataccaataaatccaaaaataagtcaatgtgagcttctgcaccagccacagacccatccctgagacccctttgagatgttcatactcagaattcaactcttcctctagaatcattacaagattagctaccagttgtacatcagccactcctaatacctagtggggtttcaatgttktcttgcatcaatgaaggtgctaatcacgtctatggtgacatttaacaccacgttcgactccctcatctcaaacctctgcttctgctggccacctcctctgccacaccaccccccttaactgaatgggtttggtaaactttggtttgagctagatttctgacaattatcccccactatttttacctgcatggtgccaccaatgtctgcatgaagaggggagagataaagaagaaagagaaaaaaatggagaagtgcgttaaaataaataaataaataaaattataaaggcagctgagagctaggttgtcaaagtcattaaatgccaactgagaaggaatgatgtgattccatctttcttttagaacaagtactaatatccaagatat

SEQ ID NO: 230933 - DNA, 389 bp, Homo sapiens
gaattcttcacaatgaactttatctttgtagccaaacattttagttaagtacttatattccattttgtctttgatagaagcatatttatctaaaataaacaaatgatagataaaaattttctttcttttctgccttttttgaggaacattggtagggtggaatagtggaaataaataactgcagtcagaaaaaaaacaagaagaaagcattcatatgatatagtaataataacatagaatgttcgaaatcacagacagtaaataagatattgcatcttataaaggaagtgtttaacagcattataaaaatgtaamtatacctttgaagggacaggtaacaagtgtgagaaatgaatgacatcagataacgtgttttctctctatagaac

SEQ ID NO: 230934 - DNA, 434 bp, Homo sapiens
agcaagcacagacaaaatacggctttgctagttttaatataaccggtctgtttatgtggaatggtgtgtggtatatagttcaagaactttaatgttacatttattaagatctttacttatatttaactgggaagataattgcaaactgaaaaactaagtcaatctgttcttgtagtatgtctyaattttattgtgataaaaataatgtctacatataattaacatattgttaaactgctttttttttttacttatatgcagagactaggcattattcaaaattttttagtggcttatacaacctgcttttaaaatgtccttcacttcattgtttcttcatgaaggtattgataagtcaaagaaaacctgacatgcatagaagaaagccttccaccaggagtggaaccaattaaaaacggatcttaacccctgtc

SEQ ID NO: 230935 - DNA, 428 bp, Homo sapiens
cggctttgctagttttaatataaccggtctgtttatgtggaatggtgtgtggtatatagttcaagaactttaatgttacatttattaagatctttacttatatttaactgggaagataattgcaaactgaaaaactaagtcaatctgttcttgtagtatgtctcaattttattgtgataaaaataatgtctacatataattaacatattgttaaactgctttttttttttacttatatgcagagactaggcattattcaaaattttttagtggcttatacaacctgcttttaaaatgtccttcacttcattgtttcttcatgaaggtattgataagtcaaagaaaacctgacatgyatagaagaaagccttccaccaggagtggaaccaattaaaaacggatcttaacccctgtcattccttggaaaa

SEQ ID NO: 230936 - DNA, 478 bp, Homo sapiens
agccagagatgctgttattctctaaagattttctgggccatggtatatcgtcctccaaagaaatatctatcccagtgtttttcaaaaccgtgtagtcacagagcccaacataaaactctgtgatacgtaaaacagaaaatcaaagttcccatagttgaaatggacatggggaagcctgggaaccattcctgatcattccccccaaccccacccccccaccacagtcctccctctttccaatctggcaggccttgggatagcttgaaagtctctacactatctgggcacttatcaagctaaagtgtgcatctgaatgatcaggaacacgagttaaaaatctagatggctgggctgcaccagtgtctgaaycagaaagcctagaatttgcatttctaatggtccaggaatcacactttgaggaccactgccctaccacattgcttcaacacatttgtttaatatcacaaacaaggaccac

SEQ ID NO: 230937 - DNA, 492 bp, Homo sapiens
gggctgggagccccgctgatgcccggagggtgggctgaggtctggacgccgacttgccttcctacttgagcccaaacagccaggtttctgggtgggcagaggctgtgtgcagactccagcacacagggcacctctgactcccgcttcgctttcctcccagcagatctccgaagacctgggcagtgagaagttctgcgtggatgcaaatcaggcgggggctggcagctggctcaagtacatccgtgtggcgtgctcctgcgatgaccagaacctcaccatgtgtcagatcagtgagcaggtaggtccgggctcataacaggggcttctgcctcttggaattgtccctgaggatgtggcaccaagattggtggaggtgccgaggcaagggttgtstgagcctctttggggacatctgccaagccctggcctgcagtgggggtgctgtttggtgcttggccagcactggcttccggggagctgactcaccccggg

SEQ ID NO: 230938 - DNA, 598 bp, Homo sapiens
gtgaacataggtggtagccaggtggtggtgacagcaggccttggatgagacccagtgctctgctggcttcaggtctaacccagcttagtttcagtggtggtggcaacaggggtgcttgcatcaacgcatgaacacatccctagttccaggagactcagcacagagagagactccatttgtttggaagaaagtaacagaaaagaacaagagtctctacgtggtaatccaaataattcttccagattttatccaagaccaccaaggcagtacctctgagtctgcaaaaacctcagcattattgggcttggggcccaartcccttcgaataactggaaagacttctcaaaaaggacagatacaaacaagcccagactgcaaagactacaataaatacctacctctttgatgcctacacaccaatgaacatctacaagcatcaaatcaagatcatccaggaaaacatgaccccaccaaatgaactaagtaaggcagggaccaatcctggaaaaacagagatagatatgtgacctttcaggcaggaattcaaaatagctatgttgaggaaagtcaaagaaattgaagataacacagagaagga

SEQ ID NO: 230939 - DNA, 502 bp, Homo sapiens
aaacctgcacattctgcacatgtatcccagaatttaaagtataatttttyaaaaaatccaatttaataggttgttgccctcacagcaagctagaatatgccttcctataactcctgctcccatcctggagataattatgttcttcaggggcaggaacatactaaggattcagtgagttaagaggcaaagcacctgactcaggagtggccaataagtcctaatcgcaactctcccaccctgcatctgggcgtgtgaaggactgatggagaagtggtgtcttcctgacctccgctagagactcatctaaagagtctcacacatccacctgtctgcctgctctacaaacagaagctcctttcatcctttcccacctgtacaaacatcactgagtcttttatttttaattttttggttaaaaaaattataaaatcaagagtgttctttaagaaaattaaaacacatatctcacagagagctaatagcatttaataacactgttaat

SEQ ID NO: 230940 - DNA, 549 bp, Homo sapiens
accccaagaggccggagcccatgtctgtcttgttcttccctgtattgtattcctaactccaaagaatcaggaatattttattttaaagaagcctaaaagacttaggaattaagaatattttattttaaaataagcctaattaagacacttatgaatgtctcattcacaagagaggtcagtaaatacttgacgaagaaagaaggaaaagaaggagaggaggagtgaagggggaggtctttgtcctgtaagagctgtcamccctttccctactgagccaatgtgaaaactgccttcagtaaccctaaggaggaatggcatttacagagcagtccacatgccaggcactttccagcaactcattcaatcctcacaactacgttgtcaggtagagcccacctttagccccatttgaggaatctgagagtcagagggctgaagtaatatgtccatcttcacacagctagtaagtgacaatgacgggatttgcattccggtctgagttcagaggctggacttttaaccaatacagtacagtgcttcctgggaaga

SEQ ID NO: 230941 - DNA, 548 bp, Homo sapiens
gcctttccaacagccatagttactaacaacggtgatatagaagaaaattgtctggagaagaaggaaacttaagaaaaagataaaaggagaaaaagaacattttcaagttagttgctttcacaaataacattaactagcattttcaccttccacctctacaacttccacagacactgagacgagtcacctctgacccacctacatgctacttctagaacataacattcattctaggaaaggcaactaagggatgctatatcagtgaagagtgtgaaaaaaatatgcatcttctgtattcatacttgggaatgcatctagtaaacaccccactgactttttataatttctgcatgtaacaagtttacattccctataaacatagccttacaaataatatcatctgcaggaaggtaatatacctaatatatcrcacctaaagagttgggagaggtatacgtctttaatcttcaatctgttaaagtattttaaataatagcattgccaaaaatcacactttgatgagacaggtgaaggaccgtggaagcctg

SEQ ID NO: 230942 - DNA, 537 bp, Homo sapiens
gaattctattctcaagcaaattcttaggccaaccccaacattaaaaaaaaatttwaaaaaaaacaaagctaatatgattaaagcgagacaccttgaatcataaaaggaagacctggcctctctcaccttacctggctttgttctttctaacaagacacgggacccctcacccaggctgccctggaaatcagaatccacacagaaccatcatctctggggccaggcccaataattcacatttcaacacagcctttgtgttttctcaaattcaattttattatgatagaacatttaatatgagatctaccctcttaaaaaataaatatacaataggctattgttgaccataggtgcagtgctatacagcaaattcctagaggttattaattctgcttaatgaaactttatgcctattagtgatttttatgtacacataagattcagcacctcttttctaaagtgttttctgtaatttattgcatatttcaaaacaggttgaagagaagaattttaattttcccaacacaaagaaatgat

SEQ ID NO: 230943 - DNA, 596 bp, Homo sapiens
cagcacctctagttcatttcaactcttgccaaatgtgcacttgcattgctttaatgctttaagcaatttgtcttgacgggatatgtttgcatatcattttaaacctaacctaaatacataacatcacagtgatcaaagcaccttataatttgaggcttttaagtcactgattcacatctgtcttccaaaagtaatacctaaataatggagtgattcttataacccaagctctgctgggaaattcacattcattatctcattggttttcaaacttttattttatttttaggagaaacggaattctattctcaagcaaattcttaggccaaccccaacattaaaaaaaaattttaaaaaaaacaaagctaatatgattaaagcgagacaccttgaatcataaaaggaagacctggcctctctcaccttacctggctttgttctttctaacaagacaygggacccctcacccaggctgccctggaaatcagaatccacacagaaccatcatctctggggccaggcccaataattcacatttcaacacagcctttgtgttttctcaaattcaattttattatgatagaacatttaatatg

SEQ ID NO: 230944 - DNA, 580 bp, Homo sapiens
aaagcttctctctcaaaaggaaagttcaactctgtgagtwgaaagcaaacatcacaaagaagtttctgagaatgcttctgtttagcttttctgtgaagattatcccgtttccaacgaaatcttcaaagaggcccaaacatccacttgcagatgccacagaaagagtgtctggaaactgctgtttgaaaaggaaccttcaactctgtgagttgaatgcagtcatcacaaacaagtttctgacaatgcttctctctagtttttacgtgacgataattcgttttccaccacaggcctgaaagctctccaaatgtccacttgcagaccctacgaaaagcatgcttctcatctgctctatgaaaagcggggtgaaactctgtgagttgaacacaaacatcacagagaagtttctgagaatgcttctgtttagttttaatgtgaagatattcccgtttccaaagacatcttcaaagaggaccacatatccacttgcagattccacaaaaagagagattcaaaactgctctatccataggacgtttcaacgctttgagttgaatgcaatcgtcacagagaagtttct

SEQ ID NO: 230945 - DNA, 579 bp, Homo sapiens
aagcttctctctcaaaaggaaagttcaactctgtgagttgaaagcawacatcacaaagaagtttctgagaatgcttctgtttagcttttctgtgaagattatcccgtttccaacgaaatcttcaaagaggcccaaacatccacttgcagatgccacagaaagagtgtctggaaactgctgtttgaaaaggaaccttcaactctgtgagttgaatgcagtcatcacaaacaagtttctgacaatgcttctctctagtttttacgtgacgataattcgttttccaccacaggcctgaaagctctccaaatgtccacttgcagaccctacgaaaagcatgcttctcatctgctctatgaaaagcggggtgaaactctgtgagttgaacacaaacatcacagagaagtttctgagaatgcttctgtttagttttaatgtgaagatattcccgtttccaaagacatcttcaaagaggaccacatatccacttgcagattccacaaaaagagagattcaaaactgctctatccataggacgtttcaacgctttgagttgaatgcaatcgtcacagagaagtttct

SEQ ID NO: 230946 - DNA, 559 bp, Homo sapiens
gtttcaaagcttctctctcaaaaggaaagttcaactctgtgagttgaaagcaaacatsacaaagaagtttctgagaatgcttctgtttagcttttctgtgaagattatcccgtttccaacgaaatcttcaaagaggcccaaacatccacttgcagatgccacagaaagagtgtctggaaactgctgtttgaaaaggaaccttcaactctgtgagttgaatgcagtcatcacaaacaagtttctgacaatgcttctctctagtttttacgtgacgataattcgttttccaccacaggcctgaaagctctccaaatgtccacttgcagaccctacgaaaagcatgcttctcatctgctctatgaaaagcggggtgaaactctgtgagttgaacacaaacatcacagagaagtttctgagaatgcttctgtttagttttaatgtgaagatattcccgtttccaaagacatcttcaaagaggaccacatatccacttgcagattccacaaaaagagagattcaaaactgctctatccataggacgtttcaacgctttgagttg

SEQ ID NO: 230947 - DNA, 551 bp, Homo sapiens
gcttctctctcaaaaggaaagttcaactctgtgagttgaaagcaaacatcayaaagaagtttctgagaatgcttctgtttagcttttctgtgaagattatcccgtttccaacgaaatcttcaaagaggcccaaacatccacttgcagatgccacagaaagagtgtctggaaactgctgtttgaaaaggaaccttcaactctgtgagttgaatgcagtcatcacaaacaagtttctgacaatgcttctctctagtttttacgtgacgataattcgttttccaccacaggcctgaaagctctccaaatgtccacttgcagaccctacgaaaagcatgcttctcatctgctctatgaaaagcggggtgaaactctgtgagttgaacacaaacatcacagagaagtttctgagaatgcttctgtttagttttaatgtgaagatattcccgtttccaaagacatcttcaaagaggaccacatatccacttgcagattccacaaaaagagagattcaaaactgctctatccataggacgtttcaacgctttgagttg

SEQ ID NO: 230948 - DNA, 579 bp, Homo sapiens
aagcttctctctcaaaaggaaagttcaactctgtgagttgaaagcaaacatcacaaagaagtttctkagaatgcttctgtttagcttttctgtgaagattatcccgtttccaacgaaatcttcaaagaggcccaaacatccacttgcagatgccacagaaagagtgtctggaaactgctgtttgaaaaggaaccttcaactctgtgagttgaatgcagtcatcacaaacaagtttctgacaatgcttctctctagtttttacgtgacgataattcgttttccaccacaggcctgaaagctctccaaatgtccacttgcagaccctacgaaaagcatgcttctcatctgctctatgaaaagcggggtgaaactctgtgagttgaacacaaacatcacagagaagtttctgagaatgcttctgtttagttttaatgtgaagatattcccgtttccaaagacatcttcaaagaggaccacatatccacttgcagattccacaaaaagagagattcaaaactgctctatccataggacgtttcaacgctttgagttgaatgcaatcgtcacagagaagtttct

SEQ ID NO: 230949 - DNA, 550 bp, Homo sapiens
cttctctctcaaaaggaaagttcaactctgtgagttgaaagcaaacatcacaaagaagtttctgagaaygcttctgtttagcttttctgtgaagattatcccgtttccaacgaaatcttcaaagaggcccaaacatccacttgcagatgccacagaaagagtgtctggaaactgctgtttgaaaaggaaccttcaactctgtgagttgaatgcagtcatcacaaacaagtttctgacaatgcttctctctagtttttacgtgacgataattcgttttccaccacaggcctgaaagctctccaaatgtccacttgcagaccctacgaaaagcatgcttctcatctgctctatgaaaagcggggtgaaactctgtgagttgaacacaaacatcacagagaagtttctgagaatgcttctgtttagttttaatgtgaagatattcccgtttccaaagacatcttcaaagaggaccacatatccacttgcagattccacaaaaagagagattcaaaactgctctatccataggacgtttcaacgctttgagttg

SEQ ID NO: 230950 - DNA, 580 bp, Homo sapiens
aaagcttctctctcaaaaggaaagttcaactctgtgagttgaaagcaaacatcacaaagaagtttctgagaatgcttctgtttagcttttctgtgaagaktatcccgtttccaacgaaatcttcaaagaggcccaaacatccacttgcagatgccacagaaagagtgtctggaaactgctgtttgaaaaggaaccttcaactctgtgagttgaatgcagtcatcacaaacaagtttctgacaatgcttctctctagtttttacgtgacgataattcgttttccaccacaggcctgaaagctctccaaatgtccacttgcagaccctacgaaaagcatgcttctcatctgctctatgaaaagcggggtgaaactctgtgagttgaacacaaacatcacagagaagtttctgagaatgcttctgtttagttttaatgtgaagatattcccgtttccaaagacatcttcaaagaggaccacatatccacttgcagattccacaaaaagagagattcaaaactgctctatccataggacgtttcaacgctttgagttgaatgcaatcgtcacagagaagtttct

SEQ ID NO: 230951 - DNA, 543 bp, Homo sapiens
gtttcaaagcttctctctcaaaaggaaagttcaactctgtgagttgaaagcaaacatcacaaagaagtttctgagaatgcttctgtttagcttttctgtgaagattatcccgtttccaacgaaatcttcaaagaggcccaaacatccacttgcasatgccacagaaagagtgtctggaaactgctgtttgaaaaggaaccttcaactctgtgagttgaatgcagtcatcacaaacaagtttctgacaatgcttctctctagtttttacgtgacgataattcgttttccaccacaggcctgaaagctctccaaatgtccacttgcagaccctacgaaaagcatgcttctcatctgctctatgaaaagcggggtgaaactctgtgagttgaacacaaacatcacagagaagtttctgagaatgcttctgtttagttttaatgtgaagatattcccgtttccaaagacatcttcaaagaggaccacatatccacttgcagattccacaaaaagagagattcaaaactgctctatccataggacgtt

SEQ ID NO: 230952 - DNA, 551 bp, Homo sapiens
gcttctctctcaaaaggaaagttcaactctgtgagttgaaagcaaacatcacaaagaagtttctgagaatgcttctgtttagcttttctgtgaagattatcccgtttccaacgaaatcttcaaagaggcccaaacatccacttgcagatgccacagraagagtgtctggaaactgctgtttgaaaaggaaccttcaactctgtgagttgaatgcagtcatcacaaacaagtttctgacaatgcttctctctagtttttacgtgacgataattcgttttccaccacaggcctgaaagctctccaaatgtccacttgcagaccctacgaaaagcatgcttctcatctgctctatgaaaagcggggtgaaactctgtgagttgaacacaaacatcacagagaagtttctgagaatgcttctgtttagttttaatgtgaagatattcccgtttccaaagacatcttcaaagaggaccacatatccacttgcagattccacaaaaagagagattcaaaactgctctatccataggacgtttcaacgctttgagttg

SEQ ID NO: 230953 - DNA, 559 bp, Homo sapiens
gtttcaaagcttctctctcaaaaggaaagttcaactctgtgagttgaaagcaaacatcacaaagaagtttctgagaatgcttctgtttagcttttctgtgaagattatcccgtttccaacgaaatcttcaaagaggcccaaacatccacttgcagatgccacagaaagagtgtctggaaactgctgtttgaaaaggaaccttcaactctgtgagttsaatgcagtcatcacaaacaagtttctgacaatgcttctctctagtttttacgtgacgataattcgttttccaccacaggcctgaaagctctccaaatgtccacttgcagaccctacgaaaagcatgcttctcatctgctctatgaaaagcggggtgaaactctgtgagttgaacacaaacatcacagagaagtttctgagaatgcttctgtttagttttaatgtgaagatattcccgtttccaaagacatcttcaaagaggaccacatatccacttgcagattccacaaaaagagagattcaaaactgctctatccataggacgtttcaacgctttgagttg

SEQ ID NO: 230954 - DNA, 580 bp, Homo sapiens
aaagcttctctctcaaaaggaaagttcaactctgtgagttgaaagcaaacatcacaaagaagtttctgagaatgcttctgtttagcttttctgtgaagattatcccgtttccaacgaaatcttcaaagaggcccaaacatccacttgcagatgccacagaaagagtgtctggaaactgctgtttgaaaaggaaccttcaactctgtgagttgaakgcagtcatcacaaacaagtttctgacaatgcttctctctagtttttacgtgacgataattcgttttccaccacaggcctgaaagctctccaaatgtccacttgcagaccctacgaaaagcatgcttctcatctgctctatgaaaagcggggtgaaactctgtgagttgaacacaaacatcacagagaagtttctgagaatgcttctgtttagttttaatgtgaagatattcccgtttccaaagacatcttcaaagaggaccacatatccacttgcagattccacaaaaagagagattcaaaactgctctatccataggacgtttcaacgctttgagttgaatgcaatcgtcacagagaagtttct

SEQ ID NO: 230955 - DNA, 559 bp, Homo sapiens
gtttcaaagcttctctctcaaaaggaaagttcaactctgtgagttgaaagcaaacatcacaaagaagtttctgagaatgcttctgtttagcttttctgtgaagattatcccgtttccaacgaaatcttcaaagaggcccaaacatccacttgcagatgccacagaaagagtgtctggaaactgctgtttgaaaaggaaccttcaactctgtgagttgaatgcagtcatcacaaacaagtttctgacaatgcytctctctagtttttacgtgacgataattcgttttccaccacaggcctgaaagctctccaaatgtccacttgcagaccctacgaaaagcatgcttctcatctgctctatgaaaagcggggtgaaactctgtgagttgaacacaaacatcacagagaagtttctgagaatgcttctgtttagttttaatgtgaagatattcccgtttccaaagacatcttcaaagaggaccacatatccacttgcagattccacaaaaagagagattcaaaactgctctatccataggacgtttcaacgctttgagttg

SEQ ID NO: 230956 - DNA, 543 bp, Homo sapiens
gtttcaaagcttctctctcaaaaggaaagttcaactctgtgagttgaaagcaaacatcacaaagaagtttctgagaatgcttctgtttagcttttctgtgaagattatcccgtttccaacgaaatcttcaaagaggcccaaacatccacttgcagatgccacagaaagagtgtctggaaactgctgtttgaaaaggaaccttcaactctgtgagttgaatgcagtcatcacaaacaagtttctgacaatgcttctctctagtttttacgtgacgataattcgttttccaccacaggcctgaaakctctccaaatgtccacttgcagaccctacgaaaagcatgcttctcatctgctctatgaaaagcggggtgaaactctgtgagttgaacacaaacatcacagagaagtttctgagaatgcttctgtttagttttaatgtgaagatattcccgtttccaaagacatcttcaaagaggaccacatatccacttgcagattccacaaaaagagagattcaaaactgctctatccataggacgtt

SEQ ID NO: 230957 - DNA, 578 bp, Homo sapiens
aagcttctctctcaaaaggaaagttcaactctgtgagttgaaagcaaacatcacaaagaagtttctgagaatgcttctgtttagcttttctgtgaagattatcccgtttccaacgaaatcttcaaagaggcccaaacatccacttgcagatgccacagaaagagtgtctggaaactgctgtttgaaaaggaaccttcaactctgtgagttgaatgcagtcatcacaaacaagtttctgacaatgcttctctctagtttttacgtgacgataattcgttttccaccacaggcctgaaagytctccaaatgtccacttgcagaccctacgaaaagcatgcttctcatctgctctatgaaaagcggggtgaaactctgtgagttgaacacaaacatcacagagaagtttctgagaatgcttctgtttagttttaatgtgaagatattcccgtttccaaagacatcttcaaagaggaccacatatccacttgcagattccacaaaaagagagattcaaaactgctctatccataggacgtttcaacgctttgagttgaatgcaatcgtcacagagaagtttc

SEQ ID NO: 230958 - DNA, 607 bp, Homo sapiens
ttgcagattctagaaaaagagtgtttcaaagcttctctctcaaaaggaaagttcaactctgtgagttgaaagcaaacatcacaaagaagtttctgagaatgcttctgtttagcttttctgtgaagattatcccgtttccaacgaaatcttcaaagaggcccaaacatccacttgcagatgccacagaaagagtgtctggaaactgctgtttgaaaaggaaccttcaactctgtgagttgaatgcagtcatcacaaacaagtttctgacaatgcttctctctagtttttacgtgacgataattcgttttccaccacaggcctgaaagctctccaaatgtccacttgcagaccctaygaaaagcatgcttctcatctgctctatgaaaagcggggtgaaactctgtgagttgaacacaaacatcacagagaagtttctgagaatgcttctgtttagttttaatgtgaagatattcccgtttccaaagacatcttcaaagaggaccacatatccacttgcagattccacaaaaagagagattcaaaactgctctatccataggacgtttcaacgctttgagttgaatgcaatcgtcacagagaagtttct

SEQ ID NO: 230959 - DNA, 297 bp, Homo sapiens
tccaccacaggcctgaaagctctccaaatgtccacttgcagaccctacgaaamgcatgcttctcatctgctctatgaaaagcggggtgaaactctgtgagttgaacacaaacatcacagagaagtttctgagaatgcttctgtttagttttaatgtgaagatattcccgtttccaaagacatcttcaaagaggaccacatatccacttgcagattccacaaaaagagagattcaaaactgctctatccataggacgtttcaacgctttgagttgaatgcaatcgtcacagagaagtt

SEQ ID NO: 230960 - DNA, 543 bp, Homo sapiens
gtttcaaagcttctctctcaaaaggaaagttcaactctgtgagttgaaagcaaacatcacaaagaagtttctgagaatgcttctgtttagcttttctgtgaagattatcccgtttccaacgaaatcttcaaagaggcccaaacatccacttgcagatgccacagaaagagtgtctggaaactgctgtttgaaaaggaaccttcaactctgtgagttgaatgcagtcatcacaaacaagtttctgacaatgcttctctctagtttttacgtgacgataattcgttttccaccacaggcctgaaagctctccaaatgtccacttgcagaccctacgaaaagcaygcttctcatctgctctatgaaaagcggggtgaaactctgtgagttgaacacaaacatcacagagaagtttctgagaatgcttctgtttagttttaatgtgaagatattcccgtttccaaagacatcttcaaagaggaccacatatccacttgcagattccacaaaaagagagattcaaaactgctctatccataggacgtt

SEQ ID NO: 230961 - DNA, 557 bp, Homo sapiens
aaagttcaactctgtgagttgaaagcaaacatcacaaagaagtttctgagaatgcttctgtttagcttttctgtgaagattatcccgtttccaacgaaatcttcaaagaggcccaaacatccacttgcagatgccacagaaagagtgtctggaaactgctgtttgaaaaggaaccttcaactctgtgagttgaatgcagtcatcacaaacaagtttctgacaatgcttctctctagtttttacgtgacgataattcgttttccaccacaggcctgaaagctctccaaatgtccacttgcagaccctacgaaaagcatgcttctcayctgctctatgaaaagcggggtgaaactctgtgagttgaacacaaacatcacagagaagtttctgagaatgcttctgtttagttttaatgtgaagatattcccgtttccaaagacatcttcaaagaggaccacatatccacttgcagattccacaaaaagagagattcaaaactgctctatccataggacgtttcaacgctttgagttgaatgcaatcgtcacagagaagtt

SEQ ID NO: 230962 - DNA, 557 bp, Homo sapiens
aaagttcaactctgtgagttgaaagcaaacatcacaaagaagtttctgagaatgcttctgtttagcttttctgtgaagattatcccgtttccaacgaaatcttcaaagaggcccaaacatccacttgcagatgccacagaaagagtgtctggaaactgctgtttgaaaaggaaccttcaactctgtgagttgaatgcagtcatcacaaacaagtttctgacaatgcttctctctagtttttacgtgacgataattcgttttccaccacaggcctgaaagctctccaaatgtccacttgcagaccctacgaaaagcatgcttctcatctgctctatgraaagcggggtgaaactctgtgagttgaacacaaacatcacagagaagtttctgagaatgcttctgtttagttttaatgtgaagatattcccgtttccaaagacatcttcaaagaggaccacatatccacttgcagattccacaaaaagagagattcaaaactgctctatccataggacgtttcaacgctttgagttgaatgcaatcgtcacagagaagtt

SEQ ID NO: 230963 - DNA, 607 bp, Homo sapiens
ttgcagattctagaaaaagagtgtttcaaagcttctctctcaaaaggaaagttcaactctgtgagttgaaagcaaacatcacaaagaagtttctgagaatgcttctgtttagcttttctgtgaagattatcccgtttccaacgaaatcttcaaagaggcccaaacatccacttgcagatgccacagaaagagtgtctggaaactgctgtttgaaaaggaaccttcaactctgtgagttgaatgcagtcatcacaaacaagtttctgacaatgcttctctctagtttttacgtgacgataattcgttttccaccacaggcctgaaagctctccaaatgtccacttgcagaccctacgaaaagcatgcttctcatctgctctatgaaaagcggggtgaaactctgtgagttgaacacaaacatcacagagaagtttcygagaatgcttctgtttagttttaatgtgaagatattcccgtttccaaagacatcttcaaagaggaccacatatccacttgcagattccacaaaaagagagattcaaaactgctctatccataggacgtttcaacgctttgagttgaatgcaatcgtcacagagaagtttct

SEQ ID NO: 230964 - DNA, 576 bp, Homo sapiens
cttctctctcaaaaggaaagttcaactctgtgagttgaaagcaaacatcacaaagaagtttctgagaatgcttctgtttagcttttctgtgaagattatcccgtttccaacgaaatcttcaaagaggcccaaacatccacttgcagatgccacagaaagagtgtctggaaactgctgtttgaaaaggaaccttcaactctgtgagttgaatgcagtcatcacaaacaagtttctgacaatgcttctctctagtttttacgtgacgataattcgttttccaccacaggcctgaaagctctccaaatgtccacttgcagaccctacgaaaagcatgcttctcatctgctctatgaaaagcggggtgaaactctgtgagttgaacacaaacatcacagagaagtttctgagaatgcttctgtttagttttwatgtgaagatattcccgtttccaaagacatcttcaaagaggaccacatatccacttgcagattccacaaaaagagagattcaaaactgctctatccataggacgtttcaacgctttgagttgaatgcaatcgtcacagagaagtttct

SEQ ID NO: 230965 - DNA, 579 bp, Homo sapiens
aagcttctctctcaaaaggaaagttcaactctgtgagttgaaagcaaacatcacaaagaagtttctgagaatgcttctgtttagcttttctgtgaagattatcccgtttccaacgaaatcttcaaagaggcccaaacatccacttgcagatgccacagaaagagtgtctggaaactgctgtttgaaaaggaaccttcaactctgtgagttgaatgcagtcatcacaaacaagtttctgacaatgcttctctctagtttttacgtgacgataattcgttttccaccacaggcctgaaagctctccaaatgtccacttgcagaccctacgaaaagcatgcttctcatctgctctatgaaaagcggggtgaaactctgtgagttgaacacaaacatcacagagaagtttctgagaatgcttctgtttagttttaatrtgaagatattcccgtttccaaagacatcttcaaagaggaccacatatccacttgcagattccacaaaaagagagattcaaaactgctctatccataggacgtttcaacgctttgagttgaatgcaatcgtcacagagaagtttct

SEQ ID NO: 230966 - DNA, 536 bp, Homo sapiens
gcttctctctcaaaaggaaagttcaactctgtgagttgaaagcaaacatcacaaagaagtttctgagaatgcttctgtttagcttttctgtgaagattatcccgtttccaacgaaatcttcaaagaggcccaaacatccacttgcagatgccacagaaagagtgtctggaaactgctgtttgaaaaggaaccttcaactctgtgagttgaatgcagtcatcacaaacaagtttctgacaatgcttctctctagtttttacgtgacgataattcgttttccaccacaggcctgaaagctctccaaatgtccacttgcagaccctacgaaaagcatgcttctcatctgctctatgaaaagcggggtgaaactctgtgagttgaacacaaacatcacagagaagtttctgagaatgcttctgtttagttttaatgtgaagatattcccrtttccaaagacatcttcaaagaggaccacatatccacttgcagattccacaaaaagagagattcaaaactgctctatccataggacgttt

SEQ ID NO: 230967 - DNA, 543 bp, Homo sapiens
gtttcaaagcttctctctcaaaaggaaagttcaactctgtgagttgaaagcaaacatcacaaagaagtttctgagaatgcttctgtttagcttttctgtgaagattatcccgtttccaacgaaatcttcaaagaggcccaaacatccacttgcagatgccacagaaagagtgtctggaaactgctgtttgaaaaggaaccttcaactctgtgagttgaatgcagtcatcacaaacaagtttctgacaatgcttctctctagtttttacgtgacgataattcgttttccaccacaggcctgaaagctctccaaatgtccacttgcagaccctacgaaaagcatgcttctcatctgctctatgaaaagcggggtgaaactctgtgagttgaacacaaacatcacagagaagtttctgagaatgcttctgtttagttttaatgtgaagatattcccgtttccaaagacawcttcaaagaggaccacatatccacttgcagattccacaaaaagagagattcaaaactgctctatccataggacgtt

SEQ ID NO: 230968 - DNA, 578 bp, Homo sapiens
aagcttctctctcaaaaggaaagttcaactctgtgagttgaaagcaaacatcacaaagaagtttctgagaatgcttctgtttagcttttctgtgaagattatcccgtttccaacgaaatcttcaaagaggcccaaacatccacttgcagatgccacagaaagagtgtctggaaactgctgtttgaaaaggaaccttcaactctgtgagttgaatgcagtcatcacaaacaagtttctgacaatgcttctctctagtttttacgtgacgataattcgttttccaccacaggcctgaaagctctccaaatgtccacttgcagaccctacgaaaagcatgcttctcatctgctctatgaaaagcggggtgaaactctgtgagttgaacacaaacatcacagagaagtttctgagaatgcttctgtttagttttaatgtgaagatattcccgtttccaaagacatcttcaaagaggamcacatatccacttgcagattccacaaaaagagagattcaaaactgctctatccataggacgtttcaacgctttgagttgaatgcaatcgtcacagagaagtttc

SEQ ID NO: 230969 - DNA, 536 bp, Homo sapiens
gcttctctctcaaaaggaaagttcaactctgtgagttgaaagcaaacatcacaaagaagtttctgagaatgcttctgtttagcttttctgtgaagattatcccgtttccaacgaaatcttcaaagaggcccaaacatccacttgcagatgccacagaaagagtgtctggaaactgctgtttgaaaaggaaccttcaactctgtgagttgaatgcagtcatcacaaacaagtttctgacaatgcttctctctagtttttacgtgacgataattcgttttccaccacaggcctgaaagctctccaaatgtccacttgcagaccctacgaaaagcatgcttctcatctgctctatgaaaagcggggtgaaactctgtgagttgaacacaaacatcacagagaagtttctgagaatgcttctgtttagttttaatgtgaagatattcccgtttccaaagacatcttcaaagaggaccwcatatccacttgcagattccacaaaaagagagattcaaaactgctctatccataggacgttt

SEQ ID NO: 230970 - DNA, 576 bp, Homo sapiens
cttctctctcaaaaggaaagttcaactctgtgagttgaaagcaaacatcacaaagaagtttctgagaatgcttctgtttagcttttctgtgaagattatcccgtttccaacgaaatcttcaaagaggcccaaacatccacttgcagatgccacagaaagagtgtctggaaactgctgtttgaaaaggaaccttcaactctgtgagttgaatgcagtcatcacaaacaagtttctgacaatgcttctctctagtttttacgtgacgataattcgttttccaccacaggcctgaaagctctccaaatgtccacttgcagaccctacgaaaagcatgcttctcatctgctctatgaaaagcggggtgaaactctgtgagttgaacacaaacatcacagagaagtttctgagaatgcttctgtttagttttaatgtgaagatattcccgtttccaaagacatcttcaaagaggaccacayatccacttgcagattccacaaaaagagagattcaaaactgctctatccataggacgtttcaacgctttgagttgaatgcaatcgtcacagagaagtttct

SEQ ID NO: 230971 - DNA, 576 bp, Homo sapiens
cttctctctcaaaaggaaagttcaactctgtgagttgaaagcaaacatcacaaagaagtttctgagaatgcttctgtttagcttttctgtgaagattatcccgtttccaacgaaatcttcaaagaggcccaaacatccacttgcagatgccacagaaagagtgtctggaaactgctgtttgaaaaggaaccttcaactctgtgagttgaatgcagtcatcacaaacaagtttctgacaatgcttctctctagtttttacgtgacgataattcgttttccaccacaggcctgaaagctctccaaatgtccacttgcagaccctacgaaaagcatgcttctcatctgctctatgaaaagcggggtgaaactctgtgagttgaacacaaacatcacagagaagtttctgagaatgcttctgtttagttttaatgtgaagatattcccgtttccaaagacatcttcaaagaggaccacatatccacttgmagattccacaaaaagagagattcaaaactgctctatccataggacgtttcaacgctttgagttgaatgcaatcgtcacagagaagtttct

SEQ ID NO: 230972 - DNA, 557 bp, Homo sapiens
aaagttcaactctgtgagttgaaagcaaacatcacaaagaagtttctgagaatgcttctgtttagcttttctgtgaagattatcccgtttccaacgaaatcttcaaagaggcccaaacatccacttgcagatgccacagaaagagtgtctggaaactgctgtttgaaaaggaaccttcaactctgtgagttgaatgcagtcatcacaaacaagtttctgacaatgcttctctctagtttttacgtgacgataattcgttttccaccacaggcctgaaagctctccaaatgtccacttgcagaccctacgaaaagcatgcttctcatctgctctatgaaaagcggggtgaaactctgtgagttgaacacaaacatcacagagaagtttctgagaatgcttctgtttagttttaatgtgaagatattcccgtttccaaagacatcttcaaagaggaccacatatccacttgcagattccacaaaaasagagattcaaaactgctctatccataggacgtttcaacgctttgagttgaatgcaatcgtcacagagaagtt

SEQ ID NO: 230973 - DNA, 557 bp, Homo sapiens
aaagttcaactctgtgagttgaaagcaaacatcacaaagaagtttctgagaatgcttctgtttagcttttctgtgaagattatcccgtttccaacgaaatcttcaaagaggcccaaacatccacttgcagatgccacagaaagagtgtctggaaactgctgtttgaaaaggaaccttcaactctgtgagttgaatgcagtcatcacaaacaagtttctgacaatgcttctctctagtttttacgtgacgataattcgttttccaccacaggcctgaaagctctccaaatgtccacttgcagaccctacgaaaagcatgcttctcatctgctctatgaaaagcggggtgaaactctgtgagttgaacacaaacatcacagagaagtttctgagaatgcttctgtttagttttaatgtgaagatattcccgtttccaaagacatcttcaaagaggaccacatatccacttgcagattccacaaaaagagagattcaaaactgctstatccataggacgtttcaacgctttgagttgaatgcaatcgtcacagagaagtt

SEQ ID NO: 230974 - DNA, 565 bp, Homo sapiens
aaagttcaactctgtgagttgaaagcaaacatcacaaagaagtttctgagaatgcttctgtttagcttttctgtgaagattatcccgtttccaacgaaatcttcaaagaggcccaaacatccacttgcagatgccacagaaagagtgtctggaaactgctgtttgaaaaggaaccttcaactctgtgagttgaatgcagtcatcacaaacaagtttctgacaatgcttctctctagtttttacgtgacgataattcgttttccaccacaggcctgaaagctctccaaatgtccacttgcagaccctacgaaaagcatgcttctcatctgctctatgaaaagcggggtgaaactctgtgagttgaacacaaacatcacagagaagtttctgagaatgcttctgtttagttttaatgtgaagatattcccgtttccaaagacatcttcaaagaggaccacatatccacttgcagattccacaaaaagagagattcaaaactgctcyatccataggacgtttcaacgctttgagttgaatgcaatcgtcacagagaagtttctgagaa

SEQ ID NO: 230975 - DNA, 398 bp, Homo sapiens
agcatgcttctcatctgctctatgaaaagcggggtgaaactctgtgagttgaacacaaacatcacagagaagtttctgagaatgcttctgtttagttttaatgtgaagatattcccgtttccaaagacatcttcaaagaggaccacatatccacttgcagattccacaaaaagagagattcaaaactgctctayccataggacgtttcaacgctttgagttgaatgcaatcgtcacagagaagtttctgagaaggcttctgtctagattttatttgaatatgtacccgtttcgaacgaaggccaaagagtggtccaaatatccacttgcagatcctacaaaaagagtgtttcaaagctgaactatcaaaggaaggttcaactctgggatttgaatgca

SEQ ID NO: 230976 - DNA, 578 bp, Homo sapiens
aagcttctctctcaaaaggaaagttcaactctgtgagttgaaagcaaacatcacaaagaagtttctgagaatgcttctgtttagcttttctgtgaagattatcccgtttccaacgaaatcttcaaagaggcccaaacatccacttgcagatgccacagaaagagtgtctggaaactgctgtttgaaaaggaaccttcaactctgtgagttgaatgcagtcatcacaaacaagtttctgacaatgcttctctctagtttttacgtgacgataattcgttttccaccacaggcctgaaagctctccaaatgtccacttgcagaccctacgaaaagcatgcttctcatctgctctatgaaaagcggggtgaaactctgtgagttgaacacaaacatcacagagaagtttctgagaatgcttctgtttagttttaatgtgaagatattcccgtttccaaagacatcttcaaagaggaccacatatccacttgcagattccacaaaaagagagattcaaaactgctctatccataggacgtttcaackctttgagttgaatgcaatcgtcacagagaagtttc

SEQ ID NO: 230977 - DNA, 398 bp, Homo sapiens
agcatgcttctcatctgctctatgaaaagcggggtgaaactctgtgagttgaacacaaacatcacagagaagtttctgagaatgcttctgtttagttttaatgtgaagatattcccgtttccaaagacatcttcaaagaggaccacatatccacttgcagattccacaaaaagagagattcaaaactgctctatccataggacgtttcaacgctktgagttgaatgcaatcgtcacagagaagtttctgagaaggcttctgtctagattttatttgaatatgtacccgtttcgaacgaaggccaaagagtggtccaaatatccacttgcagatcctacaaaaagagtgtttcaaagctgaactatcaaaggaaggttcaactctgggatttgaatgca

SEQ ID NO: 230978 - DNA, 267 bp, Homo sapiens
cttccctttactaccataggcctcaaagcgctccaaacctccactagccgattctacaagaagagtgtttccaaactgctctgtcaataggaatgctcmactctgtgaggtgaatgcaatcatcacaaagtagtttctgagaaggcttctatctagtatttatgtggagatatttccttttccaccacaaacctcacagccctcccaatgtccacttgcagattctagaaaaagagtgtttcatagctgctctttccgaaggaaagt

SEQ ID NO: 230979 - DNA, 267 bp, Homo sapiens
cttccctttactaccataggcctcaaagcgctccaaacctccactagccgattctacaagaagagtgtttccaaactgctctgtcaataggaatgctccactctgtgaggtgaatgcartcatcacaaagtagtttctgagaaggcttctatctagtatttatgtggagatatttccttttccaccacaaacctcacagccctcccaatgtccacttgcagattctagaaaaagagtgtttcatagctgctctttccgaaggaaagt

SEQ ID NO: 230980 - DNA, 267 bp, Homo sapiens
cttccctttactaccataggcctcaaagcgctccaaacctccactagccgattctacaagaagagtgtttccaaactgctctgtcaataggaatgctccactctgtgaggtgaatgcaatcatcacaaagtagtttctgagaaggcttctatctagtatttatgtggagatatttccttttccaccacaaacctcacagccctcccaatgtccacttgcagattctasaaaaagagtgtttcatagctgctctttccgaaggaaagt

SEQ ID NO: 230981 - DNA, 549 bp, Homo sapiens
tataaaacatgtgttattttaaaacattaacagcagactctcaaactgtgaccttacagatctgaaggaccatatgtagatattgacccagaccaagtagcagtgttgttggtttttttttttttttttttttctgtgaagggcaaaagagtaaatagcttaggctttgagaccgtaaggtctacactggttcaactctgtagcggtcatagaccatatgaaaatgaatgggcacagctgtattccaatcaaactttttttcataaatgtaggcagtgggctagctttgttctgcaagccatagtttgctgacccctcttctgtagcatgtttttcaaatagtcatgcayaacgtgctttaaaatcatctggattttcttcaggggtgaatttagtttttatagtgactgaacattataaattagagaagattttctttaagaaaaaagaacaaaattgtgaatataaattaggaaggtagctacttagtgttagaaatgaaatcatactgaatatcataaaattataaaatccagaaaatattatagt

SEQ ID NO: 230982 - DNA, 549 bp, Homo sapiens
tataaaacatgtgttattttaaaacattaacagcagactctcaaactgtgaccttacagatctgaaggaccatatgtagatattgacccagaccaagtagcagtgttgttggtttttttttttttttttttttctgtgaagggcaaaagagtaaatagcttaggctttgagaccgtaaggtctacactggttcaactctgtagcggtcatagaccatatgaaaatgaatgggcacagctgtattccaatcaaactttttttcataaatgtaggcagtgggctagctttgttctgcaagccatagtttgctgacccctcttctgtagcatgtttttcaaatagtcatgcacaacgtgctttaaaatcatctggattttcttcaggggtgratttagtttttatagtgactgaacattataaattagagaagattttctttaagaaaaaagaacaaaattgtgaatataaattaggaaggtagctacttagtgttagaaatgaaatcatactgaatatcataaaattataaaatccagaaaatattatagt

SEQ ID NO: 230983 - DNA, 586 bp, Homo sapiens
aattgagtttcaactaaatgctttgttttataatttgctgtgaggtaattagaaaaatgtgcatgaaagcatgacacgtataaatcacaggtatattcatctgaagtattttgtgcagtttatatttatagctcattctgtgaagctaaatccactgtattgaaacagacaattaaaggaaggtaaagggactattttcccagcaattgcaatgtgctaggcatgatgccaggcactgcacaagctctatctccattaatcttctctaatgtaaatattgccaccacttcacaaataaagaaactgaactatgtataaaactgagcttaaggggatyaatgaatatattatttgttgttgaacatatgcaggtctaattaaagtaattgcaagttatattaaaagaatttgtggtagagacagaagttgaacccagtgctgactggcactctagttattgttataaaggcaatttgtattattgagttactttgaataatacacattttacatttatttaaataaccatttaatttgtaatgataagtttacagattttttaaaaatagaaacatattatggcatc

SEQ ID NO: 230984 - DNA, 361 bp, Homo sapiens
ccccaagagaggatgcctcactgtagctgctcttagcgatgggataaagaacattttcttcattctctgggcaactgagaataataggactgctaacccaaatcagtttgtattgactgcagtttayacttttctctgaagtgagatgtaaggacccattcaacttctgttattttgccactgttataatcactaattaagacctaatacagccattctttatttccttatgtgtataatcaccatcatgccttctaaagtttctatgaaaaaacaaaacactagattcaatattcctccaaactgatttctgcagacttctttcttaactcctttaataacaaggtgattttatatgctt

SEQ ID NO: 230985 - DNA, 438 bp, Homo sapiens
tgcagtttacacttttctctgaagtgagatgtaaggacccattcaacttctgttattttgccactgttataatcactaattaagacctaatacagccattctttatttccttatgtgtataatcaccatcatgccttctaaagtttctatgaaaaaacaaaacactagattcaatattcctccaaactgatttctgcagacttctttcttaactcctttaataacaaggtgattttatatgcttcaccctttctagaagagagacatttaagaatgatgaaaaaaaaatgttggtktgatttgctcaatggattgccttatgttaaaaaaatgcgagaaagcatattaggatgttagtcatgttacctaagtgacaaaaccttttttcctactggacatgttttaatttaaatttcatgatgtcttgtggtcttaaaa

SEQ ID NO: 230986 - DNA, 485 bp, Homo sapiens
tatgagcaggatagcacgtagctgggtgcagaaggccatgtttgatatttttgataagattttggtaaagataatctagtcttgctagattgacatatgacatggccacagctaarctagcctctaacctatcccattgccctcaggatacaggaatgtggttagaagcaaaattagcatccacatgaagcccagggaaaagacagaaacattgttaatatcttggatagggtcaaagagagcaatccctcagtgcatccagatgagtagaagtttcagacaaagctgccctttaaataaatatgagcaaatgaaaagaagcaacttgataactatttaaattctagagagaaaggaagaaagaaatgggaggtcgggggttagcaggaatgaaggaaaataaaggttcagaaagcaaggaaagtaaaagccaattctgaaagacagtgtatttaaagaaaaggaagcacactttccccaagatt

SEQ ID NO: 230987 - DNA, 485 bp, Homo sapiens
tatgagcaggatagcacgtagctgggtgcagaaggccatgtttgatatttttgataagattttggtaaagataatctagtcttgctagattgacatatgacatggccacagctaagctagcctctaacctatcccattgccctcaggatacaggaatgtggttagaagcaaaattagcatccacatgaagcccagggaaaagacagaaacattgttaatatcttggatagggtcaaagagagcaatccctcagtgcatccagatgagtagaagtttcagacaaagctgccctttaaataaatatgagcaaatgaaaagaagcaacttgataactatttaaattctasagagaaaggaagaaagaaatgggaggtcgggggttagcaggaatgaaggaaaataaaggttcagaaagcaaggaaagtaaaagccaattctgaaagacagtgtatttaaagaaaaggaagcacactttccccaagatt

SEQ ID NO: 230988 - DNA, 594 bp, Homo sapiens
tctttcatctgtatggattaatagaccaggggaaagtgataattagtttctgctttgtgtcctcaagaatctgagcttcctctatctaatttattcatggaaatgtccttcccaggaccaagttgcaaccctccacagaaggcccttcacactctagcataaatgataccagtgaagtcgggcagtgtgcagcttgtacaacagttcacagatacacatcctgtgtgaatagctcactgcaatcttctctcctagagaaatcctttcctaacaccagatctctccttccactttatgtgaacttttattgcccctccatttttatatttccttagcaatcatgtctttcgtgtgtcctcatttgtacttcttcatgcatttttacttcctcagtacaactggagatattcgaggccaggtaataggctgcatgctttttaatccttagtagcacctgtctcagtgccttgtacackgtgtactaatcaaggtgacagttgaaacaacaaaaataataatgatgataatagataatatttattgagctctcacaatgtcccaagcatgacatgctctgaatggagtattttattt

SEQ ID NO: 230989 - DNA, 582 bp, Homo sapiens
ttgtagctaatagtttcttgtgcttttggtgctggggaagttacatcaggaataacagacttttgttctcttccccaagcccatactgagtatcaggaacttgtaaccatctaacagtctgttggtattcggtaggaccgcttatcttgcaaaagagttaggtgttgatgcctgagggtgcaaggggaaagagccagctataaaagtggcccactgagctttacacacaggacaagtaagtatgggtcctaaccttacttatcctgcctcaagaccatgttttcattcttatgcaaataggaagcttcctgactgtggtacctakgacattggagagagactagagttgtgacatttaaaataaggattacctatcattacactaaaaataatatttgtgaacagctgggaataaaaactaaactttttcatatagacagaagaggaggttgcaggaaggaaaccaggagaggcaagtgtacagaaatcagggagcagaggatctcaaacagtggaccacaggtgttccatgacatgagagggtaattagaaagtctttagatacagcctgtttgaacaaga

SEQ ID NO: 230990 - DNA, 582 bp, Homo sapiens
ttgtagctaatagtttcttgtgcttttggtgctggggaagttacatcaggaataacagacttttgttctcttccccaagcccatactgagtatcaggaacttgtaaccatctaacagtctgttggtattcggtaggaccgcttatcttgcaaaagagttaggtgttgatgcctgagggtgcaaggggaaagagccagctataaaagtggcccactgagctttacacacaggacaagtaagtatgggtcctaaccttacttatcctgcctcaagaccatgttttcattcttatgcaaataggaagcttcctgactgtggtacctaggacattggagagagactagagttgtgacatttaaaataaggattacctatcattacactaaaaataatatttgtraacagctgggaataaaaactaaactttttcatatagacagaagaggaggttgcaggaaggaaaccaggagaggcaagtgtacagaaatcagggagcagaggatctcaaacagtggaccacaggtgttccatgacatgagagggtaattagaaagtctttagatacagcctgtttgaacaaga

SEQ ID NO: 230991 - DNA, 338 bp, Homo sapiens
tctggaatagtcagagatggttttctgtaacaagtgagtttcatttgggatttgtataatcagaaagatgataaggggcaaaccataatcaaagccccagagatgcttagcaatgagagcaaccatgctgaggcatagtaaactatgacactgatcagataaycaaggtgaggtgcaaagtcaggtagaagtgctcagtgctgaggtagtaagaactagggaaccaatagaggcttttgactcatggtctgagaagatgagaaacagccactggaagacagatccagtagatggacaagagggattgatttgaatattttggagcctggggagtaacc

SEQ ID NO: 230992 - DNA, 338 bp, Homo sapiens
tctggaatagtcagagatggttttctgtaacaagtgagtttcatttgggatttgtataatcagaaagatgataaggggcaaaccataatcaaagccccagagatgcttagcaatgagagcaaccatgctgaggcatagtaaactatgacactgatcagataatcaaggtgaggtgcaaagtcaggtagaagtgctcagtgctgaggtagtaagractagggaaccaatagaggcttttgactcatggtctgagaagatgagaaacagccactggaagacagatccagtagatggacaagagggattgatttgaatattttggagcctggggagtaacc

SEQ ID NO: 230993 - DNA, 679 bp, Homo sapiens
cttaactgataggagtcagatttgtacctgggactgctgatccaaagcctataaggaaaaacatagccaaaaagaatctgccttaaactgatgtgaactgactatccagatccatataattagaaataatattagaagacatcttaatgtatatagtatcttatggaacacagttttttttgtgtgtgtttttaagcagactttatgtaccaaattaagaaattattattttaatgatgaagtcttggctgggcgcagtggctcacgcctgtaatcccaacagtttgggaggccgaggtaggtggatccctgaggtcaggagttcaaaaccagcctgaccaacagggtgaaacctgtctctactaaaaatacaaaaattagcttggtgtggtggcaggcacctgtaatcccagttactcgggaggctgaggcaggaggattgcttgaatctgagagacggaggttgcagtgagctgagatcgtgccattgcactccagcctgggtgacaaaaaaataaaaaataaaaaagttatttgctctagggcatgcagatggaaaggggttgcaacaggtactggagtcagcattgctgtccaaagccttatatgcacccacccccscaactacctacctccctgggataagattactaatgacattattttccttaggagcaga

SEQ ID NO: 230994 - DNA, 623 bp, Homo sapiens
aaaggctgacactcaatgtataattgaaccttccacttccctttttgatctaaacaattactcttctgaatatggtggaaaggttgaatggtacatttctccctccttccctgctaccctgccccccacatgccagctgggcttgcaaaaggcagaactggattccaaaattatagcagcagccagtatggtcttcggtttccctgcagacacatgagtcaatggagacccacaggactgaaacatagagggtttatgtttccctgaaaagcaacagaactggcgaaaacagctctgtttctcagagatgagtgcaaactggacttataatgaaaagtcaccaggatgtgcccagagaagtttccagcaggaacacctgcccaaagaataatgtgggaccrtgcttcagcaccacattccagaactctgagtccaaacagacccagactaccgggaagctcctgcaagcagagcaggacaggtgttgatgcacatctgagacggggagttcctgggctcaggagaagggaaagcctcctgagcagcagcccagcagggagagaggcactagccagtgggtctacgtccaagaactgccacaaaggtcttaatgcatggtgcca

SEQ ID NO: 230995 - DNA, 586 bp, Homo sapiens
acaagttttacctgcttattattttataaatgtctctctgtatacacagtattggcaagacagcatttcactggtttttcatgctgatatagaagtgcctctactgttccattcatttgaccactgaccactcactgcaagacacatttagggggcagaaaatggagagctacagactactgaccaagaccttcactggtgagatggtgaggggtaggcaatctatagtcactagatttcttcctgctaaaatactgaagtcctgaaaatttttgtttcctagatattcggtgacaataaacaggggaaattgagtcttatcatatcttgcaatgagatgtcatacatttattcataattttayattttcttatcaaatgagagaatttgtattcattgacatacttctcttccttgcttttctctctgcaagcctttccccttatactttattactcataaaaatacatctatagatgctgatctggtcatttataatacagaaaactgttagactttatattttaagtcctaaaatgctctccaaaacttgctttttagccagatgttcagcagacttcctcat

SEQ ID NO: 230996 - DNA, 393 bp, Homo sapiens
agatcttgttgaaatgtaggttccagttcgctatgtctgtgtgggaatctaagatcctctatttctcccagtctcctctcagttgatgctgatattcctagtccctgaatcatcctttgagaagcaaggcacstagatttctggtcaaaatgctgaaaattaacaacccaaatttaaagatatgtggtttgttttgcttttttgttttgtttttctttgaggcaaattactagaaccaaccaaccaatgaaggttcttcggctcaagaacaaaaagtctactttgaaatttacattttgacatgaagcaaaataaaatgttaagcctagttatttttcatttaatcctaggtgagataaaaaataatactgcttctattaaactgacataatt

SEQ ID NO: 230997 - DNA, 562 bp, Homo sapiens
aagcaatcttcttcctgcttcagcctcctgagcagctaggactacaggctcgcaccaccatgccagtctatttttaaaaaaawttttttttgttgagacaaggtcttgctatgttgcccagcctggtctcaaactcttggtctcaagtgatcctcccacctcagtctccaaaagtgctgatattacaggcatgagccactgctcccagcccttcaatgtaccttttttttttttttttttttttttttttttgagacagagtcttgccctgtcacccagactggaattcagtggcatgatcttggctcactgcaacctccgcttcctgggttcaagcaattttcctgcctcagcctcctgagtagctgggactacagacatgcaccaccacactcggctaatttttgtatttttagtagagatggagttttgccatgttggccaggctggtctcgatctcctggcctcaaatgatccacccgtcttgacctcccaacatgctgggattataggcatgagccactgtgcccagccccaatgtgtcttttaattctgttattgc

SEQ ID NO: 230998 - DNA, 562 bp, Homo sapiens
aagcaatcttcttcctgcttcagcctcctgagcagctaggactacaggctcgcaccaccatgccagtctatttttaaaaaaaattttttttgttgagacaaggtcttgctatgttgcccagcctggtctcaaactcttggtctcaagtgatcctcccacctcagtctccaaaagtgctgatattacaggcatgagccactgctcccagcccttcaatgtaccttttttttttttttttttttttttttttttgagacagagtcttgccctgtcacccagactggaattcagtggcatgatcttggctcactgcaacctccgcttcctgggttcaagcaattttcctgcctcagcctcctgagtagctgggactacagacatgcaccaccacactcggctaatttttgtatttttagtagagatggagttttgccatgttggccaggctggtctcgatctcctggcctcaaatgatccacccgtcttgacctcccaacrtgctgggattataggcatgagccactgtgcccagccccaatgtgtcttttaattctgttattgc

SEQ ID NO: 230999 - DNA, 337 bp, Homo sapiens
tacatagtattctactctctctatgtactacattttctttatccattcatccattgataaacaggttgattccattacttggctatcatgaatactgctgcctgcagtgaacaagggagtgcagacatttctttgacaaacgggttttaaacttttggtaaatactcagaaatgcaattgccagatcatatggtgattctatttttagtgttttgaggaacctccatactgtttttaatagttgatgtactagtttacattcctgctaacagtgtacaagagttatcttttcttcatatcctgaccaacayttatctttggtatttttgataataga

SEQ ID NO: 231000 - DNA, 625 bp, Homo sapiens
gcatgtaagtagttacaaggtagttaataaatagtaaggttgtggcaatcagcatcaaagagagaatgattggccattacagagaatgaccacacaatcatggtttagtaccataagccttatcaattagctatgagtaaaatgtaagactacagtggaattgttgcaattgtcttttttttcatataatagaatacacttaatttattgctttttctggcaatagtatttaaattggcatgtaataattatacatatttatggggtacatagcgatattttgatacatacaatgggtagtggtcaaatcagagtaattagcatattcatcacstcaaacacctagcatttccttgtggtgggaacattcaaaatatataaaatatatatatatataataaaccgttgttagctgtggtcaccctatagtgctgtagaacactataacttatttctcctatctagctgtaattttttatcgtttaaccaacctctccctatcctccctcacccctaccctttccaacctctagtaatcatgattctactctctgcttctatgagatcagcttgttttagcatttgcatattggcaagaacatgaaatatttatctttctgttcct

SEQ ID NO: 231001 - DNA, 535 bp, Homo sapiens
ctccctatacttatctccatttcaaaatatgcaaagctgagtgacagaggcaaaaattaattcctaaagatccaaagggtacacaatacctgtcaaatttcgtatgtctgggcaggatgcggtggcttacgcctrtaataccagcacttcgggaggctgaggcggacagatcacttgaggtcaggagttcgagactagcctggccaacacggcaaaaccctgtctctaccaaaaatacaaaaattagctgggcatggtggcacgtgcctgcagtcccagccactccagagactgaggcagaagactggcgtgaacccaggaggcggaggctgcagtgagccgagaccacaccactgcacgccagcctgggcaacagagcaaaactccgtctcaaaaaaaaaaaaaaaaaaaaaaagatgtagcctctggaaaaaatgacgcatgttggtgaggcagccttaggctctagtgcagaagaatagagaaggagaggtggaggagggagagaaggagagaccaaagactgggctgaatt

SEQ ID NO: 231002 - DNA, 535 bp, Homo sapiens
ctccctatacttatctccatttcaaaatatgcaaagctgagtgacagaggcaaaaattaattcctaaagatccaaagggtacacaatacctgtcaaatttcgtatgtctgggcaggatgcggtggcttacgcctgtaataccagcacttcgggaggctgaggcggacagatcacttgaggtcaggagttcgagactagcctggccarcacggcaaaaccctgtctctaccaaaaatacaaaaattagctgggcatggtggcacgtgcctgcagtcccagccactccagagactgaggcagaagactggcgtgaacccaggaggcggaggctgcagtgagccgagaccacaccactgcacgccagcctgggcaacagagcaaaactccgtctcaaaaaaaaaaaaaaaaaaaaaaagatgtagcctctggaaaaaatgacgcatgttggtgaggcagccttaggctctagtgcagaagaatagagaaggagaggtggaggagggagagaaggagagaccaaagactgggctgaatt

SEQ ID NO: 231003 - DNA, 535 bp, Homo sapiens
ctccctatacttatctccatttcaaaatatgcaaagctgagtgacagaggcaaaaattaattcctaaagatccaaagggtacacaatacctgtcaaatttcgtatgtctgggcaggatgcggtggcttacgcctgtaataccagcacttcgggaggctgaggcggacagatcacttgaggtcaggagttcgagactagcctggccaacayggcaaaaccctgtctctaccaaaaatacaaaaattagctgggcatggtggcacgtgcctgcagtcccagccactccagagactgaggcagaagactggcgtgaacccaggaggcggaggctgcagtgagccgagaccacaccactgcacgccagcctgggcaacagagcaaaactccgtctcaaaaaaaaaaaaaaaaaaaaaaagatgtagcctctggaaaaaatgacgcatgttggtgaggcagccttaggctctagtgcagaagaatagagaaggagaggtggaggagggagagaaggagagaccaaagactgggctgaatt

SEQ ID NO: 231004 - DNA, 368 bp, Homo sapiens
aattctctcaccatttgtttgtctgaaaaagactgtatctctccttcatatataatgcttagtttcgctagatacaaaattcttggctgatgattgttttgtttaaggaggctgaagatcrggccccaatcccttctagcttgtagagtttctgctgagaaatctgctgttaatctgataggttttcctttataggttacttggcgcttctgtctcacagctcttaagattctttccttcatcttaactttggataacctgatgacaatgtgcctaggtgaagatctttttgtgatgaatttcccaggtgttccttgtgcttcttgtatttagatgtctagatctttagcaaggctggggaagttttc

SEQ ID NO: 231005 - DNA, 436 bp, Homo sapiens
tgtcctaagctgtggcattctctctggggtatgtccaggtgcactgcctcctgggaaagccctaagggaggcaaggaagccaggccttggaggctactgagttttatgggtatctctgccttgaagggcaaaggctgtagaaaatcctatagataagtttcctgactgatttcggttaggtctggatttcccaacgtgccatagagtttctcacggcaataaagaagggcttttggtcacaacggagacccgatatagattccacagaaaagcttggtggctggagctactctaaattaaggctctgcaacctcagccaggcattgatgctgcccgaaaatctatctcatgttctgaattgacaccttccccckttcctcactgtaactatttcaagcttttatccctttcttctagcaccctactcagaagacaa

SEQ ID NO: 231006 - DNA, 546 bp, Homo sapiens
cttcttggtttggatccattgctgctgaactagtgtgatttttggggagwgttaaagagtcttgttttctcatattaccagagttggttttctggttccttctcatttaggtaggctctatcagagggaaggtctagggctgaagtctgttgttcaggttcttgtgtcccacagggtgttcctttgatgtagtactctcctcctcttcctgtgagtgtggcttcctgagagccaagctgtagagattgttatctctcttctgggtctagccacccagcaagtctaccaggctccaggctggtactgggggttgtctgcacagagtcctgtgatgtgaaccatctatgggtctctcagctgtggataccagcacctattccagtggaggtggcagggggtgaaatggactctgtgaaggttcttagtttggtgatttcatgccctgtttttgtaaggttggcctcctgcccagaagtgggcgctttccagagagcatcagctgtgctagtatggggaggaatcggtggtgggcagggccatagaatt

SEQ ID NO: 231007 - DNA, 483 bp, Homo sapiens
ggttaatactcgccggggcccaaaaggctgagtcgccccgcacgycttgcttcgtggagtctcttttcgacccccgccaccgcagctcagttcctcggattgagccctgaacccgagaaggagcaggcccggagctcaggagggcaggcacacggatttctttctgagggctgactaccaacgcccaccccagacttgtacggaaggagagagtaaaggagtcgccgcctggccaaggctgcagcagcctacagaggctcagccggagacgcaccatgaccttggccctggccgagacccctttcggagggctcagaccggcgaggagccggagcgagcgaccctgctgcggtggctcgggctgcgctctctcgggccacaccccgcgccctcgcggctggggcgggctgcgccgcggaggcggggatcgttctccggcaacaggtgcgtcccaaggcaggcaggctacttccctccaagcct

SEQ ID NO: 231008 - DNA, 483 bp, Homo sapiens
ggttaatactcgccggggcccaaaaggctgagtcgccccgcacgtcttgcttcgtggagtctcttttcgacccccgccaccgcagctcagttcctcggattgagccctgaacccgagaaggagcaggcccggagctcaggagggcaggcacacggatttctttctgagggctgactaccawcgcccaccccagacttgtacggaaggagagagtaaaggagtcgccgcctggccaaggctgcagcagcctacagaggctcagccggagacgcaccatgaccttggccctggccgagacccctttcggagggctcagaccggcgaggagccggagcgagcgaccctgctgcggtggctcgggctgcgctctctcgggccacaccccgcgccctcgcggctggggcgggctgcgccgcggaggcggggatcgttctccggcaacaggtgcgtcccaaggcaggcaggctacttccctccaagcct

SEQ ID NO: 231009 - DNA, 580 bp, Homo sapiens
aacatttttttttcttgtaaaggtgtgactgttctatggaagacataatataaatgtctttccttcaaaatgattacaaagtgaaacagaatgtttaggttctaaaatactttttaaaagtatgtaaaagcagtttgtaaattgtacagtgctaggaatggaagctattattttttttttttttttgagatggggtcttgctgtgtcgcccaggctggagtgcagcagcactatctcggctcactgcaagstctgcctcccggattcacgccattctcctgcctcagcctgccgagtagctgggactacaggcgcccgccaccacgcccagctaattttttgtatttttagtagagatggggtttcaccgtgttagccaggatggtctcgatctcctgacctcgtgatccgcccacctcggcctcccagagtgctgggattacaggcgtgagccaccgcacccggccgaagctattaatattttactccaacccctttatttcatacgtgaggaatttcaggccaagagaaaatgagtgactcacttaaggttaacagctagttaatgacagagggactg

SEQ ID NO: 231010 - DNA, 580 bp, Homo sapiens
aacatttttttttcttgtaaaggtgtgactgttctatggaagacataatataaatgtctttccttcaaaatgattacaaagtgaaacagaatgtttaggttctaaaatactttttaaaagtatgtaaaagcagtttgtaaattgtacagtgctaggaatggaagctattattttttttttttttttgagatggggtcttgctgtgtcgcccaggctggagtgcagcagcactatctcggctcactgcaagctctgcctcccggattcacgccattctcctgcctcagcctgccragtagctgggactacaggcgcccgccaccacgcccagctaattttttgtatttttagtagagatggggtttcaccgtgttagccaggatggtctcgatctcctgacctcgtgatccgcccacctcggcctcccagagtgctgggattacaggcgtgagccaccgcacccggccgaagctattaatattttactccaacccctttatttcatacgtgaggaatttcaggccaagagaaaatgagtgactcacttaaggttaacagctagttaatgacagagggactg

SEQ ID NO: 231011 - DNA, 580 bp, Homo sapiens
aacatttttttttcttgtaaaggtgtgactgttctatggaagacataatataaatgtctttccttcaaaatgattacaaagtgaaacagaatgtttaggttctaaaatactttttaaaagtatgtaaaagcagtttgtaaattgtacagtgctaggaatggaagctattattttttttttttttttgagatggggtcttgctgtgtcgcccaggctggagtgcagcagcactatctcggctcactgcaagctctgcctcccggattcacgccattctcctgcctcagcctgccgagtagctgggactacaggcgcccgccaccacgcccagctaattttttgtatttttagtagagatggggtttcaccgtgttagccaggatggtctcgatctcctgacctcrtgatccgcccacctcggcctcccagagtgctgggattacaggcgtgagccaccgcacccggccgaagctattaatattttactccaacccctttatttcatacgtgaggaatttcaggccaagagaaaatgagtgactcacttaaggttaacagctagttaatgacagagggactg

SEQ ID NO: 231012 - DNA, 283 bp, Homo sapiens
ttggggtatcatgctctagccccaacattataaacttgactactctagataccttaaataartagaattatacaatatttatccttttctgactggctaatttcacttagcacaatgtcctcagggtttatccatgttgtagtgtatgtcagaatttccttcccttttaaggctcaaaagtatttatctatatgtgatatggcttggctctgtgtctccaaccaaatctcagattgaattgtaatctttaatgttgtgggaaggacctggtgggagggacctg

SEQ ID NO: 231013 - DNA, 283 bp, Homo sapiens
ttggggtatcatgctctagccccaacattataaacttgactactctagataccttaaataagtagaattatacaatatttatccttttctgactggctwatttcacttagcacaatgtcctcagggtttatccatgttgtagtgtatgtcagaatttccttcccttttaaggctcaaaagtatttatctatatgtgatatggcttggctctgtgtctccaaccaaatctcagattgaattgtaatctttaatgttgtgggaaggacctggtgggagggacctg

SEQ ID NO: 231014 - DNA, 592 bp, Homo sapiens
  misc_feature (1)...(592): n = A,T,C or G
aggtcttgcctcaaatgtaaattacccagagtccagcaccaccacacttacccattcaaattaaattctgaatatctttactatgatttttccacataacatatatctgtccaacaacatgttgtgaaacccaaatatatgagataggtctcagtctatttaggaagtatattatgccaacattaaggatatgcacccgtgacacaccctcaggaggtcctgaggacatgtacccaaggtggtcagggcacagcttggttttayacattttagagagatatgaggcatcaatcagtatatgtaagatgtacattggtttgagccggtatggcagaacaactcgaagtgggcaggggactccaggttataggcagataagagacaaacattcgtttgagtttctgattagactttccaaaggaggcaatcagatatgcatttatctcaatgtgcagaggtacaatcttgaatagaatgggatacaggtttgtcttaagcagttgccagcttgactttcccttttagctcagtgatttgggggtccaaagatnnnnnnnnnnnnnnnnnnnnnnnnnnnnnnnnnnnnnnnnnn

SEQ ID NO: 231015 - DNA, 592 bp, Homo sapiens
  misc_feature (1)...(592): n = A,T,C or G
aggtcttgcctcaaatgtaaattacccagagtccagcaccaccacacttacccattcaaattaaattctgaatatctttactatgatttttccacataacatatatctgtccaacaacatgttgtgaaacccaaatatatgagataggtctcagtctatttaggaagtatattatgccaacattaaggatatgcacccgtgacacaccctcaggaggtcctgaggacatgtacccaaggtggtcagggcacagcttggttttatacattttagagagatatgaggcatcaatcagtatatgtaagatgtacattggtttgagccggtatggcagaacaactcgaagtgggcaggggactccaggttayaggcagataagagacaaacattcgtttgagtttctgattagactttccaaaggaggcaatcagatatgcatttatctcaatgtgcagaggtacaatcttgaatagaatgggatacaggtttgtcttaagcagttgccagcttgactttcccttttagctcagtgatttgggggtccaaagatnnnnnnnnnnnnnnnnnnnnnnnnnnnnnnnnnnnnnnnnnn

SEQ ID NO: 231016 - DNA, 580 bp, Homo sapiens
cccatcagtattttttcacagtttggatcattttgtccatttcatgatgagttgtggagtgcagagcttttaacaatgaaagtttaaaagactcaggaaggaccrgacagcatccaggccctctgtgagtctgtgcttcacactaaatttacattattttacacactaattttgtttttccaaatcatgtgcattgcactgttcattaaataggttatcataggaaagttggcttggattaatcttaggaaattcattcagattgcatattttaacagtttcagcactagctgttttagcataaaaatctgctaaagcgtttgcctgatattcaggttcagttctacaagtgtgagctttaatcttaataacagcaatctgtaatggcaacaggatagtagaaaggagatcatctacttggagtccgtttttgatggggctcccactagagatgagaaaccctcaaaatttccatctcatgcaaaaatcatgtactactccaaaaacatatctgctatttgtataaatatttactgacttgtctttagctgtatgacaagctcggtgagggcaaaaagct

SEQ ID NO: 231017 - DNA, 386 bp, Homo sapiens
tgacttcctcttttcttatttggatgccctttatttatttctcttgcctgattgccctggccaggacttccaataggagtggtgagagagggcatccttaccttttgccagctttcaaggggaatgcttccagcttttgcatattcagtatgatgttggctgtgggtttgttgtatacttctgttatgaacagaagataaaggcagtcttaggttgggattacttggacctaacagttgcagtggtcacctttagcatgcacratttcaccatatatttgtgccttactgcagtgatgaccattgccaggttgtattcaaaattatcactaaacaccctgcaatgcaatgatagcccaccttttactttttagtcttgacgttttt

SEQ ID NO: 231018 - DNA, 507 bp, Homo sapiens
ctaccttcccttattttagttgcaaaagggaagtcagattcctggtatttttcatatattattcaacttcaacttgaagaactggctgttttcttctttcttgtcattatcaacctgcagctgtcagacctcatcagcgatgacagttgacgttaatgggatttaccaasttgtttatagtataatcacatgaacaataaatttctccttattttgcagcattggacacatttccaccatgctaatggcattttaaatatatttggcaattttcccaattttttactgaagaaaactgtaagtttatacttgaggactgaagtgtgactctgccgattatcaggtcagtatcacccctacctccaaggatatcactgctatcctaaaatctaatgcaattttactgtcattcttttatatttcaggcaaaaatttattgcagtgtctatatattgagattacattcaaatgcatagaacagaaggaactgttaaatgttaatactta

SEQ ID NO: 231019 - DNA, 529 bp, Homo sapiens
attttagttgcaaaagggaagtcagattcctggtatttttcatatattattcaacttcaacttgaagaactggctgttttcttctttcttgtcattatcaacctgcagctgtcagacctcatcagcgatgacagttgacgttaatgggatttaccaagttgtttatagtataatcacatgaacaataaatttctccttattttgcagcattggacacatttccaccatgctaatggcattttaaatatatttggcaattttcccaattttttactgaagaaaactgtaagtttatacttgaggactgaagtgtgactctgccgattatcaggtcagtatcacccctacctccaagratatcactgctatcctaaaatctaatgcaattttactgtcattcttttatatttcaggcaaaaatttattgcagtgtctatatattgagattacattcaaatgcatagaacagaaggaactgttaaatgttaatacttataaatggtggttattggaatatgcaaaaacagat

SEQ ID NO: 231020 - DNA, 533 bp, Homo sapiens
attttagttgcaaaagggaagtcagattcctggtatttttcatatattattcaacttcaacttgaagaactggctgttttcttctttcttgtcattatcaacctgcagctgtcagacctcatcagcgatgacagttgacgttaatgggatttaccaagttgtttatagtataatcacatgaacaataaatttctccttattttgcagcattggacacatttccaccatgctaatggcattttaaatatatttggcaattttcccaattttttactgaagaaaactgtaagtttatacttgaggactgaagtgtgactctgccgattatcaggtcagtatcacccctacctccaaggatatcactgctatcctaaaatctaatgcarttttactgtcattcttttatatttcaggcaaaaatttattgcagtgtctatatattgagattacattcaaatgcatagaacagaaggaactgttaaatgttaatacttataaatggtggttattggaatatgcaaaaacagatctgt

SEQ ID NO: 231021 - DNA, 554 bp, Homo sapiens
gaaattcctggtgagccatggcgatgcaaattgtcagcttatctttgcaggtgcagtcaccccagccagccagacacaaatacatatctgattgtttctgctgccccattgtgtctgtgttatcttatgtaaaatgcagattccccacatttttcctctgcccctccccttccgtttatatgaaaactgtgtgyttctcaatatcccaccctttcccctttacatttggagcacttaaaatcatcttcagagaaaggcatagacctgtctcctgggtgcatccttaattttggcaaataaatttcctaaaatgattgagacttgtctcatcagtttctttgatggacagcttcatcaccaaacatctgcagattttccctacatctttttgctattgatttctatttgacaaaaatacaattcgtatgatttcaattttcttaaatttgggggaactggttttatggtccaggatacaatctcccttgccgaatgttctgtgtgctcttggaaagaatgtgtaaccagtgttaggtggttgatagttaattggt

SEQ ID NO: 231022 - DNA, 525 bp, Homo sapiens
acccatatcactgtgtcatgtggggctggtaagatccggcagcccctgaagcagccggcacaggcctggccgtaaggggagtgcggatgggctacaccctcagtggtgctggctgggaagacgaggccccagaccctcaggccctcttcccgtccggctccaggatgtggctgggggacagtgctcaccatctatgttgaagaccggggctttctgcaggtggaatttctccacgtactccaagtatcttcccagccatttggggtcctccagcattcttctcgctggaatcagaggggctgacagtgaggggctgaggcctggagcctctgtcttttctgtcctcctcctcctctgcggagaacaacggggaggcagaggccctgggcatcggccaccccaccactaagttgccacgacacagtctgggggctcttcggaccacggyagcaccccctctgcgacctcccaggcccggccagctctgattgcaccggccccaaccttgcctcctctaaacacagg

SEQ ID NO: 231023 - DNA, 505 bp, Homo sapiens
gggcagccactataagactctaaaacaaccttggtctccacaatcttttatcttaacctgaatatttcctttctataatcccaggtctttagacaaactcaaccaattgtcaaccagaagatgtttaaatttacctataacctgaaagcacctgctttgtccacctttctggtccaaaacaatgtatttcttaaatgtatttgattgatgtctcatgcctccttaaaatgcataaaaccaagcttgtataaaatgtataaaaccaaccgccttgggcacatgttctcaggccctcctgagggctgtgtcatgggccatggtccctagtatttggctcagaataaatcccttcaaatattttaccaagtttgattctttttgcagacactcctatcsatgctcagtatcagtttgggctatctttattgctcaaattaataggacaatttgctgaagtccgatttgctgaagtccaggagtatccccttctaccccagagaatccc

SEQ ID NO: 231024 - DNA, 550 bp, Homo sapiens
ataataaaaaaagaataaaaatacattaaaaagaaaaaaaaagaaattcaggaagcaaagacttaggggtcaggaaattacatctcgttgtctagaatttgtgatcaacatttcaagtcactcattcacatttaggggtagagataaagccaaaatctgtcttacactgagaagggatctaaaagggttttcttcacattgcctggtcatatttcttttactctttggaagttaatacagatagagtagaaacaaggcaacctagccccctcctttttctgttttagcttctgggtacaaccagtctctggccatctttgatggctaattccagacatttacaaaaatgcagaacctgctgtcaccatctctgcactgtgcaatgacaagattaccatttttctgctcacagatatgtggcatctgaaaactcatctagattatatatacactacaaatgtgaaaatatgtataatgartcccataagatcatcagtctcatggaggcaggacttccttaagaccaaaaatgtatgccagaaagccatgc

SEQ ID NO: 231025 - DNA, 553 bp, Homo sapiens
ttgccagtcctgcaatagaggcaatgactaataatagactgctggtacaggcaagaacatgagatgaatctcatggatatgatgttgagtgaaagaagccagacagaaaaatgtacatactgtataatttcatttataagaagttccagaacaggcaaaattgatggtgttagaaatctgaagagtggtgatatttgggagatacacaccaagaaagacacaaggcaamcttcagggatcctggagatgctctgtatcttgatctcagagatagctacaggaacctgtactcatacataaaagtcaattgagctgcacacatgagattagtgcactttacttttttataggtaaattaaaaaattaatggaatcatgaattttctggctctaaaatgggcatattggctgaaactctccatatatggttgaaaggtaaaaacctgctgttttccgtgactttggaagaagttgaggctcagttttcataactgtaaataagcctggccaaatttactttacatgacatttacaaggacattatagtgcttgat

SEQ ID NO: 231026 - DNA, 399 bp, Homo sapiens
ctggttcatggcatctttccttgggccacgcaggctggagacaagccattgttttcacagaactctagtcactgaatggctccaggaggcctggatggtacaamcctttaggcttccagcttcttcagcacccttgccaatgttgagggtatcatccttgctgatttatttattgtttttctcagcagagaaatttgcaggagagaagtgatctccttcagagaaagggctacattccagaaggttcatggtgaagataagaaaccgtcatgcagtaagaggaggccactgtgatgtatgtgtttgtttctttagacccaagtatgaattcaatagctgaatgaagatgcttagaaaagagcctcaggtaccttttttaaaaaattgtatttatggggt

SEQ ID NO: 231027 - DNA, 524 bp, Homo sapiens
ttatgaattcacagaatgtatgtaaggccagacagtgggtagtagaagaacttgcccactggaaacacaaatacagccaattcttatgtatggtaatatgttctgtaaggtcactgcaaacaccagattagtgaatactgaacgatgcattggtcctagaggaaatacagatttaggctcctgcaagcctctggtcacgttttcatcagctgattaatacacagtcttgttttatgtgtatttctatttaaagactatacagtttatatatatatatatatatgtgtatactttacacacacacatatatatataccttacatatatctatattctctaaagagtatatattcttatatacaaggggtcttcaaaatgttcatggaaatacatattattaaacactgcgtggatttcaaaatttttttgcaccaaaataaacttgtactaacttgttataatatgtctgaataggatatagtttgaggcactaagaaggrtaagacatcagtttgaaaaaagtc

SEQ ID NO: 231028 - DNA, 606 bp, Homo sapiens
gcttctagatgtagaacttatgccaagctgtgttgttaccaagggctgcagcaggtgcagaagcctgggggtacaggacggtcaccaaaaggacacaacttttgcaaggcccacatcagaaagagttgcaaactctgtaaaaaacaatttaacaagtagattcgagctcaccttagagcagagagytgtagctgcagaataacggggtgcactgggattctacaagtctttgtcaaagaagtgatgtcttgatagccccaaacaaaccctgccatttttacctcttccacctcatgaaagattcagcctcaagcagttgcttctgtatcacttatccaaagtgggcattgggtacaatgtgaatggacagtttgattttggtttgtatgaagtaaaggagcagaaccaactacccatcttttaaattatcttgcagctatgctgtctgccttaaaatgcttaacttctcccattttacaggaggaaaagggctctcatagtcagaagggttgcttgatcttatcaagcaatttcagttcactggagtttcacttacaaaatagcagtttcaggaatctcagcagcccgaaatgagagcattttatg

SEQ ID NO: 231029 - DNA, 546 bp, Homo sapiens
ctacataaggttgtgtttcttagaggagacctccctgggtccttatgaagtgaccctcaattacaacaaaagagaagacttgaaacatttttgcttttctctctgttaaagtttatagactgtttgggctggagtggagtaaaggctggtcttatcacagtttatgaactgaggctttttaaagtggagtcctagggttctgaccactatgtgtgaatgagccagctccagagaccagctggcagaacagargacgtggaagtgaataactaactttcaaagaccagatgctggtgttccctgccagctgaggggcctgaacactcttggaagtcttctatgtgtcacatttagtctcagactgggattctcatatcaatttggttaatttaaaaaggtaaggtaagagactaggaattagtaagaatgtggacaacttttcaaaatttataataataactgttgatatttacatagtattttgcacaatgtgaagtactttcttgtgtgtatttcatggtgtaatacaaaacaaaccaaccaaca

SEQ ID NO: 231030 - DNA, 274 bp, Homo sapiens
accttaaataaacttattttttattactcataattgacaaaaataacctttgctttctatgctatgagacaaaaggtaaatgcatttttctttacgttcttataytgacatagtatttttggatggagtcaaagttgaaaagttcctgatacataaatcttcaggcacttaatcttagttattgtatccaataaataccctaatcagtatcttgctacataaataagctcttctcaaaagattcatttgttattttaggcaactaaagtattat

SEQ ID NO: 231031 - DNA, 274 bp, Homo sapiens
accttaaataaacttattttttattactcataattgacaaaaataacctttgctttctatgctatgagacaaaaggtaaatgcatttttctttacgttcttatactgacatagtatttttggatggagtcaaagttgaaaagttcctgatacataaatcttyaggcacttaatcttagttattgtatccaataaataccctaatcagtatcttgctacataaataagctcttctcaaaagattcatttgttattttaggcaactaaagtattat

SEQ ID NO: 231032 - DNA, 543 bp, Homo sapiens
tctcctttgtgtgcatactcataatgcacacaccattatccacctctacagactcaggttgtttagggatgccctttcgaaggaaggctctggaaatgtctcagagctgctgtagtgtgcttgtctacctgtgcaccattgcctcggataaagatatctctctgccatcacagggcccccaactcacccaattcgtctatagtttccatgacttgcagtgtttggtgkatccttctatttttgcttttcaaacaccagagaaaacactgttgagctcaaataaccattcgaatttactgtatggaaaaagcattctggtttatcagggcccttcgcatgtcagcttctgtagtgtcctgctcacttacaagagaagccacagagggattcggaaaacataacaacagcatagctctcagtgtagtgtcaagggagacagatataaaaggtcttaacatttctctgttgttcagtttataacagatcttttccagttatgataaaaatgtggttttcatagagaatagctcatccaattatttc

SEQ ID NO: 231033 - DNA, 433 bp, Homo sapiens
tatgttaccacagatcctcttaacattgctgcagtaattggaaaactactaaacatttgttacagatagaagagagcaacagaaagtacatgagctttctaagtttccctcagcttatcaacagcctgtagaagaagcaggatattcagatggggaatcaaaacatgcttttaaatctcagttcaaatagaaaaataagtgactggaactagtgatgttctcaaaatctcaacttgagttcgggctccaccttaaggtgtgctagcttgggcatacactgaaacctaaatatttatatttctagaactggaaaatcactacctctcctttataccaacatgtctkggaatgaatcagcttggaaaacacttgtaagtgctcccttgaggtcatctttttcacagaatcaaatattttagggtttgaaggaatt

SEQ ID NO: 231034 - DNA, 424 bp, Homo sapiens
ttttcctatatcttatataacttttatgataaatgagtacaattccagtgatctacaagaatgttatgagtaaaaatgtggagcatgtattcacttagaacacatgtggaagggctctttaatgtagtgttgtctatgcctcccagcttacagatgagacaaccagagttctggaataaatgacttgcccagggtcatagagccagggcytcagggtaagtgatctgatctttggtccagtgtcagttcagtgtgccacactttttacactaaaccagaaggaagaggcattggttaatcatgataacaacaacagtttatgcttattttaagtttggtaagcatggtatatgcatcatcttactcaaccttcaaaacaatgctacaactcatactttatttatgagaaaatggaggcttagag

SEQ ID NO: 231035 - DNA, 540 bp, Homo sapiens
acatttgcctaccctaagtacctcttggaactactaacatcatttgcaatttagaccttagcaaggtggcagatgtgctggaagatccttgtgtaattattttccattcttcttaatcattcagaatttcagatctaggtttgaagttgcagtttagcaaccccactagcctctccrctgttagctgtttaacttcatctgtgtttaatttttgtttctttcatatttcttctacacatattcccagatgcctttaggaaataggtccattctgaatatatcacataaataaactgcaatgggggaaggcctcttcattttgaaaatgccacactgcacaacagctgaaaggaaggctcattgagtaatattagcttgcgtttctacgggagcactataagtgcttttttccccaaagcacttaacataacaaaattgcctcactcatcacagcaaagcagtcacctttagagtggtgcatgaagctctttttcaggatggaatcacactttagatggagcaagaaatgaagaagaattc

SEQ ID NO: 231036 - DNA, 534 bp, Homo sapiens
aaacactttgatagttttcagtctggcattttccatgagtttcaaatttgaaaacgtgaaaatccagtctgattttgaggatagcaaagagttaatacttatggggaaaagtcagtgcmcaaaaggaatgaactacattcccttttcaatttctctgccttctggctaactttccaaacagatttaatcactctcagtatgtcaccatcagaatctctccccaatggccagcacacagcggctactgggctctgagactgccaggcagccagcagccacctcacaacctcaccactcagcccaaccagctcagtccctctggcacccttcggaggctgagttactggcatgaatactttcagaaagcccaagttagcacggggccatttcaatgaaattagtggtgaaaaccatcaagcatgagaatttgatttccatccaaggaacataggttgatttttatctgctcttccttggcatcagaaaaagaggctaggatttcaataactgctgatgccattgcttgtgtgttgc

SEQ ID NO: 231037 - DNA, 559 bp, Homo sapiens
gaaataagcaggacacaaaaggacaaatactatgtgattccagttatgtgaggtaattagaataggcagattcatagagataggaaatagagtggccattgccaggtaccaaaaggaaggggaacagggaaatggggaattatttttaatgggcacggagtttctgttgggacaatgaaaaattctggaattggataggggtggtttacacaacatagtgagtattcttaatgccactgaatcatacacccaaaaaatygttaaaatatttttgaaaagtacaatgaaagctagcttttaaaaaaagatagtgctaaaccaaccaatgctagcatgtaagcagcccagcctagagttgtctaactggatcaccttagagactaccagcccactcaataatcatttcccccatctttcatgttaatggaaccctaatttgttccaataaccaaatacacttcagcccagataaattctggttagtctaaccctatcatggaaatctcattctccttgttggttattggtttaggggcaggcttgtagctgtctggccaat

SEQ ID NO: 231038 - DNA, 508 bp, Homo sapiens
gcttttctagtgaggagaatgcttgagttctttcagatcagaaaagaaagcctaaaacacttttaacttgcagactcaacagaatctatgaaagagaaacagatgaaaggcagatcgctgtgctatcctggtgctttttagyatgtgattgacacaaaggaaaaaagaaattttgttcagtctaaaaaagaactttctttcttaataattacagctccctccacctataatgggttgcttggtgagtcatcaagatctctgtctctggaaggatttggggaggagatgggaattaggattgcacagccctgccaggtccctttccaatccacaagtctctattttaagacccttgaggttaaatcctgtagaatagaatctaagaactacaagactttgcagtgcggctgatatgagtttatgtcactaggaaagatgtcctggagaatgtagtgcctgagctggacctcagaggatgatgatgatggagatgggaggacagtagcag

SEQ ID NO: 231039 - DNA, 564 bp, Homo sapiens
aatgaggggcctgtattgccccatacctatttcatagaaatattgtaaggactcaaggtttagaaacccctaattttctgagattgatatgaaaatataggrtaattataaataataagtatcagcattaagtgctttagtaatttagttataatttagtaatttagttataaattagacattttaacaaattgtgtttactggggagagaagacaaatagttaactaaatagttcctggatgctgggaacttcatgtatcttaactcctttaatctatacagcacccccatttaccatatcagtgcacatgaatgaaatgcctactacattctggaagttgcgcttgatattggtgttacggtggtgaacgagacagatacagcctccaaactcagaaagctaaagaaccagagaaaattaaaagaagtcacaattgtcatatgtaaaggtgcacaaagggttggaaggggacaggggaccttacatattaacatttcattctgagcccctgaacacattgagcttagaattcacatgcataaaaggtgggcaggcttttatg

SEQ ID NO: 231040 - DNA, 564 bp, Homo sapiens
aatgaggggcctgtattgccccatacctatttcatagaaatattgtaaggactcaaggtttagaaacccctaattttctgagattgatatgaaaatataggataattataaataataagtatcagcattaagtgctttagtaatttagttataatttagtaatttagttataaattagacattttaacaaattgtgtttactggggagagaagacaaatagttaactaaatagttcctggatgctgggaacttcatgtatcttaactcctttaatctatacagcacccccatttaccatatcagtgcacatgaatgaaatgcctactacattctggaagttgcgcttgatattggtgttacggtggtgaacgagacagatacagcctccaaactcagaaagctaaagaaccagagaaaattaaaagaagtcmcaattgtcatatgtaaaggtgcacaaagggttggaaggggacaggggaccttacatattaacatttcattctgagcccctgaacacattgagcttagaattcacatgcataaaaggtgggcaggcttttatg

SEQ ID NO: 231041 - DNA, 346 bp, Homo sapiens
tattcatttacatggagatatatttacatgagatgttactgatattcattgtgtaagatataatattgcacagaaatggttttttagttacttatttcataaaatgcatatttttcaacaagtatttaatgaaccttattatgtgtatgaaaggtctggagtttataatgtaacttttaaggattggtgggtacacagcagtgctccacgctyatttctttgctgacttcatttaactattttgtatttaaaaaaaaaaaaggcaagaaattggcctttaaaatttgacaacacctgagagacataacatgagtcagtgttcagaatcagcctggctgggccagca

SEQ ID NO: 231042 - DNA, 590 bp, Homo sapiens
aaggcaataggaattaatctaatgagctgaaatttctccttcataatttgctaggttaagctttatttttaatttgcgacatcctatgctacattattatttagcctaaccgggtaaaatatattggatgaacagattgggcatactttggggcagaaattagactagagggtaaatcttcaaccttggagtaaaatatgatcctggaataaattaatgtsctgctctgaccaatttcatggcttcaagagcaaatggtagcaggccactgccagtcccatgagcatacccacggcaggatgttaaattgaaagagcaagtcttttttccttcagaaaagtctctattttaacatttaaaagaaagactcaaattcattccaacagctttatcaggctttgccacaaaatacagtcacacatactcgggtacttggaaggttactgcagagctctttaactgatcaagtcagggtgaagtgaccaccttccccacaaccatactctgtgcttgtcatctgaaaggatgtcttaccctggctcaggctgtgggggtagctgcagtagaagcttgccttgggattatgagaa

SEQ ID NO: 231043 - DNA, 583 bp, Homo sapiens
aagcagaaaataataatgaatgtgttacaacttggaaaaacaatacattttgagaaaaaaatgtagctgttttgaaatgaaagacatttgtctaagacttctaagcttttttaaaaaaacttttaatttcatttgttaataccataagcaaacatgggccctattattagctgtttgttaagaaaataaactatggaaatgcaaatgctccaaggtagtttcaaagtcaaaaacttctccataacactaacgtagagatctaaatatttccacagactgtcctacaaatgcactactagaaatcataactatgttaaaacaatgatcctaaaatattctgtaaattcaaaggtccacacaggaggagaaagaccaaaagcatatgacatcattaattagtgagagtttttcttttcttagaggatttaaacacatctaggtatttttattttgcacacaaattgcacggctayaaactgtaaagcacaaaccagtagacagcctaactatacgattaaaaaactaaaccagtttgaaactgaggtggaatttgaattctgtttattttatagaattacaaaga

SEQ ID NO: 231044 - DNA, 550 bp, Homo sapiens
tcattttgtagaaacaaagcttccactttattagactttttactaagcatgatttttacagtattcacttttgcagaaaaggcattatttattcaggttaaataatkcagtgtattatgatagctttgagacaatatttttatgcaataagcatttagtagttataaggatagttttgagagaaatgcgttatattagattggttttgattaagacgaagaaagtcagttattaaaaagtggaaacataacagttaggaaagtataacagttagaatggacagaaaataaattgatatatgaagggctgtattagagagcaatatgaacaactgctttctgttttcatggaggatacatagtgtgagtgcagggaaggagaatttagatctaagacagaatatgttaaagaaaaaaatggttatattccagtgaataaaataaggactgcaataacaacgggcatctattaagggcttactatgatgtcagtataaccaaagcacttagcaatgcgttaacccatttaagcctcaaaaagcaaaattaaa

SEQ ID NO: 231045 - DNA, 589 bp, Homo sapiens
tgacttgacaaactttaattaaagatttcacctcagccatttgcttccctgagcagcgctcctaattcactattctttgttgtccagttttatatctccatagcatttattaccgtttactatactatgtgttatgtattacctcttttttttttctctcrtggctgaaatataggcagagatcattttctggttggttcactgatgtatcctaaatgccccaaatagcttgtcacttaaaaagtaactggtacatatctgttgaataaattgttatttttctcatgttgtgaagatgtttgtgtccctaggctttagtatttttcaactatgttgtaagttttacccatgcatattttaataaaggtatactttatatagtgtaaaatgcacaaaccttaagcacatatttcaaagattttttgacaagtgaatatatccatgtaacctaccattctatcaagttataatgcggtacaaatgttaatttcatttctattgctattaattagtttggcatattctagaacatatgtaatcatgacatgaaatcaaacagtacgtacacttttgtattttttcactcagt

SEQ ID NO: 231046 - DNA, 425 bp, Homo sapiens
cacaattaaagcctcttttctggcaatgctccttgtctcagtgattggctttctktgtggtgagcagtagaccctaaagcaaatctctaatgtttcagtaataatgtataggtatatccaaaatttttgctttaaactttctttcttggaggtctccttttattttagcaaatactggtttgttgttttttcttcagattttcgctctgcgttgtatctcctatgtagtcttactgacctcatggtgaggaggatgggaagctgtaggtacatccagtgttctatagaattttgctgttctctcctgtagtggggtacttgtggtctgccctgtggactcatgataactgaggtattactcaatacatatggcatttcaggcaatatgctggtaccatacctgtatttcatggtctgaaatactt

SEQ ID NO: 231047 - DNA, 580 bp, Homo sapiens
aaatccaaaccatttcagtgggtatcataaattgcatgttacagatgagagtaacataccaaattcatatgtcaatttttaaacaaagaatatgtgtatttagagtatgaattaccttacatttcagattctaaatacaggctaaatcagcataactttcttggattatgtattctcagaattataatattattaaaaacttattcataagacatttgtaaaactcatttgttttgttttattcacttacatttccaatagttgaargggactctaaaaggcaggaaagagttaaaattactattcataaatctaatcttttaacgtgaaactatgttttttttttttaatcaagtgctggtgaaagagagaaattcttattttatatggccaaaatgcatacaaaaccaatgctggctataaatatacaacaggctatggtatgtctacagaaaagcagacttatacttgatattttaaaaatgaaaaaacaatgttattcacttacatggtttacacataattttgtctggagaaaaaagaaatgagcaaaatgcaatttggaagtcagtttaaatct

SEQ ID NO: 231048 - DNA, 355 bp, Homo sapiens
aataaccgggagtagtagtcactgaggataaatggagatttaactgaaccaaaagttgagtgcaaggattaccagatgacagcagtgtgttatgaggctggggatgaaaatgtagttattgtgccartgggcagagttgtaaaaagcatccaataatttggctattgagaggaagaacatttggatactggttcaaggtagcagttttgtagagtgtttgtaccaggattagatttgactgtatataacaggagaacctcaaagaacagtaaaaaaagaaaacttcagattgagaggataaggtgatctgaagtttccagctggaactctactgctaacacagttacaggagaga

SEQ ID NO: 231049 - DNA, 539 bp, Homo sapiens
ccaattatacatttttagttattttaaaatgtacaattaatagttattgactatagtcatttactrttaaaaacaaaactacacatgcacccacatacacacacacacacacacacacacgcgcacacacttacatataatgtattcttatgctgatattttctctggactattaagctcttaaaggtaaagcaagtgttataaacatattttctttcccaatagtgtttaacacagtaagttatacgtagtagatcttaagtaaatacttattcagttaatgagaatgatgtcctgtcccataaccacatgcaaatagaatatatggtaagataaattcagttaaaaaaactctagattttatttagttgggggagaaggaaaaaagaacatcataaatgcattcaaacttacacaagaataaaacacttcatatgaagacaattttggtgagctacttggccacatgagcttgcgtatatttgtggtggacagtggacacatttgctagctactcttggatcaaacagtgcccacta

SEQ ID NO: 231050 - DNA, 574 bp, Homo sapiens
gcacctaactccaagaacattcagagcatgtatttttcctgtctttgcctcagtacatggcagcattgtttgcagatggatgaatcaaacatagcaatacctaccaatactctaagaaagtatcaaaatattttcctgagttgtttgaaactgcagtcctgttgaaaatcttgccttcgaaatgttcatggagaaagagcggccttaatcaatgtttagatccagcagtgagctagtgaaggaggcagttttgaacactaatgaatttgagcatagctcatttctgtataagcacatagctgaagctgcatcttccaaggatcactttcaatcaaaagtttccctatttttagacttcagggaagrgagaaatgatgttgcaatccctccacctctctaaattcctttttaatgctttcttacatgggaccttcgaactagccacataaagggtaatgcaggctgttcctgatgtagaaagaagatcttttgaaactgatgccctttaaaaaatattcagtaagcacccaagaaagtttcaggaattactggtaagaattcaaacactgagtgc

SEQ ID NO: 231051 - DNA, 482 bp, Homo sapiens
ggtttcttattctgctcaacttcttcgtatttggaaatatgaatcaggctaggaatgaagagtgacattattaagaagaccccacccagaaggaggaaagtcccacgtggttgttcggaaggagaacaaatacataaacattgtgtaacagaccgactggagaagccagccctagttcttgtgcctggccatgctgcgaggtactgaagaacagggaggaaggattttctgaatctaagcagaaagaggagggggtggcttaacaagaccataaagattctagcagttgcacaacttaggtggagcattttatagggtcctagcatttttgtctgaaaataagagggtcagtgggagagagagtatgagacaaagaatgagaatagrggaggattggaggaaggagggaaggagaggaaagaggagagacagcccctgcctttgaacttttagagacctgttactattactagttagggctt

SEQ ID NO: 231052 - DNA, 599 bp, Homo sapiens
agatctagaggttatctttgtacatttttcaacatttgggtaaaaagcagggggcaacgaagaagagggagtcagacttagcaagagacattttgctgaatgcatttatgatgttctttgttgttttaaatctaaaatctatacccatggcctttatggttttgctcatttatttgcttatactggatctggatttggagtagtgagacttgttctcaggtcctcctggtcctttacaagtggaagggtcaagggtcatgaggttcagcagccacaggtgttatgttaatgccrtccctagagaagctttctggcccatttcttcattgtgaaaatattactgctgcactgggtgaaatctaaggtaagttctatttcatacttcaaaattcttgaatttgtttttaaggtaaacagtatgtccgggtggctggtcaccgacttgatcagtcccaggaagatcccgtctcagcaagatgcactaggcgggcgccatcaggtcagcatcaacaacaccgcggtcatgcagagactggctcccaagtactactgggcagcccccgaggcctaccttggaaataaggtgcgtgtgaccctgc

SEQ ID NO: 231053 - DNA, 214 bp, Homo sapiens
agctatcaacttatgaaaagttttgaccaaatagcttttcagcttcccacgccaatctaattgcacgtgacattgatccacagatgatagaggctgggatcttttgttttttcctraagtttgagtttctgttgttgtcttcaaattcactagtcttttctcctacaatgtcgaagccgatgcccacccattcagtacttcattttggatatgg

SEQ ID NO: 231054 - DNA, 600 bp, Homo sapiens
gcatttctcttttcacagtttttatgtttccttcaagtcttkgagcatgcttataatagcttttttgtttttgttttgagatggagtctctctctgttgcccaggctggagtgcagtcacgtgatcttggctcactgcaacctctgcctcccaggttcatgcaattctcccacctcagcctcctaagtagctgggattacaggtgcacaccaccacgcccggctaatttttgtatttttagtagagatggggtttctccctgttggccaggctggtctcgaactcctgacctcaggtggtccacccgccttggcctaccaaagtgctgggattacaggcgtgaaccaccgcgcctggcctataacagtgttttaaaagcctgccaattccatcatctctatgatttgtggacatgtttctaatgactgggttttgttttttttttcccctgattgtggatcgcttttttttgttgttgttgttgtttctcatgtctagttattttcattccccataaaaaaaaacccagctctttatttggaaataattaggagtttacccaagatttgtaagaataagagtggtacgtagaacacctgc

SEQ ID NO: 231055 - DNA, 600 bp, Homo sapiens
gcatttctcttttcacagtttttatgtttccttcaagtctttgagcatgcttataatagcttttttgtttttgttttgagatggagtctctctctgttgcccaggctggagtgcagtcacgtgatcttggctcactgcaacctctgcctcccaggttcatgcaattctcccacctcagcctcctaagtagctgggattacaggtgcacaccaccacgcccggctaatttttgtatttttagtagagatggggtttctccctgttggccaggctggtctcgaactcctgacctcaggtggtccacccgccttggcctaccaaagtgctgggattacaggcgtgaaccaccgcgcctggcctataacagtgttttaaaagcctgccaattccatcatctctatgatttgtggacatgtttctaatgactgggttttgttttttttttcccctgattgtggatcgcttttttttgttgttgttgttgtttctcatgtctagttattttcattccccataaaaaaaaacccasctctttatttggaaataattaggagtttacccaagatttgtaagaataagagtggtacgtagaacacctgc

SEQ ID NO: 231056 - DNA, 558 bp, Homo sapiens
gatgtgatacaggaaattattggtgaattgacaaattgtactgtggagaatggattggttaaaatattgtrtcagtgttaaagtgattgaagtgggtaataaaccggagattctataagagaatgttatttttcttgggaaataccattggaatatttacgagtaaaaggccattatgcatgtaactctgaaatgatgcacaaaagaaaaataatacacgtgtgctgggtgtgtgtgtgtgtgtggagagagagagagggaattggtaagcacatgggtgaaacattaacagcagatgcatctgggtaaaagatctgtgagtattctttgtactgccatcacataggtcagcctctctccaaaacctgcactcttgtttactaaaacagtatttctcaaaacatggaacgccttagtgattttttttaaatctcattttgctaactttcagctcttttaattaagcccaaaagagaatcttaagttggtgctggatggtttggtttttaacaccaaacacttgctaattctctttgtataacaaagagagtcatcagg

SEQ ID NO: 231057 - DNA, 483 bp, Homo sapiens
agtgagttccaggacgtgagtttgaataaatggaaaaatgggaacctgaaaccctcagcaaagtctgctgtgagcatgtgtctctgatctttcaagtactgctttggccactcttaagcttcgtgaaccttattttcctcatacataaatgggaggrgagtagtaatgacatctactatttattaatcacctgctgagcatcagaggctgtgatgagtgccttacaggtctcattttttcctcactggagccctataagataagtactgttttccccattttatagacaaagagactgaggttcagagaggcccagaaatcttaggcagccagtaaatgccagaaacagaagttgaagccaagtctgtttgatgccagagcctgggcccatcaccaccccctggactctgtgccctccgggagctgttgcaaagatgagagttatttttctgtgtggtgcctggcacacagtgccggtgtgca

SEQ ID NO: 231058 - DNA, 483 bp, Homo sapiens
agtgagttccaggacgtgagtttgaataaatggaaaaatgggaacctgaaaccctcagcaaagtctgctgtgagcatgtgtctctgatctttcaagtactgctttggccactcttaagcttcgtgaaccttattttcctcatacataaatgggaggagagtagtaatgacatctactatttattaatcacctgctgagcatcagrggctgtgatgagtgccttacaggtctcattttttcctcactggagccctataagataagtactgttttccccattttatagacaaagagactgaggttcagagaggcccagaaatcttaggcagccagtaaatgccagaaacagaagttgaagccaagtctgtttgatgccagagcctgggcccatcaccaccccctggactctgtgccctccgggagctgttgcaaagatgagagttatttttctgtgtggtgcctggcacacagtgccggtgtgca

SEQ ID NO: 231059 - DNA, 587 bp, Homo sapiens
tattttgaatgtgtgataaactattgttaattatagtcaccgtactgttctattgaacactagctcttattccttctaactgtatatttgtacccattaatcaacctctcttcatcctccccaccacccttcctggccttcagtaatcacagtctactctctatcttcatgagatctacttttttagctcccacatgtgattgagaacatgccatatttgtctttctgtccttggcttgtttcacttaacataaygacctccagttccatccatgttgctgcaaatgacaggatttcattgttttttatggctgaataatattctagtgtatatgcataccacattttctttatccatccatcaattggtggagtgcgctgacatttgaaaagcttctttttagatcctcatggcagaacaggataagttcaccaaacaggaatgatttcacgttttcttggtgtctagactttgctcagacttaaatctgtgtttagtcggcctttgaggaaatacaggacagatccttctatctcccagcgtggttgagagaattaaaagagatcatgtaaatgtgatcaggaaa

SEQ ID NO: 231060 - DNA, 577 bp, Homo sapiens
cttaatacagtctaataaaataagttcctggtttgatcaaagaataagatctataaaaacataaataaacaccacagatacacagacaagagagaagaaattataggtgagtaaagacattttaacatttaaaatgatgtagaaaaacataraaaagaataaatgataggtttgactacctatgaaagaaaatctaatactttttgcataaattaaatcaaatgacaacaagaagcatagcaaaggtttaatgatattcacatatagggaaaatataagattgatttttaacaagaatcctatggaataatgaacacagtttttgagaagatcattcacaaaaatgaaaatagaaatagctaaaaaacataagaaatacaacttcactggtaatcaaataaacacaaactgaaatatgagattattattaacacctgtaaacaaagcaaagatttttaaagacatgctacctaattctgacaacagagaaatttacctatattacaattgaagatataagatacatatacatttgcatattaatatgcatatttaatattaatactcacatagacat

SEQ ID NO: 231061 - DNA, 584 bp, Homo sapiens
atttgttaaaaatggaatccaaggctgctaagtatgaaggaatcttatacattttaaaggttttttttactgcacaaaattttgtaacatttcctggtgtcctatggggcatcctaaatttggctagagtacacrcttccttgaaagcagcaaaagaaaaccaatcatacctccctgggtgttgtcattaggaactttatccattcaatcattcttagagcatcagcatcgccaaattctgttgctttgtcagaaatctatggagttgctcaaatggagacaagcttttcatctctttgccatattagtctgtatcttgattaacaaaaagacacatccaaacatgcaaacatttcttccacatgctagaaaaagtggtcataccaaaaatgaatgctagagaagcaagagcagtcagactttgtcaaagacagttaattatccaagaatgacaagctaaaaagctagtctgcatggctgaactacacacatgaaatgctctgtgcacttagcagattggtgacagcacagggtctaagtcccactgtctaaccataccgtttaatctgagaggcttgagttca

SEQ ID NO: 231062 - DNA, 619 bp, Homo sapiens
cgcacattattgcctccaaggcactgttttgctagggagtggtgcatgtagtgtgtgtctattggttaataggaaggaggtaaacctggactggattggctaaagtagattttgtgagtatagatgaagttgtggatgttctatccccaactccaagcccttaccacttcagtgcatgcccacctaccttccaactgccagaattggcatctcgtggtctgagaactttctctgaccaccagaacctgctctgcccctacaggtggcagatcagaggtgccagtgagttggtgtagccctcaaggaaggactgatgayggctggtaagaaattctccaactcccttgccccccaggtagagtaactctgaggtgcgtgttcaacactggctcccagagttcccccataagattaggtttcaattttccctcgtgataacttgcttgatgtcattccctgcattgacctcgattgtgttcccttccctgtctcatgtctacactcccttaccaatatttcccaggaaacattgcaaccaacttcttagctcagggtcagcttctaaaggaacccaaactaagagagtggaggactttggaccttagctttggacattaca

SEQ ID NO: 231063 - DNA, 565 bp, Homo sapiens
gagttattctaaaggaacacaaggagactttcaaagtgatgaacatttttattgttttgattgtggttttggtttcatgtatgtcaaaattaccaaatagtatactttaaayagttgcaggttatcatatgccaactatatctcaatagagttgttttttagaaagcaattgttttattttcagtttctcaacttttcctagcatcagtagcatgatagctttacatcccctttgtcatctcttttcaaaatgtctgcttcacatattatgacattttaccaattgtatttggaatgtttcttgaaacttccctgacacattattttgttttaaaatgttacaaatgtttagatgttagaaattgtcttaatataatttttactatagaaatataaggcaaaaaatgatctacaaatgcaaggtataatacttacatttataacttgggttcagcagaaagcagagctgaggcttctggagctatttgcttgcactttattagggatacaattctggggagcaggagagaaacaaagagagtggagcagctaaaggagaacaaat

SEQ ID NO: 231064 - DNA, 455 bp, Homo sapiens
gccagcacaattgttttgaaagttatagcattgttggataaataccataatgggcagcggaatttgtagtaaaacacaggaggtaaattttggtmatttttaaaggtttcagaggagagaaaagacatattaccaaatggccaggggatcaaggtagctaacatatctgtttttggctaacaggtgatctgtccctgggattcaggtgtcaacccaaaagaaaaacacaataaggaaatgcaagtacccatgaaaaagaactcatcctgcattgcacagcatatctgtttatcgtcttgaactggctgcaaaagatacctaattgctcttacttcgctcaaaaataaaagcttcaaagtgctgtcattttccactgagtttcagaacagctgatcatctcatgcactcgctctgtacttagaccacactaagtttgcatctctcaattcagccag

SEQ ID NO: 231065 - DNA, 455 bp, Homo sapiens
gccagcacaattgttttgaaagttatagcattgttggataaataccataatgggcagcggaatttgtagtaaaacacaggaggtaaattttggtaatttttaaaggtttcagaggagagaaaagacatattaccaaatggccaggggatcaaggtagctaacatatctgtttttggctaacmggtgatctgtccctgggattcaggtgtcaacccaaaagaaaaacacaataaggaaatgcaagtacccatgaaaaagaactcatcctgcattgcacagcatatctgtttatcgtcttgaactggctgcaaaagatacctaattgctcttacttcgctcaaaaataaaagcttcaaagtgctgtcattttccactgagtttcagaacagctgatcatctcatgcactcgctctgtacttagaccacactaagtttgcatctctcaattcagccag

SEQ ID NO: 231066 - DNA, 455 bp, Homo sapiens
gccagcacaattgttttgaaagttatagcattgttggataaataccataatgggcagcggaatttgtagtaaaacacaggaggtaaattttggtaatttttaaaggtttcagaggagagaaaagacatattaccaaatggccaggggatcaaggtagctaacatatctgtttttggctaacaggtgatctgtccctgggattcaggtgtcaayccaaaagaaaaacacaataaggaaatgcaagtacccatgaaaaagaactcatcctgcattgcacagcatatctgtttatcgtcttgaactggctgcaaaagatacctaattgctcttacttcgctcaaaaataaaagcttcaaagtgctgtcattttccactgagtttcagaacagctgatcatctcatgcactcgctctgtacttagaccacactaagtttgcatctctcaattcagccag

SEQ ID NO: 231067 - DNA, 565 bp, Homo sapiens
tacttgctactctgataggaagcctggagaaggggaagggcaggagagacacggtcagcttttcctctggaggaaaagaaatagtgcttctttgtcttcctcctccagctgctcaccttgttcctcactcctcctgcaccagtgtgcagggagagagaaatatacagagaaagaaagcatgttgtaactggaatgcttatgaacaccatccatttagtggcctggttggcatacaattctgactcttcctcatggatgcagttgtgatgttttcggagatccttttccacaccaaatattggggacctctcacttccagatgtcttgcccttgattgatggactctctcctgtttcacctttgcactgttttcttagtctctagctgtccccttgggttcactgttagctcttttctctggagatcttttcacttgtccaagtgagccctcctggctagtccctaaattgattttatgctcgtttattctgtttctgtccctcgctgtctctggctctctctctctctctcytctctttttctctctttcttttacacacataca

SEQ ID NO: 231068 - DNA, 593 bp, Homo sapiens
ataggcagactatgtgagaggccagatcatatttagaaatttattggcaagcatggactcaagggaaactaggagaatggagtgatttatgatgtcaacccctggggactggaatgctaaaagctataaagccctgtggtgtctattgctacataacaaactactataaaacttagtgacttaaaacaataaacaagtatttttaataattccgtgggctatctgggtgktttttttggggtctggcaacttctttgaggctggatggtctaggatggcctcacttagaggtatgaggcctcaggtaggatggttggacagctgaggactctctacatgtaggttctcattctccaggagattggcccaggcctgttcgtgtgatgtaggaataattcgcagaagcagagaaggtaaccccactatgtgagcactattcaaacctctgcttatttatatttgctaatatcccattggccaaagcaaatcacatggccaaacccagatacacgggtggaggaacagactccacctcttgatgagaggaccttcaaaatattgtggctttttttttttttttccaatttaccaca

SEQ ID NO: 231069 - DNA, 499 bp, Homo sapiens
ccccatcgccttttgctctctttctctctgtcacttgctcctattttcaccatgtgaagtgcttgctcccactttgccttccaccatgagtaaaagctccctgaggcctcccgagaagccaagcagtgttggcgccatgcttgtacagcctgcaaaactgtaagctaattaaacctcttttctttataaattacccagtgtcaggtagttcttcacaacaatgcaagaacaacctaacacatagaccctgccttcaaggaattaatagtctaatgggagagacaacatttaaagagctaatgtttaaaaaagattattttatcattatttagctgaaatakttatttctatattataataagccaaaaatatacagagaaacgcttatctctaaggccttcgatttattgaatattcttcagggctcttggtaaaagcttcatgataaggaaatatcttaaaataggagtacactttttttaaaaaaaaaaaaccaccc

SEQ ID NO: 231070 - DNA, 527 bp, Homo sapiens
agtgatattacaatttggttttacttaaacatgctaaaaatataccagaagaagccagagtcagtttccaggagttacaactatggtgtattctatctttaaaatatgctgttatgaagagaagtgggctaaaaggcacaaacatacagtaagagagaaggaataaattcaatgtttgatagcagagtaggatgattatacttaacaaacatgtatagtactcaggtgacggacaccctaaataccctgagtcactcactacccattatgtgtaacaagatgtctgatctaccccacaaatttgcgcaaataaaaaartaaaatactctattaatctcaccaggagtggaataaatttttgtgcttgtggattggtggacaaggggaataatggtgatggaaaaatcctggagacgcttaggcccagtcactcttttaatgctttctttgcttacttagtttaaaggtgggagcattgcattagaagcccagagatccggcttttagcctgacacctccctgaattc

SEQ ID NO: 231071 - DNA, 527 bp, Homo sapiens
agtgatattacaatttggttttacttaaacatgctaaaaatataccagaagaagccagagtcagtttccaggagttacaactatggtgtattctatctttaaaatatgctgttatgaagagaagtgggctaaaaggcacaaacatacagtaagagagaaggaataaattcaatgtttgatagcagagtaggatgattatacttaacaaacatgtatagtactcaggtgacggacaccctaaataccctgagtcactcactacccattatgtgtaacaagatgtctgatctaccccacaaatttgcgcaaataaaaaagtaaaatactctattaatctcaccaggagtggaataaatttttgtgcttgtggattggtggacaaggggaataatggtgatggaaaaatcctggagacgcttaggcccagtcactcttttaatgctttctttgcttacttagtttaaaggtgggagcattgcattagaagcccagagatccggcttttagyctgacacctccctgaattc

SEQ ID NO: 231072 - DNA, 429 bp, Homo sapiens
gaattccactctgcacccccacctcaccgtctcagtttctgcttccccsgcccgccctgaagccccactcttttgttgtagaacagcattagtagagtctatcagagggaagaggctctttctaggaataagatgctacacgttattcttaaagggaacgtgctgcaagctcagaggctaagattctccaagaaagagtcaaaaggccttgatacaacaaagcaggattccagagcagcctggcattgttccagtctgaagtatggggtggttccaaaattggggaccgtggaaatagattacagggatctgtggctctagaacacacaacagaccctgtgaatgcactgaataaatacctcgcacgtattgtgctactgttttctaatctatggaagtgctgtttaaatgaccaaattacagttatta

SEQ ID NO: 231073 - DNA, 567 bp, Homo sapiens
ttttttcctaaatggaaatctttttattattttttcctgattttataagtaacacattctctttgtaggaaatttaaacacttcagaggtgaatattaaatttaaacaattcaaaactcccataattatattcatcaaaaaacacttaacattttgatgcatatttatttatattatttaacaagctmttgtacagcaatttgtatacactgagctcctgtccatccactttacaattgtgcttcatttactcctcttgacaaccctatgaggtattattatttccctatttacagagaaggaaatggagtctcagaggctttaataacttgcgcaaaagtacatggttataagtggcaaagttgggattccaacacagaccctcggactccagagtccctgctcttagttatataccaggcctctatgcatccttccatatctccatgcctaaaatttaaaaaaatatatcccatgtttccaagttgacctgcctccggcagtcaatttttcctttaatagcctcttaaaatgggtcgagaccccatccacggaaagtgggaagtc

SEQ ID NO: 231074 - DNA, 567 bp, Homo sapiens
ttttttcctaaatggaaatctttttattattttttcctgattttataagtaacacattctctttgtaggaaatttaaacacttcagaggtgaatattaaatttaaacaattcaaaactcccataattatattcatcaaaaaacacttaacattttgatgcatatttatttatattatttaacaagctcttgtacagcaatttgtatacactragctcctgtccatccactttacaattgtgcttcatttactcctcttgacaaccctatgaggtattattatttccctatttacagagaaggaaatggagtctcagaggctttaataacttgcgcaaaagtacatggttataagtggcaaagttgggattccaacacagaccctcggactccagagtccctgctcttagttatataccaggcctctatgcatccttccatatctccatgcctaaaatttaaaaaaatatatcccatgtttccaagttgacctgcctccggcagtcaatttttcctttaatagcctcttaaaatgggtcgagaccccatccacggaaagtgggaagtc

SEQ ID NO: 231075 - DNA, 390 bp, Homo sapiens
ggttcaagatatataaaaaatcaggtcaatgaggcctagaaatatatttcctaggggtatttgggggagacgcaagatttcatttctttttttttttttttcataatagctacatggattgctattatcttttcttcttaaatggaaaagaagaacatacttataaaagcattaaygagctttcttgcatttatgagagttgtaaggcattcaagatagaaaaatgtttctttggttatgtcagtgagttgttgaatcactcctgcttcaagtttaccttgcctctagagtttcaattacattagacaataaatgtccttcactgttaagtcaatctgagatggtctgtcattaaggacaggctaggtaatcctgcagtagtaaagaatt

SEQ ID NO: 231076 - DNA, 607 bp, Homo sapiens
ttactggcagttgagaagcagttgcctcttttaactctacctgattcatagtctctcaattctcttttattcatgctgtcaaattcagcaattattttctaagtttgaggtcgtatgtcagacaagtaatataggtaattccacagaagcacaccttgaaatattatctttggatgagkacactgaagttcactttgttcatatcacttgtctgttgtgtattggttgtgaaatcttctctatgtgttctcactacaggatgggggctcacggtgcagccatcatctggagctatgtgtcactatgacagagtgcaataccttgccatactttggcataaacagttaccagcaaaagaactagcattcttttttctgacatctgagtgtgttgggtatacagtattatttcctagttactgctggtaacagtttcccagctgtttcctcatggcctaatatggattgttatcattcccatttcagcctcttctaaagggtacttgacaccttcatgatccactgaatccatgccacaactgtagggttttgcttttcttaacactatcccctccctcctttcctgggtccaatttctatataagtta

SEQ ID NO: 231077 - DNA, 599 bp, Homo sapiens
gtcttctatacttgcgggaaaatgagatgtatctgtagtttaagtgacctttgaggcattcaatccagggtatgtatcattttttccaaactaaatagctgaaaataagataaaccaagctttactagaaggaagcattgtgatcattagaaagtcatttaatctcttaaaattttggctacttcatttgtcattcagtaactttatttagacttgatgaactggatataaaagtctaattctaaattaacartcatataattgccttctcatgggtaaaggtttttgacaatcatgcttgtatttataacatagctcttttaaaggaattggtagttggaatataaaagtaaaggaaataaaacaaactttttgtaacaacagtctcaatcttgatttacatgatatcgttatggttttaatttattgtgatgatatgctcattgcactatactgtaatttgtagctatctccagtaccagggagggtatttagctccaagattgttatgcaaaaccagtttgatttctgctgctatttgttttgattggtcaccgtttccattatgacttatcaatgcctgactgtaccagtgttta

SEQ ID NO: 231078 - DNA, 540 bp, Homo sapiens
ctcctgtccaagaaaagccctaaacctgatggtttcactgttaagtactgtcaaacttttaaagaacaattaatacaaattcttctcaaacaggtcccaaaaattaaagaatagagaataattccaatcacacttaacaaggccagcatcatccttatagcaaatccaggtaaagacactaaggaaaacaaaattataggccagtatttctgatgaaaacagatgcaaacattctcaacaagataccagctcacgcctgtaatcccagcactttgggaggtcgaggcaggcagatcatgaggtcaggagttcgagaccagtctggccaataaggtgagacccccatctccactaaaaatacaaaaattggcctggcattgtgggaagstcctgtaattggagctactcaggaggctgagacaggagaatcgcttgaacccaggaggcagaggttgcagtgagccgagatcgtgccattgcactccagcctgggcaacaagagcaagactccaccatgtgaaaaaaaaaaaagatagcagc

SEQ ID NO: 231079 - DNA, 495 bp, Homo sapiens
ggaggctgagacaggagaatcgcttgaacccaggaggcagaggttgcagtgagccgagatcgtgccattgcactccagcctgggcaacaagagcaagactccaccatgtgaaaaaaaaaaaagatascagcaagccaaacatgacagcacattaataagatcatcattcaccatgattaagtgggatttatcccagggatatgagataatccaaacaatacaaagcaataaatgtgatacaatacatgagctgaacagaaaagaaaaaaaaatgatgttttcaatagatgcagaaggtgcatttgacaaatttcacatcttctctcagctctcaactaataaggtatagaagaagttaccttagtgaaataaaggctatatatgacaatcccacagctagccttgtattccatggggaaaaattgaaagattttactctaaaaccaagaaaaagacaaaaagactcttgcaacttccattcagcgtattactgga

SEQ ID NO: 231080 - DNA, 406 bp, Homo sapiens
aagttatattcctaacataatgtgagtttctgcccatgaatttttaaatgagtaaactgagtttaattaaccattttatttattgagacgtgaggtgctaaagattaaaatgtgaaataaatagggtttgtgttttggaaaggcactcaggctaagtctggtaaaggaaacagaatgaatgaatactgtgaaagtaccaagaagaacctttatgtttattgaccttttggctcacaaactcagacttcaccatgcactgttgtraaaagatgtggcctttattttcgtattttaaatccacaatatattttatttcctggatctaggcaaaaaaaggtgttttataaatatacctgaactaattttacttttttgtttgttggtttgtatgtttgttttgagatgg

SEQ ID NO: 231081 - DNA, 599 bp, Homo sapiens
tggtgtgatctaatccattattatttatrcttagataatattcgtgtgtttcagtctattgagatagtaatatttttattatttgcttgtaccttactaagttttgttactgtatatgtgcagtagtttgtctattaaattttgaattttcacctgcataatcatattatctgcgaaataaacatagtttaagtgttttttctgacactgtgattctaatctgcattctcttctaggtttacattttaatatatttattagcatgttgaataatagaagcaactgtgggtatgtttgtctggttctgattttaatagagatgcctcctgtgtttccccattaagaaagttgctggcttttatgcttaggatcctatatttcacttctttaaagaagtatttacaaggtggagtggctcatggcagcaatcccagcactttgggaggctgaggtgggaggatcacttgaggccagaagtttgagatcagcctgggcaacacagtgagactccatctctatgggaaaaaacattgttattcattgattcctaatttattaattcttagttaatcataaatagttataattattcataaatg

SEQ ID NO: 231082 - DNA, 427 bp, Homo sapiens
ttgtactgcagcagagtcttcaaagatttgattatgagatggaaaatatgagctttcagatgagcagctcaaataaagacttttaagcctcacccagtttggcaaatgtcttttggggagtgtcctccatttttctattccttgattayttttcaagtcagtaaaaccactacctgtttgctgccagcagataacataacccagaggtcatttgagattcctatgatacattgaattgaaagcttttcttatctaaggattttatttatctttgatttccccacattgtataggctcaatatataaaatatgagtcagttttaagtgtggctatagaaatagctattttttctttcctctttttgatactcagtcataggtagtaagtgtaatcaatcaaatttcactagtgctgtcataaggcacc

SEQ ID NO: 231083 - DNA, 575 bp, Homo sapiens
aaaacctatacgctacaacaactttgggataagagctataacacaggaatacacagtgtgaaaaagtgcccaaacccaaaatgaggccagtgaaggaagaagatatgccagaggagaaggacataaccatgtaaagaggagaaaggggaataagggagcgtaaggtattccaagcttcagaagagaatgtgaagataaatatcctgggtttagatcctaaaggatggatttagatraaggtgcgatatttgagtcaggcacatgtaaggaatatcctaaagttctgctagtgagtaggagcatgaaatattaaggtgaataagcacaaccaggtctgagctttattattacatactaagcagaaaagtgtttcacttgttcctgttattagctttcactcattcatgaagataaggtaattaaagctgttcaattcataaaataagtgaaagatagaatgaaatatatagatctacatccgaacaaaatatatagatctacatctgcgctttgttattacatactaagcagaaaagtgtttcacttattcgcattattaattttcactcatttaa

SEQ ID NO: 231084 - DNA, 401 bp, Homo sapiens
actggttaagtatatttaaactgcgggggtttataacactaacaataataacaacataaactaatattcagaaagaaaaatcaacatatattgaaagggagatgagttaaaaatataaatataataaatccagagaaacatattgtgtaccaaagcagtcatctatgatatcctatctttctacacgatttagaaattataggtccatagtactacgtasaaaacccttgggaaaaatgtgttacataatttataatatttcatcttttagaatgaaaatatgatacaaatacagtctcttggtatccaggggttccaggaccctgaaaggtaccaaaatacatggatgcttaagtctcttatataaaatggcataatatttgcatatatctgacacaaat

SEQ ID NO: 231085 - DNA, 408 bp, Homo sapiens
cccacttgagtcattcgtggtcataagatataaaaaaatggcttcacgttttatatgactaagctctaactgcttttccacatgaactagtctgtagatgtttatatttaggttcaatcatttccttctggaacttgttaattggttaygacatttaagaaatatatacttaattcatagtatatgtaatatgctgtcttagggctttggaaagggaaaatacaaagaaaaataaaacattgtcctcaccctcagagaaatataaaattctttccttttatatttcctcaggtctattattttcctattttttttctctcataggttggtctgtcaataatcctataattcaaattcatttcacaccacatctcaacaaaaccagactgtcctacctcatggttatta

SEQ ID NO: 231086 - DNA, 410 bp, Homo sapiens
tctgctctatttagtttcctactagctttagatactacagcaaaagaaaagatgtcattcgcattgcattctgagatttgatttcttgaaagcttcttcaattgcttaagttactaaaatgtcaagtttagatttgcaacgtttttcctagacatcagatcaagtttgttatccttgaatcattgcaatagggagggatgtattaygtagactaaatggaataactacacttcaagtttttaaagtatagttgaagaaattaagtcaacaccaagcaaaatatctttcatatgtgacaggacccatttcacgtataaaagtatgacaagaggtagacactatcatagtttaaaaaacacagaacaacaacaacaacaacaacaataaaacccaagcatggccttagatag

SEQ ID NO: 231087 - DNA, 618 bp, Homo sapiens
gtcttgttttgacatgcagatttatactgaagattaagatgcagtaaactttcttttaaatgcttcaaaatgaacattcttgaaaacatttctttctgttttacaagtatgtatcagtaaggaatatatccccactaggagagcagtttggtggcactaattggtttgtagtaagccttcagcagtagtttactctccattgctttagaactgtcagtggaagtgtcaaaacaatgcaaaagaaaaatgtcttatttatttctatgaaaatagttttgactttgtgcatcttctgataggatcttgccctcttttcccacctacacccagggctatgtggatcactctttaggatagagaatgcctgaaatcaatttcttctcctyctaagtagctaatagacagaagacaaacacttcttcctttgcatcttctcttcctttactagtacaaccctgagtttcatctgagcgcatgctgcatcacacctgtataccttccttgcacctaaggtggatacatgtatataaatgggaggaatgcatgaaactcctaaattggttcttaagggaagaagaatatgtgtcatcttttttatctctttcccctagctaagat

SEQ ID NO: 231088 - DNA, 548 bp, Homo sapiens
attccttgatgatttctacctgtgttattttaccatttccatccaattttggtctgcagcacacaggtttagtacttaaatatgtaatctcatatgtggactgattttttcatggatgtcttgggatggatagtattaggagatgaggagactaaatttaatgaattttatgaggctgaaaatgtatcctgaagatttaatcctgaagatttaaaactatttaaagcagagcagtattgtcagaatcttcaataagatattctttattaataaccagactggtctttgcraaacacaatttagataacttcattccaatgtttacaatcatttaatggtttcccattcttacttagggtgtgacttagagcctgttataggacaaggaagacaccatattacccagctccgtgttacctccctaaatccgtctcttctcttatttattctgtcttgctgtatctcaaacatacttgacattctgatgccttggggtattagacttgtcgttctagtacctggaacgttcttcctcacactattgtcta

SEQ ID NO: 231089 - DNA, 574 bp, Homo sapiens
tgtcttagaagttatgtcaatgacaggactactaatttggaagtcatcaacttagaggcgacaatcaatgatggatacagacacattaactcaaatgcattgagtgtgtgtttaatttgtgtcatgacaactctattatattttctaaatgataactccttgatggtaaccaagattgactatgtgtaaatagccagagttgacagtgtggtttatcatgggcaaagaattactttttccttaacaccccaacaacttttaattattctccacctactattccycactactgatactgaatagaccttactttgtttagagaaataatgtatagtgttgatatgatatgtgtatgtataattaatatttaaatataaattagtgacagcctaagggcaaagggaataataaaagcatcaaagagaatacttagggtttaagataatttaaattttcatattattctatcatgtggtttcactattgccaaccaacacatatcacatgaatataaacacacacacgcctgccttttttagaaagttttctaagtaaaattggcattaagctcata

SEQ ID NO: 231090 - DNA, 574 bp, Homo sapiens
tgtcttagaagttatgtcaatgacaggactactaatttggaagtcatcaacttagaggcgacaatcaatgatggatacagacacattaactcaaatgcattgagtgtgtgtttaatttgtgtcatgacaactctattatattttctaaatgataactccttgatggtaaccaagattgactatgtgtaaatagccagagttgacagtgtggtttatcatgggcaaagaattactttttccttaacaccccaacaacttttaattattctccacctactattccccactactgatactgaatagaccttactttgtttagagaaataatktatagtgttgatatgatatgtgtatgtataattaatatttaaatataaattagtgacagcctaagggcaaagggaataataaaagcatcaaagagaatacttagggtttaagataatttaaattttcatattattctatcatgtggtttcactattgccaaccaacacatatcacatgaatataaacacacacacgcctgccttttttagaaagttttctaagtaaaattggcattaagctcata

SEQ ID NO: 231091 - DNA, 610 bp, Homo sapiens
aaatcgagtctgcagtgagccatgattgtgcaactgcagactagtctaggcaacagagtgagaccctgactcaaaaaaaaaaaaaaggtattttgaggtacttctgatagctataagatgtttttgtaaagttaatgacaaccacaatgccaaaaactataataaataccctaaaagtaaaacttaaggaattaaaaataccaccagaggaaataacttaacaggaaaggaaaacagtaagaagtgaagagaggaagagaggagytacagaacatctagtaacaaaatggcagtatcaagtccttacctaccaataacaacactgaatataaatagactaaatgttccaattaaaattttgtggctgaatgaattaaaaaagaacaaaaagctaaatctgactgtatggtgcctacaaacaatccactttacctataaagacatacatagattgaaattgaagaggtggaaatatatattctatgaaaatgaaaaccaaaaaagagcaggagtagctatgcttacattatataaaatagacattaaatccaaaactgtaaaaagcgtgagcgaagttcactgtataatgataaaagcatcaattcagtaa

SEQ ID NO: 231092 - DNA, 573 bp, Homo sapiens
ttctcccattctgtatattatttcctttgttgtttggaagcttttaactttgttgtaatccaatgcatctatwtatgcatttgttgtctgtgcttgtgttctctgcaccctgagctcagagtttggactatactatatcacctattaaagtaactgattataaacctctttaatcattcacttcctacaattcatcttttaagaaatgtgaaatactctcaaaggccctttaagtccttctaccatgtagaggtttacattctctgtttcctgggtagctagtcaggacaataaaagattaatctatacttggctttttgcttctgtttgatatatattagtatttctcacattcctccccatttaatggataaacttctctcaaccttgtctgtttcttctctttcctctctctctctatactccatatctttttctgtctctcccatgcatcctccatgcttcccacaaatacacacacacacacgtgcacacacacacacaaacactcacagatatacattaccagtaacagccacctttcaatcaaagttgctatcaatctgtaaatga

SEQ ID NO: 231093 - DNA, 609 bp, Homo sapiens
gccctttaagtccttctaccatgtagaggtttacattctctgtttcctgggtagctagtcaggacaataaaagattaatctatacttggctttttgcttctgtttgatatatattagtatttctcacattcctccccatttaatggataaacttctctcaaccttgtctgtttcttctctttcctctctctctctatactccatatctttttctgtctctcccatgcatcctccatgcttcccacaaatacacacacacacacgtgcacacacacacacaaacactcacagatatacattaccagtaacagccacctttcaatcaaagttgctatcaatctgtaaatgagttaatgtcattargtttgaggtctcaccccctagattcaaattcttgctagatatacagcctcggagaatttatttctaacaatcttctctcatttatcacaaggagataaaaagagcacacacctcagtgccatagtttaaaattcataggttgatcgcttagaaacaagtctaattaaattatcatttcaatttcaatgatgaagtaaaagttatctggcagaaaatgtttaatgaacactagtatgaaagttgttt

SEQ ID NO: 231094 - DNA, 551 bp, Homo sapiens
ttaactcactgcagctctgtgggccatcagacacatgttaacagtgaggattgtttacaaaaaacaatttctcatgtagaggaatgcagggaaaaagttttcttttctgaatatawatatatatatatatatatatatatatatataaaaccaaaatttatttcaggatcaaatagacaatataataagatttgttaatttagaaaaactttgaagaatagtttttattctaggcatcataaaagcaagttcagtttgaccactgttattgaatgtacaatttaaaaagctataattaaattattagcagaaatagttacaatatacttttttcatttgcaagtccttttaattttttttctgaaagtatttcttaagataatatacattttgattactctatggctaaacttaagcattttttagatatttaattttgtttcaatacaaaaaaaattctcttcattgttggaataaaaaattcatgatcaatgtgcaaaaatagtattaacttcatacaatagtgatttaaaacaatgtatgctacctca

SEQ ID NO: 231095 - DNA, 551 bp, Homo sapiens
ttaactcactgcagctctgtgggccatcagacacatgttaacagtgaggattgtttacaaaaaacaatttctcatgtagaggaatgcagggaaaaagttttcttttctgaatataaatatatatatatatatatatatatatatataaaaccaaaatttatttcaggatcaaatagacaatataataagatttgttaatttagaaaaactttgaagaatagtttttattctaggcatcataaaagcaagttcagtttgaccactgttattgaatgtacaatttaaaaagctataattaaattattagcagaaatagttacaatatacttttttcatttgcaagtccttttaattttttttctgaaagtatttcttaagataatatacmttttgattactctatggctaaacttaagcattttttagatatttaattttgtttcaatacaaaaaaaattctcttcattgttggaataaaaaattcatgatcaatgtgcaaaaatagtattaacttcatacaatagtgatttaaaacaatgtatgctacctca

SEQ ID NO: 231096 - DNA, 589 bp, Homo sapiens
ttcattgtatggtgacataaacaagaaataaactttcatttgtttaacccattttggatttatccattacaggaactagcattacttgaacttagtatcatattagaatgttagcttcatgaaaactgttttgttgttgttcactgctttatccagtcatgtggaactgtgatgggttctaaataaataagtgtaataatgaatgaatcaaggaagaaaaggtagaagacaactaaaatatatttatttattatcaaccttttattttcctctgtgggaatattcaaaataagggtaacaacaaaccattcaatatcagcatagctgagaagtctatgccattataatmatctgtattatattataagaacatataaattataaaacaaatcacagctcttaaaactgcacatatttaattgtatgtttacgtgcatgcacattgttttgtttttttttttgtccttagtttgccaaaggcagaatgaaagaaaaaccttattgaaaacctcataaatgtgtacatcgttgtttgggaatgcaactttctcaaacaaaagcatcacattcagggtttttttagcaaatt

SEQ ID NO: 231097 - DNA, 435 bp, Homo sapiens
ccatgtctccacaaaaaataaaataaaaataaaaattagtctggcctcctggcatgcacctgtggttccacctactcaggaggctgaggtgggaggatagcttgagcccagaaggtcaaggctacaatgaactctgtttgcaccactgctctccagcctggataaaagagtaagaccttacctcaaaaaaaaaataaaaaaaaaagggggtctcaacccagatggcttcttcaatatttattcaaacattctaatgtaataaaattatctgcctaaaaatggatcatacaatatatataaaatggaaaatactaaatacatttttgattctggcatataaagtctgttataaaaatcaggtcaaacagaaaaacaaacaataatacaaaaagtacagaakagttacaagtgataggtaggacttttatctgctag

SEQ ID NO: 231098 - DNA, 413 bp, Homo sapiens
tgaattttgtgtgacaatgaattcttgacaaattaatgtatttcaactttgtagcatgaatctaatgtcatctggaaaatgtaggctagaatagataaaagattaaaaatatgagaaattttgcctaataaatgttgaaatatattattaagtatcaatgattaaattaatgtagcctaaacagaccattgtatacaatatatgataccttagtgtagaaaaaatgatgtcatctcaaatcagtaggaacgaatgttcaaagaagctacattaatgrcttgatttttcataaaataaaaatttgcttgaacctttgcctcagcatgcccatgaagatattcattaaatgggttaaagaaagttaaatttaaaataaaaatcagattaaacacaaagtgacataaagtaaaatc

SEQ ID NO: 231099 - DNA, 592 bp, Homo sapiens
ccatgcaatcatgaataccatgcattcatcaataccatttttaattgctcactcatgttacagttcgttttccagtgagtgattatctggtaaatctacaggttatttaagttagtctgtaaatgcttctactacaaatgaaagaactacagaagatctgataatcatctgtataggaaaattcttatacacagagatcaagtatgtttatgttactgacacttaaaaaatgattgcaaaccttttacaattggacacttttttatttcaatatactagtattgaatatctagtaaatataagagaattttatagtctttggatgaaatggcaagaaacaagtttttttcctgaatatcataaaacttaattcaaattcacacataaacataaatcaaatggaaatattcaatgtttaaaagagtctttacaagcaatgcaaaacrgtaatgttactgagaagtcaatgaacctcagcactccgacaatcttagaacctaagcggtctgttttcttcctgaaaaattacaggtcaaggtcatatgtcaaggcttgcttgaaagagaaattttactcactgagtctatgcaag

SEQ ID NO: 231100 - DNA, 592 bp, Homo sapiens
ccatgcaatcatgaataccatgcattcatcaataccatttttaattgctcactcatgttacagttcgttttccagtgagtgattatctggtaaatctacaggttatttaagttagtctgtaaatgcttctactacaaatgaaagaactacagaagatctgataatcatctgtataggaaaattcttatacacagagatcaagtatgtttatgttactgacacttaaaaaatgattgcaaaccttttacaattggacacttttttatttcaatatactagtattgaatatctagtaaatataagagaattttatagtctttggatgaaatggcaagaaacaagtttttttcctgaatatcataaaacttaattcaaattcacacataaacataaatcaaatggaaatattcaatgtttaaaagagtctttacaagcaatgcaaaacggtaatgttactgagaagtcaatgaacctcagcactccgacaatcttagaacctaagcggtctgttttcttcctgaaaaattmcaggtcaaggtcatatgtcaaggcttgcttgaaagagaaattttactcactgagtctatgcaag

SEQ ID NO: 231101 - DNA, 560 bp, Homo sapiens
tgaagtcataatacagcaaaggtaggcttagggcagaggcatgcctgtgacaaagtaatagcctaacaatggtgaagtaaagggatgtatatatygctttttttccacgcgtaattcaggggaataaaagatagattaaaacaatggacatcagagattcatgatttcacagtaaataagagacactttacagaacaaaaatcagacaacactgtaattatatatatattttttgagacaggatcttgctctggtctcccaggctggagtgcagtggtgcagtcatggctcactgcagcctcaaactctcagcctcaagtgattctctcatctcagcatcccaagtagctgagacttgaggcatgtgctactgcatccaggtaattaattttttttcatttttactggagacaaggtctcgctatgtttcccaggctagtatgaaactcctgaactcaaatggtcttcccaccttagcctccaaaagtgctgggattacaggcataagccaccacacctggccaacaccataattgtattattctactaaaatattgttt

SEQ ID NO: 231102 - DNA, 473 bp, Homo sapiens
taagcatttctgcctttcctttctttgtttttttttttctaaagtaggtaagtgtccagaaacaacatgtcaaaatatctagagyctatattgccagttagatgtgagatgtttaaaaaaaattaaggtaagatagttttatggtctatattataattagctaagcccaaccatgcatgcttatgtgaaattaagaatagcagcctgagtaatagtctactttcttggaaactggagtcaatgtgtttctgtcacacacagacacagacacacgcacacatgtttagaagataatctactttagttaggattaatcatcatattgctatgctttgcctaaagagcattcctaagaatttttttttaaacttaaaattgtagttaatatctatagtaggaaagtaataacagttaaagaaaaaaaacccaggctatgtagcacagaaaaatgagagtccaggttagaatcataa

SEQ ID NO: 231103 - DNA, 473 bp, Homo sapiens
taagcatttctgcctttcctttctttgtttttttttttctaaagtaggtaagtgtccagaaacaacatgtcaaaatatctagagcctatattgccagttagatgtgagatgtttaaaaaaaattaaggtaagakagttttatggtctatattataattagctaagcccaaccatgcatgcttatgtgaaattaagaatagcagcctgagtaatagtctactttcttggaaactggagtcaatgtgtttctgtcacacacagacacagacacacgcacacatgtttagaagataatctactttagttaggattaatcatcatattgctatgctttgcctaaagagcattcctaagaatttttttttaaacttaaaattgtagttaatatctatagtaggaaagtaataacagttaaagaaaaaaaacccaggctatgtagcacagaaaaatgagagtccaggttagaatcataa

SEQ ID NO: 231104 - DNA, 473 bp, Homo sapiens
taagcatttctgcctttcctttctttgtttttttttttctaaagtaggtaagtgtccagaaacaacatgtcaaaatatctagagcctatattgccagttagatgtgagatgtttaaaaaaaattaaggtaagatagttttatggtctatattataattagctaagcccaaccatgcatgcttatgtgaaattaagaatagcagcctgagtaatagtctactttcttggaaactggagtcaatgtgtttctgtcacacacagacacagacacacrcacacatgtttagaagataatctactttagttaggattaatcatcatattgctatgctttgcctaaagagcattcctaagaatttttttttaaacttaaaattgtagttaatatctatagtaggaaagtaataacagttaaagaaaaaaaacccaggctatgtagcacagaaaaatgagagtccaggttagaatcataa

SEQ ID NO: 231105 - DNA, 581 bp, Homo sapiens
tctagaagttataccaaccacatctcagaccacagtgctacaaaaataaaartcaatactaagaaaattcctccaaagcattcaattatatggaagttaaacaatctgatcctgaatgagttttgggtaaataattaaattaagtcaaaaataaaggaattctttgaagctaaagataacaaagatacaacatatcacaatctctaggacacccctaaaacaatgttaagatggtcatttgtagcactaagtgcccacatcaaaaagttatatatatatctcaaattaacaacctaacatcacaactagaacagctagagaagcaagaacaaaccaaccccaaagttagtatagaagacaagaaataaccaaaatcagagctgaactgaagaaaattgagacacaaaaatcactcaagagatcagtgaatccaggagtttgttctttgaaaaaattaataagataggctgctagccagactaataaagaaaaaaggacagagaagatccgaataagcataattagagatgacaaaggggacattaccagtgaccccaaagaaatacaaaaaaattatcaga

SEQ ID NO: 231106 - DNA, 511 bp, Homo sapiens
agaaataaaagacatctaaataggaagagaggaagtcacactatccctgtttgcagatgacatgatgctatatctagaaaagttttaatttgagacagaggattatgaaatatgaagcatctatagcctgcatagagtttgaaaataacagaaaaagatgcagccttctgatcaaattcagatgggaaagcaaacagggattgttcaaattaaatttgcctgtgaataacagaatagttctggtggaaccagcaagacaaagtttgcaaacatagccaccaatgttactagtccatttacattttaagaaatactttatggtgtaaacatttttacatatttggtcaatctcccaagatgttaataaaagrgaaaacaataccattcattacaaaaatatggcaaatgtatttaaaaagtcagtgttatattatgaaagtgaaaataagactttcaaaagaaatgaaaatgttacaattagattgaactgtcaaaattgcataatggctaa

SEQ ID NO: 231107 - DNA, 593 bp, Homo sapiens
aattttatttactggtgtcacgttgtaagaaatgaagattatctttatttcaactttgccatgtatttctcctccaattccttgggtaattagattctaattttaactgaatcattagtatgtgtttatattactatgactatataaatactgtacagtagagggctaaatgataaatttcctatatttatcatgagattgacaatttcctcattgtcattttgatatctttttgtaacattcttagttattctttattctcctcctttaaaatttactggtttttgtcagattctttcatattcattattctcagatttctcttgcctgcttgtcccatttcccgaatcctgtgtcttccytcatttttgcttcctattcgtttggtgaagagtgttccttatttctttctaagaaaagaaaatcacaaatctgaatctttaattatctaaaaatttatctaattaataaattggctaagttaaaaattctaattttctctcagaattttgaggccattgctcataggcctcttttttttttatttcaatgctactttttatgatccacatattattttgtttctcatttta

SEQ ID NO: 231108 - DNA, 593 bp, Homo sapiens
aattttatttactggtgtcacgttgtaagaaatgaagattatctttatttcaactttgccatgtatttctcctccaattccttgggtaattagattctaattttaactgaatcattagtatgtgtttatattactatgactatataaatactgtacagtagagggctaaatgataaatttcctatatttatcatgagattgacaatttcctcattgtcattttgatatctttttgtaacattcttagttattctttattctcctcctttaaaatttactggtttttgtcagattctttcatattcattattctcagatttctcttgcctgcttgtcccatttcccgaatcctgtgtcttccctcatttttgcttcctattcrtttggtgaagagtgttccttatttctttctaagaaaagaaaatcacaaatctgaatctttaattatctaaaaatttatctaattaataaattggctaagttaaaaattctaattttctctcagaattttgaggccattgctcataggcctcttttttttttatttcaatgctactttttatgatccacatattattttgtttctcatttta

SEQ ID NO: 231109 - DNA, 557 bp, Homo sapiens
tttggacaaggagtttttttttttttttttttaaagacrgagtctcgctctgtcgcccaggctggagtgtagtggcacaatctcggctcactgcaacctccgcctcccaggttcaagcaattctcttgcctcagcctcctgagtagctggaattacaggcgctcgccaccacacccagctaatttttgtatttttagtagacacagggtttcgccatgttggccaggttggtctcgaactcctgacctcaagtgatccacccgacttggcctcccaaagtgctggagttacaggcataagccaccacacctggccacctttttaataataaaatattttattttttaaattattgaaataatgcatactcaaataaaaatataatcttagagttcctatggaagaagagatgccctcagaatagctaggaaatgtggaaaatgagaagagtgatggaggatttacctatccaggtattagtataggctctaaaggtcctgtaaccaagtcagttttggtgtcgtgacagggactagattagtgaagcaggaagtgaa

SEQ ID NO: 231110 - DNA, 557 bp, Homo sapiens
tttggacaaggagtttttttttttttttttttaaagacagagtctcgctctgtcgcccaggctggagtgtagtggcacaatctcggctcactgcaacctccgcctcccaggttcaagcaattctcttgcctcagcctcctgagtagctggaattacaggcgctcgccaccacacccagctaatttttgtatttttagtagacacagggtttcgccatgttggccaggttggtctcgaactcctgacctcaagtgatccayccgacttggcctcccaaagtgctggagttacaggcataagccaccacacctggccacctttttaataataaaatattttattttttaaattattgaaataatgcatactcaaataaaaatataatcttagagttcctatggaagaagagatgccctcagaatagctaggaaatgtggaaaatgagaagagtgatggaggatttacctatccaggtattagtataggctctaaaggtcctgtaaccaagtcagttttggtgtcgtgacagggactagattagtgaagcaggaagtgaa

SEQ ID NO: 231111 - DNA, 557 bp, Homo sapiens
tttggacaaggagtttttttttttttttttttaaagacagagtctcgctctgtcgcccaggctggagtgtagtggcacaatctcggctcactgcaacctccgcctcccaggttcaagcaattctcttgcctcagcctcctgagtagctggaattacaggcgctcgccaccacacccagctaatttttgtatttttagtagacacagggtttcgccatgttggccaggttggtctcgaactcctgacctcaagtgatccacccgacttggcctcccaaagtgctggagttacaggcataagccaccacacctggccacctttttaataataaaatattttattttttaaattattgaaataatgcatactcaaataaaaatataatcttagagttcmtatggaagaagagatgccctcagaatagctaggaaatgtggaaaatgagaagagtgatggaggatttacctatccaggtattagtataggctctaaaggtcctgtaaccaagtcagttttggtgtcgtgacagggactagattagtgaagcaggaagtgaa

SEQ ID NO: 231112 - DNA, 557 bp, Homo sapiens
tttggacaaggagtttttttttttttttttttaaagacagagtctcgctctgtcgcccaggctggagtgtagtggcacaatctcggctcactgcaacctccgcctcccaggttcaagcaattctcttgcctcagcctcctgagtagctggaattacaggcgctcgccaccacacccagctaatttttgtatttttagtagacacagggtttcgccatgttggccaggttggtctcgaactcctgacctcaagtgatccacccgacttggcctcccaaagtgctggagttacaggcataagccaccacacctggccacctttttaataataaaatattttattttttaaattattgaaataatgcatactcaaataaaaatataatcttagagttcctatggaagaagagatgccctcagaatagctaggaaatgtggaaaatgagaagagtgatggaggatttacctatccaggtattagtataggctctaaagktcctgtaaccaagtcagttttggtgtcgtgacagggactagattagtgaagcaggaagtgaa

SEQ ID NO: 231113 - DNA, 402 bp, Homo sapiens
tgaggtgggaatttgcctgaagtgtttcctagatgggaaggcggccagtgtggcaggagcacagattgtgaggaggggctgagagagtggaagggagagtcaaggtaaatgggtcagcccaggtagggcctgtgtccaccatgagaagcctcgcccttaccctaagagcaaacacgttgccctcagcaagcacaggcagctcatgactgtccagccctctctgccaggtggagggcagtggaaggggttgtgcatccatgcagggctgggtggaagctgaccaggttagggagggggtatgaactcgctacttcccacgccagtgcctrtgtccatggttccctctgccagggcctacatcctcctagaccccatcctttgtgtctcagatacagcagcacg

SEQ ID NO: 231114 - DNA, 575 bp, Homo sapiens
ataagggaagaggccatggagatggactagggagagtctcagatacctaactggtggatacacacactggcatcctcccagaccagtgccctggtaattatctaggaggtgacctgtagctcaactgagtcatgcttcctcctctctcagtcccccgaggcaggctctggacacctgctcatctcatggctgctcagccagaaaaatgtcctcctasatcgtgtagatgatccccttgctgttgtctcagagccattttccagctctgggtccacaacaatgggggtatggtagaaacctagggggtcaatgaatcagtcaaaaaacactggctgagcaccccagcgatagagtgattactgcctataggcagggaaaaagagtgtggggtggtggggtctggaggtaacattatccgtgaatttcatttagggattgttacaaagagtggacgccaaccaaaacgcatattttctccaaagacatgtgcagtaatattttagcagcacttttgtggtggccaaaaactcaatgcaacgcccatcagcaaatactgttcaggagcagaaatggac

SEQ ID NO: 231115 - DNA, 550 bp, Homo sapiens
gaattcctggcagccctaccaatgcagactctgccatctgcccaggaagctgtgagactgggctgtggcccccccagccctaggaccccctcccagcttggtggctgtttttctcactatctcagccatgccccccacaaggcatcttccttttgaaaataaaaaccaggagtgggcaatttcagtcccccactccataccacaaaaccctgatgaaggagttccactgccttctgggaagaggagaaaggaaacacacacacacacacacaagagcaagtcacaaattaacatcacagcacatgaggtaggcacacctgcatttctgcagacacgcctgggctcaggagmctgccaagccccaaccagcctgtgtcctgcagggatgtatatcccacttccagcaacagtagggccctgacatttaatcctgaggaggtgacccccactggcatctctgaactgggccttgacaaatagcagtcacttctgaatccattcccccaaaaggtcaccagccagacgccaacaaaaaacccagccatcgctg

SEQ ID NO: 231116 - DNA, 537 bp, Homo sapiens
gagactcatattgctgcagccattcacaaaatgcttcctcttctctccgtatttctccctcactcttcattgccacaaacaggacaggggccccaggggcagggtcatgcactccrccctggctcctggtcacgctcccacctcggcaaccccccggagttcagtggagaccctgcatcctgggtccacaccagccttgttcacaagacaaggtgacagaggccatgcgttcagatgtggagcagggagacttgagtatgactcgaccttttacctgatggtcccgggacttcgggaggagatctgccctgctgagcctctgcttctacatctgcaaagtgagacttacaggcttggccgcctctttaggctgcgtgaagaatctggagatacagggaacattcaacacacactgagtgcctgggtctgctcatggtttcccaattcagatccaagaaaagcacgctgctgccccgcaagaccagaacacagagcccctccctccccaggagccggacctgagcagcagggggttaa

SEQ ID NO: 231117 - DNA, 598 bp, Homo sapiens
tcatgtcctcaggtgatccgccattcttggcctcccaaagtgctgggattacaggcgtgagccatcccgcccagtcttcttgaatattttgaaagagtgagaaagattggtattagttctttcaatgttggtggatttttgtaaagaagctttcagtccctgagcttttctttatgagtgacttttcttgttggttcaatcttcttacccattattggtctgttcagatttttatttattcataattcagtctttataggtggtatgtgtctagaaatttatgtatttcttctatgttattcaattcttggtgtataattattcataatattcttttataatcctttgtatctctgtggtattgcttgaaatgtctcttctttcatttctgattacatttatttgagtcttctctctttcttagtctagttaaaggcttgccagttttatcttttcaaaaatccaactcttagttttattaatcytttctattgtttttctagtctctacctcatatatttctctctgatctttattatttctttctttctactgattttttcttttagtttgttctttttctagttgtttgaagtgt

SEQ ID NO: 231118 - DNA, 458 bp, Homo sapiens
taatcacctcctaaatgacccacctgttaattaattgcagtggtgattaggtttcaatgtatgaattttgtggggacacgaactttcagaccatagcaagaaccaaataagagtagaagggcatgctaaataatgaagagagttatgagtaaaggatcctggttacaagtcctggatctcacccttataaactagagcttggacaagttggtaaatatcatgaagacagcatctgcatatattttgtttttctctctatccacagaatagcacctatatagtaagtatgcaaatggtaattattgaattaaaygctttgccaaataaggggattttagaagattatacgtaatgtctctttaagttatatattctgtaattctaggtaatatatgtaaaagtgctttgaagattgaacagtacaattgtaagaaattatttttaaaatcctggttaca

SEQ ID NO: 231119 - DNA, 371 bp, Homo sapiens
atatttaaaaaataaatgtaatagaatttgatgataagatttatcaccagaaagagagagagagagaggtgtcaartatgagatcaggtatgatttccagatatttgacttgaaaaggtagggatagataagttcaccaagttagataactttaagactcagagtgaattgattggtgttgaacaatgtaggattttatgtgcccatttgaggcagttgtgatggtcatggattttgtttctagcatatgtaaaggattacttatgttatttttgaagtttaaagtttggtaacagagaacttgcctagaaaaagatggtggtaaggatttcttaattttctagatcttcttgggaagaaattcatgaatc

SEQ ID NO: 231120 - DNA, 577 bp, Homo sapiens
tttttttcaagtgcacacagatcattttccaggacagatcacatgtgaggctatgaaccaagtcttaataaatttaagaagattgaaatcctatcaaatatcttttctgaccacaacagtgtgcaatttaaaatcaacagtggtaggaaaatggaaaaattcacaaatatktgtaaattaaataatacattcctgaacaatcaatgggtcaaagataaaatcaaaagaacattaaaaacctatatattttaaatatataaaattattttaataatattaattgatttatttaaatatagaaaataattttgggtggaaataccctaaacatcaaagatagcaccattttagtattaagtgtgtcaatggggaaaagcctaagattttgggtcaagacacccaggttcagacctgaattctatcatttcccatcatgtgatcttaagcaagtaacacatttcctctgagtttcagtttttctcatctatgaatgaagataatattactttgttgcattgttggaatataatctaatatatgaaatgtatcagaaacttattttacttgactagaaata

SEQ ID NO: 231121 - DNA, 577 bp, Homo sapiens
tttttttcaagtgcacacagatcattttccaggacagatcacatgtgaggctatgaaccaagtcttaataaatttaagaagattgaaatcctatcaaatatcttttctgaccacaacagtgtgcaatttaaaatcaacagtggtaggaaaatggaaaaattcacaaatatttgtaaattaaataatacattcctgaacaatcaatgggtcaaagataaaatcaaaagaacattaaaaacctatatattttaaatatataaaattattttaataayattaattgatttatttaaatatagaaaataattttgggtggaaataccctaaacatcaaagatagcaccattttagtattaagtgtgtcaatggggaaaagcctaagattttgggtcaagacacccaggttcagacctgaattctatcatttcccatcatgtgatcttaagcaagtaacacatttcctctgagtttcagtttttctcatctatgaatgaagataatattactttgttgcattgttggaatataatctaatatatgaaatgtatcagaaacttattttacttgactagaaata

SEQ ID NO: 231122 - DNA, 404 bp, Homo sapiens
ctggggccttaaaggacggcaggactcgaggatgcaggaggtgatacaggggtgagagattatgctgtcattttaaccctccctgggcacagggcctcctgacagcctttccttagagagcaaatccctctaggacgccacccgccccctgcaccatctccagggtagggggtgggtgtggggcttgttcgctttccctcccccaggataggggggctcccccacaggcgaggagccagccacctagtcagagaaggctcactgtccccaggcggtcccttgtgayccagctcatggtgtggctcatccagtctctctccctccatccttccaacaatccacagtcactaccagaactcagaggctctgaggagtaaaggcacttgtccaaggtcacatggctg

SEQ ID NO: 231123 - DNA, 511 bp, Homo sapiens
ctggtacctgatacccctaggaaccaaaaacagccattctagataactcagattctggcatcacagttatcagcccctccacgaggcatcacatccctaccctgccaagtggccttctagaacagagcctggcatgctttcagaggagactcttggaggatggtgactggatggtttgctccaaaagtaatacagaggggatgaagagatggttcaggtacccaccaagaaccaacctgcttctgaccaagacacagccccagcctgcgaccccagtstgtggcctgctaaagtctggtgggagccacaaagctaaagggcaaggcggggctgccacttcggagctcactacagattatttgttgggcatctaccaggtgcacacagcagggctttcttgtttgcacccaccaagaagagggccagagcacccaagaacacacacatcgcttaggatcccggtgagagatctgctaagggggtggggcctgggaggatcggaggcacgcgg

SEQ ID NO: 231124 - DNA, 514 bp, Homo sapiens
gaagttttgcccatgcctatttcctgaatggtattgcctaggcgttctattttttttctttaatttcactttaaattctggaatacatgtgaagaatgtgcaggcttgttacacaggtatacatgtgccatagtggtgtgctgcacctatcaacccatcatctatgttttaagccctgcatgcattaggggtttgtcctattgctctctctccccttactccccaccccctgacaggccctggtgtgtgattttcccctccctgtgtccatgtgttctcattgttcaactcccacttataagtgggaacatgcagtggttgattttctattcccrtgttagtttgctgaggatgatggtttccagcttcatccatgtccctgaaaaggacattaactcattcttttttatagctgtatagtattccatgatgtatatgtgctacatctactttatccagtctatcattgatggggatttggatttggttccaagtctttgctactgtaaatagt

SEQ ID NO: 231125 - DNA, 321 bp, Homo sapiens
gcactatctagagggacagaactactagaatagatgtatgcatgaaagggagtttattaaggattattaactcacacaatcacaaggtgaagtcccmccacaggctgtctgcaagctgaggggcaagaaagccagtccgaatcccaaaaccttaaaagtagggaagctgacagtgcaaactttagtctgtggccaaaggcccaagagcccctggaaaatcactgctgtaagttcaagagtccaaaatctgaaaaacttggagtctgatgttcaagggcaggaagcatccagcacaggagaaagatgaaggcccgaatactc

SEQ ID NO: 231126 - DNA, 592 bp, Homo sapiens
caccatgcctagcctaattcctttttactttatacctctctacatttttaaattgattacaataagcaagtatctcttctgtataaaacataattatagcacaacagcttttttgaacttttctttgaagttgtgtcatctaatcaacccttatggaaatcacaggtagtttatcatagggataatattgaaaaattgtccacatgtcacatggtgtcacctctgtgaagatccataggagaaatttccactccagcttgaatctccagatacctgtggttcatttgagcaactgctttgcttttatcttttgcgcattgtgcatctggtaactgatcgtattttcctttcctctggaaaccaggaatctcagagtcaagttgtagactgtaaagtttattcaacaaccataccagactctgtggcttatgttctatgcacagcccttgctgatrgaatcatcttgctctccatgtttattttccctcacccacattccttcctttgttttaattttaactgcttatgttgcatgtatccctatagctacctctgatcttttttgggaaatgtagtagggatatgaataaat

SEQ ID NO: 231127 - DNA, 593 bp, Homo sapiens
tgaaaaacccagatatcccggtccatcctaagaaaagtcagatgctcccttcttctgtgctcttattaccrtatgtacccattcacacataacatgagtctgtttgtgaatctgttccccactgtgcacagcctctgtcatagagaatgccaggatccttgcattaagcctcatattcgataactgcgctactccagagggtaccactcatatagactacagagtgaggaaaatgttaacacgtggagttgtacagtatgggagctctaaggatagtatccccattgtcttctaaaggaagtggcacatcccatacactcataaacgtttctaagtgactaagtggctgaaacagagatcacaataaatgtgaaatggaacttaaccactgagccctcttaaccaatgtattatcctctaaatcaacacttcataagtgcaagtctaaataataccattaacctaaagataagtgttagttctgttgcccactataagtacactcagaaaaatctctggtttatctcttctatatcagcttcctgtgcattttctttaaatgttaacaatgaattttgaagatttccttctaa

SEQ ID NO: 231128 - DNA, 397 bp, Homo sapiens
gaattctctataaaattgtaaagttatttattcagaaaactggtaacttgaataaatggaaacccgaagaatatatgtaatatatggaataatcccctatctttagggcaaatttcctgaaggaaagggacaatagtttatctgtctttcctaataccagttgactgagaaagaacttagtgaatgtttattaatggtgatagataacgcttggaaaatatgtggaatggttgctcacagaaatctgtgatatgtgtcttaaaatatttgcacattagcaaatgttttagactttaggaaatcttccagactaaaactctttctagggaaatggtgttgcaattttgatggtatataggaagtcagtgrgctttccttttagttttcctaacattca

SEQ ID NO: 231129 - DNA, 633 bp, Homo sapiens
cagttaattaaggggtgatgatttgcaagagaaaattagtggagagtcacataggtaaatcattatttaacttaggttttcctaaagttagaatagtcgaatgttcttttctttacctttacaattaagacaaaatgtttaataagaatagcaaaaatttttttatattatgcatccttatacctcacatatcttccttaactagatagtttgacagaaagaatggcatacaaagaggaaaggggaaaaatgactcagaacaagacaaaagctctgactgtttaaagttatcgcttacagagactttaacaattttgtggaatttttacaactatgagagtaaatgaaactggtcaactcttgacagttgcctcaagatggagtgaaattgcatcgagggtaagactgtgtccacaggtttaaaattctctcttatgagtaatagtgttcatgtgctcccattctcgaccctgttgttgaaattcaaacttaaaaagcctgacttcttgttgggtaacttgccctgcctccagaggtatttgaacttcattatcttcarcacaggaattgttaatcttctcacttcacctgttcttgcattagctcaattgatgtcatcactgatttcctaaa

SEQ ID NO: 231130 - DNA, 586 bp, Homo sapiens
tacagctataactacacatgcttctttagcatttgtactttattatggactaaaatcccacatttgtgagaagtcattcccagtggagagaaggatatggtgggactgtgtgtctgtggggctggagtttccataatcccagaaatgttttgatattaaaaatattgggcattcagctgtaaaaaggaatgaagcactgactcaagtcacaacgtggatgaaccttaacacattacgctaagtgaaagcagccaggcacaaaatgacacagattgtacgattccttttatgtgaactacccagaacagttaaatccacagaaacagaaagcagattaggggttacctcgggctacagggagtagggaatggggagtgactgcttagtgaggatggggttttattttggaatggtgaaaatatcttggaactagatagaggtagtgttcacctccatttttcataataaaatggttaattttatgttctataagttttacctaaataaatacataaatgaagcctytatgctaagcaaactctggggtagacaatccatttccttacaatgtagtgttaaaccatac

SEQ ID NO: 231131 - DNA, 542 bp, Homo sapiens
ttctgcttcagtctattggtcaaagcaagtcacaaggccagtcagattcaagaggaggggaaatagactctgccttctgacttgaggggtactgtgttatgttcaggaataaaagagctgatagcagccattttttgaagactacttcatccactacgtgtttgggtgctttgtgacaccacatcagatcatcgatatattcttcttagctacgccactttgaaccagttacacattctttctggacctttctatgaaatgcyggaggttgcatttctctaagttgctaatgcacatttagcatttttttttttttttggtgatgtctcaagagcaactgaagtccaataaatattcagagggaacttgaggaacattggtgagctatggatagttccacctgttcatctgtcctttattttttttccaatgagaaaaaaacaggaatccagatgaaaggcatgcattgcattcgttgacattgaagagtagagaagtagagccagcatccttcccaaatctctagggaccatcctcctgcc

SEQ ID NO: 231132 - DNA, 442 bp, Homo sapiens
agactgtcatatatagttacttacatacatttccgctatatgttccacagattcttcaaatgcatctacacatgagctcagttctaccccaaacccactacagcagcggtccccaacatttttggcaccagaccagttgcatggaagaccattttcccatgggatggggtgggcagtggaagggggatcttctacttcagatcattaggcattagcttctcatgtggagtgagcaacctagatccctcacatgcacagttcacagtagggtttgcgcttctatgagaatctaatgctgccactgatccaacaggaggcggggctcaggcagtaagactcactggcytgctgctcacctcgtgctgtgtggcctggttccttacaggccgcagactggtaccagtccacttcttttgagcatgaactgcacaacaatctctcc

SEQ ID NO: 231133 - DNA, 350 bp, Homo sapiens
agaagtcccattaaataaaatattgagtcctatcaacagaagaatgctctctactcggtttaattatgacattaagaacttaattcaatgtttctcaaagatgtttcaaaatttggctaagtgataacacgattatctgagaattgactatggtaggtaagagtactgaccatgttgcctaggtaccaagaataaagaggccaaattctagcctcaccttaaattcttcatagaatttactygaggggtgttatttaacatattttaagaagagaacacatctactgatgggaatctgtcagatgatcactggaaagttggacagacaaccactgggacttcctttccac

SEQ ID NO: 231134 - DNA, 524 bp, Homo sapiens
ttttttttttttttttttttgctggtctgcttgctttgctacattgtgaaaaacttaaagatgggaaccatgtcaaccatcctttcatccttagaatctggtatagtacttagcacagagtaagcactcaacatttgttgaatgcatgaaggaaatagacatgattctgggacctgagacatgagatctgttttctgctttacctctcaaattctttttgctacaaggcaaggcattgtgatcaagtgtaatgtacattgcctttgaaaaattgttattcctaatctttggggacaagcagaaaaatagctgatacaatctatgtggaaaactaatgtgaaaaaaacttactggttgcattgatcaaatgtctgggctctttctttgaaaagtctgtttttgaagagtattttcctgtgcagtttattgagagcaatcgggcagkcatttgttcttgccagggttggggggcaatgtgtgagcaaggtacaaagtggaagctggatgaaactataaacatctgg

SEQ ID NO: 231135 - DNA, 611 bp, Homo sapiens
aatacctcacatgtgacttataatcctgcggcacaaaacagagtatctccagcaggctttccttgcagggacagaacaaaatatgtattgaggtcaacgtttagtccttaggctcactgactagggctttggttttaaataagagatttagtccaggaagttcatagaagttacctcatttaatcctagaagcagcaccttgaggtaaatattataggaatttgggcccagaaagtttaataacttgcccagagtkgcacagctgcttaagggggagccaggatgcagacttaagctgttcttaagacatccctgttcttttcttttcactgttcttttatttcttttaagagtttcatatgtagagggtataaccatcttatggtttgtttaaacaacttgggcctttttcttgtcctgtctgactttcccagctctctggttctgggattctatgctgaaagccaggcttggaggttggagaatgtagagataagcagacagtcctggggcatcatgagcaatgtccggtaagactgcaaagtactttgattgaaacttgtgtcacatgctcaaggatgtgacacaaatttttaaactacatataagtg

SEQ ID NO: 231136 - DNA, 697 bp, Homo sapiens
ttgcagtgagctgagatagcaccagtatactccagcctgggcaacagagtgagaccttgtctcaaaaaacaaaacaaaacaaaacaaacaaacaaacaaaaaacmaactgtaaagtcaaatatttttctgtatttctaatatgtggacttattgtaaaggagcaatataacttctatctaaaagaatggtaatagactgtgctttatatctgtatcactgttgcataaacatctggtcccagcctctctccatcctgatgtactgccagccttggtgtgaggcatttttgtctaatatgggtgcttgagctcatgttcattgataaattctgacctggccatttggctgccagcacagatgtaaatttagccaggtgatttatctcagctcagacatgtaaattatgtagcaaaagcaagctagctactacagtactgagatagacacttcatgtatgcagcagtcaggcacggtgctcagccaccttcatccagcccagatattacccgccaataacattgttcgcttagcttgtttaatgtgggtcagaaacagttcaagtacaaggtcacttgatgaaaagacctaacccatttttcctgcactgaaccacatcccttagagcttggactctctgttggattacgatttctattttgtaataaaatgtatccacttagcatttaatctttggtc

SEQ ID NO: 231137 - DNA, 484 bp, Homo sapiens
tgaaaaaatgttttgtcaactaccatatctgccagtgagaacctgtcagagtaaaaaagaatctgaggctggccagtccacccggacaccttggcctggatcatttcttcttccataacaccagattgatgagctgggtacatcaacctgaggcatmagaaagctctttcccaagcaccgttgaaaggcgcttcacagtgcttcaacctgtagcttcagcttcatcaatctaccagtgctgcacagctgtctttggtattgaagatagccaagcttcagcttctttttcttcattcaaaaaggacaggtcctcaatccaactttttcttccaattcttctcagccaaccatctcaccacttccttacctatcacaaggccaccttcccctgtgcactgagggcccttgacctctttaaggcgcccagtgtccacttcctggacacaccttcccttacgaagttgacagtatctcctaagaattc

SEQ ID NO: 231138 - DNA, 511 bp, Homo sapiens
ccatccccttagtattaggtgaaatcttataatttacgatgatartatttgcatttttgttttccaggtgattgtccaagtgctgaccctacagtgaaactgggagctgtgggtggaagtggatttaaagtttgccttagaactcctcatttggaaaagagatacaagtaggttcttaattatcttgggcttctgggaacagaatcagccagcatgcagtcctaaattcagccatctgataacagttctatgcctgttgctgagtggaacaagaaataaagacaacacccaggccctgactttcggatctgattggagaagccagtcatgtagtttgtctgaatgccatataatttgataggtagcaggagagcatgagttgtaagccagcctaggacctactcccaatagcgcttggttctccaggaaaaatcatgtgggaaagatggagatgacaatgataaggcggagctgcattctcttacataaatggggatgtatgggttgttaa

SEQ ID NO: 231139 - DNA, 520 bp, Homo sapiens
tttaaactgttccactcagtttaacaggaagcatggcatggtatctgctctgtgacttgcttaattaaagctgtatcttgttccaactgcctaacagaagttctgtttgaggacagaagaaccacatataggccggggacggtgactcacacctgtatagtcccagcactttgggaagccaaggtgtgaggtttgcttgagtccaggagtttgagaccagcctgggcaacatggcaaactacaaaaaatacaaaacaatagccagtggacgcacctgtagtctcagctatctgaggggctgaggcaggaggatcacttgagcctgagagatcgaggctgtggtgaatgggtgacaaagtgagaccytgtctcaaaaaaaaaaaaaatacagatacaaacttcaaccatttatattgcatgctccctgaggacaggcactactataccatgctctggtcataataaatgttaaaaaataatgcctatttaattaactatccaattgagtgaggaaaaataa

SEQ ID NO: 231140 - DNA, 618 bp, Homo sapiens
aactacaaaacactgctgaaagaaatcatagaggacatgaacaaatggaaacacatcccatggatgtgtagaatcaatattggatgggtagaatccatctgattctatcatattgcaatggtacccatattgatgggtagaatgaatattgtgaaaatgaccatactgccaaaagcaatctacaaattmagtgcaatccccatcaaaataccaccatcattcttcagagaattagaaaaaacaattctaaaattcatatagaaccaaaaaagaggccacatagccaaagcaagactaagcaaaaagaacaaatttggaggcattacaatacctgatttcaaactatactataaggccagtcaccaaaacagtgtggtactggtacaaaaataggcacatagactaatgaaacagaatagagaacccagaaataaacccaaatacttacagccactgatctttgacaaggcaaacaaaaacataaagtggggaaaggacacccttttcaacaaatggtgctgggataattggttagccacaggtaagagaatgaaactggatccgcatctcttaccttatacaaaaatcaactcaagactgattaaagactgaaatcta

SEQ ID NO: 231141 - DNA, 169 bp, Homo sapiens
actttgaggaactatgtttcccgcatgtggttttggtgggaagaggaaatagaaccaccacaactcaatgaatctatttattcacctgttccttggaagcccaatctcctccacctccttagccttgagaccaarcccccagcaccgtgcccgctgcacatgagagctc

SEQ ID NO: 231142 - DNA, 379 bp, Homo sapiens
ctatagaaccttgagcaactgtgataactacatgaagttaaagaaaaaggaaataaaggtccaggcccctttactcaaagtgggaaatctaataggaattcctcatgtgaagatgggatcccaaaggatgactcccacaatgggtcaatgtgctgatcacattaaaaatcactaaaagtagagttcaaatgaattttttgaagttactataaaatkttatttatgtgaaagagtataaaatgtattatttaaataacaacattaagatgagtagccacatacacattgcccatgataagaagcagcatcgccagaacctaagcagacttgtgttgccccacttgatcacgtctcctgttttgccaccccagatacagcc

SEQ ID NO: 231143 - DNA, 502 bp, Homo sapiens
tggtttccccttagctactggttaagatagacatgagacatggcatcaagattctttaccacctctccaggcttatcaaccccwccttccaaaacacacaccagcagtcagtccattccaacagattgtctttctcagctgctccaggctctttcatgtcttcctgccttggcacaaactatccctttgcctcaaatattttttctgattctacacataatggcttgctaactcatctttaaaaacccaagtcacatgctatattcagctctgaaatgccttctctggtcttcctctattcctggagcatttgtgttataacccaaccctgtcaggtagctatttgttactccattagaaggagtccccctcgagggcagtagctgcattttatgatcctgtcttccaatcttctagttcagtgcttccccatagagtggtaagttttaagtaaacatataatgaataaatgaatgaatgcaccacttatggtgccaagggt

SEQ ID NO: 231144 - DNA, 587 bp, Homo sapiens
tttccttccacaaatttagtttgttcacgatgctgtttgaacattatgaacattttaacagtttggaactagtttcctaacagagtaaaaagaggaacccaatcctgtatcccccccaacaaaaaatactacttacagagtttataataatgccttcgatttgaattcaaggcacaattcaaagtcaaattttagcctcaacaggtacatttttctcaccaaactatttgacattgtcaaatgaacacacattcccgaaaaaagggactcaaatcaagcactgaatgtaatacatttgacataaccaccaggcacacacacaggagtgagcacatccagtttccaattatttacgccatagcgtggtcattgcagcctgtctaacccttggcagtagctttttttttaattaacattttacaaaagtaatcagtttttggaagaaaagccatagaaatgcacataagcacaaggaagaaacaccataatcttcccacccagggatgcacactgtgggtrtgttcaggtgcgtcctctttctctcctgttctgcacattgattatttaaacagatacatggcctccat

SEQ ID NO: 231145 - DNA, 583 bp, Homo sapiens
agctcgtggtgaggacctggaatgatgtccttgaggtggaaatggcagagcccggtatctaccttgatgacaaaaccatgccctgctctcctggatggcaatcctgtctgataaagctttgctcaaatgttgaaagctgccatggtgcaaaggacacttaactggggaacgaatccaagtgagtgatctttctgaacaccaggaagctggcagagctattaactagattgctcactggttttcacgtgtgtcaaacttctcattctgcaaatgggctgtccctcwggccgggaataggaaatttgtggcaattctcaggagggaagggaacattctgtttcaaaccaccaaccctactctaagtggaaaataatgtaaaacttattgtatttgcaacattacattaagaatgatgcaaaacttacaaaaaacagaatttggggtatttttgtataaatggaacttgaacacaattccatctagcagttgaactggtaaataagttgacaattttactttcacaaacattaactggagagactaccacaggaaggatatacaaggacccggcaaaagtgagttg

SEQ ID NO: 231146 - DNA, 588 bp, Homo sapiens
tgagtaacatgttagaactatcaagaacacggcacccaacagacagcagtcacactcctacactcctgctggtgtctccagtgggccaatggacctcttggacatgcatattttttgcaaacacacacacacacacacacacacacacacacacacacacacacacgctgagttcttcctctgtccctaagaatttggtgttggctttcttgggtcaggcgataacccagtaaagaaaaacagaagccctcagccagctgttccattaattgatgtcaacgagaagatcataaaattaatctctgaatcatcactgagcagaaggccacctgkcaggaatccctcttcctcctcattcctgtgtcccacagttgatgacatgattttggagatagtttcaaactgtaactggcctttccttgggactcgttaaaaagacctcatgaaaagagaatgctgaaaaattgaagttcttcagatatatagtcatccctcagtatccatggaggatgggttctaggacttccctgggccaccaaaatccaaggatgctcaagtccctgatagaaaacagcatcatatttgaat

SEQ ID NO: 231147 - DNA, 544 bp, Homo sapiens
aaaagctaaaacgaatgtagaatgaatggttgcttctggagaacaagaaactgaagggaatccaggggatgatggcacattgtttttcacaataagctttacaaaatgatttgamtctgagttccccagaagcagaccctgagatggagattggtgcgcaagtgatttactgagaaagtgctcccaggggaaactggtaagggcaggagaagcgcatcccagactgcaccagaccctgctccagctccaggcaaggctgccaggctttgtcactccctccagcacctctggagggccaggcactgagatggagagggccaagggcaccaagggccacaggtggaaagtctcctgcaccccagggcacccagaaggctggtgacatacctctgagatgtaagaggatctgagagggtttgggtggtgacctcgaaatacctacgagtcctaaaatatagttcaatatgctgcaatttgcatctcccagccagacttttccagatttgtacatcacatgggattggcaataaacccaacttgttca

SEQ ID NO: 231148 - DNA, 544 bp, Homo sapiens
aaaagctaaaacgaatgtagaatgaatggttgcttctggagaacaagaaactgaagggaatccaggggatgatggcacattgtttttcacaataagctttacaaaatgatttgaatctgagttccccagaagcagaccctgagatggagattggtgcgcaagtgatttactragaaagtgctcccaggggaaactggtaagggcaggagaagcgcatcccagactgcaccagaccctgctccagctccaggcaaggctgccaggctttgtcactccctccagcacctctggagggccaggcactgagatggagagggccaagggcaccaagggccacaggtggaaagtctcctgcaccccagggcacccagaaggctggtgacatacctctgagatgtaagaggatctgagagggtttgggtggtgacctcgaaatacctacgagtcctaaaatatagttcaatatgctgcaatttgcatctcccagccagacttttccagatttgtacatcacatgggattggcaataaacccaacttgttca

SEQ ID NO: 231149 - DNA, 493 bp, Homo sapiens
ttatttggggtgtgtgtttggcttttactataggttcaaaatgagtcaccccctcccamctcctgggttacaaaaggtggttgcatttagggagttgagctgttttctttgcttcgccctggcacctgtgagctttttcaggtgtgacacactttcctatagctgtgcttggcattatcctagcacagaccctgggcttgtctgggatgagacaggcctccctcgttcctctgccctaggcttgcttttttacatgttaaatcatgcggtggtggggatccatgcagacaagccatgctaacagccagggcgtctttaagagggggttgctgtgaaagcctgctgccgggttgggggcaggttaaaaatgctatgcctgcttattttaaatgctgttcatggaacaaaaatctgtgtagtgactttgtgagaagttgtgatgtttatgttgtgtaactttgtgcaggaacactgcgtcttgcagtgggtgcac

SEQ ID NO: 231150 - DNA, 493 bp, Homo sapiens
ttatttggggtgtgtgtttggcttttactataggttcaaaatgagtcaccccctcccacctcctgggttacaaaaggtggttgcatttagggwgttgagctgttttctttgcttcgccctggcacctgtgagctttttcaggtgtgacacactttcctatagctgtgcttggcattatcctagcacagaccctgggcttgtctgggatgagacaggcctccctcgttcctctgccctaggcttgcttttttacatgttaaatcatgcggtggtggggatccatgcagacaagccatgctaacagccagggcgtctttaagagggggttgctgtgaaagcctgctgccgggttgggggcaggttaaaaatgctatgcctgcttattttaaatgctgttcatggaacaaaaatctgtgtagtgactttgtgagaagttgtgatgtttatgttgtgtaactttgtgcaggaacactgcgtcttgcagtgggtgcac

SEQ ID NO: 231151 - DNA, 549 bp, Homo sapiens
gggtgcctaccatgtgccaagactgtgccaggcactggggatatgatgatgaaaccaaagatgctagcatgaacacaatcactaaaccaaagtcacacaaataaattaaatgtgggagggacaaggagagctatacatgtactgatcatctgctatgctggaagtttatttagcaaatgtaatcttatttaatcatctggacccragggaggtaatctgacctctctgaatctcagcttcatgtgaaaacggggataatattattgagagagaacatttgttacaggggcaaaccctgttccaaggtttctttcactcaaagtataaacaatgaggcactttttacactttagacactaaaactttttggaggcaaagagggctggtatttagtgagtatctgctatgtgctaggcactttacagagatctcatttaatctcagttccattctttgaatttgctatgtaccctgctgtccaaatgacggcactgagtcagtgagaggtttcataacttgcccaaggccacagaactggatggagaaaga

SEQ ID NO: 231152 - DNA, 549 bp, Homo sapiens
gggtgcctaccatgtgccaagactgtgccaggcactggggatatgatgatgaaaccaaagatgctagcatgaacacaatcactaaaccaaagtcacacaaataaattaaatgtgggagggacaaggagagctatacatgtactgatcatctgctatgctggaagtttatttagcaaatgtaatcttatttaatcatctggacccaagggaggtaatctgacctctctgaatctcagcttcatgtgaaaacggggataatattattgagagagaacatttgttacaggggcaaaccctgttccaaggtttctttcactcaaagtataaacaatgaggcactttttacactttagacactaaaactttttggaggcaaagagggctggtatttagtgagtatctgctatgtgctaggcactttacagakatctcatttaatctcagttccattctttgaatttgctatgtaccctgctgtccaaatgacggcactgagtcagtgagaggtttcataacttgcccaaggccacagaactggatggagaaaga

SEQ ID NO: 231153 - DNA, 682 bp, Homo sapiens
gtaattctctggattaccaggaagagactgttattcatttacctcactttcaggtaaacaaataagagtctctttctttctgggctgacccagctggaactaagggtatggttatgcaggcacttctgtggccagcagcactagactttgttgggactgacctaaagccagcacagcactgggtcttgcccaaggcctgctgtaactgccacctggctaccacctatgttcactcaaagtcctaggcctcygcaatcggcaggccaggtttttattcttttccccagggcagtgagattccccaggctctcggtgactccagagatggtttctgaaagtcagggattagagtcaaaagtcttaggaatttgcctgatgttccattctactgcagctaaggtgaaagtcagaccacaataggaagtccttcccactcttccttctccttttcacaggcaaaggagcttcatctggtgggcatcaccaccactggcccatggtggagttctgccaggccactgctagtgttcacttaatgcccaagagttcttcagacagcttgtggtaaacgctgcacagcctgggactcacccttcaaggtagcgggctcccttctggcccaggacaggcctagaaatgctaggagcccgggcctggactcagggaccccaagtgcctgctt

SEQ ID NO: 231154 - DNA, 357 bp, Homo sapiens
ggcaggctaccactgtggtacattgtggagtggcaagaactctgaaaatatgaataataatrgcctacaaaaatatatgacagtattcagggcaaccacaactgctagaaaatgaagagagaattccataaaagagggagtcagaaaaaagattcccaaattctctgcagaatcctgagccatgcatacgtagggcagactgcagacagtctaggtaaaggggatttagagaagtactgaactgagattttaagtatactgactttaaactacaaaacgcacacacgcacatacacacaaacagacaaaacttgaaatgattataacagaatctagagtctccacaacaacttacag

SEQ ID NO: 231155 - DNA, 493 bp, Homo sapiens
tatataagcggttttttttgtttgctttaatcttccacatccataataaggatattaggtaaaacaatctaagtagttggtaacattattgtgagtaaaaagtgttggtctatttgttccaaaaggtcctttcacatctttttggcaaggcccaagattccaactgtggcttcactttttcaaacaagktaatttgagaatctctagaatataggaagcagtcaataatctcttgttaaataatttgttatttaatgagtacttgaaaggctgaattggtgaatgcctgaatgaatgaattatagatggagaaaacgttaactgtaaatcaatagaagttgtttctgagaaatacttgataacaaagactttaaacaaagactttaaaacatctgtcttgaaggtgcttaaagaactaaaggagaaatcacaaaaactatgtatgaacagaaaggaagtatcaataaagaattttttaaaaaaagaaacaaaa

SEQ ID NO: 231156 - DNA, 493 bp, Homo sapiens
tatataagcggttttttttgtttgctttaatcttccacatccataataaggatattaggtaaaacaatctaagtagttggtaacattattgtgagtaaaaagtgttggtctatttgttccaaaaggtcctttcacatctttttggcaaggcccaagattccaactgtggcttcactttttcaaacaagttaatttgagaatctctagaatataggaagcagtcaataatytcttgttaaataatttgttatttaatgagtacttgaaaggctgaattggtgaatgcctgaatgaatgaattatagatggagaaaacgttaactgtaaatcaatagaagttgtttctgagaaatacttgataacaaagactttaaacaaagactttaaaacatctgtcttgaaggtgcttaaagaactaaaggagaaatcacaaaaactatgtatgaacagaaaggaagtatcaataaagaattttttaaaaaaagaaacaaaa

SEQ ID NO: 231157 - DNA, 622 bp, Homo sapiens
ttgcaaagctgctgaaataccttcatgaaagggaaaggcaaattaaatatattgaaaagctatagagagtttgaattgtaatgtttttagacaaataatctatttccttgctttttatttttatttgacatctaggctactctaccttttaattacttacttcacaatattgtcaatcatgtaacaaaaactacggaaggtctttgctgtaaaaaatagttaagaaatgtattaagcttccaattcacatttagtaatcttacaaatattaggcaagaggaatgactacatggaagtaattttaactgccacagactctgcatctgcaaaaatcatgccagaaaccaagggacaagttttttgtctaagacatgtcctcagtcgtcctcgcctttatgttacacacagggcaagaatcagttttaagggtatgactacatgctttttgtttccartttcctttgttattattcatttagatgattggcatcgggatgggagtgcttggtcaagggagcaaccttaaaccttaaacctgtcccatcgcagaatggtacttgaaagattattgtttgacacagaaacgtaaaagtggagtaagaaagaaagggaaagtaggctt

SEQ ID NO: 231158 - DNA, 622 bp, Homo sapiens
atatacacaagtatgtaatatgtgttcactttcagcataataataataattaaaagatttatgcaaggaaattacattcagaagataataataactgaagcataagggaataccaataagataactagttgcccaattaagtttttcagccttgttaaaaggcaaaaaatcaatagagatttaatcaaatctgagaaacattggctaaaatgcttgagaataatgaagaagactaattgataaactacagattctattctctgcagactctcttgcccarcaagtgtcaagttcaaaaatttcgtacccagtcataaaatcacctaagtgttttcttaaatatacatgttaaattcagatttgcagatcaggattcaaggaagagctaaatgcatattacaggggcatgacatttgatgtcacataaccagaagggaagacaataactaaatttcatatgatgatagtgttggtgaggcagaggctgattaaacttctgaaaccattcctgagtctacatttaaaattggtttggcaactgatctgagacaatgagtgagcagtaatggaaagctgaaaatgagaaaggcaaaggaaataaagcatgtgtgtgggtgatgaa

SEQ ID NO: 231159 - DNA, 622 bp, Homo sapiens
atatacacaagtatgtaatatgtgttcactttcagcataataataataattaaaagatttatgcaaggaaattacattcagaagataataataactgaagcataagggaataccaataagataactagttgcccaattaagtttttcagccttgttaaaaggcaaaaaatcaatagagatttaatcaaatctgagaaacattggctaaaatgcttgagaataatgaagaagactaattgataaactacagattctattctctgcagactctcttgcccaacaagtgtcaagttcaaaaatttcgtacccagtcataaaatcacctaagtgttttcttaaatatacatgttaaattcagatttgcagatcaggattcaaggaagagctaaatgcatattacaggggcatgacatttgatgtcacataaccagaagggaagacaataactaaatttcatatgatgatagtgttggtgaggcagaggctgattaaacttctgaaaccattcctgagtctacatttaaaattggtttggcaactgatctgagacaatgagtgagcagtaatggaaagytgaaaatgagaaaggcaaaggaaataaagcatgtgtgtgggtgatgaa

SEQ ID NO: 231160 - DNA, 556 bp, Homo sapiens
tgcaaacatttctagcactcaacaaagtaaaatttatagtatctatcatctaatcaaagactatcaagcatataagtatgaaaaaaaatacaaaccattatgaggagaaaatttaatgaatctaaactcacctagaactcacaaagatattaaaattagcaagaaaagctacattatgacagttcttaaaagtttattaatgataactacagtatgtgagaagtaaaatatattggatcattggatatgctcaatggcagattagatattgccaaaaagattactgagcctaaagacatagcaatagaaagtatccaaatggaacacatgaagagaaaaaattaaaagagcattattaagctrtggaacacagtcagtcaccctaatatatatttaattagtgcctcttgagagagagaaggttaaaaatatttgaaaaataatgaaaaagatgttttccaaatttgataataattgttaactaacaaatacaagaagtttaataaatcccaagcacgagaaacataaagaaaactacagcaagtcatgtgataat

SEQ ID NO: 231161 - DNA, 563 bp, Homo sapiens
acaattgtattaacaaatctactgaaactacatatgtcaaaaaaaatctcctatatgcactgaggtggaaagaaaataagtaaactgaaatatactttcttttgctctccctgaattgggtttctgtttccaattgtattagtccattctcacattgatataaagaaytacctgagactgggtaatttataaggaagagaggtttaattgactcacagttccacaggctatacaggaggcatggctgggagggctcagaaaacttacaatcatggcagaagagtgaaggggaagcaagcatgtcttcacacggcagcgggagagagaaagagagtgaagggggagctactacacactttcaaacaaccagatcttgtgagaagtctatcacaggacagcactagggagatggtactaaaccattagaaatcaccccatgattcaatcacttttcaccagctcccacctctaatattggggattaaattcaacatgagatttgggtggggacacagagccacaccatatcaacaatggtggcatttttcaaatgaaaaaagagg

SEQ ID NO: 231162 - DNA, 439 bp, Homo sapiens
  misc_feature (1)...(439): n = A,T,C or G
gatgcaaggaagagacgagtacagtgtgaaaggaaaaaggatcaaatagataattcagacacaaggcagatacaaagggaagagtccagacagacaaaaacagactccttattcattccggtctatgatgtctccacttccatagtggaaaaagacagagagaaagagaaaaacccccataaaattaataattgtgngccacggaggccaatttctgttgatamctataaggtatagctacatttgcaccaacagtaaagttgatgtagttaagcccacagtcagagttcagctatctcatagtaatcctttttgtttctttctttaagtctcaatttaaaagaatctactagagtttgttaaaggataatatcaaaattagatggtgcaactcacttttgcagtaagctgcagaagcccagaacaggcaagcaggtta

SEQ ID NO: 231163 - DNA, 252 bp, Homo sapiens
tatacactctaaaattctaggtggtaactagctaaattactgtgtattttaattaaaatattgtgtaactattataatgatgttcaaaagactttaaaatctatcaggggagaaatacatgtyaaataacagctgaattccacatggattaaaagagatcacactgtaatcaatttaacatattgatgaacattaaatcttttgccagtgttactggtttggttgcacatgaacaagactataaagcttaaa

SEQ ID NO: 231164 - DNA, 462 bp, Homo sapiens
ttagctgttaacgtctttcctactagtgaagatgggcagctgacgatcttaaaaatgaaaagatactctcctcctgctctgtcaaagagacagactgtgcttcctgtgagtggttctttacttagccttgcctttgggtctagaacatcagctgccacctgcagatgcacctgcaaacctaattttatggtaagaagtaagatatttctggcatctcggggttttgygcctcaactgtcagaagaataatttagctggactcttaggagatctgtggttgtggggccttttctcaatgcatcctactcagtcttcattcagccttcacaaaaccatccacccatttggctttccaggatcttagctgttttctaattttaacaaaaaaatggaggatatagtttttaaatttttttattgtctttgtattttagctaagaagagtagtctgacagtacagtt

SEQ ID NO: 231165 - DNA, 630 bp, Homo sapiens
acagttttatcttcaaacaagaaactgctatcaagtgtagcgggtatacttgcattttctataactgagctaatctatcatgacaccttaatattttttattcattggaatactatttatcttcatgctatatttgcatttttcacataaatttagttcatcaggtgacatattcagaaactgcaatatgagttcatgccaatagtctatctgtcccagatattacataaatttcggcacatatttcacttaaaacataaacactgtttataaatgttctacatagctatcttcttttcaagactctgagtacaatattgacaaaacatttaattttttcackcttatgcatccttccaaattctaattgtttcctaacctaaattatgtgttgtttttgaatactttaagtcacatgtactttcaattgattttgactattttatgtttttagttaaggaaagttcctacttaatacattaaagaatcaaaactttgcccactgggtttttgtttacgtgtgaattatattactgaaagtgggtcaaaaatgatcaagctatttcaaaattattttctatgaactctaaaccacaaacacttgtcacattgaaaaagattactttcctc

SEQ ID NO: 231166 - DNA, 598 bp, Homo sapiens
atctaataaatagctaatatctaggatgcataaagaaatataaaactttaacactaaataaaaacaattagaaaatattcaaaaaacagaaagagaagctttactgaaaggtgatctatagatgacaaataagcacatgaaaagatgtttaacatcattagccattgtagaaatacaaaataatgccacaatgagatatcactactataaaaatggctaaaataagatatagtaatgacactaaatgctggtgaggaggtgaacagactaaatcattcatgcattgttagcaggtatgcaaaatgttacaactaactgctctaaaaaacagtttctttaaaaatgaagcatgcmactatcatgtgactcaacaattaaattatactctggacaggtatcccagataaatgaagacttacattcaaacagacatcttaaaatcataaaattttatttatattacagtctcaaaaagaaaaagaaaacttatggccaggcacagtggctcatgcctgtaaccccagcactttgggaggccaaggtgggtggatcacttgaggtcaggggtttgagaccagcctgggccaacacggtgaaa

SEQ ID NO: 231167 - DNA, 497 bp, Homo sapiens
tctcatttatagatggataaagtggaccttatgaagtccacaaatatatacagtggactcataaagttgaactcacaaaaatagagtagaatgatggttaycagaggataagcatggaagcctgaaggaaatggggaggtggtgaccatacagtacaaagtttcagatagataggagataaggttttgggatctattgcacataagagtgattatacttaataataatgtatgctacatttcaaagtacagatggcctacaacttacaatggttcaagttatgatttttcaactttacatgagtttgccttttagatttacaatattttcaacttaaatgagtttgtcaggacataagcccatcataagctgaggagcatctgtaatagagtacatttcaaatgtttcaccataaagaaaatagataaataaggtgattaatatattaattagtttaacatagacattatacattgtatacatatatcaagacatca

SEQ ID NO: 231168 - DNA, 375 bp, Homo sapiens
agttaagaaaacctatgggaaatgcaagatataacaagcagttgccatcatcttatcagtagtcacacaktgacaaaacactgtaagggactaagtactaagtaactcattccgtgcatgcagaacgagtaaaagaaagttatgtactttgttcactacagtctaagtgaggtcttggattcaaactctgttcttcctggtcaaatctcactacagcatggggcacctgaggacaatcaaagaactttcttaggagaatttaaggtttgtttgaattaatatttttgttgctggatacacacatatatactctgtaaaattacctaaaaaaaagcaaggaatttaatcctcatagaaaagttgccattgcaaagt

SEQ ID NO: 231169 - DNA, 608 bp, Homo sapiens
tcttaatttccacaatttaagagtaattatgaatctcaaggtaaaacaaatgtgaatcaaacaattaacacatagtttgttttctcttgacaaatttaaagatttatgtgaaataaaatcaagtctagaaaattgtttctcagctgggcatggtggttcatgcctgtaactccagcgctttgggagcccaaggcgggcagatcgcttgatgtcaggagtttgccacaagcctggccaacatggtgaaaccccatctctcctaaaaatataaaaaattagccaggcatggtcgtgcacacctctaktaccagctactagaggctgagacaggagaatcacttgaacctggaaggcagaagtttcagtgagccaagattgtgccactcaaaaaaaataatgtttctttgataagtaacattcataattctcaatagcctccaaaagaaggaaggattgactgtatgattaaattgatagatgtatagtgaatgattttcagtcttggctcaaatttgtggagaaaaaatgattttcaatgcataaaaatggctaacaaattcatttaacatagtgttttatttttctctataactttgactcaaaaacag

SEQ ID NO: 231170 - DNA, 540 bp, Homo sapiens
  misc_feature (1)...(540): n = A,T,C or G
ctctattaccagctactagaggctgagacaggagaatcacttgaacctggaaggcagaagtttcagtgagccaagattgtgccactcaaaaaaaataatgtttctttgataagtaacattcataattctcaatagcctccaaaagaaggaaggattgactgtatgattaaattgatagatgtatagtgaatgattttcagtcttggctcaaatttgtggagaaaaaatgattttcaatgcataaaaatggctaayaaattcatttaacatagtgttttatttttctctataactttgactcaaaaacagtaagatcttgaaaaaaaattaactgtaatgattaaatccttaatgctctgcctcaacagaaaaagataaaaccccagaatatagccaatgaacacttcttcaaagaagcactgaaatgctgtcatactgcatttcttccaacagaaatatcaacagccatagtatcatgtactgcaatggagatctaatgttgcaacaggctcgtttgatacatatggttgaaaaannnnn

SEQ ID NO: 231171 - DNA, 540 bp, Homo sapiens
  misc_feature (1)...(540): n = A,T,C or G
ctctattaccagctactagaggctgagacaggagaatcacttgaacctggaaggcagaagtttcagtgagccaagattgtgccactcaaaaaaaataatgtttctttgataagtaacattcataattctcaatagcctccaaaagaaggaaggattgactgtatgattaaattgatagatgtatagtgaatgattttcagtcttggctcaaatttgtggagaaaaaatgattttcaatgcataaaaatggctaacaaattcatttaacatagtgttttatttttctctataactttgactcaaaaacagtaagatcttgaaaaaaaattaactgtaatgattaaatccttaatgctctgcctcaacagaaaaagataaaaccccagaatatagccaatgaacacttcttcaaagaagcactgaaatgctgtcatactgcatttcttccaacagaaatatcaacagccatagtatcatgyactgcaatggagatctaatgttgcaacaggctcgtttgatacatatggttgaaaaannnnn

SEQ ID NO: 231172 - DNA, 602 bp, Homo sapiens
tgcataaatctaaataattaaaataccagaaagaagtgtttagtttaaaaatattatgaatattgctagctcctagaatcagggaagaaatgatcaagaaataaagtgcaattttcatgagccttgatgagaggctattatcattgttacagcatggagagaataatttagttagagacttggaacctgaagtaaagtcataaaatgcaaatgagaagtgacgtttctagtaaatggcaagcattacagagtttcactggtrtctagaatgcataaatgggatgatataagagaaaatattttaaaacatgtgggagctaaagtaataataatttaacagccctataaatggctgtttaaaagtttgtctttgttttggtcaaatagttttcacaaagtaaaaaactcatccagaaactttcagagattaacctcacagcacctcagagaataaattagagtaaaaaaaacacatgtggtaattttaaactgtttaaatgtgtgcttctccattttaattattataaacacccatggatttctttctattataccactaaactttaatttatttgaaataacaggaaatgggcaaaattgca

SEQ ID NO: 231173 - DNA, 602 bp, Homo sapiens
tgcataaatctaaataattaaaataccagaaagaagtgtttagtttaaaaatattatgaatattgctagctcctagaatcagggaagaaatgatcaagaaataaagtgcaattttcatgagccttgatgagaggctattatcattgttacagcatggagagaataatttagttagagacttggaacctgaagtaaagtcataaaatgcaaatgagaagtgacgtttctagtaaatggcaagcattacagagtttcactggtgtctagaatgcataaatgggatgatataagagaaaatatttyaaaacatgtgggagctaaagtaataataatttaacagccctataaatggctgtttaaaagtttgtctttgttttggtcaaatagttttcacaaagtaaaaaactcatccagaaactttcagagattaacctcacagcacctcagagaataaattagagtaaaaaaaacacatgtggtaattttaaactgtttaaatgtgtgcttctccattttaattattataaacacccatggatttctttctattataccactaaactttaatttatttgaaataacaggaaatgggcaaaattgca

SEQ ID NO: 231174 - DNA, 602 bp, Homo sapiens
tgcataaatctaaataattaaaataccagaaagaagtgtttagtttaaaaatattatgaatattgctagctcctagaatcagggaagaaatgatcaagaaataaagtgcaattttcatgagccttgatgagaggctattatcattgttacagcatggagagaataatttagttagagacttggaacctgaagtaaagtcataaaatgcaaatgagaagtgacgtttctagtaaatggcaagcattacagagtttcactggtgtctagaatgcataaatgggatgatataagagaaaatattttaaaayatgtgggagctaaagtaataataatttaacagccctataaatggctgtttaaaagtttgtctttgttttggtcaaatagttttcacaaagtaaaaaactcatccagaaactttcagagattaacctcacagcacctcagagaataaattagagtaaaaaaaacacatgtggtaattttaaactgtttaaatgtgtgcttctccattttaattattataaacacccatggatttctttctattataccactaaactttaatttatttgaaataacaggaaatgggcaaaattgca

SEQ ID NO: 231175 - DNA, 544 bp, Homo sapiens
agatctgttttttaaaaagaatgtggcacctccccaccccttgctcctgttcttgccatataatgtgcctgctccccttttgccctccaccataaaaggaagcttcctgaggccctcaacagcagcagatactggcatcatgtgtcccatacagcctacggaatagtgagtcaattaaataccttttctttataaatcactcaggtatttctttataacaatacaaaaatgacctatcacagaaaattggttctgaggagtagggcctcactataaaaagctgaaagtgtgaaagtggctttggaactgagtaacaggccagaggttagaaaagtttggaaggcttggaagaagactcaawagtcggggaaagtttggaacgtgaacgttttggcgactggttaaatagttgtggccaaaatgttgatagaaatatggctagtaaaggccaggctgatgatgtctcaaatgaaaatgagcaacttgttgggaactggattaaagttcattcttgttacaccctagcaaggagcttggctacatt

SEQ ID NO: 231176 - DNA, 256 bp, Homo sapiens
ggctttggaactgagtaacaggccagaggttagaaaagtttggaaggcttggaagaagactcaatagtcggggaaagtttggaacgtgaacgttttggygactggttaaatagttgtggccaaaatgttgatagaaatatggctagtaaaggccaggctgatgatgtctcaaatgaaaatgagcaacttgttgggaactggattaaagttcattcttgttacaccctagcaaggagcttggctacattttacacat

SEQ ID NO: 231177 - DNA, 551 bp, Homo sapiens
agcttctgaaactaagatggccactgctgcaactacccataaacagtgaggccaaccttttgctactacatcaatttccttacttaggtatgccactggttgtggggttgtcccacgagtctgagtaaggactccaagagctattcttcctctctctgtgacttataaagaggagttttgtcctgtgggaaggctgaaggctggagcttgtactagggactgctttaaggttttgaaggctgtttctgcctctggttcccattctactagatgagtatttgccctctggtctcctcgattagcgtatagagtggcctggccatctcgctctatctggggatccatagtttggaaaagccggtgatcccaagcaatgcccacaattgttttaatgtcttagggggaggataaaccagtataggctgaatttgttctttgctgagggctctagttcctctggctaagattaggtctagatatttgacttgttgtaggcagaggtaggccttcaatttagatgycttgtatccttgattagctagaaagttcaa

SEQ ID NO: 231178 - DNA, 490 bp, Homo sapiens
ggaattatataaagcatcattttgtctctggaatttattccttcccatgggttatcggtctcactgacttcaagaatgaagccaaggttcttcgcagtgttaagctcttaaggatggtgtttccggagtttgttgcttcagatgtttagatgtgtctggagtttcttccttccggtgggttcgtggtctcgctgacttcaggagagaagccacagacctccgcagtgagtgttacagctcttaaaggyggcacgtccagagttgtttgttcctcctggtgagttcatggtctccttgacttcaggaatgaagccacagaccctctccgtgagtgttacagctcataaaggcagtgtggacccaaagagtgagcagcagtaagagttattgtgaagagtgaaagaacaaagcccccactccatgaaagggggtcccaccaggttgctgctgctggctccggtggccaccttttattcccttatttggccct

SEQ ID NO: 231179 - DNA, 490 bp, Homo sapiens
ggaattatataaagcatcattttgtctctggaatttattccttcccatgggttatcggtctcactgacttcaagaatgaagccaaggttcttcgcagtgttaagctcttaaggatggtgtttccggagtttgttgcttcagatgtttagatgtgtctggagtttcttccttccggtgggttcgtggtctcgctgacttcaggagagaagccacagacctccgcagtgagtgttacagctcttaaaggtggcacgtccagagttgtttgttcctcctggtgagttcatggtctccttgacttcaggaatgaagccacagaccctctccgtgagtgttacagctcataaaggcagtgyggacccaaagagtgagcagcagtaagagttattgtgaagagtgaaagaacaaagcccccactccatgaaagggggtcccaccaggttgctgctgctggctccggtggccaccttttattcccttatttggccct

SEQ ID NO: 231180 - DNA, 522 bp, Homo sapiens
aatatgcaaaaaaatgattaaattaaacccttatctcatgccatatacaaaaatcaactcaaactacaatgaaaacttaaaygtacaacttggaatcaaaaaactaccagaagaaaccataagtgaaaacttcatgacgttggcatgggcaatgaatttttggatatgactcccaaaagcacagggaacaaaagcaaaaagagacaaataagataacatcaaactaaagaacttgtgcacagtcaaggaaacaattaacaaactgaagaatggcctatgaaattgaagaaaatatttgcaaaccattcatctgataagggataaatatccaacatgtccaaggaactagcaactaatagttatttaacttactaatagtaagaatacaaataacattattaaataaggggaaaatgttctgaataaatatttgtcaaaaaagacataaaagtggccaacaggtatatataaaaaataatcaacctcactaatcaccgccagattaacatcactaatcaccac

SEQ ID NO: 231181 - DNA, 547 bp, Homo sapiens
actcaaaacaataaagatagcaccaggaaaaaaaaatggaaattctgaaatacaagatgtataaaaacatagctagatatcacttctaggtcaaagagtatgaagtaatcaacctttccaagatagggcagtcagaatgtcaaaactgattaatgttwaagctgactgaagaatggttgttgaaattgttcaagtcagggaacatgtaagcaacataaaaaatttgtaactttgcttctgttaatggtatttgtaaaaatcagcacataatttgtaagaggaaaagagtacaggagaaaaggttttgatgtagaacagtttgcatttttgtaagccaaagaaaaataatttattttcttcaagcactgaatgtgggaagaacagtctaattattagagggaatggaaagatggatctaactggaaataattgatatatactaaaacttctttatttcatagctaatgaggagaaaaaatgaaattgaatctctactttgtataaaatctgaaaatatattttgtattttgtttgcaactatgcttgt

SEQ ID NO: 231182 - DNA, 547 bp, Homo sapiens
actcaaaacaataaagatagcaccaggaaaaaaaaatggaaattctgaaatacaagatgtataaaaacatagctagatatcacttctaggtcaaagagtatgaagtaatcaacctttccaagatagggcagtcagaatgtcaaaactgattaatgtttaagctgactgaagaatggttgttgaaattgttcaagtcagggaacatgtaagcaacataaaaaatttgtaactttgcttcygttaatggtatttgtaaaaatcagcacataatttgtaagaggaaaagagtacaggagaaaaggttttgatgtagaacagtttgcatttttgtaagccaaagaaaaataatttattttcttcaagcactgaatgtgggaagaacagtctaattattagagggaatggaaagatggatctaactggaaataattgatatatactaaaacttctttatttcatagctaatgaggagaaaaaatgaaattgaatctctactttgtataaaatctgaaaatatattttgtattttgtttgcaactatgcttgt

SEQ ID NO: 231183 - DNA, 587 bp, Homo sapiens
tagacaaactttagcttgactgaaaaaaggagagatgatacagataaataaaataaaaaatgaaagaggagacattacagctgataccagagaaacacgaaggatcataagagactactgtgtaccattatatgttatcaaattagacaacctagaagaaatggataaattcctagactaatacaaccactcaagacagactcatgaagaaatagaaaatctgaagacactgataatgagtaaggggattgaatcagtaataaaaaatattccatcaatgraaagcctaggatctcccggcttcacagttgagttctaccaaacatttaaagaaaaactaataaaacacttctcacacttttccaaaaaaaaaaaaaaaaaaaaaaacaaagaggaggaattactttcacctcttcttttcatgaagctatcattaccttaatatataaccagacaaggaaattacaaggaaatatccttgaacatagattcaaaaatctttcacaaaaatactagccaactgaattcaacaacacattaaaggatcatccaccatgttcaagtaagatttatcattgtgatgcaag

SEQ ID NO: 231184 - DNA, 587 bp, Homo sapiens
tagacaaactttagcttgactgaaaaaaggagagatgatacagataaataaaataaaaaatgaaagaggagacattacagctgataccagagaaacacgaaggatcataagagactactgtgtaccattatatgttatcaaattagacaacctagaagaaatggataaattcctagactaatacaaccactcaagacagactcatgaagaaatagaaaatctgaagacactgataatgagtaaggggattgaatcagtaataaaaaatattccatcaatggaaagcctargatctcccggcttcacagttgagttctaccaaacatttaaagaaaaactaataaaacacttctcacacttttccaaaaaaaaaaaaaaaaaaaaaaacaaagaggaggaattactttcacctcttcttttcatgaagctatcattaccttaatatataaccagacaaggaaattacaaggaaatatccttgaacatagattcaaaaatctttcacaaaaatactagccaactgaattcaacaacacattaaaggatcatccaccatgttcaagtaagatttatcattgtgatgcaag

SEQ ID NO: 231185 - DNA, 615 bp, Homo sapiens
taattgatgtaaaattcatttatgagaaygaaagatagagtaagagctttctgtgtctttgtgtcaagaagcatgcctatgaagggcatgtggcggtgagttggaaccagcatgtgctgacttgtgaaagctgaattttatcatttctagcaaccctacatttgtcctttgaaattggccattgaggagtatttacatcataggaataggcaaagagtatgactcagcatttctttctcctttttctgtagaataaatttaccagcacaacagtacgccattgacctgggagtggaggagtgacaatgaacacagtaagatacaacaagccaaagacaaaattggaatagcatagacaaaaaattatgattttacctgcttcactgttttaatcaggacaatgctgcatgtattcccgtttatttttgcattcctacaaatggttcacaaagggcctgccacagccagaggctcagtgagtactcattaactaactgaatcttatgctaagttttatcatcaatagggtcatgttctaaagatatttaacctaaaaactttttacccaccattataaaatatttcaaattttccaatctgtttatttgaattctt

SEQ ID NO: 231186 - DNA, 606 bp, Homo sapiens
tgactctccccatctctttctttgatagtttactcttaattgacactgccttacacttgtgagtattgggctcaggccatgacaacctttcttttcccccatctcctctgcaagtcatgcacaaatagcccaatacttcattttagaatgtgcaagtgcctgccacctattgttttgttcttagctttttatgactgtagcaaaattagagacagatcagcaattagactatcaatcaaacatattttccaggtattgataatagcaataattmcaaataataaagctaactgtagtatattatattattgaggtgataggaaagtctttttaaggaagcaatccactcaccctaaagggattttgcaaaaaggaaatagggaggaacagtggtattgagatgaccttgggcttatttcccaaaccaaactattttgtttttgagatggggtctcactctgttgcccaggctggagtgcagtggtgtgattatagctcactgcagtttcgaactcctggcctcaagaagcaatcctcctgcctttacctccttagtgactgggattataggaatgagccactgtgcctggcccaaatagaacttaa

SEQ ID NO: 231187 - DNA, 606 bp, Homo sapiens
tgactctccccatctctttctttgatagtttactcttaattgacactgccttacacttgtgagtattgggctcaggccatgacaacctttcttttcccccatctcctctgcaagtcatgcacaaatagcccaatacttcattttagaatgtgcaagtgcctgccacctattgttttgttcttagctttttatgactgtagcaaaattagagacagatcagcaattagactatcaatcaaacatattttccaggtattgataatagcaataattccaaataataaagctaactgtagtatattatattattgaggtgataggaaagtctttttaaggaagcaatccactcaccctaaagggattttgcaaaaaggaaatagggaggaacagtggyattgagatgaccttgggcttatttcccaaaccaaactattttgtttttgagatggggtctcactctgttgcccaggctggagtgcagtggtgtgattatagctcactgcagtttcgaactcctggcctcaagaagcaatcctcctgcctttacctccttagtgactgggattataggaatgagccactgtgcctggcccaaatagaacttaa

SEQ ID NO: 231188 - DNA, 606 bp, Homo sapiens
tgactctccccatctctttctttgatagtttactcttaattgacactgccttacacttgtgagtattgggctcaggccatgacaacctttcttttcccccatctcctctgcaagtcatgcacaaatagcccaatacttcattttagaatgtgcaagtgcctgccacctattgttttgttcttagctttttatgactgtagcaaaattagagacagatcagcaattagactatcaatcaaacatattttccaggtattgataatagcaataattccaaataataaagctaactgtagtatattatattattgaggtgataggaaagtctttttaaggaagcaatccactcaccctaaagggattttgcaaaaaggaaatagggaggaacagtggtattgagatgaccttgggcttatttcccaaaccaaactattttgtttttgagatggggtctcactctgttgcccaggctggagtgcagtggtgtgattatagctcactgcagtttcgaactcctggcctcaagaagcaatcctcctgcctttacctccttagtgactgrgattataggaatgagccactgtgcctggcccaaatagaacttaa

SEQ ID NO: 231189 - DNA, 538 bp, Homo sapiens
ttgctgtttttagaattctttctttgtctttgacttttgacatttggattataatatactttggagatgatcttttcaggttgaatctattcgggaatctttgcacttcctgtatctagatgtgtatatctctcgtaagacttgagaagttttcagctattattgtattaggtagtttttccatgtctttgctcatctcttctccttctggaactctaaaaatttgaaagtttggttgctctatgctgtctcatargtcacataagccattgtctcctcctcttcctcctcttcttcttcttttcttccttctcctcctcctcctcttcttcttttctcttccttctcttctccttctcttcttctcttcttcttcttttcttccttctcctcctcctcttcttcttcttttctcttccttctcttctccttctcttcttctcttcttccttcttccttcatctgatgaggttattattaaagatttgtcttcaagttgagaaactctttcttctccctaatacagtctactattgaa

SEQ ID NO: 231190 - DNA, 529 bp, Homo sapiens
tctcttgctgtttttagaattctttctttgtctttgacttttgacatttggattataatatactttggagatgatcttttcaggttgaatctattcgggaatctttgcacttcctgtatctagatgtgtatatctctcgtaagacttgagaagttttcagctattattgtattaggtagtttttccatgtctttgctcatctcttctccttctggaactctaaaaatttgaaagtttggttgctctatgctgtctcataggtcacataagccattgtctcctcctcttcctcctcttcttcttcttttcttccttctcctcctcctcctcttcttcttttctcttccttctcttctccttctcttcttctcttcttcttcttttcttccttctcctcctcctcttcttcttcttttmtcttccttctcttctccttctcttcttctcttcttccttcttccttcatctgatgaggttattattaaagatttgtcttcaagttgagaaactctttcttctccctaataca

SEQ ID NO: 231191 - DNA, 552 bp, Homo sapiens
gactctccaattttaattaagctctctagggattctgatacacagggatgagcatcattggtgtaaaatgctaatttctaaattttcatgaggatcagaatcatctggagggatttttaaaacacagtttcctgagttcactccagatgttctgacttagcaggtctagggaggaacctaaacatttgcattcattattgttagttgtagagatagggttatagctatgttgtccagcatggtcttgaactcctgggctcaagtaatcctcccatctaggcctcccaaagcattgggagtgcaggcatgagccactgagcccagagcagaatttgcatttctgaaaagctcaggtaatgctgatatcgcttgttcatagataacctgttatatatgatatggtttggctgtgtcctcacacaaatctcatcttgaattgtagctcccgtaattctcatgtgttacgggagggacccygtgggagataattgaatcatgggggcagtttccctcatagtgtctggtggtagtgaataactctcacaagatctg

SEQ ID NO: 231192 - DNA, 654 bp, Homo sapiens
tttgttatacggcactagctaactgacatagaagattaagtaaaaagattatttttaagtaagtgaagataatagggactgggaataatggaagccacatttcactacttcaaaaaaattgtttagggttggtcatctggacgtattacatataacctgaatgagccagcatttatttactttctcaaaaataaattatatcacattggggtctctgaaatgacattttttgtgatattttctggtaatatagttgaagaataggtgaggggygtgtgtgtgtgtgtgtgtgtgtgtgtgtgtgtgtgtgtgttaaatttagtcaacagtccgtagacacccaggaagtctccaggagggaagacttcctggaagattctgttccagacaagaaacagatgacatttctagtgtgtaggtcatagacaaggctaaagcaacaatagatagtgccagtttcctattttaggcttataagatttatcagaagctaccagttacaggcctatcagcaaagtcacccaagtagtggggattgaggaaaggtggcagcaaggaaactactaattgtgctttttaaagcaactgcctcccaggaacatggacacgtagcatttatcttcatagagctattggaaggcccacaaaggaagg

SEQ ID NO: 231193 - DNA, 581 bp, Homo sapiens
aaggccctgctcttttagagctgacattctgctggggaagatgagcaattacttccttagaagtaggtgaccaaggagtcccagtctatgcttattgttctggcatgattattgatagtgtccatctttactcccagcagggtcccagtgaaatgacaaattatatggttaccatacttagaagggcatcagggcatgaggggccctagtcaacaggactttaagcttcttattccaactatcataagagcagctttacttcacctatgtttcctttttgcagtaacaatggttttgcacttttgaaagagtataattaatataccagcatactttcctagtcaattaaaaatatataagcatatggaattaactacaaaaagccccataagtcctttaataagccagacctcttctcagatgtattctctgtccactggtattcctccattacttccatttttaaatatttacatayatatactgtttttaatttataataatttttatatttttaaataaggtcataatatagtgtaatatagtacaaaatattagtataaggcaatatcataacaatt

SEQ ID NO: 231194 - DNA, 471 bp, Homo sapiens
atcagtaatttaggtttatatttttgttttcaatgactacagarttttccacagtaatgatggtgtggtaggtggcataatggaccccaacaatgtccctgaatctgtgaaaatgttaccttatgtggcaaaaaggactttgaagatgtgattaaggaatgatttatattcctttgagtaaacaaaggaatataaatcatcttggggcttgagatgggaaggttatcctggattatgtggctgggcccaatttaagcacaggagtctttattagtggaagaggaagggacatagatgggtcagagagttgtgacacaagaaggaccccacctccccactgctggctgtaaagatggaaaagaggctagaagccaaggaatgtgtcagcctctggaagctgggaagagccttcagcatacagctggcagaaaaataaggacctcagtcctacaatttaaaggaatcgaattc

SEQ ID NO: 231195 - DNA, 490 bp, Homo sapiens
cagtacatgcaccattactgtcatgagaagacgccaagattttacagagactttattatttatcaataaattaaaagggaagcctgctgtttatatcattcatgagaacatggctatgagctgggactgagtactgctaccaaggaaaatgtcactgctctaaacagagaatgggccttttgtggcaggactaggcccaacaggggtgcatgtatgttttaggtccttattcgtggccaggtctgtacctggttagatttttactcaggtccagggaagtggctgtcccccattactggaagtagtcagttgttgtcagtggtcactgaaactagaagccctggcatctactcccagctcgactggkcaagtaactctaactctttgggcaagtaactgaaagtctccgtttttctgggctcaggttcctcaaccataacatgagagtttgggactagagtagcagccctaaggcgttatgttctatgat

SEQ ID NO: 231196 - DNA, 458 bp, Homo sapiens
agtcctttgttggttatccatgtatcaaatatccttttccctctatgctttgccttttctttctctgatggtgtcttttgatgaacgtgcttcttcttttaaacattgtctaatttattaatcacttcccctatgcttatggcattttgtgtcttgttatatgaaatctttcatttcactgaagttgtaaagactttttaaatrctattttgtaaaatcttccagttaaggtggggatacaacagttcaccatcgggcagctgaagttaagccactattgaggaaggggagagagaaaatgtggactgtggatttcaggttagtgacacccattttacttttgagtgcttagaaggatctgttcaaggaagcaaaagtatatagaaagtaggataggtgcagtaggctggtccagggttctatggttaggtcatgcaagataagtgttttattttttt

SEQ ID NO: 231197 - DNA, 659 bp, Homo sapiens
ggaaaacacaatttgggtaaaatttaagacatgaaagaagatggaagaaattttgaaattgargtttagaatgttttgcagatttttcattcaagagcaagggttaccaagcttatgggaattctttaagtttcatagtatctcttttaccctgttccttgcccttccaagtaacgtacttattagtatgttatagaatattagagatggacgatctcaaattcagccttttcatttttcaggtggggatactaagactaaagaagaatgaaatctttgcctgtggtcacagagctattcagtaaaataaaataacaaaaactaggtttctgaatatccatccatggtttctaaaagtgctatagagtgcacatttgaataaaagtaaattgcttggagaaatttctgacaatttgagatgccattagggataactggagacatttatagttattataaaatcaggacaagtgatagaaaagtccattaaagtgtgaccaactctccaattctagtctcacataaaaacttaaatcttttaattaataaaaaactttaaaaatacagtattaaaaagtttaaaaatatatgaaacactttaataggcactttacaaaagggatacacaaatggccaataaatatgtgtaaaatgtgctc

SEQ ID NO: 231198 - DNA, 616 bp, Homo sapiens
catagggacttaataaacggtagcttttagtactattgtggtcactgttcttaatagtgtagctttgaagccaagttctcatcttgtttttctgtcccttttaccttcaagcccactcttgttattcctcctgccctttttgatgactcctttagtagacaggagatggtgcataatttcatccacttgccagctcccactggtcagttgggagtgttgatgaggagtccaggggcacatccgacttacaggacagcaaggccatgattggtcaaaacggcttccggggaaggacgggataagtggggcaacatcgcacaatgttgtcatctctgctttcccactctctatactcccattgctcagaggtgtctaactgctgcgtctgtcatcccactgaccagatccttcttgtattctttccaagaaagctagttttcaactaatttaagcctcyccatgaacagtagtcatgactctcagggacagaaactattgtactgaattaactccagagatattcttccctaatcaccttttctagtcattaattgccatgtactcccgtaggacttggggaagcaagaaggtgatgaggacaaagggacgtgtttgc

SEQ ID NO: 231199 - DNA, 616 bp, Homo sapiens
catagggacttaataaacggtagcttttagtactattgtggtcactgttcttaatagtgtagctttgaagccaagttctcatcttgtttttctgtcccttttaccttcaagcccactcttgttattcctcctgccctttttgatgactcctttagtagacaggagatggtgcataatttcatccacttgccagctcccactggtcagttgggagtgttgatgaggagtccaggggcacatccgacttacaggacagcaaggccatgattggtcaaaacggcttccggggaaggacgggataagtggggcaacatcgcacaatgttgtcatctctgctttcccactctctatactcccattgctcagaggtgtctaactgctgcgtctgtcatcccactgaccagatccttcttgtattctttccaagaaagctagttttcaactaatttaagcctctccatgaacagtagtcatgactctcagggacagaaactattgtactgaattaactccagagatattcttccctaatcrccttttctagtcattaattgccatgtactcccgtaggacttggggaagcaagaaggtgatgaggacaaagggacgtgtttgc

SEQ ID NO: 231200 - DNA, 500 bp, Homo sapiens
ttgaaaatatgaaggacatggtattcccactaaaaggatgtaatcattttggattaaatgtgaataaccatctggatctacaatcagccatccagggtagacacccaggtgttatcaacctascacctgcaatgaagagagggcattggaggggcgattcaaatcagtttccacttttttaaacaggaattaaaatagaaatgtattttgtcagactggaaaatgccattttgaaaaccataattgtgaactgcattttcccaacaagttatgatggtagacacccacaaacagctgtttgtggcttccttgagtataggaacaacacaagaaagaaacaagctaacagtgtatatagtctctcccaggtgctctagccaccacctccagcaagcctggaaaccagctgacctgtgaaagtccagccaagtgactgcttcagaagtgattagagatggccaataaccgcctctcaggagttctgctgaactcagctaatg

SEQ ID NO: 231201 - DNA, 493 bp, Homo sapiens
gtgcaagcatatttaaaatattttgataatacatttactgggataggttcattttatgtttgcataycctatgatttgcaatcaagtagaacaattagattgttgcacagacttttaaactgcagttaagagtttcctggagatgggaagtctgtatggagataaagcagaaattatatttcttttttattgctcttcaattttcaatttatattctaaggtgattttttatttaaaaaaattattagattcatagaagagaataggatccatgtgaataagaggaagcctacttatttatcagattttgtgttaataacacacactgcaaaaaaagaaaaaaataaggctgcaaatggtccctttgataaagaaccctatgggatatttttgcaaaagatggaaaagtctaacttattcaaaaaataacaaatatttagccacccactgagacttaagtgcatctattccaatcacaataattcttagagga

SEQ ID NO: 231202 - DNA, 591 bp, Homo sapiens
tggccacgccactggctggggtcctcttccgacgtgtggaagctttgatgttttgttcttgcaataaatcttactgctgctcactctttgggtccgcagcatttatgagctgtaacactgaccgcaaaggtctgcagcttcactcctgaagtcagcaagaccacgactccactgggaggaacgagtggaacgaacaactctggacgtactgcctttaagagctgtaayactgaccgggaaggtctgcagcttcattcctgaaatcagcgaggccacaaacccaccagaaggaagaaactccggacacgtccgaatatcagaaggaacaaactccggacgcaccatctttaagaattgtaacactcaccgcgagggtccgcagcttcattcttgaagtcagcaagaccaagaacccaccaattccagacacaccgccaccacatgctggcaaagatgtgcggaaactggatcactcatacattgcttatgcgtatgtaaaatagtacaaccacactggaaaacagttgtcgatgtctttaaaaactaaatatgcaattaccatataacccagcaatttctctcctggacatt

SEQ ID NO: 231203 - DNA, 656 bp, Homo sapiens
cttagtgtgtggaacatcttgtcctagacattgtacttgtattaattggtttattttcatatcaactttctgaagtacatgttattatttgatccattttatagatgaataatttgagacacaaaagggttaaatagcccaggtgcagtggctcaagcctgtaatcccagcactttgggaggctgaagcgggtggatcactaggtcaggagtttgagaccagcttgcccaacatggtgaaaccccgtctctactaaaaatgcaaaaattagctgsgtgtgggggcgtacccctgtaatcccagctacttgggaggctgaggcagaagaattgcttaaactcgggaagtagaggctgcagtgagccaagattgcaccacaagaaaaaaaaagggttaaataatccacaaaagttctcatggacagcaagtgtccacgtggtatagagtcctaatttttccagtcttagcctgtgctgttatccactctaatatgctgtgttctctatgcagccttgctaaggagtgacctgcagtcattaccatttgttggctctttagagtgatataaggaatgcctctgttgaggaggctaattgtcctaggactctgggtttctgctaccaggaaaatatatatacacatttaaaaaaaaaaat

SEQ ID NO: 231204 - DNA, 656 bp, Homo sapiens
cttagtgtgtggaacatcttgtcctagacattgtacttgtattaattggtttattttcatatcaactttctgaagtacatgttattatttgatccattttatagatgaataatttgagacacaaaagggttaaatagcccaggtgcagtggctcaagcctgtaatcccagcactttgggaggctgaagcgggtggatcactaggtcaggagtttgagaccagcttgcccaacatggtgaaaccccgtctctactaaaaatgcaaaaattagctgggtgtgggggcgtacccctgtaatcccagctacttgggaggctgaggcagaagarttgcttaaactcgggaagtagaggctgcagtgagccaagattgcaccacaagaaaaaaaaagggttaaataatccacaaaagttctcatggacagcaagtgtccacgtggtatagagtcctaatttttccagtcttagcctgtgctgttatccactctaatatgctgtgttctctatgcagccttgctaaggagtgacctgcagtcattaccatttgttggctctttagagtgatataaggaatgcctctgttgaggaggctaattgtcctaggactctgggtttctgctaccaggaaaatatatatacacatttaaaaaaaaaaat

SEQ ID NO: 231205 - DNA, 656 bp, Homo sapiens
cttagtgtgtggaacatcttgtcctagacattgtacttgtattaattggtttattttcatatcaactttctgaagtacatgttattatttgatccattttatagatgaataatttgagacacaaaagggttaaatagcccaggtgcagtggctcaagcctgtaatcccagcactttgggaggctgaagcgggtggatcactaggtcaggagtttgagaccagcttgcccaacatggtgaaaccccgtctctactaaaaatgcaaaaattagctgggtgtgggggcgtacccctgtaatcccagctacttgggaggctgaggcagaagaattgcttaaactcgggaagtagaggctgcagtgagccaagattgcrccacaagaaaaaaaaagggttaaataatccacaaaagttctcatggacagcaagtgtccacgtggtatagagtcctaatttttccagtcttagcctgtgctgttatccactctaatatgctgtgttctctatgcagccttgctaaggagtgacctgcagtcattaccatttgttggctctttagagtgatataaggaatgcctctgttgaggaggctaattgtcctaggactctgggtttctgctaccaggaaaatatatatacacatttaaaaaaaaaaat

SEQ ID NO: 231206 - DNA, 613 bp, Homo sapiens
cagtgtgctgagttcaaaggtactgcagaaggatgaggtgtgtggcaagagggagggaggaaaatcaaattagaaatggcagatgtagagtgttcagactctagactcagagggacttgggattagaccccagctctactgtttattcaccatgtgtggtcaggaaaggttaacgctttacatcagattcttacccactcaatgaaggctcagatttggttataaggattaagaaagaggccaggcacgatggctcatgcttgtaatcccaccagtttgggaggctgaggtgggcaaatcacctgaggtcaggagttcgaaaccagcctgaccaacatagtgaaaccccatctctactaaaaatacaaaattagccaggtgtggtggtgcatgcctttaatcccagctactagggaggctgaggcaggagaatcacttgaacctagggggcagaggttgcagtgagccgggatcatgccattgcaccccagcctgggcmacaaaagggaaactccatctcaaaaaaacaaaagaaagaaagacaggtatatgaagtgtctacttggtgagcactcaattgatggcaattattgtgagtagtataatctaaaac

SEQ ID NO: 231207 - DNA, 607 bp, Homo sapiens
ggatacaacaatagctataacatgtgcatattcaacaattttaccacttgagcctccatcttgagaaactttatattaaaaattatttgcaaaatttttgtatgcttacttataatgaagaattagaaataatcaaaagatacagtgaaggaactgcaaaatagattatgccaaatctgtgtaaactacattatgaaataccaaaaaagatgcttatgtaatatctaccaaaatataataaatgactcaaaataaatgatacttataagaaaacaaaattaaaaattgtatagtaatataaccttattygtgtaaaatatgctgagaaaaagtggatgttaataaataacaatatttaaaattatttgtctttaggtgatccttttctttatatttttctatatcacacattttccaaaataagaacattttcctttctaaaatttttttcaactttgctgtttctatgtcattttgttttgacactgaaatgttaggttatcaggaattagaaagactttgaagtaatttattttacttttttttctttttagaaattctgtggcgtaacaagttgctgtcacactggctttttaaaatatatgta

SEQ ID NO: 231208 - DNA, 452 bp, Homo sapiens
tctatgaaataatgagaagatgttcatttcctttataaatacaataaattccaataacaataggaaaaataatactttttaaatgaaatgtaagyattctgacttctggctaaaaacctagggttatttttcaggcccaaccacaggcaattgcaaaggcttcgccagacaggcctcgtggggaaagctgccctccccacaccaggcttggggcatagcccaccgatttcagtctcttcaggaaggggcagtcaaggactcgggcatccctgcattcccagcttaggtgcttctatctggaagtctctttatggggaactggggttcctttgaggccccctctcaggtacctctggacttatcagaagaaagggaggtagcttgaagacccttttctccactctgactcagttctcagtacttttcaactcctagaacttccccttctccta

SEQ ID NO: 231209 - DNA, 452 bp, Homo sapiens
tctatgaaataatgagaagatgttcatttcctttataaatacaataaattccaataacaataggaaaaataatactttttaaatgaaatgtaagcattctgacttctggctaaaaacctagggttatttttcaggcccaaccacaggcaattgcaaaggcttcgccagacaggcctcgtggggaaagctgccctccccacaccaggcttggggcatagcccaccgatttcagtctcttcaggaaggggcagtcaaggactcgggcatccctgcattcccagcttaggtgcttctatctggaagtctctttatggggaaytggggttcctttgaggccccctctcaggtacctctggacttatcagaagaaagggaggtagcttgaagacccttttctccactctgactcagttctcagtacttttcaactcctagaacttccccttctccta

SEQ ID NO: 231210 - DNA, 628 bp, Homo sapiens
gatgttttatattcacaaatttaacaaatatgagtatctctcttatgccaggcattgtcctgacacaaggaatatgagcttttgatgaaacagcagtgattctaccatcatgaagcttatttccttcatggtctgctaggcaaaacaaactttaaaaggcaaatagtaaatgatagttttcaagttgtaacgtgttctttggataaagcacacatgggaagagatagataatgatatagaaggaagatggtttcttttacaatttttcagaagtgacaattaagataaaacttgaaaggtaaaaagaaataatagaagcaaagagtgtgaaagaagcattccatgcaaaactgcaaatatgcccaaagcttctaccataggaatgagcttgtcatgttcataaataaataaataagctgaaataaaagtaggtgatatggtttgggtctctgtccccacccaaatttcaagttcaattgcagtccccagggttggagrtagggcctcatgggaggtgactgaatcatggtggagggttctcatgaatgggttaacaccatctccttggtactgctcttgtaacagtaagtgagttaccataagcgctggttgtttaaaagtgtgtggc

SEQ ID NO: 231211 - DNA, 534 bp, Homo sapiens
ttatccttcatatcattcatgaagatgtgaattaatttctaattaatggggggactaacaaaaatattacagaacagtgtgatggtgttattaactacactggatctaaacaaacacaaaatatwctgtttcataatatcaactgtgtttatagttgctctattttggtacaaatataagagatatgttggtataataattatagtgtatgcattatggttttcaattatttacttgaaattattcatttgtattatgtttttcaatgatttactttttattatagtgagtattgtggtacaaatattatgctttatcatttattttttagataaatatttatgcagtatttaaatcattttatttatataaaaatgctatttgtttactacagcttgtaaagaagcacattcccaccaataaaaaattatttagatgaaataaacctgaggtatttcttgaagcattccataaaaattgttgccacatgtatataatgaatggtgacacaataagaataggtataaaatcact

SEQ ID NO: 231212 - DNA, 280 bp, Homo sapiens
taatatttagcacagagttttctcctctccacctgtagaatgtataaagaatatcaaaaaagtagtataccgggaaagattatcaagtcccatagctttatgatcaaagttatgttttaagtccaatagatgaagaaagatatgttatcacttcttctccaagcaaatcaaaggaagaaatattttatagttattaaaatcactaaatcactatttctctctctgtgttgctctatttcarctttttactcacttttagtcctcttttaagcctgtttta

SEQ ID NO: 231213 - DNA, 530 bp, Homo sapiens
tttcctttgggtatatatcaagtaatgggattgctggattaaatggtaaagaatttttgtttctatattcataaggaaaactggtgtgtaattttgttttacagtactatagtattatgtctgggtttcttaacagagtaatgctaaactgagggaatgagcttgaaaatgttctcttatgtttttggaatagtttaagaatgatcggtatgygtgcctttgtaaattgcttggtagaattaatcaacaaagcatatagtcctcagaacttctttgttatgaggtcaggaacagatgttaagttggttcattttaatggtggaggtaggggctaccagcctagaaatgcacggagacattgaaagattaaaactcatggaagtggattcctgcctggtgtctccaaaaggaacatagccttgtggatccattttagattctgactgccggagctacttgagaataaatttgtgttgttttaagccaccatgtctgtagtagaatgttataacatcattaaggaacgaata

SEQ ID NO: 231214 - DNA, 530 bp, Homo sapiens
tttcctttgggtatatatcaagtaatgggattgctggattaaatggtaaagaatttttgtttctatattcataaggaaaactggtgtgtaattttgttttacagtactatagtattatgtctgggtttcttaacagagtaatgctaaactgagggaatgagcttgaaaatgttctcttatgtttttggaatagtttaagaatgatcggtatgtgtgcctttgtaaattgcttggtagaattaatcaacaaagcatatagtcctcagaacttctttgttatgagrtcaggaacagatgttaagttggttcattttaatggtggaggtaggggctaccagcctagaaatgcacggagacattgaaagattaaaactcatggaagtggattcctgcctggtgtctccaaaaggaacatagccttgtggatccattttagattctgactgccggagctacttgagaataaatttgtgttgttttaagccaccatgtctgtagtagaatgttataacatcattaaggaacgaata

SEQ ID NO: 231215 - DNA, 530 bp, Homo sapiens
tttcctttgggtatatatcaagtaatgggattgctggattaaatggtaaagaatttttgtttctatattcataaggaaaactggtgtgtaattttgttttacagtactatagtattatgtctgggtttcttaacagagtaatgctaaactgagggaatgagcttgaaaatgttctcttatgtttttggaatagtttaagaatgatcggtatgtgtgcctttgtaaattgcttggtagaattaatcaacaaagcatatagtcctcagaacttctttgttatgaggtcaggaacagatgttaagttggttcattttaatggtggaggtaggggctaccagcctagaaatgcacggagacattgaaagmttaaaactcatggaagtggattcctgcctggtgtctccaaaaggaacatagccttgtggatccattttagattctgactgccggagctacttgagaataaatttgtgttgttttaagccaccatgtctgtagtagaatgttataacatcattaaggaacgaata

SEQ ID NO: 231216 - DNA, 530 bp, Homo sapiens
tttcctttgggtatatatcaagtaatgggattgctggattaaatggtaaagaatttttgtttctatattcataaggaaaactggtgtgtaattttgttttacagtactatagtattatgtctgggtttcttaacagagtaatgctaaactgagggaatgagcttgaaaatgttctcttatgtttttggaatagtttaagaatgatcggtatgtgtgcctttgtaaattgcttggtagaattaatcaacaaagcatatagtcctcagaacttctttgttatgaggtcaggaacagatgttaagttggttcattttaatggtggaggtaggggctaccagcctagaaatgcacggagacattgaaagattaaaactcrtggaagtggattcctgcctggtgtctccaaaaggaacatagccttgtggatccattttagattctgactgccggagctacttgagaataaatttgtgttgttttaagccaccatgtctgtagtagaatgttataacatcattaaggaacgaata

SEQ ID NO: 231217 - DNA, 590 bp, Homo sapiens
cctggaaataaatatacatttttaaatacagaacttgacattgtaatgtgctcctgtgaattattggtaataaaatagagcaattctttaaaagatgagaaatgcatatagacctatgaattagacaatatccggagaaacacattagaaacttcactttaatcctttaggcttttgtgacatacacaatgaaaacacaatgaaaacaagatacataccgtgatattaaaatactcagagttctgatattaagaacagacaagaatactaataaaatcttcatgtggtaattaaaatatatatatatatgtatcacgtatattgtggcaccaaataaagataaataaattgtgcttgtttgtggcagaaaagggaattaacagaacatttgtctccaaaatgaacatttgtatccaaaattatttgagatggtttacaaattgaacatgttagaaaacaggaaatttggtaatagaaactaaacaaaacatctaaatcaaaggagtagataacagtggagtttagttcattagtacaattggcttyacttttcctgttgcatagggtaaaaaagaaaatctgtttactta

SEQ ID NO: 231218 - DNA, 601 bp, Homo sapiens
tatagtgtacaactactagtcctagggcaaaaaggtattttatactcctcctcacaaagctgaaaaataaatctcaaaaggatcaaactgatcaaataaagtgsctgccaaaccaaaactcaacactctttttaaaagaaaataaaatccagatactcaacaatatttacaatactcagtgcacaatttttagatatgtgataaggcaagaacttgtatcctataaccagaaggaaagtcactgaatagaataaaaactcatgaatgacagaaatgatgaaataagaattaatggacttcagtatatatatatatacacacacacatacacacacatatatgtgtgtgtatatgtgtgtgcatgtgtgtatgtatatatatgacttggaaaaaatatgaatgtaatcaaagtagaaacaaaaactataagaaagagccaaatgaaaattctagacctgaaaaatacaaaatgtgaaataaaaaccttatggctgaatggcagattagaaactacagaaaaaaaattgatcaagccaatgaacctgaataaagggcaatgaaaacaatttaaattaaaatatagttagcaaaaaatgccaaa

SEQ ID NO: 231219 - DNA, 601 bp, Homo sapiens
tatagtgtacaactactagtcctagggcaaaaaggtattttatactcctcctcacaaagctgaaaaataaatctcaaaaggatcaaactgatcaaataaagtgcctgccaaaccaaaactcaacactctttttaaaagaaaataaaatccagatactcaacaatatttacaatactcagtgcacaatttttagatatgtgataaggcaagaacttgtatcctataaccagaaggaaagtcactgaatagaataaaaactcatgaatgacagaaatgatgaaataagaattaatggacttcagtatatatatatatacacacacacatacacacacatatatgtgtgtgtatrtgtgtgtgcatgtgtgtatgtatatatatgacttggaaaaaatatgaatgtaatcaaagtagaaacaaaaactataagaaagagccaaatgaaaattctagacctgaaaaatacaaaatgtgaaataaaaaccttatggctgaatggcagattagaaactacagaaaaaaaattgatcaagccaatgaacctgaataaagggcaatgaaaacaatttaaattaaaatatagttagcaaaaaatgccaaa

SEQ ID NO: 231220 - DNA, 601 bp, Homo sapiens
tatagtgtacaactactagtcctagggcaaaaaggtattttatactcctcctcacaaagctgaaaaataaatctcaaaaggatcaaactgatcaaataaagtgcctgccaaaccaaaactcaacactctttttaaaagaaaataaaatccagatactcaacaatatttacaatactcagtgcacaatttttagatatgtgataaggcaagaacttgtatcctataaccagaaggaaagtcactgaatagaataaaaactcatgaatgacagaaatgatgaaataagaattaatggacttcagtatatatatatatacacacacacatacacacacatatatgtgtgtgtatatgtgtgtgcrtgtgtgtatgtatatatatgacttggaaaaaatatgaatgtaatcaaagtagaaacaaaaactataagaaagagccaaatgaaaattctagacctgaaaaatacaaaatgtgaaataaaaaccttatggctgaatggcagattagaaactacagaaaaaaaattgatcaagccaatgaacctgaataaagggcaatgaaaacaatttaaattaaaatatagttagcaaaaaatgccaaa

SEQ ID NO: 231221 - DNA, 464 bp, Homo sapiens
atgtgttatgtgtatacatgtgtgtatagttcacagtgcctaagatgagttcacacacacacacacacacacacacacacacacaagaccacacagcagtgaagtctatacccagacaaagcaggcttatgttgaccttccactaacacagtttaaatgcttttcccttcttaaatgcttcaattaatkaaattagctgttttatctattatactctgagtttcatatttttaaattaacatattacaattttaccctcgaaaacctaccaaaaacagggaaaatgagaatttttacatattcatacctctattgcaatgtatgctttattacaaaaaactagtatgtctaatttcagttgttattaaatacattattcttttattcacttatctaactttatttattgggtaccttctactcgcaaacacgtttgtgtggtactgctatatactgaatgtttg

SEQ ID NO: 231222 - DNA, 329 bp, Homo sapiens
tatatttgctccccttactgaggcagattagaggtttttcttcatcagtttatgaaccaacacaatctgatttgtatgactgctttgggacagacttgatacccatggattttaacatagaatctgaataccaatcaattctcatatcctgaatcaytgtttatttaaagaaatgaaagatgggccaaaggttaaaaattctccttttatcattttctttatagtcaaagcaaaaggggtggttcatctacagtgattctttttcagaaaagtaatgtctttgatgtttaagggaggaaacaagccttctgaaaactactattctcact

SEQ ID NO: 231223 - DNA, 659 bp, Homo sapiens
ttaaaaataaagaaaaagatagataaatagacacataggtagatagataaatacatacatacatgcatacatatcagagacagatcaaacaaaataagattctagtgttatcattctcactgtgtcgaaagagactacagtgtctctatccagaaatagctctaccctgaatttgatcttatcttgttgctaccttttgtatcctgttatttcaatgccatttacttattttcctgtaattcccataaactaacatattaaaattctgtttatgattgctcatgtttaggacattaagttcagtgtcaacattgtttttaaagttgtaaggtattctttctctttttgtactatatactaaaaatactctattttaagaatkgtatttaaatggtatttaaatattccattttaagaatggtattctctgctaatgtgtacatataatactcctgagaattatcaggaaatggattttctctgccatttaccattccaggatgagcaattctatattcacaatgacttcaacaggaaaaggaaaatttttagtttcagcattatcttaaaaaaaaaaaagtcatccctatcatgcagtgattattgataagctgacaaaggaataaaaacagtaaaacactaacccacctgcagcctcc

SEQ ID NO: 231224 - DNA, 659 bp, Homo sapiens
ttaaaaataaagaaaaagatagataaatagacacataggtagatagataaatacatacatacatgcatacatatcagagacagatcaaacaaaataagattctagtgttatcattctcactgtgtcgaaagagactacagtgtctctatccagaaatagctctaccctgaatttgatcttatcttgttgctaccttttgtatcctgttatttcaatgccatttacttattttcctgtaattcccataaactaacatattaaaattctgtttatgattgctcatgtttaggacattaagttcagtgtcaacattgtttttaaagttgtaaggtattctttctctttttgtactatatactaaaaatactctattttaagaattgtatttaaatggtatttaaataytccattttaagaatggtattctctgctaatgtgtacatataatactcctgagaattatcaggaaatggattttctctgccatttaccattccaggatgagcaattctatattcacaatgacttcaacaggaaaaggaaaatttttagtttcagcattatcttaaaaaaaaaaaagtcatccctatcatgcagtgattattgataagctgacaaaggaataaaaacagtaaaacactaacccacctgcagcctcc

SEQ ID NO: 231225 - DNA, 452 bp, Homo sapiens
tttctcttaagtgggatgtgtatttcccctatgataatttgaattattttttggcaaatactcccactactactatgaatggaatatgtactgccttaatccttgatgttaggcttgttcatatgattgctcttcccaaaggaatgagaatatgacacatttaggtgtgttacatgtgcttgttctgtttgcctcagctgtcatgtgaagagcatgctatagataatctttccattttagcatggggcccagcaaaaaaatatgtggagaaatcttgaactcaatttgcagcctggaaataaagcccaggaaagtcaaagcytgaagacagagccttctacactgagtccagcttagatcaggcaaatcacagtgaacctgtagaatgtacacatgaaaataaatgctttttgttgtaaaccattggattttagcatagttaccaatgcacc

SEQ ID NO: 231226 - DNA, 629 bp, Homo sapiens
cttgacctggccagttatgatggttttactttggtaaggaaatgcactggataagaaagaggttttggatcaagaagtgcaaaccagtcaccagtattatgtgaactttggtaagattttattgctagtattgtttgtcttacagctgrtatccttgctcattgttttttttaggagttctgggtaaaataactaaatttgaagaataattaaatactattaatcaattttaggttttaaaagcacctcttcagagtgagtttacacctgacaattgaaactggtaatcttgaaaatgctctcaggtgtatgcattacaaataaaattcttaggagcagtgttgtgtgccttgtagtcccagctacttgggaggctgaggtgggaggatcaattgagctcaggaattcaaggccagctcgggcaacatagtgagaggcccgtctcttaaaatctcagccaaatagaagcttctttaacaattaatttatgtaaaatacttatttccttctgtcccttgatgtgtgctagattgtgtttacatttaattgatcttcggttagaaagccaccctatgtattaaaaaacagccattaattttgctacacattcagttgaatttgacagtaat

SEQ ID NO: 231227 - DNA, 451 bp, Homo sapiens
aagctttattattcacaaagtaccttcttttattattaaatccattgtcattaagaaaatttcacgggaaatgtatcaatgtaccaaaaatatctatggttttaagttaactattaaacatgaacattccccttctggtggtatattataaattggtacaagttctaaaatacctttctctaaatgagataatcagaatatcttagaatactccatgctaccatagcatattactgtattaaaataccaattcatgaggcacattacagcatttttcactaaatatatatatatatacttgtayttagtaatgttgacaatatcttaaagatgattactgaatactattttacacagctttgctcttaagaaaaaagagtataatttgatggcatcattttgtaactatcttagaaggggcaaaagaaattttcagcttcctagtcatgtc

SEQ ID NO: 231228 - DNA, 609 bp, Homo sapiens
aaaaaggaacactgcttataagcaatcatattgctgttactatgcactaactttgaatggaaaatatttaaatcctatgccttaatcccctcttctataaggacatgagtcataccggattagaattctaatgacctcgctttaacttaatcaccttttaaacaattatttctccaaatgcagtcacattctgaggtactgagagtctgggcttcagcatttgaattttagggggacaaaattcagcccataataacgcctaatgccaygtccattgctgacattcctgctgagaaatggtccctaaaaaagagaagctgtggtcagtcatggtggctcatgcctgtaatcctagcactttgggaggccaaggtgggtggattacttgaggtcagaagttcaagaccagcctggccaacatagtgaaaccccatatctactaaaaaatacaaaaattagcttgtgtagcacatgcctgtagtcccagctacttgggaggctaaggcaggagaatcacttgaacccaggaggtagaggttgcagtgagcggaaatcacaccactgtactccagcccgggcacccagagcaagattctgtcaaaaaaaaaa

SEQ ID NO: 231229 - DNA, 657 bp, Homo sapiens
ttaggattttgaaggatgagtagaagttagcttggtaaagaagtaaaaaagatattccaagcaaaggggatggtatgtacaaggcataggcacagaaaaaaatcacagcaagtttatacaactgtgagcagttttgcagagctgaaggataaggaaataaagaaagtggtaggaatattgtaaaagacattgaaagatttttagaatgtgggatggtcttaaaatatgtcagtgaattttttcacagtcctccaaaggtggttcctaattccccaacccttgaatgtgaaccaaacttaatgactcacttctaacgaacagaatgtggcacaaagtgatgctacgtgacttctgaggctaagtcataaaaaggttggcttcggcatggctctttctctcctgggtgctcgctgcagagaaagccagtgycatgctgtgagaacactcaagcaggctaagagaggaccatgtggtgaggaacaaaggcctccttcaatagccagcatcaagtcgccagctacaggagggagccaccttggaggtggattttccagctccattcaagccgttagatgactgcagccccacgtgacagcttcattgcaatctcgtaaaagacctttagccagaaatacccagctaagcaacgcccaaagt

SEQ ID NO: 231230 - DNA, 544 bp, Homo sapiens
gctgtatatgcactggctagacttctagatatgttgcagtttattctctgtataaacagatcagtgagtttccaaaagaaaatgccttcagtaccacaaaattaagaaaatattttgaaaacattgattaagccctccgctatttctgcaaactgagccattttccatcatgagatgagaaagtcaaacatgcagtggaaagacaatatgcagggtcatcaaacaatttgaaggaaaatattcaaaccacctccaagatcaacccttgttttatctctgcccattatttgaattagtgtataaatgcaatttttactgaatttttgtyaaatataggaaatacagatttatttttcatttttgtgggtagtttttcagaataaagttttaatccaacctttcttcctacttacccccaaatgttgatcaccttgtaagttctcttcatgtggacttttcctgataccaatgattatggataaaaatgacctcctagctgtgtattaacctaaatctcactacagtaatttttcacatgcttgtg

SEQ ID NO: 231231 - DNA, 453 bp, Homo sapiens
gcttagcactttaaatgcttattaaaagaaacagaaaggagggaggaatgcaacttatttagctatcggattagttattatgccattacctccctgctgtggaacaaccatcctgccctttcaacagtctttgcattggtagccatggggctaaaaccgtgctcaggactaagttgcagtggtggaggggccttcaagtgacctcatcgctgggagacctcatctctccaagaccttgtccttagaaatataatccacctgttttcttccctcaaccagagtccacacctggaatagtcactggataagtcaatgctcyacttttccctttcatcaggatggcatcccatatgtgcaagggaagaagtgagtaggagcaaggttaggagtaaggaagtgatggagaaagtagatattgcttccaagaggtgtgtccaggagtcctaagaacca

SEQ ID NO: 231232 - DNA, 222 bp, Homo sapiens
aagcccactaaaaaccacacaactacatggaaattgaacaacctgcccctgmatgatatcttggtgaataatgagattaaggtggaaatcaagaagttctttgaaatcagtgagaacaaagagacaatgtaccagaatctctgggatggtgctaaagcaatggtaagagggaaatttatatcactacatgcccacatcaaaaagcttgaaagatctcaaatc

SEQ ID NO: 231233 - DNA, 632 bp, Homo sapiens
ccattatatttctcctgctgagtagcacatgcaaataaaaagttcctgcagattaaagaaattcttttttaagaaacaaaataaacttgaaataaaatcatctgctatcagtgttagaagctggcatttagggaaaatatgtatgtatctgtgatgggtaatactgagtgtcaasttgactggattgaaggatacaaagtattgatcctgggtgtgtctgtgagggtattgccaaaggggattaacatttgagtcagtgggctgggaaaggtagactcactgttaatctgggtgggcacaatctaatcagctgccagcacggctagaatataaggaggcagaaaattttgaaaagagagactggcctaacttcccaggctacatctttctcccaggctggatgcttcctgccctcaaacatagaactcccaagttcttcagttttggaactcagactggctctccttggtcctcagcctgcagatggcctattgtgggaccttgtgatcatatgagttaatacttaatgaactctgctatatatatatatatatatatatattccattagttctgtccctcttgagaaccctgactaatacagtatctaaacatgtagccctcattactcat

SEQ ID NO: 231234 - DNA, 591 bp, Homo sapiens
aagcttccagagctcagttgaggctaactcccaaggaggcaattgatggacaaagtgctaactcttgaagttcagtggtcataagtggccactaagaccagggtactgtgctagattgcacctgccccgtggtcctgctagtgagggagacttccagccctctgtgccctcttggcctctcacatgctgctcatgcacacgggctccctatcttccacacttccttctcctagacactgaaagtcatttagcttcttggtgtggaaaaacatcactatacaagtatacaaccaaatatttatttcttttaggtcagatagctgtttgcttgtccattttgttttactgtttttgccttgctttggggcctcttttctgactctgctgtgaatgactgaaactgattktggaggaataaaataattttcagtgaactcagagacatgcaaaaaattctccatgttaatactttaaatatgatcccatgataataagaaataaagatttctaccttcaatccagatcaaaaaccaaatataaatatcctctttaacatatatttggtattttgacatatggacaaccccttgt

SEQ ID NO: 231235 - DNA, 579 bp, Homo sapiens
ttgttccttctggagatgctgagggaaaatctgttccatgccccttcctggtttgtgggagttgctggcaatccttggcattccttggcttatggatgtataattttaatctctgcctctgtctttaggtcactttttcctctttgttttctccccttctctcctcttgtaatagcatttgtttttggatttaggcccaatctaatccacaatgatctcatctccagatcttaattacatctgcaaagacgcatttgccaaatgtcacactcacaggtttgggaggacacctcttttgaaggacctccagtcaacccactacattatcaaagatgggtttcctaagcatgcccatgggkcttgattccctgtaacctgaattcacatgtaattctttggtgaccacagttaaaaccaacattctataactcaagaactttgtatccctaaatctacatgattcaatcaattatttgttagagcactgcattcatattttttttctaatttgttgttttataaacttgttattatggaaaatttccaacatccacaaaagtagagagaatagtataatgc

SEQ ID NO: 231236 - DNA, 579 bp, Homo sapiens
ttgttccttctggagatgctgagggaaaatctgttccatgccccttcctggtttgtgggagttgctggcaatccttggcattccttggcttatggatgtataattttaatctctgcctctgtctttaggtcactttttcctctttgttttctccccttctctcctcttgtaatagcatttgtttttggatttaggcccaatctaatccacaatgatctcatctccagatcttaattacatctgcaaagacgcatttgccaaatgtcacactcacaggtttgggaggacacctcttttgaaggacctccagtcaacccactacattatcaaagatgggtttcctaagcatgcccatggggcttgattccctgtaacctraattcacatgtaattctttggtgaccacagttaaaaccaacattctataactcaagaactttgtatccctaaatctacatgattcaatcaattatttgttagagcactgcattcatattttttttctaatttgttgttttataaacttgttattatggaaaatttccaacatccacaaaagtagagagaatagtataatgc

SEQ ID NO: 231237 - DNA, 423 bp, Homo sapiens
acccaataactcaatagaataataagcataatgtataaatagatggtttacccaaaaatgcagatgattcttaaatatatgaaatcatgctcctcctcttttataaaaagaaaaattccaattaaaactagactgacaaatcttttattacctgtgaarctggcaaaatccaaaagtatgaatctatacgctgtggagctgagggaaaaagatgactctcttgcattgttagtagaagtactagatggtacaatacatacagggggaatctggcaacatctaacaacaattaagtacgtattttgtcgactaagtaattttgctttcagaaatctattctaccaatacataggaataaaaagacatgtgtgcaaggttgtttggaaataacttcaagttcagcaagggaacagatttaataaa

SEQ ID NO: 231238 - DNA, 526 bp, Homo sapiens
agaatgggcagcttcctatgtcacataaaataataacaattaatgaaatttctgcagcaatgatgataatggttgctagtagataagtgtaagtgttcatttagatacaggtctggtctggcatcttcggagtgttgtctacctcagatacctttttttttcttagcctggcatcartgttagtcaaagaccaccttccagtccattcatgaggctcaaccttctttaaatgagacatgtggatccatgagtctatgctttcaaactttgtagcaaagggttagtaagaagtacctgataggaacctttccacttctattgaagggaaatctttagaagatgtcatttctagtagacaaaatattttggctgaagaccatgggtttgaggttcttttttgggggggagttcacaataaaaataatcttttgccaaattgtatttttttacttagttgtttcataaggccattatggtaatagaatatatctccctttagcattatgaattcatagatagtttcata

SEQ ID NO: 231239 - DNA, 558 bp, Homo sapiens
gactcctccctaactcattttatgaggccagcatcatcctgataccaaaatctggcagaaacacaacaaaaaaagaaaatttcaggccaatatccctgatcatcaatgcgaaaatccacaacttttaaaaaagtggtctgactttttgcaataattgcaaagcagagggttgggttcattttgaggtttatagggacattttagagacccagattggatatatagttgtttcaactgtaaactcagaaatttattagccttactcttttgtttgsactctttcctctttcttccttagttaaggtacaagacaaatgattgccaagattaaacaaattgtgtttgagaaatagcccaactacagcattgtcttatttctatgaatgctaatttctcatctaacccatttatgaaattggaattgaggagagtatcattttaatgattagcataactcacttcagataatcctgagtgtttaaatatattttttaaaatctcccaaaatatgacatcaccgactcatttggattttgttgacatggttttattctagtt

SEQ ID NO: 231240 - DNA, 481 bp, Homo sapiens
gaattctgatggcaataagttgccttaaaattgaatttctgggaacttagagcatgtaattatattaactgtgagtgaagttatartcacatcagaatcacatatttgttgatcactaggtaacttggattcagtaggtctatggtggtgctagggaatctgtttttaaaaagcaccacagataaactctctgatgcacaccccaagttgaaactcattgttttagaactatgtgagttctatggactaggaatcaccgaagtaaaggagatgatttagaccaagaagtcaaggacctaggtttcagaccagctaaccatttgacattaagcttaatcatttgaagaaaccggtggttttctatgaagtaaaaccaataggattgtgatcattgagtcccttccaatttggaaattatcagatacatgacaaaatgctgagtttttcaaatgtatcaggatccttgctaaggcaagggaaa

SEQ ID NO: 231241 - DNA, 485 bp, Homo sapiens
ctaggaattctgatggcaataagttgccttaaaattgaatttctgggaacttagagcatgtaattatattaactgtgagtgaagttatagtcacatcagaatcacatatttgttgatcactaggtaamttggattcagtaggtctatggtggtgctagggaatctgtttttaaaaagcaccacagataaactctctgatgcacaccccaagttgaaactcattgttttagaactatgtgagttctatggactaggaatcaccgaagtaaaggagatgatttagaccaagaagtcaaggacctaggtttcagaccagctaaccatttgacattaagcttaatcatttgaagaaaccggtggttttctatgaagtaaaaccaataggattgtgatcattgagtcccttccaatttggaaattatcagatacatgacaaaatgctgagtttttcaaatgtatcaggatccttgctaaggcaagggaaa

SEQ ID NO: 231242 - DNA, 485 bp, Homo sapiens
ctaggaattctgatggcaataagttgccttaaaattgaatttctgggaacttagagcatgtaattatattaactgtgagtgaagttatagtcacatcagaatcacatatttgttgatcactaggtaacttggattcagtaggtctatggtggtgctagggaatctgtttttaaaaagcaccacagataaactctctgatgcacaccccaagttgaaactcattgttttagaactatgtgagttctatggactaggaatcaccgaagtaaaggagatgatttagaccaagaagtcaaggacctaggtttcagaccagctaaccatttgacattaagcttaatcatttgaagaaaccrgtggttttctatgaagtaaaaccaataggattgtgatcattgagtcccttccaatttggaaattatcagatacatgacaaaatgctgagtttttcaaatgtatcaggatccttgctaaggcaagggaaa

SEQ ID NO: 231243 - DNA, 485 bp, Homo sapiens
ctaggaattctgatggcaataagttgccttaaaattgaatttctgggaacttagagcatgtaattatattaactgtgagtgaagttatagtcacatcagaatcacatatttgttgatcactaggtaacttggattcagtaggtctatggtggtgctagggaatctgtttttaaaaagcaccacagataaactctctgatgcacaccccaagttgaaactcattgttttagaactatgtgagttctatggactaggaatcaccgaagtaaaggagatgatttagaccaagaagtcaaggacctaggtttcagaccagctaaccatttgacattaagcttaatcatttgaagaaaccggtggttttctatgaagtaaaascaataggattgtgatcattgagtcccttccaatttggaaattatcagatacatgacaaaatgctgagtttttcaaatgtatcaggatccttgctaaggcaagggaaa

SEQ ID NO: 231244 - DNA, 573 bp, Homo sapiens
tcctcttttgaaccaagctaactttttactgtccccaaacactccacattctcttctgctttcacggtttgctcccttcatgcagtctctctaccatccttctgttgaaatcacatgctttctttaaggtcaacattaaaattaaaatcaatcttttcatttatcatgccaacacttcttatctctttgctttgaattcaaagaaamgctatcatctataccacaaaatttggcttgttattaaatattgtaattacaagggttttatctgtgtttgtcttgatgactactctttaaggtgaacaccattttatacttctgagcatctttcattcctagcacagtaataagatatgcaagaaagagtttctaattaatgtgtgcccaccacatgcatactaaatattgttcccacccccacatacataataaatattgcatttaatcatacatgcataagtcctggctaaagacaactctgttatgacctacttcattagtaatgcctttgtcctaaattttttgctactttagaaaaactcagaggaaaagaagcttcatttagtcaaaatt

SEQ ID NO: 231245 - DNA, 560 bp, Homo sapiens
cctcttttgaaccaagctaactttttactgtccccaaacactccacattctcttctgctttcacggtttgctcccttcatgcagtctctctaccatccttctgttgaaatcacatgctttctttaaggtcaacattaaaattaaaatcaatcttttcatttatcatgccaacacttcttatctctttgctttgaattcaaagaaacgctatcatytataccacaaaatttggcttgttattaaatattgtaattacaagggttttatctgtgtttgtcttgatgactactctttaaggtgaacaccattttatacttctgagcatctttcattcctagcacagtaataagatatgcaagaaagagtttctaattaatgtgtgcccaccacatgcatactaaatattgttcccacccccacatacataataaatattgcatttaatcatacatgcataagtcctggctaaagacaactctgttatgacctacttcattagtaatgcctttgtcctaaattttttgctactttagaaaaactcagaggaaaagaagcttcat

SEQ ID NO: 231246 - DNA, 560 bp, Homo sapiens
cctcttttgaaccaagctaactttttactgtccccaaacactccacattctcttctgctttcacggtttgctcccttcatgcagtctctctaccatccttctgttgaaatcacatgctttctttaaggtcaacattaaaattaaaatcaatcttttcatttatcatgccaacacttcttatctctttgctttgaattcaaagaaacgctatcatctataccacaaaatttggcttgttattaaatattgtaattacaagggttttatctgtgtttgtcttgatgactactctttaaggtgaacaccattttatacttctgagcatctttcattcctagcacagtaataagatatgcaagaaagagtttctaattaatgtgtgcccaccacatgcatactaaatattrttcccacccccacatacataataaatattgcatttaatcatacatgcataagtcctggctaaagacaactctgttatgacctacttcattagtaatgcctttgtcctaaattttttgctactttagaaaaactcagaggaaaagaagcttcat

SEQ ID NO: 231247 - DNA, 560 bp, Homo sapiens
cctcttttgaaccaagctaactttttactgtccccaaacactccacattctcttctgctttcacggtttgctcccttcatgcagtctctctaccatccttctgttgaaatcacatgctttctttaaggtcaacattaaaattaaaatcaatcttttcatttatcatgccaacacttcttatctctttgctttgaattcaaagaaacgctatcatctataccacaaaatttggcttgttattaaatattgtaattacaagggttttatctgtgtttgtcttgatgactactctttaaggtgaacaccattttatacttctgagcatctttcattcctagcacagtaataagatatgcaagaaagagtttctaattaatgtgtgcccaccacatgcatactaaatattgttcccacccccamatacataataaatattgcatttaatcatacatgcataagtcctggctaaagacaactctgttatgacctacttcattagtaatgcctttgtcctaaattttttgctactttagaaaaactcagaggaaaagaagcttcat

SEQ ID NO: 231248 - DNA, 573 bp, Homo sapiens
cctcttttgaaccaagctaactttttactgtccccaaacactccacattctcttctgctttcacggtttgctcccttcatgcagtctctctaccatccttctgttgaaatcacatgctttctttaaggtcaacattaaaattaaaatcaatcttttcatttatcatgccaacacttcttatctctttgctttgaattcaaagaaacgctatcatctataccacaaaatttggcttgttattaaatattgtaattacaagggttttatctgtgtttgtcttgatgactactctttaaggtgaacaccattttatacttctgagcatctttcattcctagcacagtaataagatatgcaagaaagagtttctaattaatgtgtgcccaccacatgcatactaaatattgttcccacccccacatacataataaatattgcatttaatcatacatgcataagtcytggctaaagacaactctgttatgacctacttcattagtaatgcctttgtcctaaattttttgctactttagaaaaactcagaggaaaagaagcttcatttagtcaaaattc

SEQ ID NO: 231249 - DNA, 551 bp, Homo sapiens
cagatgacctcactggaagctatgaaggtcaaataacccatcagagttacttttgagttgagtcaaaatagccaatgtttatccctctgccttggtcagtcattggatacagaccacctggaaaagggatttgaccttgagtgagggagttgtctgcagccaactgaggcaatcccagaaaagcctaacaggggaagcctgtcagctgacagcatgcccaacaggtgggggaacaagtccttgaagtgggatctaggccgtgtatcacggtgtccacataggccatgtatcacagtgtccacaaaagaccagaggcaggtcctgctaawcaagtgatcccatgaatcttttctcatgatttagcagatcagatcccagtactgctcactggtaatacaatatcccaaacaggcggctctcatgcaaggcctcttcttctctgctactgagaaacaacatgcaatcttggaaaatttcaaacacaacacatccaattcaggggagcaccagaaaaccagcaaacctgcagcaagcgtgatgtaactacagtg

SEQ ID NO: 231250 - DNA, 489 bp, Homo sapiens
taatttacatgtgagtttaacaaaaactagtggtgcaagggagaatggaactaattttttgtggagtattcatagtcataaagatacgaggcctgaagatatttgctttatgtagtttagccaagtgtaagatgcaaatgcaaaatatgtgggtgtaggtgcaggccaagtggtcgatgtagtagtataagtcaataagtattcttttttgattgcttcaatttgttcagtcaattagaaatgaggttattagttacagtgaagataggaaagaggggttggagttcaggtaaaaggaargtgtaaaagctgggtgtggtggcccatacatgtaatcctagcattttgggaggctgaaaagggaggattgctagaggctaggatttcgagaccagcctgggtaatatagcaagaccctatctctaaaaataaaataaggttaaaatatttctctaagagagcaagagaatcagtgtgataggaaaataa

SEQ ID NO: 231251 - DNA, 400 bp, Homo sapiens
taactacatcctttgactttggtagcattattaaatttcataaaccatttcttaatatttttwaaattgtattagtatcatattaatatgtaaacatgtaatacccatcaatttgtaggtacccttatagcacttaatttcatatgtcaaaatcttgtaaacttggttgtaatgactgcagtgcaaaagtaattaagtgtaccagacagcgacatctaacaggtagtcaaagcatttcccattgtataatgagatgaagcagaaagggtgtatcttaagacagcgtgcagagcagccccatatgcagaggaaacagtgaggtgaaattttcttctttagagaagtcccaggaaatggaaatttagcaagcttcagcctactatgtagtacattttccata

SEQ ID NO: 231252 - DNA, 618 bp, Homo sapiens
tataaagaaatactaatgagatgtatatgagattgttcctgtttagttctttatatagataaaatgatagattttgggtgcattgatattgaaaataagaacgtataatatggttcaaattgaaatgatcttatttgggaaatatattcttatatctcattatcataaaatygttataaatgatgatttagtctttatataattatccacatattgctttccaagtcatcagaatttcaaaacaactccttgttttattagtagaaatatgagttttatgaacacctaagagttaaaagtagtattaaatgaattcatcaattactgatgataattagttgatatcaatattattactttttttggacaatataattttaaaattaatcccaagttaaaacatcaaataaacaagcaaacatatgtagcactatgatatcaagcaaatggactataaaaacttaaattacaaaataatgaaaatgactgttcaactaattaaaataacaatttattaaaatctatattattctttttaacttttattactttactctggaagtaggatggagttgaagtagaacaataaaatataacaataatttaaatttatgtaac

SEQ ID NO: 231253 - DNA, 618 bp, Homo sapiens
tataaagaaatactaatgagatgtatatgagattgttcctgtttagttctttatatagataaaatgatagattttgggtgcattgatattgaaaataagaacgtataatatggttcaaattgaaatgatcttatttgggaaatatattcttatatctcattatcataaaattgttataaatgatgatttagtctttatataattatccacatattgctttccaagtcatcagaatttcaaaacaactccttgttttattagtagaaatatgagttttatgaacacctaagagttaaaagtagtattaaatgaattcatcrattactgatgataattagttgatatcaatattattactttttttggacaatataattttaaaattaatcccaagttaaaacatcaaataaacaagcaaacatatgtagcactatgatatcaagcaaatggactataaaaacttaaattacaaaataatgaaaatgactgttcaactaattaaaataacaatttattaaaatctatattattctttttaacttttattactttactctggaagtaggatggagttgaagtagaacaataaaatataacaataatttaaatttatgtaac

SEQ ID NO: 231254 - DNA, 618 bp, Homo sapiens
tataaagaaatactaatgagatgtatatgagattgttcctgtttagttctttatatagataaaatgatagattttgggtgcattgatattgaaaataagaacgtataatatggttcaaattgaaatgatcttatttgggaaatatattcttatatctcattatcataaaattgttataaatgatgatttagtctttatataattatccacatattgctttccaagtcatcagaatttcaaaacaactccttgttttattagtagaaatatgagttttatgaacacctaagagttaaaagtagtattaaatgaattcatcaattactgatgataattagttgatatcaatattattactttttttggacaatataattttaaaattaatcccaagttaaaacatcaaataaacaagcaaacatatgtagcactatgatatcaagcaaatggactataaaaacttaaattacaaaataatgaaaatgactgttcaactaattaaaataacaatttattaaaatcyatattattctttttaacttttattactttactctggaagtaggatggagttgaagtagaacaataaaatataacaataatttaaatttatgtaac

SEQ ID NO: 231255 - DNA, 606 bp, Homo sapiens
aactaaagcatactaatatatattgaatttcatatatatatgtggaatatatagattgattgatttccatatatgtgtgtatatatagagaaagagacagagagagagcaagagagaaaatgacagagagacagaaaaacaaaaaagtctatgacytgaattctgctataattggtatagaatacaaaagacttaagcaattgtacattactgtttccttctcctcacaagaaaaattaaattaaaaaattatactcactttaagatcttatagttcaattttaacaattttttcctttacttgaagttatcatctttgaaattcaatattggggcccctgttgtcatatttaaaactttggcaacaggctcacaatctttttctcaaccttaatttattttataatctttgttgaaacttctagtgaatgacgcatccagttacatacctctgttcttgaacctcttgtttctaataactatacctcaccatcatttcagatacctattccaggggcatatcttttttatacctatcactattttagctggaaaatcagtcatgcaaatattcaattccttaactcctttactttccaccttaca

SEQ ID NO: 231256 - DNA, 568 bp, Homo sapiens
aaaaaaatactacttattaaactttgttgcaatttataagctcatgaaaatatctttaatatagagggtgactatcattcttgtatttagcattatatatattgcaattttatttcccagctttaggagaaactaaagcatactaatatatattgaatttcatatatatatgtggaatatatagattgattgatttccatatatgtgtgtatatatagagaaagagacagagagagagcaagagagaaaatgacagagagacagaaaaacaaaaaagtctatgacctgaattctgctataattggtatagaatacaaaagacttaagcaattgtacattactgtttccttctcctcacaagaaaaattaaattaaaaaattatactcactttaagatcttatagttcaattttaacaattttttcctttacttgaagttatcatcttkgaaattcaatattggggcccctgttgtcatatttaaaactttggcaacaggctcacaatctttttctcaaccttaatttattttataatctttgttgaaacttctagtgaatgacgcatc

SEQ ID NO: 231257 - DNA, 606 bp, Homo sapiens
aactaaagcatactaatatatattgaatttcatatatatatgtggaatatatagattgattgatttccatatatgtgtgtatatatagagaaagagacagagagagagcaagagagaaaatgacagagagacagaaaaacaaaaaagtctatgacctgaattctgctataattggtatagaatacaaaagacttaagcaattgtacattactgtttccttctcctcacaagaaaaattaaattaaaaaattatactcactttaagatcttatagttcaattttaacaattttttcctttacttgaagttatcatctttgaaattcaatattggggcccctgttgtcatatttaaaactttggcaacaggctcacaatctttttctcaaccttaatttattttataatctttgttgaaacttctagtgaatgacgcatccarttacatacctctgttcttgaacctcttgtttctaataactatacctcaccatcatttcagatacctattccaggggcatatcttttttatacctatcactattttagctggaaaatcagtcatgcaaatattcaattccttaactcctttactttccaccttaca

SEQ ID NO: 231258 - DNA, 436 bp, Homo sapiens
ccttgctactgtcctacttttcatctttccttcatcctttcaaaatatattgtcatcaatgaaaacacttcaggcagcaaggaaagatcctagacttgaataaatatatccaaattattgttgcmttactagtacatgttcaaagaaataagaaaacatttttattaccccatttgcatgttgtgtaagtgaccataagtttcatgcagttcctgagagctaggttcactagagtcactttattgtgtctccagaagaaaaataaggtgatgatttaacatgtctgcatgtttgagcattgaatatttagttgatggctacatttgtgaacagtgcacttagcctgttgaccagcagttaataaaaatatatagaaataaatacataaatgggagcaaaatcagctagcagctatggagatgacagacagtatgtg

SEQ ID NO: 231259 - DNA, 411 bp, Homo sapiens
gtttctacccttaaacctgcagaaggaacatggccagccaatcaatttgaaactctgatcttcagaatcatactacaataacagcggtgcattaagtcactatatttgtggtaatttcttaaaacagtaataaggaagaaatgcaatcacagctaatcagagagaaaaaaagacatagtagatgctttttaggaaatttcagtttgaaaactaaagagatacttgacttaaaattttgatatagtgtagtgagtgctatgatcattatcytatcccatttcttcctttgttacttaatttttctatacaccctgtatatatggtatattctatatttgtatatcttcttttttccccactagaatgattgcttcacggaggtggtattttctttttctttttttttaagtg

SEQ ID NO: 231260 - DNA, 646 bp, Homo sapiens
cattaaatttttatgtccataaggtcttttatgttattttactgttgttactaatgtttatagtgataacaatatggtcaaaaaataaggcktatgatactaatttttcaataagatatgaccagcacatgattacttatccaaatatatcatgggtttttgaaaccgtgtatatgctttagtttggaagagctgtgatatggtttggctctgtgtccccacccaaatctcatctcgaattgtatccccatgtgttgagggaaggacctagtgggaggtgattggaccatggggggagatttgcccgttgctgttctcctgatagtgagtgagttctcaggagatctgatggtttaaaagtgtggcacttcccccttcactctttctctttctcctgcctctgtgggaagatgtgccttgcttccccttcgccttccaccacgattgtaggtttcctgaggcctccccagccatgcaaaactgtgagtcaattaaacttcttttcttcataaattatccaatctcagatagttcttagtagtactgtgaaaacagactaatacaggctgcattctatgcattttattcagcttaaacttactaattttgttacttaaatttttatatgtatatagaactatatatg

SEQ ID NO: 231261 - DNA, 417 bp, Homo sapiens
atattgaataaactattttatttctatttatctatccctcttttctccattctaatgccctaaacatgccagtgttgtgttctgaatcaattccctacaaccaagagacatgtgatgataatgtttctaataataattgcaatcagcaattcctgagttttattaaggaccaatcacagttttaataaagttgcagatatgagtacatttaaagctcaaaaccaacatactattaaagaaattaagatcacaaagragttgagtaaattgttaagatcacatcattattaagtattggaggcaacgggcacctgtggcaactgaagagaaggtggagagtgaggtcaggctcttatgtttcctcacctattaatagctgactgtgaccctgtactcaaagttacaattcctgaatta

SEQ ID NO: 231262 - DNA, 397 bp, Homo sapiens
tctgatgtgatttgggacataattagccaatgaaatttgatgagagaaaaattgagagcagaagtaaagaaaacaggaaaatatctttatttgtaggaaattcatctctctgccttttttcttctatttctctcatttctactttgtttctttatattgcatttcttcccactagacctgaactccataaggaaagggatatttatttgtctgtgaccctaagtgttttgtgctcagacctacgaccatacctcataccacataaatgctaaataaaactctgttaaatgaatgaacaaatgtatgttatgattagattgttaatctaactggaaaattcaagtctccataacatacacaagaaaaaakaagagattcagaataagagaatttatat

SEQ ID NO: 231263 - DNA, 574 bp, Homo sapiens
tgctccctctgaaggcactggggaaggatctatttctggcctgtctctctgagcttctgatagttccttggcttgttgcaacataaataactccattcctcacatggtaaggcattttctgtgtccaaatttcccctttatattaaaaaaatttttttcactgaaacttcaggctttgttgaattccgttgttttttcccgtagttttattgtaatataattgacaaataaaaattatgtatacatatttaagatatacgatgtaatgtcttgaatagacgtacacactgtgaagtgattaccataatccatctaaytggcatatctaccacctcatatagttaccattttgtgtgtgtgtggtggtaatacttaagatctattctcttagcaaacttcaaatatacagtaaattcttaacaactatagtcaacgtgtgtacatgaggtctccagaacttatttatcttataactgcaaaatgtttgaccaacatttccttatttttctcacccctcacccctggtaactaacgtttttctctttgttcacatgagtttgacttttttagatat

SEQ ID NO: 231264 - DNA, 573 bp, Homo sapiens
attcatctgtgtcatcacaaatggcaggatttccttcttttataaggctgaatagtgagtgctccattgcatatctacagtggtgcatcatttaatgacggggagctttccaaaaaatgcatgtttaggtagcttcatcattgtgtgaacatgatagagtagacctccacaaccagatggtatagcatactacacacctaggctatgtggtatagccacttgttcttaggctacaaacctatacagcatgttacagtactgaaatagtgtaggcaattgtaaaacaatggtatttgcgtatctaaacataattaaacatagaaaaggcatagtacaaatacagcataaaacattaaaaagggcccacttgtktagggcacgggccatgaatgtagcttgcaagactggaagttgctctgggtgagtcagtgagtggcgagtgaatgtaaaggcctaggatattacagtttacattttttttaatttcttctttcaataataaattaaacttagctattattattcaacaataattaaccttagtataactttattcttataatgaacttcttt

SEQ ID NO: 231265 - DNA, 408 bp, Homo sapiens
atattttttaatttttgaggaaacatcatagaattttcataatagttgtaccaatctacactcccaccaaaaacatatagggtttcccttttctccatatcctcaccattacttgttatcttttgactttttgataatagccatgcaaacagatgtggggtagtatcatattgtgagtttaatttgcattttcattatgattagcgatattgagcacsttttcatgtatctattggccactcgtatgcattcatttgagaaatgtctgttcagatttgtgcccatttttaagtgggttatcttgtttatgtttttgagttgtatgagttcctaatatatttttgatattaaccgctggttagatatgtgatttgtaaatattctttcccatttcatagattacctttt

SEQ ID NO: 231266 - DNA, 513 bp, Homo sapiens
aaatcccttataaaaccatcagatatcatgagacttattcactcccaggagaacagtactgggggaagcccacccccatgattcaattatctcccactgggtccctcccacaacatataggaattatgggagctacaattcaagataagatttggatggggacacagtaaaactgtatcagttgattttgatagcatttgatatctttgagtgatatgctrtataaaaatcttgccttaagatttagaataaaactcaggatcattttgttgtgaattgaaacaatagagattagtctcttgaaacaaaatttgaagactagttctgctgcattgcaacacctctgtcagtgaaacctcatcccctttgagtaaagaaactgcctcacagtcagagcctgtaagagtgtccataaaccattagcattcctcagcttctaacacatgaaattgaagcacaatttagtaaaatgttgtagccaaagatcaaatacctccatcccagcatactcag

SEQ ID NO: 231267 - DNA, 548 bp, Homo sapiens
tggggacacagtaaaactgtatcagttgattttgatagcatttgatatctttgagtgatatgctgtataaaaatcttgccttaagatttagaataaaactcaggatcattttgttgtgaattgaaacaatagagattagtctcttgaaacaaaatttgaagactagttctgctgcattgcaacacctctgtcagtgaaacctcatcccctttgagtaaagaaactgcctcacagtcagagcctgtaagagtgtccataaaccattagcattcctcagcttctaacacatgaaattgaagcacaatttagtaaaatgttgtagccraagatcaaatacctccatcccagcatactcagtttccggcaatttgtcttttccattacaagaagaatagccttccatacatttcatgccacttgatccagaacatcagcctgtgtctcaggtggcttgtctatatgcttggagcaacagaagttctttcatattccatttgcagaccctgtgtattgccctctccaggaacaaagtcagtagtttgggaatt

SEQ ID NO: 231268 - DNA, 624 bp, Homo sapiens
accagtgaattattccagtgaaatagcagaatggtaataacagtcaattaaactaatttataaattcacctacttgcttttaccaaggtcattcaagcaaacgagatttcagaaaaattaatattctgtttcctttttattaagtcatctctgatgggcttaggaaaaagaagtgttgaatgccaatctggttttatcttttaaatcctcctagtctacttaactgaatctactgttaggcttatttaaaaagtgacagcctgcgtaacccacataatgcaggaattaatagtataatttgaaaatggttggaacaactgtagttgacattatgtttatctctttagctctaaatgattatttaaactcggtttgttcattttcttggcattcttactcatattgaacttatgcatccttcttttgatagagctagttctatagaactggggctgtttgtggcagataaaaaaaagggtttgaaacacatacttccctgccttccctctctattaatattacatttaattatagaaacttatactattataagtttaatttcaaagcttatttgcatttkaaaatattaatatgtaatttctatgcacagtatttagattctgt

SEQ ID NO: 231269 - DNA, 622 bp, Homo sapiens
tattgggtattatacaaaatctagagatgttttaaagtacacaaaaggatattcatagaccatatgttaatactatgtcattttatataagggatttgagtatctgaggagtttggcatctgtgtgggttctgaaaccaatgccccatrgatacagagagatgactgtacttacctatctcagacagaccatgaataagtaaacccaatttttcataaatggaacaaaaaatattacctatgggaatctcagttgtttccaccataatttgggtcttttttttaaaaaattgtgggttgacacctagtagtgtgctctgaaataaaattttagtttatgagagtgaacaaattaatagaatagaaagtggtagaatgcatttacaattatagttcatgacacctttgtttcagttgatacacgtataggagtcacaatgaatactttttagtgtagtgcttggtcagaaaacataaatagcaactgatataatattttgctttctctaaatattaatattacagtagagtttatcaagtagccccacttgaaggatgctctgagtagtccaagttgttctgagagagtgaagtgagggcaagaagaggtgataaaatgaaaa

SEQ ID NO: 231270 - DNA, 622 bp, Homo sapiens
tattgggtattatacaaaatctagagatgttttaaagtacacaaaaggatattcatagaccatatgttaatactatgtcattttatataagggatttgagtatctgaggagtttggcatctgtgtgggttctgaaaccaatgccccatggatacagagagatgactgtacttacctatctcagacagaccatgaataagtaaacccaatttttcataaatggaacaaaaaatattacctatgggaatctcagttgtttccaccataatttgggtcttttttttaaaaaattgtgggttgacacctagtagtgtgctctgaaataaaattttagtttatgagagtgaacaaawtaatagaatagaaagtggtagaatgcatttacaattatagttcatgacacctttgtttcagttgatacacgtataggagtcacaatgaatactttttagtgtagtgcttggtcagaaaacataaatagcaactgatataatattttgctttctctaaatattaatattacagtagagtttatcaagtagccccacttgaaggatgctctgagtagtccaagttgttctgagagagtgaagtgagggcaagaagaggtgataaaatgaaaa

SEQ ID NO: 231271 - DNA, 622 bp, Homo sapiens
tattgggtattatacaaaatctagagatgttttaaagtacacaaaaggatattcatagaccatatgttaatactatgtcattttatataagggatttgagtatctgaggagtttggcatctgtgtgggttctgaaaccaatgccccatggatacagagagatgactgtacttacctatctcagacagaccatgaataagtaaacccaatttttcataaatggaacaaaaaatattacctatgggaatctcagttgtttccaccataatttgggtcttttttttaaaaaattgtgggttgacacctagtagtgtgctctgaaataaaattttagtttatgagagtgaacaaattaatagaatagaaagtggtagaatgcatttacaattatagttcatgacacctttgtttcagttgatacacgtataggagtcacaatgaatactttttagtgtagtgcttggtcagaaaacataaatagcaactgatataatattttgctttctctaaatattwatattacagtagagtttatcaagtagccccacttgaaggatgctctgagtagtccaagttgttctgagagagtgaagtgagggcaagaagaggtgataaaatgaaaa

SEQ ID NO: 231272 - DNA, 567 bp, Homo sapiens
attttgcataaatcttgattaacaaaatcaatgaataggaaagcctattaatrgtcagcccatttaaaatgtggtaggtgatttaaaagtttagtcatactcttattttcttacttgtttttcttcacctaatcccttagaaggccctataatttttctccaataataaaatatatatatttatagtacaggtcctgtcattttcttctgataataaaaaatgagtattttagtcctactattgacaataaaacaggtattttgttttatatctataaatagaaaatacaaaatttttgtataaatacaaaaattcttcccttaagttgctcatagtctggagagcaggagaggagaaatgttatataatgcagaattatgaacaaagtgaagagggagctggtaatgtattctaaaaaagtaaaaccatgactcttattcaaatataaatgaacacgtcaaagattttatttagttaattaatgaatacaaaaacaggtagatgtagatgtagatacagatatgcagacacagtcaagaatattgaaataattttgcttacagatg

SEQ ID NO: 231273 - DNA, 567 bp, Homo sapiens
attttgcataaatcttgattaacaaaatcaatgaataggaaagcctattaatggtcagcccatttaaaatgtggtaggtgatttaaaagtttagtcatactcttattttcttacttgttttycttcacctaatcccttagaaggccctataatttttctccaataataaaatatatatatttatagtacaggtcctgtcattttcttctgataataaaaaatgagtattttagtcctactattgacaataaaacaggtattttgttttatatctataaatagaaaatacaaaatttttgtataaatacaaaaattcttcccttaagttgctcatagtctggagagcaggagaggagaaatgttatataatgcagaattatgaacaaagtgaagagggagctggtaatgtattctaaaaaagtaaaaccatgactcttattcaaatataaatgaacacgtcaaagattttatttagttaattaatgaatacaaaaacaggtagatgtagatgtagatacagatatgcagacacagtcaagaatattgaaataattttgcttacagatg

SEQ ID NO: 231274 - DNA, 593 bp, Homo sapiens
tatctctgtgggcctccaaaatggataaaatgtgattttcaaaacagtaaatccatgactgttacacagatataaaatattttattcaacatatttattaatgaaggaaccrgtaagattttttaaattttattttatttcaatagttttggggggaacaggtggtttttggattcatagataagttctttaatggtgatttctgagactttggtgtacccatcatgcaagcagtgtacactgtactcagtgtgtagtctttcattcctcactccctactcccattctttcccctgagtccccagagtacattatgtcacttcttatgcctttgggtcctcatagcttagctcccacttataagtgagaacagacaatatttggttttgcattcctgagttacttcacttagaataatggtctccaactccatccagatcgctgccaatgccattattttgtttatttttatggctgagttgtattccatggtttatatataccacattttctttatccatttgttgattgatgggcatttgggctggttccatatttttgcaattgcaaattgtgctgctatgaacgtgtgt

SEQ ID NO: 231275 - DNA, 593 bp, Homo sapiens
tatctctgtgggcctccaaaatggataaaatgtgattttcaaaacagtaaatccatgactgttacacagatataaaatattttattcaacatatttattaatgaaggaaccagtaagattttttaaattttattttatttcaatagttttggggggaacaggtggtttttggattcatagataagttctttartggtgatttctgagactttggtgtacccatcatgcaagcagtgtacactgtactcagtgtgtagtctttcattcctcactccctactcccattctttcccctgagtccccagagtacattatgtcacttcttatgcctttgggtcctcatagcttagctcccacttataagtgagaacagacaatatttggttttgcattcctgagttacttcacttagaataatggtctccaactccatccagatcgctgccaatgccattattttgtttatttttatggctgagttgtattccatggtttatatataccacattttctttatccatttgttgattgatgggcatttgggctggttccatatttttgcaattgcaaattgtgctgctatgaacgtgtgt

SEQ ID NO: 231276 - DNA, 593 bp, Homo sapiens
tatctctgtgggcctccaaaatggataaaatgtgattttcaaaacagtaaatccatgactgttacacagatataaaatattttattcaacatatttattaatgaaggaaccagtaagattttttaaattttattttatttcaatagttttggggggaacaggtggtttttggattcatagataagttctttaatggtgatttctgagactttggtgtacccatcatgcaagcagtgtacactgtactcagtgtgtagtctttcattcctcactccctactcccattctttcccctgagtccccagagtacattatgtcacttcttatgcctttgggtcctcatagcttagctcccacttataagtgagaacagacaatatttggtttygcattcctgagttacttcacttagaataatggtctccaactccatccagatcgctgccaatgccattattttgtttatttttatggctgagttgtattccatggtttatatataccacattttctttatccatttgttgattgatgggcatttgggctggttccatatttttgcaattgcaaattgtgctgctatgaacgtgtgt

SEQ ID NO: 231277 - DNA, 593 bp, Homo sapiens
tatctctgtgggcctccaaaatggataaaatgtgattttcaaaacagtaaatccatgactgttacacagatataaaatattttattcaacatatttattaatgaaggaaccagtaagattttttaaattttattttatttcaatagttttggggggaacaggtggtttttggattcatagataagttctttaatggtgatttctgagactttggtgtacccatcatgcaagcagtgtacactgtactcagtgtgtagtctttcattcctcactccctactcccattctttcccctgagtccccagagtacattatgtcacttcttatgcctttgggtcctcatagcttagctcccacttataagtgagaacagacaatatttggttttgcattcctgagttacttcacttagaataatggtctccaactccatccagatygctgccaatgccattattttgtttatttttatggctgagttgtattccatggtttatatataccacattttctttatccatttgttgattgatgggcatttgggctggttccatatttttgcaattgcaaattgtgctgctatgaacgtgtgt

SEQ ID NO: 231278 - DNA, 465 bp, Homo sapiens
taatttttaacactgaaatcttctatcccaaagcttctttctagtgctctttatggaaagaaaatgaatttctatttttgcaactggtaaagagatgtgctaatcagtttttcctgtcttaatagataaactgattttatattagaggagaaaatctgcaccattattttcctagcaatctagagctggaagggcagatatggggcacaaattccaccactcaactaactttttcccatggcaaacattactaaccttacaatgtactttttttctgtaagactgcaaatgacctcagagtaatcttcaaatcagttggagttagcacaaaaaagaaaaactatttgccatccytgatttcatggtctagcaggaataaaataatttaacaatgacaattttatttcaaataaaattgaaataatagccatcaccactatatagagttcaccgtttcactgatgc

SEQ ID NO: 231279 - DNA, 595 bp, Homo sapiens
cctagagaatctctgaggggatctctgatggaggtgacaaggatattacaagatctcttgggtggatcctgtttgctgttgcagactcaaactatcctacatctgtcagcacctgcataagaggtctatcttcataaccaaaaggaactttccagataaatggtcacctagtatttggggtcaccataaaccagtgtgttttagtaatgcttgctaacttctgttttggaagttcttrtaattcattcaagttccccttagtttaagaaaaaaagattttatgaactttctctcattagctaatgtggaaggctctgatttttaaaactttttgccataagaaaactttgagaacctcgaactttaaaaaatgtcatatattcatgaattgagtttgcagaggacaagttaatatgaggattaacaaaatactttttatcctcactggttctattatatttttgaccctttgatgaaaaatcatttatcagaaccataggcttcacagaaaagagcaagagagcaaaactatctactgctagataattatagagctaattcctagaaagaaatgttagtgtctatgaaatttgtt

SEQ ID NO: 231280 - DNA, 377 bp, Homo sapiens
tcctgtttgctgttgcagactcaaactatcctacatctgtcagcacctgcataagaggtctatcttcataaccaaaaggaactttccagataaatggtcacctagtatttggggtcaccataaaccagtgtgttttagtaatgcttgctaacttctgttttggaagttcttataattcattcaagttcccctyagtttaagaaaaaaagattttatgaactttctctcattagctaatgtggaaggctctgatttttaaaactttttgccataagaaaactttgagaacctcgaactttaaaaaatgtcatatattcatgaattgagtttgcagaggacaagttaatatgaggattaacaaaatactttttatcctc

SEQ ID NO: 231281 - DNA, 595 bp, Homo sapiens
cctagagaatctctgaggggatctctgatggaggtgacaaggatattacaagatctcttgggtggatcctgtttgctgttgcagactcaaactatcctacatctgtcagcacctgcataagaggtctatcttcataaccaaaaggaactttccagataaatggtcacctagtatttggggtcaccataaaccagtgtgttttagtaatgcttgctaacttctgttttggaagttcttataattcattcaagttccccttagtttaagaaaaaaakattttatgaactttctctcattagctaatgtggaaggctctgatttttaaaactttttgccataagaaaactttgagaacctcgaactttaaaaaatgtcatatattcatgaattgagtttgcagaggacaagttaatatgaggattaacaaaatactttttatcctcactggttctattatatttttgaccctttgatgaaaaatcatttatcagaaccataggcttcacagaaaagagcaagagagcaaaactatctactgctagataattatagagctaattcctagaaagaaatgttagtgtctatgaaatttgtt

SEQ ID NO: 231282 - DNA, 354 bp, Homo sapiens
cgtagccttcagcagagtctcacagtcaacttgcagtaacgagccggaaggaaatctggtgaataaatagggccttgccccaatctcttaatttcctgttaatgtttcccactagctaactccaactggaaggcaacagggccaytttgatacagtcactgcaggtcaatgctggggcatagcatatagtgaagagcagcacagtgtgtgtatcagggatccagcagagaagcacgaggatggagagacacacacacagagatttatataaatatatataattgatattcatgtgtaatttgagggtattaatttatataagtataaattaatataaatataatttatttataa

SEQ ID NO: 231283 - DNA, 418 bp, Homo sapiens
tgggcgggagaagttactgaaactcacagggagtagatgcaggaaaagggctgcctcacaagagacgtagccttcagcagagtctcacagtcaacttgcagtaacgagccggaaggaaatctggtgaataaatagggccttgccccaatctcttaatttcctgttaatgtttcccactagctaactccaactggaaggcaacagggccattttgatacagtcactgcrggtcaatgctggggcatagcatatagtgaagagcagcacagtgtgtgtatcagggatccagcagagaagcacgaggatggagagacacacacacagagatttatataaatatatataattgatattcatgtgtaatttgagggtattaatttatataagtataaattaatataaatataatttatttata

SEQ ID NO: 231284 - DNA, 419 bp, Homo sapiens
cctgtcagcttattataaataaattatatttatattaatttatacttatataaattaataccctcaaattacacatgaatatcaattatatatatttatataaatctctgtgtgtgtgtctctccatcctcgtgcttctctgctggatccctgatacacacactgtgctgctcttcactatatgctatgccccagcattgaccygcagtgactgtatcaaaatggccctgttgccttccagttggagttagctagtgggaaacattaacaggaaattaagagattggggcaaggccctatttattcaccagatttccttccggctcgttactgcaagttgactgtgagactctgctgaaggctacgtctcttgtgaggcagcccttttcctgcatctactccctgtgagtttcagtaac

SEQ ID NO: 231285 - DNA, 494 bp, Homo sapiens
ggtttcttttggacagtgtcatgcatatatttagtgtcagttttgcaacttttaaggactttctgggtcctgcaagtctaatttcttattaagcagtaattgatcaacataattcatgaggaatcactattgtcaaacattgataagcctacaaatacattttgttctccatttaatcctcaaaaaattttaggtgatgagtataattaacttgttttcactcataagattgatggttttagtcccttcacaggttaagatttagatgagttaagcatcttatccattttatacctttattaattcaacagatatttattaagctcttaatttgtgccaggcagtgaaaaagayagacatagtccctgtcctaacatagtgacaaattttggattcaaactcgactgagttattaacatctacaccatactatcaggtgcatttttctggcataaagagacaacaccttaatcaaaatagctgcactagtttta

SEQ ID NO: 231286 - DNA, 494 bp, Homo sapiens
ggtttcttttggacagtgtcatgcatatatttagtgtcagttttgcaacttttaaggactttctgggtcctgcaagtctaatttcttattaagcagtaattgatcaacataattcatgaggaatcactattgtcaaacattgataagcctacaaatacattttgttctccatttaatcctcaaaaaattttaggtgatgagtataattaacttgttttcactcataagattgatggttttagtcccttcacaggttaagatttagatgagttaagcatcttatccattttatacctttattaattcaacagatatttattaagctcttaatttgtgccaggcagtgaaaaagatagacatagtccctgtcctaacatagtgacaaattttggattcaaactcgactgagttattaacatctacaccatactatcaggtgcatttttctggcataaagagacaacacyttaatcaaaatagctgcactagtttta

SEQ ID NO: 231287 - DNA, 586 bp, Homo sapiens
atccaccaatttaaatgttaatctcatcaaaaattgccccacagaagcttccagaataatatttgaccacatatctaggcaccaagtccccgccaagttgacacataaaattaaccattacaagaccacttcttgtaaactttcactcatatgcatctccttaaaccatacttaatctccagataaagacagtatgactttgccttggggattaagttttcaacacatgaactttcggggaacacatttcagctaaagcactagccttccagggtgactaccrtgaaagggagggcatatttccatctaacatggcacaactatcttgcacaaaactggaaacacaataactctttctaacttcctgagctgcagtgttaaatgcataagctctgcttagtgggcccatatgaataaattcaacctgttctttctttatgttccttccaacataatcccacacatttaatatccattcccatacatatttttaggatttctatctgtatacatttgaaaaataaagtagatcttttgaaatgcaacacacttcttcatgggtcaaacattgtaactcactgtagga

SEQ ID NO: 231288 - DNA, 453 bp, Homo sapiens
accccggtcccctcagctaaatttatcttatccattcttaatgataggaaacactaggatttattttactttgtgttaaagcatgtgtgcctttctaaaaggcctcttttagaaaagtyttggccgtgcctgaaggtattaactatagcagacctccagggataagaaacacttgttcagctctaattattttatcaggtgtcagcctcgctgcctaaatgcctaaattctaaagcaagtcagttgcctttcaatcaacaagacagaaccatctacacctgacagatccccatcagaaaacccatggagacaattgcttctccagaaggatcagaacaggctagtcatttatttcctgagattctctaactttcacctttttttcattctgatcataagaaaaagatatgcatgtgctatattacattaactcttccagtgtagcaatgtgtt

SEQ ID NO: 231289 - DNA, 578 bp, Homo sapiens
tccaaacattttcaaaggaaatgtaaacacttttcaccagacaaaaaaatttttgaatacattaatcatgtcttaaaaaaaatacatatgcatcagagatacctatagaatgcatggatcttattaggaaataataaaggcaaatgcttctattaaataatttgtgcagtaaaatctttgtttgcttgatttttgctgatattcacactcacmgctttctacttgaccagatacagagagagaagtaaacttctgaatattgtgagtagtctctttttgatttacaaatcagtttatttgataccatctccactatttcagatcctgggaatttatttccacaatcatgcctttcaacaatttatagaaatttgcagctcaaaatcttacagattaccttgtccaaccccctttttttacaggtagggaagctgaggtccatggatgatagcaacacttcattagtcaattaaactggaaaaaacaaaacacagaaacgcttttccagggggcaggatttttcccaataaatatatcttgctgttgatccacacccttgtctttatttctcttcctcc

SEQ ID NO: 231290 - DNA, 555 bp, Homo sapiens
atcatatttcagggctttattgtcagagattcaaatacagaatgcgtttttaccaagtgcttcaggtgagactaatgcaaaggacctgccctttcaagtacacacagtgaaagtctgaactccataaggacagaagccgatttttgttaatctttttatgcccagtgcctacatagcacgtattgtatagaaaatgtgtaacgttgaatgcatgcaaactgtatttctaaaaatacacaccaccttcrtttgttgtttgtttctagcaaaagcactgacaaatttattctttactggaatattttgaattgttatcttcgaattgttatgtttctgcatttctttatagatcaagcttctcaatacaaagcccagatcaagcttttcaacacaaaaagccatcagcctcaacaaaatcctaggaagcagaattcaagcagtgaaggataatgttttgtttaagttgtcagtgttcacccttcaaaaatgtaaaatataattccaaatcaaaatccaagttgcttttctttttggtattttgcgatttattgtagc

SEQ ID NO: 231291 - DNA, 555 bp, Homo sapiens
atcatatttcagggctttattgtcagagattcaaatacagaatgcgtttttaccaagtgcttcaggtgagactaatgcaaaggacctgccctttcaagtacacacagtgaaagtctgaactccataaggacagaagccgatttttgttaatctttttatgcccagtgcctacatagcacgtattgtatagaaaatgtgtaacgttgaatgcatgcaaactgtatttctaaaaatacacaccaccttcatttgttgtttgtttctagcaaaagcactgacaaatttattctttactggaatattttgaattgttatcttcgaattgttatgtttctgcatttctttatagatcaagcttctcaatacaaagcccagatcaagcttttcaacacaaaaagccatcagcctcaacaaaatcctaggaagcagaattcaagcagtraaggataatgttttgtttaagttgtcagtgttcacccttcaaaaatgtaaaatataattccaaatcaaaatccaagttgcttttctttttggtattttgcgatttattgtagc

SEQ ID NO: 231292 - DNA, 547 bp, Homo sapiens
ttatttcatatagaaaaattacatttattggcttctaagacctaatctactcaataaaataagttatgataccttaataactgaggaaaatagacataagtaaaaaaaaacacgaggagagaagtctacatgtaagtattctgaggtcaggactttttcaactttatcacaaaattcacagggtggataaatagtatttccacattttataaaggtttcgaggaagcctcagtataatcarcccctaacatattatcttctagatagccaagttctgtagctcacaacacatggcccctgccttccaactgtaattaacataatctggttatcttattctgtaaaaattacaaaagtccatttcagtggggtaattgcaggtgagtgatatccaagactgagaaaatgtagattattagatttagcaaaatgttatagcatgattcatatttgttgattgtgaaaatgcttttgggagattgaattagcagaaagaagaccttttaaaggctcagagaaaataatctcaggagtgtaacattggaat

SEQ ID NO: 231293 - DNA, 562 bp, Homo sapiens
aggccgcactgctaccaggaggagagagagcttctgtgaatacagtcgagcagacaaaaacagagctgacagtagagagaaatcaactccttgggggttcatttgaactcctggatccacccatgcctgatacccctatagctggttttcagttaaataggtgaatatatttcctctttgattaagccactgggagttaaatttctgytcacaaacaacttcaagagcctagtctgattaaaaaaaattaccctatagtggctgggtgccatggctcacacctgtaatcccagcactttgggaggctgaggtgggtggatcacctgagattgggagttcgagaccagcctgaccaacacggagaaaccccatctctactaaaaatacaaaattagctgggcgtggtggtgcatgcctgtaatcccagctactcaggaggctgaggcaggagaatcacatgaacccaggagacagaggttgtggtaagccaagatcataccattgcactccagtctgggcaacaagcacaaaactctgtctcaaaaaacaaaacaaaactgag

SEQ ID NO: 231294 - DNA, 562 bp, Homo sapiens
aggccgcactgctaccaggaggagagagagcttctgtgaatacagtcgagcagacaaaaacagagctgacagtagagagaaatcaactccttgggggttcatttgaactcctggatccacccatgcctgatacccctatagctggttttcagttaaataggtgaatatatttcctctttgattaagccactgggagttaaatttctgttcacaaacaacttcaagagcctagtctgattaaaaaaaattaccctatagtggctgggtgccatggctcacacctgtaatcccagcactttgggaggctgaggtgggtggatcacctgagattgggagttcgagaccagcctgaccaacacggagaaaccccatctctactaaaaatacaaaattagctgggcgtggtggtgcatgcctgtaatcccagctactcaggaggctgaggcaggagaatcacatgaacccaggagacagaggttgyggtaagccaagatcataccattgcactccagtctgggcaacaagcacaaaactctgtctcaaaaaacaaaacaaaactgag

SEQ ID NO: 231295 - DNA, 478 bp, Homo sapiens
actgcggcaactgcctgctgggcacctgctttatgccacgtggtgtgatggttaaggatgtggactttggagttacttgctgaaagaccctgagctagtaacttaacacctttgtgcctcagtttcctcatctrtgaaatgggtgtgcaggattaaatgtgttgatacagtgtgctgggactagagcctggccatagtactaactgggatacatattccacaatgtaaaccattattagagtgatcctaccacaacagctgtcctgcgtcaggcactctgaaatctccttcaacctccaccaaggctccctcctgcaagtactattattagccccagagaaaactgaggtttcattactgtcctaaggccacccagacagaagatggcagggatgggatgtgaattctgccctccctcaccgttcaatgtgggcttctcatcacgaaactcggatttcccaactctttccgttcaagg

SEQ ID NO: 231296 - DNA, 474 bp, Homo sapiens
cttgcaatgaattattatgtagttcttagaccaggccctgaagagtagacactccatacgtgtggactgtcgttattacagctcttagtccaatggggacgctaagagccaaagacgggcgtgatctgataaggtcaacagtcagtcatcactttctctggccttgaactcatgcagcctgcctcctggaattctcgcaaaatgtccaaggcagtgggaacatgtcagtctggaattccacactgcactgtcaacgccttttcaggaggaattccgcagccagccctgtgtgagtgctgggtgtgtgttcccacatctgggcatgagcagaaggcagaccaaatgacagtcttaatagcaacacatctgcttttcaaaaacctcatttgagccagcctccataatatcccagccgatccaaggaagctgctgccgkgaacagtggcctgtccgctcccctgccccagacgcagc

SEQ ID NO: 231297 - DNA, 474 bp, Homo sapiens
cttgcaatgaattattatgtagttcttagaccaggccctgaagagtagacactccatacgtgtggactgtcgttattacagctcttagtccaatggggacgctaagagccaaagacgggcgtgatctgataaggtcaacagtcagtcatcactttctctggccttgaactcatgcagcctgcctcctggaattctcgcaaaatgtccaaggcagtgggaacatgtcagtctggaattccacactgcactgtcaacgccttttcaggaggaattccgcagccagccctgtgtgagtgctgggtgtgtgttcccacatctgggcatgagcagaaggcagaccaaatgacagtcttaatagcaacacatctgcttttcaaaaacctcatttgagccagcctccataatatcccagccgatccaaggaagctgctgccgggaacagyggcctgtccgctcccctgccccagacgcagc

SEQ ID NO: 231298 - DNA, 388 bp, Homo sapiens
caagatttcccactctaatccccaagactttgaagattggattcactgatgcaggtgtaattaggtttactgctatggtctgagtgtgtcccccaaaattcatatgttgaaacttaatcacccaagtgagagtattaagaggtgggggaatgaagtcacgaggatggaacccycatgaatgggattcacatccttataaaagaggctgaggggagcaccgtaggctcgtgccccctttgtcttctaccatgtgaggacactgcgttcattccctcagatgacacagcaacaggtgtcatcttggaagcagacactaggccctcctcagacactgaacctgctggctccttgaccttggacttgccaacctccagaactgtgagaaatg

SEQ ID NO: 231299 - DNA, 388 bp, Homo sapiens
caagatttcccactctaatccccaagactttgaagattggattcactgatgcaggtgtaattaggtttactgctatggtctgagtgtgtcccccaaaattcatatgttgaaacttaatcacccaagtgagagtattaagaggtgggggaatgaagtcacgaggatggaacccccatgaatgggattcacatccttataaaagaggctgaggggagcaccgtaggctcgtgccccctttgtcttctaccatgtgaggacactgcgttcattccctcagatgacacagcaacaggtgtcaycttggaagcagacactaggccctcctcagacactgaacctgctggctccttgaccttggacttgccaacctccagaactgtgagaaatg

SEQ ID NO: 231300 - DNA, 603 bp, Homo sapiens
caaagaatatgtttataaaatctagagatatgccatacaaagagactgggagactcaatagtgctaagatatcagttctcctcaaattggtctatagattcaacagcattccaatcaaaattgaaacactgatctcaaaattcatatgcaatgcaaatggctagaatagccaaaacaattttgagaaagaacaacagagttggaagacttattacatttgatttgaagactcattgaaaagatgcagaaatccaggaactatggtattagcataaatataactatatagtgatcgatggaacagagtagacagccctaaaatagacacaaaaatgctatttggaacagtaccatggcatttcaatattgaaagggtaatcttttcaataagtggtcttgggagarctggctattcacatagacacagataaactttgatgtctacctcatatctatgatgtatatgaaaattaactcaagatagattatagaccataaatataaatgctaaaagcatcaaacattttggagaaaaaatatagtaaatattttgacaaccttggcataggaaagatatccagtgacccaacaggcattaagctt

SEQ ID NO: 231301 - DNA, 548 bp, Homo sapiens
tggcaaaaaatgtcaacatcaacttgttcagaactctgaaaattaagcagtcttataacaattcaaagagtaaaatttatttaagaaaaactggttacaccttggtaccaaaagggatacttaaaaaacaaactttattgaagtataatctacctaccataaatttaactcatttttaactgtgcaaccagtgatttctactaaatttattatgttggaaaactatcaccataatccaattgtagaacatttttatcccctcagtaagatccctcgtggcctggcatggtggttcatgcctgtaatcccagggctttaggaggctgaggtggaaggattgctttagtttaggaattcaaggccagcctgagcaacatggtgaaacactgtctacaaaacccaaaaattttggccgggtgtggtggcctgcgcctgtagttacagttactctggaggctgaggtgggaggatcacttgagccttggagatcaaggctacagtgaaccaygatcgcaccactgtactccaccctgggtgacagagcgaga

SEQ ID NO: 231302 - DNA, 593 bp, Homo sapiens
tcattttacacattaatgtcctccaagtaccctgtagtgttcctacagtgtagctggcatttcaagatactgggagaagcaatttggaatctgttagtgsgaattatcttagaaagagccagaagaaactttttagaggacagtattgttacttatatctttggaagcatcaatatgactttttggcaggagtttctctgccttaagagcacgttactgctatccttagaggtggtggatgagttaagctccttttgacaattgctttactttcgtaataacaaaatgttatttaatactaactaagttgacttgtttcttatatatgtattgcaggtaacttcttaccacaacgacgttctcttaatttaaaatgaaattttgaaattaaatactcttctcttgtaaaaggataaggaataaccccaatttcaaaacagagtgagtgactgaattttcatcgtgacttcatctaggctttttaaaatgagcatagcattaaaaatgaaagaaaaaatctgccctgcagactcgatacccataatttaaattgtgtttataagtattttcttcagggaaaaatcttacccccc

SEQ ID NO: 231303 - DNA, 593 bp, Homo sapiens
tcattttacacattaatgtcctccaagtaccctgtagtgttcctacagtgtagctggcatttcaagatactgggagaagcaatttggaatctgttagtgggaattatcttagaaagagccagaagaaactttttagaggacagtattgttacttatatctttggaagcatcaatatgacttttyggcaggagtttctctgccttaagagcacgttactgctatccttagaggtggtggatgagttaagctccttttgacaattgctttactttcgtaataacaaaatgttatttaatactaactaagttgacttgtttcttatatatgtattgcaggtaacttcttaccacaacgacgttctcttaatttaaaatgaaattttgaaattaaatactcttctcttgtaaaaggataaggaataaccccaatttcaaaacagagtgagtgactgaattttcatcgtgacttcatctaggctttttaaaatgagcatagcattaaaaatgaaagaaaaaatctgccctgcagactcgatacccataatttaaattgtgtttataagtattttcttcagggaaaaatcttacccccc

SEQ ID NO: 231304 - DNA, 593 bp, Homo sapiens
tcattttacacattaatgtcctccaagtaccctgtagtgttcctacagtgtagctggcatttcaagatactgggagaagcaatttggaatctgttagtgggaattatcttagaaagagccagaagaaactttttagaggacagtattgttacttatatctttggaagcatcaatatgactttttggcaggagtttctctgccttaagagcacgttactgctatccttagaggtggtggatgagttaagctccttttgacaattgctttactttcgtaataacaaaatgttatttaatactaactaagtwgacttgtttcttatatatgtattgcaggtaacttcttaccacaacgacgttctcttaatttaaaatgaaattttgaaattaaatactcttctcttgtaaaaggataaggaataaccccaatttcaaaacagagtgagtgactgaattttcatcgtgacttcatctaggctttttaaaatgagcatagcattaaaaatgaaagaaaaaatctgccctgcagactcgatacccataatttaaattgtgtttataagtattttcttcagggaaaaatcttacccccc

SEQ ID NO: 231305 - DNA, 593 bp, Homo sapiens
tcattttacacattaatgtcctccaagtaccctgtagtgttcctacagtgtagctggcatttcaagatactgggagaagcaatttggaatctgttagtgggaattatcttagaaagagccagaagaaactttttagaggacagtattgttacttatatctttggaagcatcaatatgactttttggcaggagtttctctgccttaagagcacgttactgctatccttagaggtggtggatgagttaagctccttttgacaattgctttactttcgtaataacaaaatgttatttaatactaactaagttgacttgtttcttatatatgtattgcaggtaacttcttaccacaaygacgttctcttaatttaaaatgaaattttgaaattaaatactcttctcttgtaaaaggataaggaataaccccaatttcaaaacagagtgagtgactgaattttcatcgtgacttcatctaggctttttaaaatgagcatagcattaaaaatgaaagaaaaaatctgccctgcagactcgatacccataatttaaattgtgtttataagtattttcttcagggaaaaatcttacccccc

SEQ ID NO: 231306 - DNA, 634 bp, Homo sapiens
ctgttctgctactgattagctttggtcttgggaaggttatttgccctactggggcctcactcgccttatctgtaacataatgctactaagaagacaatgatcaataaataaaatgagatatgtgatagagggagggtatggtaggggttatcagcttgggttttggagtaggagatcttagtttgaatctctgtaatacaacttattagttgtgtaagcttgggcaagtttcttaaattttctaagcttgcaatttctcttctrtaaaaatgggaaaaaaccataacacctactttataaagttttgcagcgttaaataagataatacatgtaaagcacttagaatatagtcagggatttaataagtgctagagaaatactattattatcatttgaaaaaatcagggacctagcaacttagggtgtctaataattagtagcggctgctattaataatattaatataattatacttggcttggatttaagataagatactctatggtaattttgaacatactgtagaaattccatttactttgactccccaagtccttagaggaactaaggtcatgcatcaaacaggaatttaagtgattaataatactgtggccttttgagttctagtgagaaa

SEQ ID NO: 231307 - DNA, 449 bp, Homo sapiens
gagactccatctcaaaaataaagaaaaaaaaaaaagaaaaaaaaatcccatctgaggacagatatttcagtgttcttgataagccaaaggagactgcattgtgtctggtggatgactgtaatcctggaaatccagtgctttggcactcccactgggtcacaggcctgattttcatgagcctggtgcaagaggtagtctgacattatgttgaagaggtaacctttatcagaattacttgttaatcctctgtggatacctgacctctgagagagaccctgttacttgggaagagtccagcataatacacatatgattgcttcattttcccagtatatttaattcagttacttgtggtgtggaaggaagccctggctgaratattaaatttccattttaatttccaaactacaatattaaaacattgtactcattagtctgaaaagcaatac

SEQ ID NO: 231308 - DNA, 632 bp, Homo sapiens
ttggagatacgtggtatcttagtcaagtaaatgatagaatgacaaccaaagaaagggataaattccctaccggtcagcaagccatccccagtatggatccccactgggaccttgactcagatcatgaggactggagttgtaaacatcttttgacctgtgttctagaaggactaaggagaattattaaaaagcccatgaattattcaatgatgtccaccataactcagggaaaggaagaaaatccttctgccttcctygagtgactatgggaggccttaagaaaatatactcccctgtcacctgaatcactcgagggtcaattgattctaaaagataagtttattacccaatcagccacagatatcaggagaaagttccaaaagcaagccctgggccctgaaaaaaatttggaggcattattaaacctggtaaccttggtgttgtataatagggaccaagaggaacaggcccaaaaggaaaagcgagatcagagaaaggctgcagccttaatcatggccctcagacaaacaaaccttggtggctcagagaggacagaaaatggagcaggccaatcaccacccagtagggcttattatcagtgtggtttattaggacactttaaaaaaagattg

SEQ ID NO: 231309 - DNA, 186 bp, Homo sapiens
gatgtccaccataactcagggaaaggaagaaaatccttctgccttcctcgagygactatgggaggccttaagaaaatatactcccctgtcacctgaatcactcgagggtcaattgattctaaaagataagtttattacccaatcagccacagatatcaggagaaagttccaaaagcaagccctggg

SEQ ID NO: 231310 - DNA, 186 bp, Homo sapiens
gatgtccaccataactcagggaaaggaagaaaatccttctgccttcctcgagtgactatgrgaggccttaagaaaatatactcccctgtcacctgaatcactcgagggtcaattgattctaaaagataagtttattacccaatcagccacagatatcaggagaaagttccaaaagcaagccctggg

SEQ ID NO: 231311 - DNA, 186 bp, Homo sapiens
gatgtccaccataactcagggaaaggaagaaaatccttctgccttcctcgagtgactatgggaggccttaagaaaatatactcccctgtcacctgaatcactcgagggtcaattgattctaaaagataagtttattacccaatcagccacagatatcaggagaaagytccaaaagcaagccctggg

SEQ ID NO: 231312 - DNA, 632 bp, Homo sapiens
ttggagatacgtggtatcttagtcaagtaaatgatagaatgacaaccaaagaaagggataaattccctaccggtcagcaagccatccccagtatggatccccactgggaccttgactcagatcatgaggactggagttgtaaacatcttttgacctgtgttctagaaggactaaggagaattattaaaaagcccatgaattattcaatgatgtccaccataactcagggaaaggaagaaaatccttctgccttcctcgagtgactatgggaggccttaagaaaatatactcccctgtcacctgaatcactcgagggtcaattgattctaaaagataagtttattacccaatcagccacagatatcaggagaaagttccaaaagcaagccctgggccctgaamaaaatttggaggcattattaaacctggtaaccttggtgttgtataatagggaccaagaggaacaggcccaaaaggaaaagcgagatcagagaaaggctgcagccttaatcatggccctcagacaaacaaaccttggtggctcagagaggacagaaaatggagcaggccaatcaccacccagtagggcttattatcagtgtggtttattaggacactttaaaaaaagattg

SEQ ID NO: 231313 - DNA, 632 bp, Homo sapiens
ttggagatacgtggtatcttagtcaagtaaatgatagaatgacaaccaaagaaagggataaattccctaccggtcagcaagccatccccagtatggatccccactgggaccttgactcagatcatgaggactggagttgtaaacatcttttgacctgtgttctagaaggactaaggagaattattaaaaagcccatgaattattcaatgatgtccaccataactcagggaaaggaagaaaatccttctgccttcctcgagtgactatgggaggccttaagaaaatatactcccctgtcacctgaatcactcgagggtcaattgattctaaaagataagtttattacccaatcagccacagatatcaggagaaagttccaaaagcaagccctgggccctgaaaaaaatttggaggcattattaaacctggyaaccttggtgttgtataatagggaccaagaggaacaggcccaaaaggaaaagcgagatcagagaaaggctgcagccttaatcatggccctcagacaaacaaaccttggtggctcagagaggacagaaaatggagcaggccaatcaccacccagtagggcttattatcagtgtggtttattaggacactttaaaaaaagattg

SEQ ID NO: 231314 - DNA, 540 bp, Homo sapiens
aggggtctaggtcgaagacccagctttgcctacagcaggtcaaatatctagacctaatcttagccagagggaccagggccctcagcaaggaatgaatacagcctatactggcttatccttgccctaagacattaaaacagttgcgggggttccttggaattactggcttttgctgaccatggatccccagatacagcgagatagccaggcccctctatactctaatcaaggaaacccagagggcaaatattcatctagtagaatgggaaccagaggcagaaacagccttcaaaaccttaaagcaggccctcgcacaagctccagttttaagccttctgacaggacaaaacttctctttatacgtcacagagagagcagggatagctcttggagtccttactcagactcgtgggacaaccacacaaccagtggcaggtatacataagtaaggaaattgatgtagtatcaaaaggctggcctcactgtggtggtggccatsttagtgtcagaggctatcaagatactacaaggaaaagatct

SEQ ID NO: 231315 - DNA, 619 bp, Homo sapiens
aataccaaaatttacaaatcaattgtattacgcattagcaatgaactgcccaaaaatgaaactgagaaaataattctatttataataaaatcaaaaggaataaaatacttaggtataattttaacaaaagaagtataagacttgttaattgaaaactacaaaatattgttaaattacagaagacctaaataaatgtaaagacatccatgttcatggatcaaaatacttaatattgttaagatgggaatactcaccaaactgatttacagttkcaatgcaaatcactatcaaaatctctgttgattcctttttttttttgcagaaattgacaggcagatactaaaattcatacagaaatgccagagatatagagtaggcaaaataaactgaataaagaataaagttggtgaatttacacttccctatttttaaacttgctacaaaactacagtaatgaagacagagtagtactgaaataaggataaacatgtagaacaatgaaatagaattgtgagttcagaaataaacccatgcatgtatagccaattgactcttttgtttgttttttgttttcagacggagtttcactcttgtcactgaggctggagtgtaatcgtgt

SEQ ID NO: 231316 - DNA, 569 bp, Homo sapiens
tctttcccaaaccagaatagagcaaagtatgtatggcagaaaaataagcattcatcttaaaacatctaaaagtcattgacgagtgatgaaatcacaggcactaacctaacatttcaatacaagataaaccaagcctctttatctttaccaggaatgatctaaaatgtagaaccaaatctggctgttttttacagatccacacatgtccagagaagagatcaaaaagaaaaagcgaagcctcatctggctgcwccatcaggtagagaaacagcggttctgtttcctttaaagttgaagtttccaaaactaacagatcccaagtggatcatctgacttagaaagaaaccagagcacagaaccagaaccatgggcaaacagctcaagaaaaacaacaacgacaacaaccaaggaggcagagggggcagagctgcctccgctgcaggctgagcggctatcaggggtgagctgacgggtgccccggaagtggctgaacccagatgaaccacgtccactgcctgggcaggtcacattgccggggcaatgaaaaatcatttacctttgttgagtga

SEQ ID NO: 231317 - DNA, 571 bp, Homo sapiens
gcaaacgcctcctggcaggcggaagcacactgaggaagcatggctggagctcaggaagatgaggagacctgccagatcacagtaaaaccaaggtcacagaacgagggttttgcccacagctacacaacttctgggatactttccttatactaccaccttcctagtcaacagacttcattttctttcctctccaaaccttcccctgggacagaggtccatcagttaatgctcattccagggtaaaaaagaaatcacgaagtagaacatgaaaaggaaatgcaaaaacttgagccacaaaaactggagacctcgctatggaatttttctttgttgagtgtgcccaggagtcttggggatggtctatgtcagtggtattcaaagtgtggtcccaggaccagccacatcagcatctcctaaacacttattagaaaagcaaattcaaaggccccactcaaaacctatgaatcagaaatatgggaggtggagctcagcaatctgaattttaacaagcaaaaagcyccacaaaaagggttcctgttgcacagacaatagtctaaatcagtgcttccca

SEQ ID NO: 231318 - DNA, 546 bp, Homo sapiens
tgtaaatcaaccaatccttagaaggatcctcgttggcactgattttgtcacatgccttcctctgcagtcgtcactttttcatgggaatagrgatccagaatgggtcatatatgcacaggtgattggagggaatggatcgtgaatgcaaacgtgatggcagggcagggagttttttatcagaaggacagtgggggataaatactacagtggctacaccaaggaatggctgggaggagtagcaactacttccctaaattttcattttaaatgtatttattaaacatctactcagctatgtaatgaacaaaccaaacacattaaaatgcctgctccctcgcagtttataatccattacaataatctttatcaaaatttaaaagccataacaactaaatgcaaagtatgacctttaatgggatcctatattaaaaaaaaaaactataaaggacattctagagatggttggggaaatttgaaggtagactgtgtattcaattacattgttataaaatttttggagtctatttacattgttttatagttgta

SEQ ID NO: 231319 - DNA, 578 bp, Homo sapiens
ccctctccccttctctcagtaatctccagccatgtgggtcactgcactgcctagctracacaggaaattacctcttcttctacctctcttctcctcttctacctctattctcctggctcgttgtgtggctgaccgcttcttactctttaggtttcagcttaaatgtcatcgacgcagggaggccctcactgacctcccgtttactcaccacgttctctgtcatggctctctttggttccatcctcatacttggccctgtagtgtatcctgtctatttaactcagcttccttccctgccttttttctcacactgagaagaggaatcttgtctaccttgttcctcaatatatccagccccttcacaataccgtaagtctgatttccaataagtattctatctgataaatgaatgaaaaaatgagtaccttaactcataagtaggtgatttgttattgaactctcagggtacatctctcttattctcaagagcagagctgcctgcctactagcacagagttatgcattgggtaggtatcttgtaattatgaataagtgcctaccacaaatttaatatctac

SEQ ID NO: 231320 - DNA, 578 bp, Homo sapiens
ccctctccccttctctcagtaatctccagccatgtgggtcactgcactgcctagctaacacaggaaattacctcttcttctacctctcttctcctcttctacctctattctcctggctcgttgtgtggctgaccgcttcttactctttaggtttcagcttaaatgtcatcgacgcagggaggccctcactgacctccygtttactcaccacgttctctgtcatggctctctttggttccatcctcatacttggccctgtagtgtatcctgtctatttaactcagcttccttccctgccttttttctcacactgagaagaggaatcttgtctaccttgttcctcaatatatccagccccttcacaataccgtaagtctgatttccaataagtattctatctgataaatgaatgaaaaaatgagtaccttaactcataagtaggtgatttgttattgaactctcagggtacatctctcttattctcaagagcagagctgcctgcctactagcacagagttatgcattgggtaggtatcttgtaattatgaataagtgcctaccacaaatttaatatctac

SEQ ID NO: 231321 - DNA, 562 bp, Homo sapiens
ctccccttctctcagtaatctccagccatgtgggtcactgcactgcctagctaacacaggaaattacctcttcttctacctctcttctcctcttctacctctattctcctggctcgttgtgtggctgaccgcttcttactctttaggtttcagcttaaatgtcatcgacgcagggaggccctcactgacctcccgtttactcaccacgttctctgtcatggctctctttggttccatcctcatacttggccctgtagtgtatcctgtctatttaactcarcttccttccctgccttttttctcacactgagaagaggaatcttgtctaccttgttcctcaatatatccagccccttcacaataccgtaagtctgatttccaataagtattctatctgataaatgaatgaaaaaatgagtaccttaactcataagtaggtgatttgttattgaactctcagggtacatctctcttattctcaagagcagagctgcctgcctactagcacagagttatgcattgggtaggtatcttgtaattatgaataagtgcctaccacaaa

SEQ ID NO: 231322 - DNA, 603 bp, Homo sapiens
gtgtatgtgtgtgtgacacacagttctacatatagatagattatagctcaatgacagaatcccaggaggcttcctactaaataagacaaaattataagataatagtttatcaagaaataaggtaacaattgagagcttaatatacacttaggaatgttctaagccggttaatgacatagtgcatttaagaaatctagaaggcgggccaggcacggtggctcaggcctgtaattctagcactttggaaggcagaggtgggcggatcacttgaggtcaggagttcaaaacctgcctggccaacatggtgaaaccccatggcgggcacctgtaatcccagctactcaggaggctgaggcagaagaaccatttgaacccgggaggtggaggctgcagggcagcagaggttgcagtgagccgaggtcacgccactgcactccagccttggtgacagagcaagactccgtctcaaaaaaaaaaaaaaaraaaaaagaaagaaatctagaaggtgagtagatactttaaaccagtggtatccaatcctttgagtgtgaggacgtttttgcttatctgtggtgatgggtatcaaaaaaattattcacaaac

SEQ ID NO: 231323 - DNA, 558 bp, Homo sapiens
cacatgtatacgtatgtcactaacctgcacattgtgcacatgtaccctaaaacttaaagtataattaaaaaaaaatcactaagcagaaaagatgcaacatctgtcctcggtgttcctaagatttctaaacmaaatcccattatgtccactactcaccttacgtattttaggcatgatgcgaaaataatatttgaaaaaatactttaacatagaggtcctcaataatacaaatactcctatgtcactaaaagcaatggaacagcagtcagattatgcagcccattataagcgataaagtggacattggctctccttgtaaacttggagatcactgaagaaaaaaaggaaattcttagaagatttaagagcatgggacagaagatgaccctatttgtgaataagagaaaaaatgcagccttttcggaaattatttttattggcgcagtttcccagactacatttgaaggcctggcttccttcctgacctctggcctcctagcctgtgtcctctccttcattcagtctcacctacctgggggtttggctgctgtctcatgt

SEQ ID NO: 231324 - DNA, 558 bp, Homo sapiens
cacatgtatacgtatgtcactaacctgcacattgtgcacatgtaccctaaaacttaaagtataattaaaaaaaaatcactaagcagaaaagatgcaacatctgtcctcggtgttcctaagatttctaaacaaaatcccattatgtccactaytcaccttacgtattttaggcatgatgcgaaaataatatttgaaaaaatactttaacatagaggtcctcaataatacaaatactcctatgtcactaaaagcaatggaacagcagtcagattatgcagcccattataagcgataaagtggacattggctctccttgtaaacttggagatcactgaagaaaaaaaggaaattcttagaagatttaagagcatgggacagaagatgaccctatttgtgaataagagaaaaaatgcagccttttcggaaattatttttattggcgcagtttcccagactacatttgaaggcctggcttccttcctgacctctggcctcctagcctgtgtcctctccttcattcagtctcacctacctgggggtttggctgctgtctcatgt

SEQ ID NO: 231325 - DNA, 558 bp, Homo sapiens
cacatgtatacgtatgtcactaacctgcacattgtgcacatgtaccctaaaacttaaagtataattaaaaaaaaatcactaagcagaaaagatgcaacatctgtcctcggtgttcctaagatttctaaacaaaatcccattatgtccactactcaccttacgtattttaggcatgatgcgaaaataatatttgaaaaaatactttaacatagaggtcctcaataatacaaatactcctatgtcactaaaagcaatggaacagcagtcagattatgcagcccattataagcgataaagtggacattggctctccttgtaaacttggagatcactgaagaaaaaaaggaaattcttagaagatttaagagyatgggacagaagatgaccctatttgtgaataagagaaaaaatgcagccttttcggaaattatttttattggcgcagtttcccagactacatttgaaggcctggcttccttcctgacctctggcctcctagcctgtgtcctctccttcattcagtctcacctacctgggggtttggctgctgtctcatgt

SEQ ID NO: 231326 - DNA, 405 bp, Homo sapiens
atatttgtggagcatgtactatgtgctcaggagtatgtcacagagcactgtgctgggaagctcacattatgtgtgttaattctcacagcatcctgggaggtgggtacaaagtgtgtgatacttcccaggatttaaatgyagggcccagcatttctattttttcttctgttttcctatcattgatttttaaaaaatatatagaataatagctcaatgtagataaatgggagagacacagaagaaagttttaagtacaattcgggaattttttatttttgtgtttatagttactttgagacttgtgaaaaatccactgaaactgcaaagatggagaacaggttgctggatgggatgtctctagaaatactggttttaattttacataaaataatttaagtacattaa

SEQ ID NO: 231327 - DNA, 591 bp, Homo sapiens
ttaattttacataaaataatttaagtacattaaattcaaagtacattgcctttctccatttatcagcttttgtgtttcaggaaattgggagcaccagctctggagaggcagtaggaatagctactccaaactctgatcttctctaagcagttctgtgaggtatttcagtgtggggtcagacctggacaaggttcagtagaggggggatctgggcaaagttgggacagaaaatgggccctaggcttctgctctctaggccactaagtagtttcagttttgtcttttctaagcctgccyaaaagaaatttgattcccagagtttgtgaaatttttatctattttgccacttccccatctataacatacaataacaaggaatttaaccaaaacccttttgtttttccagaccaattatatttgaagttaaatatttattcttagcaaggcaaaaacaatacaaataatgacttctcttctgtccataaacagccatgcaggtggtggtatcaaaactcacaaaacaataaaagggaagtaacccaaacgaagcttaagtctcctgtacagttttcatctttgtactgaatacat

SEQ ID NO: 231328 - DNA, 594 bp, Homo sapiens
gttttaattttacataaaataatttaagtacattaaattcaaagtacattgcctttctccatttatcagcttttgtgtttcaggaaattgggagcaccagctctggagaggcagtaggaatagctactccaaactctgatcttctctaagcagttctgtgaggtatttcagtgtggggtcagacctggacaaggttcagtagaggggggatctgggcaaagttgggacagaaaatgggccctaggcttctgctctctaggccactaagtagtttcagttttgtcttttctaagcctgcccaaaagaaatttgattcccagagtttgtgwaatttttatctattttgccacttccccatctataacatacaataacaaggaatttaaccaaaacccttttgtttttccagaccaattatatttgaagttaaatatttattcttagcaaggcaaaaacaatacaaataatgacttctcttctgtccataaacagccatgcaggtggtggtatcaaaactcacaaaacaataaaagggaagtaacccaaacgaagcttaagtctcctgtacagttttcatctttgtactgaatacat

SEQ ID NO: 231329 - DNA, 589 bp, Homo sapiens
taattttacataaaataatttaagtacattaaattcaaagtacattgcctttctccatttatcagcttttgtgtttcaggaaattgggagcaccagctctggagaggcagtaggaatagctactccaaactctgatcttctctaagcagttctgtgaggtatttcagtgtggggtcagacctggacaaggttcagtagaggggggatctgggcaaagttgggacagaaaatgggccctaggcttctgctctctaggccactaagtagtttcagttttgtcttttctaagcctgcccaaaagaaatttgattcccagagtttgtgaaatttttatctattttgccacttccccatctataacatacaataacaaggaatttaaycaaaacccttttgtttttccagaccaattatatttgaagttaaatatttattcttagcaaggcaaaaacaatacaaataatgacttctcttctgtccataaacagccatgcaggtggtggtatcaaaactcacaaaacaataaaagggaagtaacccaaacgaagcttaagtctcctgtacagttttcatctttgtactgaataca

SEQ ID NO: 231330 - DNA, 591 bp, Homo sapiens
ttaattttacataaaataatttaagtacattaaattcaaagtacattgcctttctccatttatcagcttttgtgtttcaggaaattgggagcaccagctctggagaggcagtaggaatagctactccaaactctgatcttctctaagcagttctgtgaggtatttcagtgtggggtcagacctggacaaggttcagtagaggggggatctgggcaaagttgggacagaaaatgggccctaggcttctgctctctaggccactaagtagtttcagttttgtcttttctaagcctgcccaaaagaaatttgattcccagagtttgtgaaatttttatctattttgccacttccccatctataacatacaataacaaggaatttaaccaaaamccttttgtttttccagaccaattatatttgaagttaaatatttattcttagcaaggcaaaaacaatacaaataatgacttctcttctgtccataaacagccatgcaggtggtggtatcaaaactcacaaaacaataaaagggaagtaacccaaacgaagcttaagtctcctgtacagttttcatctttgtactgaatacat

SEQ ID NO: 231331 - DNA, 591 bp, Homo sapiens
ttaattttacataaaataatttaagtacattaaattcaaagtacattgcctttctccatttatcagcttttgtgtttcaggaaattgggagcaccagctctggagaggcagtaggaatagctactccaaactctgatcttctctaagcagttctgtgaggtatttcagtgtggggtcagacctggacaaggttcagtagaggggggatctgggcaaagttgggacagaaaatgggccctaggcttctgctctctaggccactaagtagtttcagttttgtcttttctaagcctgcccaaaagaaatttgattcccagagtttgtgaaatttttatctattttgccacttccccatctataacatacaataacaaggaatttaaccaaaacccttttgtttttccagaccaattatatttgaagttaaatatttattcttagcaaggcaaaaacaatacaaataatgacttctcttctgtccataaacarccatgcaggtggtggtatcaaaactcacaaaacaataaaagggaagtaacccaaacgaagcttaagtctcctgtacagttttcatctttgtactgaatacat

SEQ ID NO: 231332 - DNA, 462 bp, Homo sapiens
atttaggtcttggagggctggtgagctatgtttgtgggccacaatgtggcccatgccaaatgtttgtgggcatgttggcaagggaggtgggagggaacagaatttctcaggtttaatcgatgcgtatgtgtgaatctgggttaggtttatgggccccatatctctgaaatcagtgtcagaacggaagatgccaggagcactgaaggcggtgaaataactgactgctgtcctgaaaagttatttttgtagaaatttaactgctctagaaaggactgtagatgccaagagagagaccattctgtttgcagatttaggaaatactttgctgcactttgccrcacaattgcaggttgtgactggaatcctgagaaagaatgttttctcaagtgaagtctgctcgacattttgtgtataacatctggtaattctggacagtgtgtggaaaatataactaaaagcaaa

SEQ ID NO: 231333 - DNA, 483 bp, Homo sapiens
tatcattccccacagtatgtcaaaaaaagtttcagagatatcatattgagttatttaggccaaagtcaataaatgggcctaggaataagactttgaaaataatattacacwctatattaggcatggtggctcatgcctgtaatcctagcactttaaaaagctgtggcagaaagatcacttgaggccaggaatttgagatcagccagagcaacatagtgagacccccatctctacaaaaaaaatttttttaattacccgggcatggtggctcaatcctgtagaaccagctagttgggatactgaggcaaaaggatggcttgtacccagagttcagggctgcagtgaattattatcactgcacttctgcctggatgacagacaaagaccctatctcaaaaaacaacacaaaataatgaaatctatgattaaggattctgatgctataagcctttccttaaactgcaaatgtttcatgctaatttg

SEQ ID NO: 231334 - DNA, 601 bp, Homo sapiens
gggttcagttccttcttctgtaagaaagggttaatacctacctcatagaattgatgtgttttaaatatagttgagcattcacataaagaggtttttgaaattttcttcacttttccgtaagttatagccaactcatctttttgttccagtttctccctcatgatatttggtatatatgrcttccaatggtgactgctttaaaggctggtgtacattcaaatgcatatacatgttcttgtgttaaatttttaaaaaccaaactcctgtccaggcgcagtggctcacgcctgtaatcccagcactttgggaagccgaggcaggcggatcacctgaggtcgggcgttcgagaccaacctgaccaacatggagaaaccccatctctactaacaacacaaaattggctggtcatggtggtgcatgcctgtaatcccagctgcttgggaggctgaagcaggagaatcgcttgaacctgggaggcagaggttgcagtgagctgagatggcaccattgcactccagcctgggcaacaagagtgaaactccatctcaaaaacaaaacaaaacaaaacaaaacaaaactccttttgttgctttacaccttc

SEQ ID NO: 231335 - DNA, 601 bp, Homo sapiens
gggttcagttccttcttctgtaagaaagggttaatacctacctcatagaattgatgtgttttaaatatagttgagcattcacataaagaggtttttgaaattttcttcacttttccgtaagttatagccaactcatctttttgttccagtttctccctcatgatatttggtatatatgacttccaatggtgactgctttaaaggctggtgtacattcaaatgcatatacatgttcttgtgttaaatttttaaaaaccaaactcctgtccaggcgcagtggctcacgcctgtaatcccagcactttgggaagccgaggcaggcggatcacctgaggtcgggcgttcgagaccaacctgaccaacatggagaaaccccatctctactaacaacacaaaattggctggtcatggtggtgcatgcctgtaatcccagctgcttgggaggctgaagcaggagaatcgcttgaacctgggaggcagaggttgcagtgagctgagatggcrccattgcactccagcctgggcaacaagagtgaaactccatctcaaaaacaaaacaaaacaaaacaaaacaaaactccttttgttgctttacaccttc

SEQ ID NO: 231336 - DNA, 608 bp, Homo sapiens
ctgactgacacctcttatggccaggtgcccctctgagacaaagtttccagaggaacactcaggcagcaacatttgctgttctgcagcctcygctggtgacacccatgtaaatagggtctggagtggacctccagcaaactccaacagacctgcagctgagggtcctgaccgttagaagaaaaactaacaaacagaaaggacatccacaccaaaaccccatctgtacgtcaccatcaccaaagaccaaaggtaaataaaaccacaaagatggggagaaaccagagcagaaaagctgaaaagtctaaaaatcagagtgcctcttctcctccaaaggaatgcagctcctcaccagcaatggaacaaagctggatggtgaatgactttgatgagttgagagaagaagtcttcagacggtcagtaataacaaccttctccaagctaacggaggatgtttgaacccatagcaaagagagatcagactgttactgtgtctatgtagaaagaagtagacataagaaactccattttgttctgtactaagataaattattctgccttgagatgctgttaatctgtaatgctagccccaaccctgtgtttgcagagac

SEQ ID NO: 231337 - DNA, 608 bp, Homo sapiens
ctgactgacacctcttatggccaggtgcccctctgagacaaagtttccagaggaacactcaggcagcaacatttgctgttctgcagcctccgctggtgacacccatgyaaatagggtctggagtggacctccagcaaactccaacagacctgcagctgagggtcctgaccgttagaagaaaaactaacaaacagaaaggacatccacaccaaaaccccatctgtacgtcaccatcaccaaagaccaaaggtaaataaaaccacaaagatggggagaaaccagagcagaaaagctgaaaagtctaaaaatcagagtgcctcttctcctccaaaggaatgcagctcctcaccagcaatggaacaaagctggatggtgaatgactttgatgagttgagagaagaagtcttcagacggtcagtaataacaaccttctccaagctaacggaggatgtttgaacccatagcaaagagagatcagactgttactgtgtctatgtagaaagaagtagacataagaaactccattttgttctgtactaagataaattattctgccttgagatgctgttaatctgtaatgctagccccaaccctgtgtttgcagagac

SEQ ID NO: 231338 - DNA, 608 bp, Homo sapiens
ctgactgacacctcttatggccaggtgcccctctgagacaaagtttccagaggaacactcaggcagcaacatttgctgttctgcagcctccgctggtgacacccatgtaaatagggtctggagtggacctccagcaaactccaacagacctgcagctgagggtcctgacygttagaagaaaaactaacaaacagaaaggacatccacaccaaaaccccatctgtacgtcaccatcaccaaagaccaaaggtaaataaaaccacaaagatggggagaaaccagagcagaaaagctgaaaagtctaaaaatcagagtgcctcttctcctccaaaggaatgcagctcctcaccagcaatggaacaaagctggatggtgaatgactttgatgagttgagagaagaagtcttcagacggtcagtaataacaaccttctccaagctaacggaggatgtttgaacccatagcaaagagagatcagactgttactgtgtctatgtagaaagaagtagacataagaaactccattttgttctgtactaagataaattattctgccttgagatgctgttaatctgtaatgctagccccaaccctgtgtttgcagagac

SEQ ID NO: 231339 - DNA, 536 bp, Homo sapiens
gattaacaagttttatattttcaccagagatatttagccctgcctggtaatcagaaaagtgcaaattaacataaaataagatatattttgtaaagtcatgctggtattgaaaaagtaattactaccattggcaaatgtgaggaaaaaggcattctcatacactgttggtatatgaaattggtaaattatttctgaagggtaacttagtgctgtgtatcaaaatttcaaataacctgacatccctttaactcaacaactccacttstgggactagatttcacaggaaaacataacttgtgtaaacatacacttattaagggcattaattatatattacacataatgaacaatagcttaataaatacataaaatatatgtaataagaaggtgaattggaagtattaagaaagaattataaaaagtgtggggtaacagatgttagaccctttagcctagttttagttgacaatcatctgcagatatagtttgtgtgagagacatcttactctgtaaatcatttggagagacacctgcaa

SEQ ID NO: 231340 - DNA, 483 bp, Homo sapiens
tatcattccccacagtatgtcaaaaaaagtttcagagatatcatattgagttatttaggccaaagtcaataaatgggcctaggaataagactttgaaaataatattacacactatattaggcatggtggctcatgcctgtaatcctagcactttaaaaagctgtggcagaaagatcacttgaggccaggaatttgagatcagccagagcaacatagtgagacccccatctctacaaaaaaaatttttttaattacccgggcatggtggctcawtcctgtagaaccagctagttgggatactgaggcaaaaggatggcttgtacccagagttcagggctgcagtgaattattatcactgcacttctgcctggatgacagacaaagaccctatctcaaaaaacaacacaaaataatgaaatctatgattaaggattctgatgctataagcctttccttaaactgcaaatgtttcatgctaatttg

SEQ ID NO: 231341 - DNA, 483 bp, Homo sapiens
tatcattccccacagtatgtcaaaaaaagtttcagagatatcatattgagttatttaggccaaagtcaataaatgggcctaggaataagactttgaaaataatattacacactatattaggcatggtggctcatgcctgtaatcctagcactttaaaaagctgtggcagaaagatcacttgaggccaggaatttgagatcagccagagcaacatagtgagacccccatctctacaaaaaaaatttttttaattacccgggcatggtggctcaakcctgtagaaccagctagttgggatactgaggcaaaaggatggcttgtacccagagttcagggctgcagtgaattattatcactgcacttctgcctggatgacagacaaagaccctatctcaaaaaacaacacaaaataatgaaatctatgattaaggattctgatgctataagcctttccttaaactgcaaatgtttcatgctaatttg

SEQ ID NO: 231342 - DNA, 618 bp, Homo sapiens
catttggttctggatacatgttgaacttagttgaatataaaaatcaatagataaaaagtgtgtttaccatactgtataattccatgtacgtgaagcatccagaaaagataaacgtatagggayaaaaagtagattaatatttgcaaagggctgggaatagaagctggtagtgactgctaatgggcatgagggatcttgcagtgatggaaatgctgtaaagttggattgtagagatggctgcacaactcagtaaatggactaaaaatcttttaactttaagttaaaacagatacattctatagtatgtaaattatatttcaacaaagctgttttaataaaaaaaggaaaaatgtgtttactatatcagcttagaaacatgcctcatttctaggaaataaaaggtagagatgagagatgatttactttgagaaaagacattgtgtcacctatgaaattttattaggcacagagtcatattttaagatagatagttctgtactgctgaaataattttaatgactttatgttgccacatgttaagaccataatgtaggtataaatggaaatgtttacacctgaaatgagtattttcaaattaaaatttaattaagtgatttc

SEQ ID NO: 231343 - DNA, 621 bp, Homo sapiens
aaacatttggttctggatacatgttgaacttagttgaatataaaaatcaatagataaaaagtgtgtttaccatactgtataattccatgtacgtgaagcatccagaaaagataaacgtatagggacaaaaagtagattaatatttgcaaagggctgggaatagaagctggtagtgactgctaatgggcatgaggratcttgcagtgatggaaatgctgtaaagttggattgtagagatggctgcacaactcagtaaatggactaaaaatcttttaactttaagttaaaacagatacattctatagtatgtaaattatatttcaacaaagctgttttaataaaaaaaggaaaaatgtgtttactatatcagcttagaaacatgcctcatttctaggaaataaaaggtagagatgagagatgatttactttgagaaaagacattgtgtcacctatgaaattttattaggcacagagtcatattttaagatagatagttctgtactgctgaaataattttaatgactttatgttgccacatgttaagaccataatgtaggtataaatggaaatgtttacacctgaaatgagtattttcaaattaaaatttaattaagtgatttc

SEQ ID NO: 231344 - DNA, 618 bp, Homo sapiens
catttggttctggatacatgttgaacttagttgaatataaaaatcaatagataaaaagtgtgtttaccatactgtataattccatgtacgtgaagcatccagaaaagataaacgtatagggacaaaaagtagattaatatttgcaaagggctgggaatagaagctggtagtgactgctaatgggcatgagggatcttgcagtgatggaaatgctgtaargttggattgtagagatggctgcacaactcagtaaatggactaaaaatcttttaactttaagttaaaacagatacattctatagtatgtaaattatatttcaacaaagctgttttaataaaaaaaggaaaaatgtgtttactatatcagcttagaaacatgcctcatttctaggaaataaaaggtagagatgagagatgatttactttgagaaaagacattgtgtcacctatgaaattttattaggcacagagtcatattttaagatagatagttctgtactgctgaaataattttaatgactttatgttgccacatgttaagaccataatgtaggtataaatggaaatgtttacacctgaaatgagtattttcaaattaaaatttaattaagtgatttc

SEQ ID NO: 231345 - DNA, 620 bp, Homo sapiens
aacatttggttctggatacatgttgaacttagttgaatataaaaatcaatagataaaaagtgtgtttaccatactgtataattccatgtacgtgaagcatccagaaaagataaacgtatagggacaaaaagtagattaatatttgcaaagggctgggaatagaagctggtagtgactgctaatgggcatgagggatcttgcagtgatggaaatgctgtaaagttggattgtagagatggctgcacaactcagtaaatkgactaaaaatcttttaactttaagttaaaacagatacattctatagtatgtaaattatatttcaacaaagctgttttaataaaaaaaggaaaaatgtgtttactatatcagcttagaaacatgcctcatttctaggaaataaaaggtagagatgagagatgatttactttgagaaaagacattgtgtcacctatgaaattttattaggcacagagtcatattttaagatagatagttctgtactgctgaaataattttaatgactttatgttgccacatgttaagaccataatgtaggtataaatggaaatgtttacacctgaaatgagtattttcaaattaaaatttaattaagtgatttc

SEQ ID NO: 231346 - DNA, 620 bp, Homo sapiens
aacatttggttctggatacatgttgaacttagttgaatataaaaatcaatagataaaaagtgtgtttaccatactgtataattccatgtacgtgaagcatccagaaaagataaacgtatagggacaaaaagtagattaatatttgcaaagggctgggaatagaagctggtagtgactgctaatgggcatgagggatcttgcagtgatggaaatgctgtaaagttggattgtagagatggctgcacaactcagtaaatggactaaaaatmttttaactttaagttaaaacagatacattctatagtatgtaaattatatttcaacaaagctgttttaataaaaaaaggaaaaatgtgtttactatatcagcttagaaacatgcctcatttctaggaaataaaaggtagagatgagagatgatttactttgagaaaagacattgtgtcacctatgaaattttattaggcacagagtcatattttaagatagatagttctgtactgctgaaataattttaatgactttatgttgccacatgttaagaccataatgtaggtataaatggaaatgtttacacctgaaatgagtattttcaaattaaaatttaattaagtgatttc

SEQ ID NO: 231347 - DNA, 602 bp, Homo sapiens
ttggttctggatacatgttgaacttagttgaatataaaaatcaatagataaaaagtgtgtttaccatactgtataattccatgtacgtgaagcatccagaaaagataaacgtatagggacaaaaagtagattaatatttgcaaagggctgggaatagaagctggtagtgactgctaatgggcatgagggatcttgcagtgatggaaatgctgtaaagttggattgtagagatggctgcacaactcagtaaatggactaaaaatcttttaactttaagttaaaacagatacattctatagtatgtaaattatatttcaacaaagctgtttwaataaaaaaaggaaaaatgtgtttactatatcagcttagaaacatgcctcatttctaggaaataaaaggtagagatgagagatgatttactttgagaaaagacattgtgtcacctatgaaattttattaggcacagagtcatattttaagatagatagttctgtactgctgaaataattttaatgactttatgttgccacatgttaagaccataatgtaggtataaatggaaatgtttacacctgaaatgagtattttcaaattaaaattta

SEQ ID NO: 231348 - DNA, 621 bp, Homo sapiens
aaacatttggttctggatacatgttgaacttagttgaatataaaaatcaatagataaaaagtgtgtttaccatactgtataattccatgtacgtgaagcatccagaaaagataaacgtatagggacaaaaagtagattaatatttgcaaagggctgggaatagaagctggtagtgactgctaatgggcatgagggatcttgcagtgatggaaatgctgtaaagttggattgtagagatggctgcacaactcagtaaatggactaaaaatcttttaactttaagttaaaacagatacattctatagtatgtaaattatatttcaacaaagctgttttaataaaaaaaggaaaaatgtgtttactatatcagcttagaaacatgcctcatttctaggaaataaaaggtagagatgagagatgatttactttgagaaaagacattgtgtcacctatkaaattttattaggcacagagtcatattttaagatagatagttctgtactgctgaaataattttaatgactttatgttgccacatgttaagaccataatgtaggtataaatggaaatgtttacacctgaaatgagtattttcaaattaaaatttaattaagtgatttc

SEQ ID NO: 231349 - DNA, 444 bp, Homo sapiens
atattttaagatagatagttctgtactgctgaaataattttaatgactttatgttgccacatgttaagwccataatgtaggtataaatggaaatgtttacacctgaaatgagtattttcaaattaaaatttaattaagtgatttccttcgacacttaattctagacttcccagatgaactgaagtgtattgctgtgtcttgtaataccttgctttaagtagctttttatgtgtttttttttttggtaatctttgttattattcatattaattttaaaaatctgaaaatacttcaaattacatatttttatgactacgtaatgttgtaaaggcacctacatgtcataaaatcataatttagaatgaatgtaataattaacaaaactatgtttgatttagttttgccactggtatttatagtttactttgactatttatattaata

SEQ ID NO: 231350 - DNA, 491 bp, Homo sapiens
ttttagcaattaaatatcaaagccaacccaattagtctaatacaggagactcgttcaatcacatgtttatgtttttctctctatgaaaaagaatctaaattggccttttttcactatgcagcagaactgtgtttctggacctctaccagtttgtcagctgagcagttctggctgcagcttgtctgttgayggatagcacagcccctctatctgagtgctcagcagagtgcttgtgaaggcagcaccacagcaacagttgctcagagcgaacggattcaggagcctcaatttagcaatagagtccagggttttcagctcagtgtctttagcctgtctctgctggtcatgtcagttatgttctattcaatccaggaggtgctgtttacgttgtagtacatatatagtcattgcctaatgagtcatacagagagaaaagtaagttataaattatgtcccccatttgctgcaactctcagtggtaagaatgattc

SEQ ID NO: 231351 - DNA, 491 bp, Homo sapiens
ttttagcaattaaatatcaaagccaacccaattagtctaatacaggagactcgttcaatcacatgtttatgtttttctctctatgaaaaagaatctaaattggccttttttcactatgcagcagaactgtgtttctggacctctaccagtttgtcagctgagcagttctggctgcagcttgtctgttgatggatagcacagcccctctatctgagtgctcagcagagtgcttgtgaaggcagcaccacagcaacagttgctcagagcgaacggattcaggagcctcaatttagcaatagagtccagggttttcagctcagtgtctttagcctgtctctgctggtcatgtcagttatgttctattcaatccaggaggtgctgtttacgttgtagtacatatatagtcaytgcctaatgagtcatacagagagaaaagtaagttataaattatgtcccccatttgctgcaactctcagtggtaagaatgattc

SEQ ID NO: 231352 - DNA, 593 bp, Homo sapiens
cttgctgagtggtaataaaaacagataccctgccctcccagagccaacctccagtgccagggcaagcagcagcaagtaagaaaaccttggtttctgtatctgcatcagctacacagtgcttgcacacaggagatatcagccagttttctcagttaaagagacagaaacaaaatgtgtcctcactactttttgaatttaccatgttatctaatattttaacttaattgaatgaataaactccctatgcatctggacacatgcatggaaaattcacaaacattycaaaccaaaacagagtattttgccaaaagaaaatttcttagatatgtgaagttcacttttttcttttagtgattttaatgtaatgaaattgaaaactctgtgcttctaaaagactttttaaggagcacggtatttttccattttgaaaaaaaattggcaaaatatcttctaatatagatagaaggtaattggctgagggtaataaacagaagattaaaaaacaacctttatcccctgatattctgtcaagggctacagtgaattacacaccctggcatgggtttgtacaccatgtgctggaagccagcagt

SEQ ID NO: 231353 - DNA, 593 bp, Homo sapiens
cttgctgagtggtaataaaaacagataccctgccctcccagagccaacctccagtgccagggcaagcagcagcaagtaagaaaaccttggtttctgtatctgcatcagctacacagtgcttgcacacaggagatatcagccagttttctcagttaaagagacagaaacaaaatgtgtcctcactactttttgaatttaccatgttatctaatattttaacttaattgaatgaataaactccctatgcatctggacacatgcatggaaaattcacaaacattccaaaccaaaacagagtattttgccaaaagaaaatttcttagatatgtgaagttcacttttttcttttagtgattttaatgtaatgaaattgaaaactctgtgcttctaaaagactttttaaggagcacggtatttttccattttgaaaaaaaattggcaaaatatcttctamtatagatagaaggtaattggctgagggtaataaacagaagattaaaaaacaacctttatcccctgatattctgtcaagggctacagtgaattacacaccctggcatgggtttgtacaccatgtgctggaagccagcagt

SEQ ID NO: 231354 - DNA, 555 bp, Homo sapiens
tgaattctaccggaggtacaaagaggaactggtgccatcgcttctgaaactatgccaatcaatagaaaaagagggaatcctccctaactaattttatgaggccagcattatcctgataccaaagcctggcagaggcacaacaaaaaaaaagagaattttagaccaatatccctgatgaacatcgatgcaaaaatcctcaataaaatgctggcaaaccaaatccagcagcacatcaaaaarcttatctaccatgatcaagttggcttcatccctgggatgcaaggctggttcaacatatgcaaatcaataaatgtaatccatcatacaaacagaaccaaagacaaaaaccacatgattatctcaatagatgcagaaaaggccttcgacaaaattcaacagccttcatgctaaaaactctcaataaactaggtattgatggggatgtatctcaaaataataagagctatttatgaaaaacccacagccaatatcatgctgaatgggcaaaacaggaagcattcactttgaaaactggcacaagacagggatgcaacc

SEQ ID NO: 231355 - DNA, 554 bp, Homo sapiens
gaattctaccggaggtacaaagaggaactggtgccatcgcttctgaaactatgccaatcaatagaaaaagagggaatcctccctaactaattttatgaggccagcattatcctgataccaaagcctggcagaggcacaacaaaaaaaaagagaattttagaccaatatccctgatgaacatcgatgcaaaaatcctcaataaaatgctggcaaaccaaatccagcagcacatcaaaaaacttatctaccatgatcaagttggcttcatccctgggatgcaaggctggttcaacatatgcaaatcaataaatgtaatccatcatayaaacagaaccaaagacaaaaaccacatgattatctcaatagatgcagaaaaggccttcgacaaaattcaacagccttcatgctaaaaactctcaataaactaggtattgatggggatgtatctcaaaataataagagctatttatgaaaaacccacagccaatatcatgctgaatgggcaaaacaggaagcattcactttgaaaactggcacaagacagggatgcaacc

SEQ ID NO: 231356 - DNA, 330 bp, Homo sapiens
ccaggaacaggtgatccatgcaggagagaggagcagcattgctgagagccaggggtgaagcaattcaagctggagacactgagacaaacacaggggcgcctggcattctctgaaaggcagtacagtggttctcaccactcagtaaatgtggtaattacctcttatctggttacaatgcgtcttcccaggcctgccarcagggattcttaatcctgatgcaaatgatgtggcagcacttgtggttatagacatgagtgtttgaatcacagatctatgtccaaacccaaatcccctcagtaattaactgtaagctgtcattcaattacttaa

SEQ ID NO: 231357 - DNA, 529 bp, Homo sapiens
aggggattaagagaagtaagtacagttagtgagcagagcaagccagcgtggtgagggcctttcctaggtgaggcatccaccacatttgaaagtgggatgcagggcaagagctcaacatcaaccaggatrggcaggaatgaagtaaatagctcacacctgttccttcatgggtcagttcctttcattttcacttttgactctgatgcaaaattagaactcttctctgctcaaatgttactattcttaataaagtaaagtaaataagtagggtccaaaaacttcaattgcgtaaagtacatgctcttgttattacaaggcaaatgggaaatattttgcagttggtcattgccatcacaataacacaaattctaaaatttacactgtttacaactgaaccacaccctcaaataatcaaaaaatggtccctccctaacctctctccccaggaagagaaggtctttggctgccccaacctgagcaggagagcaggtggagagtgggagcccacagctgcagtggcaagaagcct

SEQ ID NO: 231358 - DNA, 592 bp, Homo sapiens
gttcataggggattaagagaagtaagtacagttagtgagcagagcaagccagcgtggtgagggcctttcctaggtgaggcatccaccacatttgaaagtgggatgcagggcaagagctcaacatcaaccaggatgggcaggaatgaagtaaatagctcacacctgttccttcatgggtcagttcctttcattttcacttttgactctgatgcaaaattagaactcttctctgctcaaatgttactattcttaataaagtaaagtaaataagtagggtccaaaaacttyaattgcgtaaagtacatgctcttgttattacaaggcaaatgggaaatattttgcagttggtcattgccatcacaataacacaaattctaaaatttacactgtttacaactgaaccacaccctcaaataatcaaaaaatggtccctccctaacctctctccccaggaagagaaggtctttggctgccccaacctgagcaggagagcaggtggagagtgggagcccacagctgcagtggcaagaagcctgagggctgatggcctagaccaaataatagggaattgggctgagttgtttgaatcgtt

SEQ ID NO: 231359 - DNA, 592 bp, Homo sapiens
gttcataggggattaagagaagtaagtacagttagtgagcagagcaagccagcgtggtgagggcctttcctaggtgaggcatccaccacatttgaaagtgggatgcagggcaagagctcaacatcaaccaggatgggcaggaatgaagtaaatagctcacacctgttccttcatgggtcagttcctttcattttcacttttgactctgatgcaaaattagaactcttctctgctcaaatgttactattcttaataaagtaaagtaaataagtagggtccaaaaacttcaattgcgtaaagtacatgctcttgttattacaaggcaaatgggawatattttgcagttggtcattgccatcacaataacacaaattctaaaatttacactgtttacaactgaaccacaccctcaaataatcaaaaaatggtccctccctaacctctctccccaggaagagaaggtctttggctgccccaacctgagcaggagagcaggtggagagtgggagcccacagctgcagtggcaagaagcctgagggctgatggcctagaccaaataatagggaattgggctgagttgtttgaatcgtt

SEQ ID NO: 231360 - DNA, 592 bp, Homo sapiens
gttcataggggattaagagaagtaagtacagttagtgagcagagcaagccagcgtggtgagggcctttcctaggtgaggcatccaccacatttgaaagtgggatgcagggcaagagctcaacatcaaccaggatgggcaggaatgaagtaaatagctcacacctgttccttcatgggtcagttcctttcattttcacttttgactctgatgcaaaattagaactcttctctgctcaaatgttactattcttaataaagtaaagtaaataagtagggtccaaaaacttcaattgcgtaaagtacatgctcttgttattacaaggcaaatgggaaatattttgcagttggtcattgccatcacaataacacaaattctaaaayttacactgtttacaactgaaccacaccctcaaataatcaaaaaatggtccctccctaacctctctccccaggaagagaaggtctttggctgccccaacctgagcaggagagcaggtggagagtgggagcccacagctgcagtggcaagaagcctgagggctgatggcctagaccaaataatagggaattgggctgagttgtttgaatcgtt

SEQ ID NO: 231361 - DNA, 592 bp, Homo sapiens
gttcataggggattaagagaagtaagtacagttagtgagcagagcaagccagcgtggtgagggcctttcctaggtgaggcatccaccacatttgaaagtgggatgcagggcaagagctcaacatcaaccaggatgggcaggaatgaagtaaatagctcacacctgttccttcatgggtcagttcctttcattttcacttttgactctgatgcaaaattagaactcttctctgctcaaatgttactattcttaataaagtaaagtaaataagtagggtccaaaaacttcaattgcgtaaagtacatgctcttgttattacaaggcaaatgggaaatattttgcagttggtcattgccatcacaataacacaaattctaaaatttacactgtttacaactgaaccrcaccctcaaataatcaaaaaatggtccctccctaacctctctccccaggaagagaaggtctttggctgccccaacctgagcaggagagcaggtggagagtgggagcccacagctgcagtggcaagaagcctgagggctgatggcctagaccaaataatagggaattgggctgagttgtttgaatcgtt

SEQ ID NO: 231362 - DNA, 580 bp, Homo sapiens
cttaaatactcagtctatcattgtttaatattgaatgaaagacacatattttgtttacttattatgcagcagctagtctgtgttcacctgcattgtctcagggttagctctttatttccaagcatcctgtcccatttcctggagcctattgaccaggggaaagatatggtcaaaagttacaggtatgttgggcaaagccttaggaatagcttttctgacaaacaagcaatggggaaaagactccgttcaataaatggtgctgggataactggctagccacatgctgaagattgarctgggcccctttcttacaccatacacaaaaatgaactcaggatggattaaagacttaagtgtaaaacccaaaaatataaaaaccctggaagacaacctaggcaataccatcctggacataagaacaggcaaagatttcatgacaaagacaacaaaagcaatagcaatgaaagcaaaaattgacaagtgggatctagttaaactaaagagcttctacacagcaaaagaaactatcaacaaagtaaacaggcaacttgcagattgggagaaagtatttacaaactat

SEQ ID NO: 231363 - DNA, 584 bp, Homo sapiens
acatgcatgcaaatgttcattgcagcactattcacaatagcaaagacatagaatcaacccaaatactcatcagtcacggattggataaagaaaatgtgctacatatacaccatggaataatatgcagccataaaaaagaatgagattatgtcttttgcattagtatggatgaagctgatgggtattatcyttagcaaactaacgcaggaatagaaaaccaaatacagcatgttctaacttataagtgggagctaaatgataagaacttgtgaacacaaagaaggaaacaaaagacactggggtctacttgatggggggagggtgggaggagggagaggagcagaaaagataactattggatactgggcctaatacctggatgatgaaataacaggtacaacaaacccctgtgacacatatttaactgtataacaaaccctcccgtgtaccccctaacctaaaataaaagttaaaaaaaaagaaacacagctttttattttttttctttttaatcccataaaggtcatgggccatttgccacctgaacagtcagtaacacatgagtggaaagaaactgaacaccc

SEQ ID NO: 231364 - DNA, 584 bp, Homo sapiens
acatgcatgcaaatgttcattgcagcactattcacaatagcaaagacatagaatcaacccaaatactcatcagtcacggattggataaagaaaatgtgctacatatacaccatggaataatatgcagccataaaaaagaatgagattatgtcttttgcattagtatggatgaagctgatgggtattatccttagcaaactaacgcaggaatagaaaaccaaatacagcatgttctaacttataagtgggagctaaatgataagaacttgtgaacacaaagaaggaaacaaaagacactggggtctacttgatggggggagggtgggaggagggagaggagcagaaaagataactattggatactgggcytaatacctggatgatgaaataacaggtacaacaaacccctgtgacacatatttaactgtataacaaaccctcccgtgtaccccctaacctaaaataaaagttaaaaaaaaagaaacacagctttttattttttttctttttaatcccataaaggtcatgggccatttgccacctgaacagtcagtaacacatgagtggaaagaaactgaacaccc

SEQ ID NO: 231365 - DNA, 594 bp, Homo sapiens
gttattcataggataaagtagaaatcatttaaatggctaacagtataaggagggttaaatcaagcatccaggtgtggaaatagttgatttacatatatagtttatgccatgtaagacgtttatgatccaatattggatgaaaaaacagaaacattttatgtacagtataatctaaaatttctacatttcattaaaagtgcaggaatataattatcaaaatttgagtgataaaattatgaatttttctttttcttataactcattttatatttaccaaagatcctccaaagagaatayacacttttataattagaaaaaaagttatttgttaaagagatcataaatgacataatattttacagaagttaaaagctgagattgtgaggatttccagggactcctgccaccagcccatctcgcatcatcatttacatggaaatgttgggactgaggtgacttcatgcctctcaattcccagccagctttctctccctctggctcctagccagcctgttaaccagaaaataatcagtaagacaaaaaacaccctagtgttctaacaagttacacataattgcttgcttaccaattgcc

SEQ ID NO: 231366 - DNA, 588 bp, Homo sapiens
aaatccacatatttccagccaactgattttggacgaacatgccaagaacatacgctggggaaaggacagcctcttcaaatgaatgacactgtgaaaactaaatatccatatggagaagaatgatattagcttcctatgtaacaccatataacaacataaactcagaatcgattgaagactgaaatgtaaggcccaaaattatcaaactactctaagtaaatatagggaaaatgcttgaggacattagtctgcacaaagatttttatgggtaagacatcagaagcataggcaaacaacaaatcatagacaaawgacactacattaagctaaagagcttctgtccagcaaacaactgagtgaagaaaaaacctgtagaataggagaaaatattgtcaagctattcacctaataagggactaatatacaaaatatacaaaaaaactcaaacaacttcacagtataaaaatctgagttcaaatttgggcaaaatatataactatacttttttttagaaaaagaaatccaaataaccaataaataaattttaaatgctcagtatcactaatcctcagggaaatacaaatcaaa

SEQ ID NO: 231367 - DNA, 610 bp, Homo sapiens
aatgctgccagttgtcagccttttttacatactgtggcaactgccacttttaaaattatacaacaccttgaaagaaataacaaagatggagatttcttcgaaaacagctctaaagcagcctgctaagcaggagattcacgcctgcagccarcatttaccccgtctgccttgcaatttcaggatcagtatacatcaaatcaagtgaacaacccagggaattctgccgttaccttttagaaacagaataaatattaacagagctttacttctttccaccaaggaggactatatgttaatacagtaatttacactggaaaaaatataaatgaaagggtttagaacctcataactttaaaaataacataattcctcctagaacattcctttcacttgtgattctcaaagcactttgcatttcccagctattggcagggctggaattaggatcaaagtatcactaaatggtaggtgaaataaatgtgaagctgattttcaggagtacaggaatggagtcatcaggcgactttaaagttaagaatctgttggagcagctgccaataaatcaaggcccaaaggagaaagttctttggaaaccttgaaatattgtata

SEQ ID NO: 231368 - DNA, 610 bp, Homo sapiens
aatgctgccagttgtcagccttttttacatactgtggcaactgccacttttaaaattatacaacaccttgaaagaaataacaaagatggagatttcttcgaaaacagctctaaagcagcctgctaagcaggagattcacgcctgcagccaacatttaccccgtctgccttgcaatttcaggatcagtatacatcaaatcaagtgaacaacccagggaattctgccgttaccttttagaaacagaataaatattaacagagctttacttctttccaccaaggaggactatatgttaatacagtaatttacactggaaaaaatataaatgaaagggtttagaacctcrtaactttaaaaataacataattcctcctagaacattcctttcacttgtgattctcaaagcactttgcatttcccagctattggcagggctggaattaggatcaaagtatcactaaatggtaggtgaaataaatgtgaagctgattttcaggagtacaggaatggagtcatcaggcgactttaaagttaagaatctgttggagcagctgccaataaatcaaggcccaaaggagaaagttctttggaaaccttgaaatattgtata

SEQ ID NO: 231369 - DNA, 548 bp, Homo sapiens
  misc_feature (1)...(548): n = A,T,C or G
attttatcatatgtaaaatgtaggtaataaaatatccaatatcgtgcttgctgcagtagcacatayactaaaattggaaggatacagagaagatgagcatggcccctgcacaaggatgacacacaaatccatgatgcgttccatattttcatgatctatgcagcanatcaccatggcacacatttacttatgtaataaacctgcatgctctgcacatgtgcctctgaactaaaagttgaaaatacanaaaataaataaaatatccagtatcattttaaatactccatattcattgggagactgtctggcagtcaagatgtccagacctttcttagtcatggcccagattttgacaactgcatcttttttcttggctcatgacccttgagcaaagtgatgtagaaataggggaaatctttaagagtgcatggattcccatggtgggaacctagtaaataaggtcaagtgctttatgctgtctttgttttacactgctttctagcctactttcccacattctttgtaagcctaattctctaacgctccca

SEQ ID NO: 231370 - DNA, 574 bp, Homo sapiens
tgaatagacatttttcaaaggaagacatacaaataaccaacaagcatatggaaagctgttcaacataactaatcctcatgataatgcaaatcaaaaccacaatgaggtatcacctcacatctgtttgaatggctattatgaaaaagacaagaggtaacaagtgttggtgaaggtatggaaaaaagggaacccttgtataccattggtgggaatacaaattggtatgatcatcatggaaaacagtatgaaggctcctcaaaaaattaaaaatagaaccacgacatgattcaacaacctaatttctgggtatatatccaaaggaagtgaagtcaggttcttgaaataatatctgcagtgctatgtttttttgcagcattattcacaatagctaagatatggaagcaacctaagtgtctgytgagagataaataaagaaaatatggtttatgtacacaatgttatgctattcagcctttaagaagaagtaaatcctgccatttgtgacattatggttgaacctgtgagacgttatgtaaagtgaaataagccatacacagaaagaaaaatactgtgt

SEQ ID NO: 231371 - DNA, 574 bp, Homo sapiens
tgaatagacatttttcaaaggaagacatacaaataaccaacaagcatatggaaagctgttcaacataactaatcctcatgataatgcaaatcaaaaccacaatgaggtatcacctcacatctgtttgaatggctattatgaaaaagacaagaggtaacaagtgttggtgaaggtatggaaaaaagggaacccttgtataccattggtgggaatacaaattggtatgatcatcatggaaaacagtatgaaggctcctcaaaaaattaaaaatagaaccacgacatgattcaacaacctaatttctgggtatatatccaaaggaagtgaagtcaggttcttgaaataatatctgcagtgctatgtttttttgcagcattattcacaatagctaagatatggaagcaacctaagtgtctgctgagagataaataaagaaaatatggtttatgtacacaatgttatgctattcagcctttaagaagaagtaaatcctgccatttgtgacattatggttgaamctgtgagacgttatgtaaagtgaaataagccatacacagaaagaaaaatactgtgt

SEQ ID NO: 231372 - DNA, 588 bp, Homo sapiens
aaatccacatatttccagccaactgattttggacgaacatgccaagaacatacgctggggaaaggacagcctcttcaaatgaatgacactgtgaaaactaaatatccatatggagaagaatgatattagcttcctatgtaacaccatataacaacataaactcagaatcgattgaagactgaaatgtaaggcccaaaattatcaaactactctaagtaaatatagggaaaatgcttgaggacattagtctgcacaaagatttttatgggtaagacatcagaagcataggcaaacaacaaatcatagacaaatgacactacattaagctaaagagcttctgtccagcaaacaactgagtgaagaaaaaacctgtagaataggagaaaatattgtcaagctattcacctaataagggactaatatacaaaatatacaaaaaaactcaaacaacttcacagtataaaaatctgagttcaaawttgggcaaaatatataactatacttttttttagaaaaagaaatccaaataaccaataaataaattttaaatgctcagtatcactaatcctcagggaaatacaaatcaaa

SEQ ID NO: 231373 - DNA, 588 bp, Homo sapiens
aaatccacatatttccagccaactgattttggacgaacatgccaagaacatacgctggggaaaggacagcctcttcaaatgaatgacactgtgaaaactaaatatccatatggagaagaatgatattagcttcctatgtaacaccatataacaacataaactcagaatcgattgaagactgaaatgtaaggcccaaaattatcaaactactctaagtaaatatagggaaaatgcttgaggacattagtctgcacaaagatttttatgggtaagacatcagaagcataggcaaacaacaaatcatagacaaatgacactacattaagctaaagagcttctgtccagcaaacaactgagtgaagaaaaaacctgtagaataggagaaaatattgtcaagctattcacctaataagggactaatatacaaaatatacaaaaaaactcaaacaacttcacagtataaaaatctgagttcaaatttgggcaaaatatataactatacttttttttagaaaaagaaatccaaataaccaataartaaattttaaatgctcagtatcactaatcctcagggaaatacaaatcaaa

SEQ ID NO: 231374 - DNA, 382 bp, Homo sapiens
ggtaaccagtatcttatttttaccttcaaaggctctagggcagatctgacttagctttggccataggactgtaagttttaccaaagcaagtttaggcaagtcttagagacaaattatttgacttcccagtttggttttccatttaggcaagtatttctgcttacttccataatacattttttastcttgttgctttttccatgacttttatataaccttgtcttcattttttaaaactttcttctctgtttttcttggtgtttcttttgttctattatttttttcaaactctgctgcctatgtattccaagtttttctatagacagaatcaagaggacatagaattacagaattttaaggaatcttagaatgaattaaaata

SEQ ID NO: 231375 - DNA, 382 bp, Homo sapiens
ggtaaccagtatcttatttttaccttcaaaggctctagggcagatctgacttagctttggccataggactgtaagttttaccaaagcaagtttaggcaagtcttagagacaaattatttgacttcccagtttggttttccatttaggcaagtatttctgcttacttccataatacattttttactcttgttgctttttccatgacttttatataaycttgtcttcattttttaaaactttcttctctgtttttcttggtgtttcttttgttctattatttttttcaaactctgctgcctatgtattccaagtttttctatagacagaatcaagaggacatagaattacagaattttaaggaatcttagaatgaattaaaata

SEQ ID NO: 231376 - DNA, 466 bp, Homo sapiens
atgcccaactggagcatttatgctgtttgtgcagcattgcccagctgcagagaagcccaaggctcagagggtaagaagtgactggaagttgtcttgctacgtatgtggtgcaggttctttaacttwcataaaaatatatttgataagatggtcaatttgcatgagtatttacccaatcagagggtgcagagaacagttatatggagatttttttttaagctattacatttacatcatttagaaatcaaaatgagataagttacctaccaagggtaccttccccatttctatgcccatcatagggagctgagaatggcctgactaataaatttgcattagaattaacaaccacagggatggcatactttacaacagcaacccagggacaaggaaaggggagaggatgttaccaagcctagggaaacaactcaggctcatggtgaacagggagggaaactgataatgt

SEQ ID NO: 231377 - DNA, 466 bp, Homo sapiens
atgcccaactggagcatttatgctgtttgtgcagcattgcccagctgcagagaagcccaaggctcagagggtaagaagtgactggaagttgtcttgctacgtatgtggtgcaggttctttaactttcataaaaatatatttgataagatggtcaatttgcatgagtatttacccaatcagagggtgcagagaacagttatatggagatttttttttaagctattacatttacatcatttagaaatcaaaaygagataagttacctaccaagggtaccttccccatttctatgcccatcatagggagctgagaatggcctgactaataaatttgcattagaattaacaaccacagggatggcatactttacaacagcaacccagggacaaggaaaggggagaggatgttaccaagcctagggaaacaactcaggctcatggtgaacagggagggaaactgataatgt

SEQ ID NO: 231378 - DNA, 466 bp, Homo sapiens
atgcccaactggagcatttatgctgtttgtgcagcattgcccagctgcagagaagcccaaggctcagagggtaagaagtgactggaagttgtcttgctacgtatgtggtgcaggttctttaactttcataaaaatatatttgataagatggtcaatttgcatgagtatttacccaatcagagggtgcagagaacagttatatggagatttttttttaagctattacatttacatcatttagaaatcaaaatragataagttacctaccaagggtaccttccccatttctatgcccatcatagggagctgagaatggcctgactaataaatttgcattagaattaacaaccacagggatggcatactttacaacagcaacccagggacaaggaaaggggagaggatgttaccaagcctagggaaacaactcaggctcatggtgaacagggagggaaactgataatgt

SEQ ID NO: 231379 - DNA, 507 bp, Homo sapiens
agaagcccaaggctcagagggtaagaagtgactggaagttgtcttgctacgtatgtggtgcaggttctttaactttcataaaaatatatttgataagatggtcaatttgcatgagtatttacccaatcagagggtgcagagaacagttatatggagatttttttttaagctattacatttacatcatttagaaatcaaaatgagataagttacctaccaagggtaccttccccatttctaygcccatcatagggagctgagaatggcctgactaataaatttgcattagaattaacaaccacagggatggcatactttacaacagcaacccagggacaaggaaaggggagaggatgttaccaagcctagggaaacaactcaggctcatggtgaacagggagggaaactgataatgtctaactaacacaattttaaattcagtaagaaaatggtttgttagatcatgtagctcacttactcgccattgaaaaatgctgtgagtgtttc

SEQ ID NO: 231380 - DNA, 480 bp, Homo sapiens
aactgataatgtctaactaacacaattttaaattcagtaagaaaatggtttgttagatcatgtagctcacttactcgccattgaaaaatgctgtgagtgtttccatggaaatctgaattcaaaagatctttcctttaatcatattctgagawttacacggaaaatatctaaaataggctttttttttccttgaacattacctactctatattcaccctcagggttttttctctcaaatgaatcaaatataaagagaaccttgtagaatactgagttgggttgtggagttgacttatcaagtgctatttttctcattctcatcacagctcatagcgtgttgggaaaaaaaatgatgcctgaatagctcatatgggcaggtggtcagtataattgatttctcagttatgtatggttaaaatttaataatagaaaaaacatcctccgtaaagggaagtattgagaatacatctataaaatgtt

SEQ ID NO: 231381 - DNA, 480 bp, Homo sapiens
aactgataatgtctaactaacacaattttaaattcagtaagaaaatggtttgttagatcatgtagctcacttactcgccattgaaaaatgctgtgagtgtttccatggaaatctgaattcaaaagatctttcctttaatcatattctgagaattacacggaaaatatctaaaataggctttytttttccttgaacattacctactctatattcaccctcagggttttttctctcaaatgaatcaaatataaagagaaccttgtagaatactgagttgggttgtggagttgacttatcaagtgctatttttctcattctcatcacagctcatagcgtgttgggaaaaaaaatgatgcctgaatagctcatatgggcaggtggtcagtataattgatttctcagttatgtatggttaaaatttaataatagaaaaaacatcctccgtaaagggaagtattgagaatacatctataaaatgtt

SEQ ID NO: 231382 - DNA, 480 bp, Homo sapiens
aactgataatgtctaactaacacaattttaaattcagtaagaaaatggtttgttagatcatgtagctcacttactcgccattgaaaaatgctgtgagtgtttccatggaaatctgaattcaaaagatctttcctttaatcatattctgagaattacacggaaaatatctaaaataggctttttttttccttgaacattayctactctatattcaccctcagggttttttctctcaaatgaatcaaatataaagagaaccttgtagaatactgagttgggttgtggagttgacttatcaagtgctatttttctcattctcatcacagctcatagcgtgttgggaaaaaaaatgatgcctgaatagctcatatgggcaggtggtcagtataattgatttctcagttatgtatggttaaaatttaataatagaaaaaacatcctccgtaaagggaagtattgagaatacatctataaaatgtt

SEQ ID NO: 231383 - DNA, 394 bp, Homo sapiens
gaaatttaaatttatgttctcaagatttgtattgcaaaggtatttttatgtgatttatgagttgtccatgaagagtttatataaaacacttcatctaattgaataacatgtattttcctgcaaataaccagttytagaagcagagactcttaataccaatatggtaagtctttatcatcataattttgtcattgtagtttatttaaaatatttacttggccaggcgtggtggctcacacctgtaatcccagcacttttggaggccgaggtgggtagatcacctgaggtcaggagttcaagatcagcctggccaacatggtgagaccctgtctctaaaaaaaaaaaaaaaaaaaaaaaaagcacaaaaattatccaggcatgatagtgcatgcct

SEQ ID NO: 231384 - DNA, 394 bp, Homo sapiens
gaaatttaaatttatgttctcaagatttgtattgcaaaggtatttttatgtgatttatgagttgtccatgaagagtttatataaaacacttcatctaattgaataacatgtattttcctgcaaataaccagttctagaagcagagactcttaataccaatatggtaagtctttatcatcataattttgtcattgtagtttatttaaaatatttacttggccaggcgtggtggctcacacctgtaatcccwgcacttttggaggccgaggtgggtagatcacctgaggtcaggagttcaagatcagcctggccaacatggtgagaccctgtctctaaaaaaaaaaaaaaaaaaaaaaaaagcacaaaaattatccaggcatgatagtgcatgcct

SEQ ID NO: 231385 - DNA, 552 bp, Homo sapiens
atggaatcaacctacatgtccatcaccaaatgaatggacgaaaaactgtggcacacaaacacagtkgaatactattcaccgtataaaggaattaaatcctgttattcgtggccacgtggatcagtctgacagatgttatgttaagtgcagacacagaaagataaatactgcacattcttactcatgtgtgggagctaaaggaaaattgaaggctgggcaatatggctgatgcctgtaatttcctagctctttgtaagaccaaggcaagagaatcatttgaggccaaaagttccagagctccctgggaaacatagggagatatctctacaaagtcaaaaatcagacatgtgcaatggtgcatgcccataatgccagctgctcaggaggctgaggtgtgaggatcagatgggcccaagagtttgaggctgcagtgaactatgatcaaaccactgtctccagtctgggtgactacagttgcccagagccaagactacactagcaagaccctgtctcttaacaaaaaaaagctcacagaagtaggggaggtgaggc

SEQ ID NO: 231386 - DNA, 505 bp, Homo sapiens
ggaaggtaaattagtgcagccactatagagaacaacaggaggttttctcaaaaaaactaataatgggactgccgagggatccagcaaccccactactgggtattcaggcaatagaaaagaaaacaatagatcaaaaggatacctgtcctcatatgtttactgtagcactatccacaacagcttgtgtatggaatcaacctacatgtccatcaccaaatgaatggacgaaaaactgtggcacacaaacacagtggaatastattcaccgtataaaggaattaaatcctgttattcgtggccacgtggatcagtctgacagatgttatgttaagtgcagacacagaaagataaatactgcacattcttactcatgtgtgggagctaaaggaaaattgaaggctgggcaatatggctgatgcctgtaatttcctagctctttgtaagaccaaggcaagagaatcatttgaggccaaaagttccagagctccctgggaaacatagggag

SEQ ID NO: 231387 - DNA, 505 bp, Homo sapiens
ggaaggtaaattagtgcagccactatagagaacaacaggaggttttctcaaaaaaactaataatgggactgccgagggatccagcaaccccactactgggtattcaggcaatagaaaagaaaacaatagatcaaaaggatacctgtcctcatatgtttactgtagcactatccacaacagcttgtgtatggaatcaacctacatgtccatcaccaaatgaatggacgaaaaactgtggcacacaaacacagtggaatactattcaccgtataaaggaattaaatsctgttattcgtggccacgtggatcagtctgacagatgttatgttaagtgcagacacagaaagataaatactgcacattcttactcatgtgtgggagctaaaggaaaattgaaggctgggcaatatggctgatgcctgtaatttcctagctctttgtaagaccaaggcaagagaatcatttgaggccaaaagttccagagctccctgggaaacatagggag

SEQ ID NO: 231388 - DNA, 552 bp, Homo sapiens
atggaatcaacctacatgtccatcaccaaatgaatggacgaaaaactgtggcacacaaacacagtggaatactattcaccgtataaaggaattaaatcctgttattcgtggccacgtggatcagtctgacrgatgttatgttaagtgcagacacagaaagataaatactgcacattcttactcatgtgtgggagctaaaggaaaattgaaggctgggcaatatggctgatgcctgtaatttcctagctctttgtaagaccaaggcaagagaatcatttgaggccaaaagttccagagctccctgggaaacatagggagatatctctacaaagtcaaaaatcagacatgtgcaatggtgcatgcccataatgccagctgctcaggaggctgaggtgtgaggatcagatgggcccaagagtttgaggctgcagtgaactatgatcaaaccactgtctccagtctgggtgactacagttgcccagagccaagactacactagcaagaccctgtctcttaacaaaaaaaagctcacagaagtaggggaggtgaggc

SEQ ID NO: 231389 - DNA, 505 bp, Homo sapiens
ggaaggtaaattagtgcagccactatagagaacaacaggaggttttctcaaaaaaactaataatgggactgccgagggatccagcaaccccactactgggtattcaggcaatagaaaagaaaacaatagatcaaaaggatacctgtcctcatatgtttactgtagcactatccacaacagcttgtgtatggaatcaacctacatgtccatcaccaaatgaatggacgaaaaactgtggcacacaaacacagtggaatactattcaccgtataaaggaattaaatcctgttattcgtggccacgtggatcagtctgacagatgttatgttaagtgyagacacagaaagataaatactgcacattcttactcatgtgtgggagctaaaggaaaattgaaggctgggcaatatggctgatgcctgtaatttcctagctctttgtaagaccaaggcaagagaatcatttgaggccaaaagttccagagctccctgggaaacatagggag

SEQ ID NO: 231390 - DNA, 603 bp, Homo sapiens
tctgacttagcaggtattggagtctgcatttctcatgagcactcaggtgatgtttgtgctggtccttggacacagctctgaatagcaagggaatagccttcctttagagaaatctggaaaaagaaccactggagagcaatttaaaaaataacagaatccagggaaagctttaatttccttttatttctgagcatgattctagccacargggaaggaaaatgagatgaaaaaagagagattacaggtgtatactactgctgaatacagatgaaaaaagtggtcacaatcatccataaaaagcagttaggaagggaagcatcaggatgacagttctgataatcattttttcaaaggaagagggatggtgaatggacacaaaaggaggaaagaaagacatttgctggggtcttgggagttaaagccaagtaaacttgagacaactcacttccagttgcttcagcatatgcccagtctcacaaaagaggttattgctgtggagagtactggagacaggagggagtgctagagttggggtaaaccacagcagctcatttcacttgataactgtcaggcctcagggagagaagtttcactgacatgagt

SEQ ID NO: 231391 - DNA, 603 bp, Homo sapiens
tctgacttagcaggtattggagtctgcatttctcatgagcactcaggtgatgtttgtgctggtccttggacacagctctgaatagcaagggaatagccttcctttagagaaatctggaaaaagaaccactggagagcaatttaaaaaataacagaatccagggaaagctttaatttccttttatttctgagcatgattctagccacaagggaaggaaaatgagatgaaaaaagagagattacaggtgtatactactgctgaatacagatgaaaaaagtggtcacaatcatccataaaaagcagttaggaagggaagcatcaggatgacagttctgataatcattttttcaaaggaagagggatggtgaawggacacaaaaggaggaaagaaagacatttgctggggtcttgggagttaaagccaagtaaacttgagacaactcacttccagttgcttcagcatatgcccagtctcacaaaagaggttattgctgtggagagtactggagacaggagggagtgctagagttggggtaaaccacagcagctcatttcacttgataactgtcaggcctcagggagagaagtttcactgacatgagt

SEQ ID NO: 231392 - DNA, 617 bp, Homo sapiens
ttcttactcatgtgtgggagctaaaggaaaattgaaggctgggcaatatggctgatgcctgtaatttcctagctctttgtaagaccaaggcaagagaatcatttgaggccaaaagttccagagctccctgggaaacatagggagatatctctacaaagtcaaaaatcagacatgtgcaatggtgcatgcccataatgccagctgctcaggaggctgaggtgtgaggatcagatgggcccaagagtttgaggctgcagtgaactatgatcaaaccactgtctccagtctgggtgactacagttgcccagagccmagactacactagcaagaccctgtctcttaacaaaaaaaagctcacagaagtaggggaggtgaggctggttaatggatacagaattacagttagataagaggagtgggttctggtgttctgtggcattgtagggtgaatatggttaactacgacttattgtatatttttaaaaagccagaagattttgaatgttcacaattcaaagaaatgaacaatggttgaagtagtaaatgtgctagttagcttgatcattacacactatatacatgtataaaaatatcactctatagcccataattatgta

SEQ ID NO: 231393 - DNA, 334 bp, Homo sapiens
  misc_feature (1)...(334): n = A,T,C or G
tggagttctgatcccctccntgaggaaagctttacytattaaagtgtcagtttctgttttaacttcagaggcttgctgctagtgttattacactgatgatctgaagcttatcagatgttctaatgagcaagactgtgtgtgtaggtgtatatatagatgtgtgtatgcgtgtgcttgtggcatctttcactattacaaatgacgaaagtaatgattcatttatgactggtagacacagtcttttaaaatggtgattttgagcctttttagtgttaaagtttttaaaacatgattgcatagaggctaccaacatcataagttggttgtttttcat

SEQ ID NO: 231394 - DNA, 334 bp, Homo sapiens
  misc_feature (1)...(334): n = A,T,C or G
tggagttctgatcccctccntgaggaaagctttacctattaaagtgtcagtttctgttttaacttcagaggcttgctgctagtgttattacactgatgatctgaagcttatcagatgttctaatgagcaagactgtgtgtgtaggtgtatatatagatgtgtgtatgcgtgtgcttgtggcatctttsactattacaaatgacgaaagtaatgattcatttatgactggtagacacagtcttttaaaatggtgattttgagcctttttagtgttaaagtttttaaaacatgattgcatagaggctaccaacatcataagttggttgtttttcat

SEQ ID NO: 231395 - DNA, 506 bp, Homo sapiens
tttgtattatattttccacttgtacccacattggtgtgattatctctggtttaattcattttacactgttcattgtattccctcataccactttaccacatttagttagactctcctgttgctgataaatgaagaaataaaaagaaaaataatgtcagwttaagagggcttttctttaatcagtttgtatctattagcatttactatatgagagtttaaacctgaaaagttcagaatacaagcatgcaccaccatattttattaatgcccttagaactatgactcatgagcctttagcctatgaagttaggacaattcatttctctgaagaagaatgctgggctgttctcagaaaagaaaactgaaaatagcaaatgatattgtcttattttacctcttggacatccttgaatgaaactgctactaaagggatactcggatcaaaattcagatctaatgttttgaacagtatagtttgtgaatgtccagtgatcatgagcccttga

SEQ ID NO: 231396 - DNA, 506 bp, Homo sapiens
tttgtattatattttccacttgtacccacattggtgtgattatctctggtttaattcattttacactgttcattgtattccctcataccactttaccacatttagttagactctcctgttgctgataaatgaagaaataaaaagaaaaataatgtcagtttaagagggcttttctttaatcrgtttgtatctattagcatttactatatgagagtttaaacctgaaaagttcagaatacaagcatgcaccaccatattttattaatgcccttagaactatgactcatgagcctttagcctatgaagttaggacaattcatttctctgaagaagaatgctgggctgttctcagaaaagaaaactgaaaatagcaaatgatattgtcttattttacctcttggacatccttgaatgaaactgctactaaagggatactcggatcaaaattcagatctaatgttttgaacagtatagtttgtgaatgtccagtgatcatgagcccttga

SEQ ID NO: 231397 - DNA, 617 bp, Homo sapiens
ttcttactcatgtgtgggagctaaaggaaaattgaaggctgggcaatatggctgatgcctgtaatttcctagctctttgtaagaccaaggcaagagaatcatttgaggccaaaagttccagagctccctgggaaacatagggagatatctctacaaagtcaaaaatcagacatgtgcaatggtgcatgcccataatgccagctgctcaggaggctgaggtgtgaggatcagatgggcccaagagtttgaggctgcagtgaactatgatcaaaccactgtctccagtctgggtgactacagttgcccagagccaagactacactagcaagaccctgtctcttaacaaaaaaaagctcacagaagtaggggaggtgaggctggttaatggatacagaattacagttagataagaggagtgggttctggtgttctgtggcattgtagggtgaatatggttaactacgacttattgtatatttttaaaaagccagaagattttgaatgttcacaattcaaagaaatgaamaatggttgaagtagtaaatgtgctagttagcttgatcattacacactatatacatgtataaaaatatcactctatagcccataattatgta

SEQ ID NO: 231398 - DNA, 480 bp, Homo sapiens
agtcaaaaatcagacatgtgcaatggtgcatgcccataatgccagctgctcaggaggctgaggtgtgaggatcagatgggcccaagagtttgaggctgcagtgaactatgatcaaaccactgtctccagtctgggtgactacagttgcccagagccaagactacactagcaagaccctgtctcttaacaaaaaaaagctcacagaagtaggggaggtgaggctggttaatggatacagaattacagttagataagaggagtgggttctggtgttctgtggcattgtagggtgaatatggttaactacgacttattgtatatttttaaaaagccagaagattttgaatgttcacaattcaaagaaatgaacaatggttgaagwagtaaatgtgctagttagcttgatcattacacactatatacatgtataaaaatatcactctatagcccataattatgtatatatgtgtcaattaaaac

SEQ ID NO: 231399 - DNA, 165 bp, Homo sapiens
atttaattctgctaggacgcctggtctactgattaactgcagctaatatgrggtctacttcacatccaagttaaattcagtgcccttaatcagtcatatgatgaggtcaacagtaataaattatgcaatattttttcacccacccctatagttttaatttctttt

SEQ ID NO: 231400 - DNA, 165 bp, Homo sapiens
atttaattctgctaggacgcctggtctactgattaactgcagctaatatgaggtctacttcacatmcaagttaaattcagtgcccttaatcagtcatatgatgaggtcaacagtaataaattatgcaatattttttcacccacccctatagttttaatttctttt

SEQ ID NO: 231401 - DNA, 289 bp, Homo sapiens
taatctggctaacctcactctctaagtctcagctcatggatgatctttaggaaagccatccctgacagcttctattttccttccttattccccagtgcctaacacttagcaggaactcaataagtaattatttagcaaaattaagactgcttatacaaagatgattcaaaagattrtcctctacagtctagcagcaaaggggtcaacatgtaaagacatgatgtgcaggtcaggtggtaaagtgacactagaaaaattgacaaggtactaagggaccccaacgaagcag

SEQ ID NO: 231402 - DNA, 321 bp, Homo sapiens
tctttcttattggtgttcagtttagctcttaataatttagtgtttgcctagtgctctagttaatcttcagaaataaacatgcactgtaggggctcactctttctggtatgctgaggtaaagtctttgtaagagaggaagcttttataatactacctatcatctttgaattcatttctggtagattttacacaaatgcattaagtttagtccaaacagacagtgagagttcagcttgctggttcatgtttctgtcctatgttaagccaaagyaaattatttttcactttttagttacaatcccataatttaagagtagcaac

SEQ ID NO: 231403 - DNA, 367 bp, Homo sapiens
ttgaaagtcaaaatactaacctrctatgtgtctctgataaattgcctgaacattacctgattttgaagtgctgcactcctaagactttttcttggaatgagttaaacgttttattccaagaatcctctactgagctagaaagcagagctgtgcatctctgtttcagtaaaaggaggtcaatacagggaactgtggtctctgagaatgcaagatctgcactaagaaaaggattagctacagtactacccaagagaaccagctaccaggaggaaagagggtctgtaaactgcaagatgatgacttcacttgatttccactgaggaaagctggtggttcagacttaaacttctccttcctcgatggtaaa

SEQ ID NO: 231404 - DNA, 367 bp, Homo sapiens
ttgaaagtcaaaatactaacctactatgtgtctctgataaattgcctgaacattacctgattttgaagtgctgcactcctaagactttttcttggaatgagttaaacgttttattccaagaatcctctactgagctagaaagcagagctgtgcatctctgtttcagtaaaaggaggtcaatacagggaactgtggtctctgagaatgcaagwtctgcactaagaaaaggattagctacagtactacccaagagaaccagctaccaggaggaaagagggtctgtaaactgcaagatgatgacttcacttgatttccactgaggaaagctggtggttcagacttaaacttctccttcctcgatggtaaa

SEQ ID NO: 231405 - DNA, 544 bp, Homo sapiens
acttcaaaattgaaaactactgtgcctcagaagacagtatgaagaagtgaaaaggtaagacgccaagtagaagaaagtatttgaaaagcgtgtatctgataagggacttacatatataggaaatataaataactcttgcaattaataaataacaagataagccaattttaaaaaatggtaaaagattttgaatagatatatctgcaaagcagatataaagatggataagcacattaatagatgcttaatgtaattagtcattaggaaaatgtaaatcaaaaccacatgtggtatcacttcacaccacaggataaaatctttgttcaagaaaaaagagkgttagaaaaaaatgtaaagaaattaaaacccttatctaatgctgctgggaatgtaaagtgatgcagccactttggaaaacaaactggcagctccttaaagggttaagcataaagttaccatatgacacagaaattccagtcataagtataactccagaaaaataaaaacatacacaagcacaaaaactcatacataaatgtttaca

SEQ ID NO: 231406 - DNA, 544 bp, Homo sapiens
acttcaaaattgaaaactactgtgcctcagaagacagtatgaagaagtgaaaaggtaagacgccaagtagaagaaagtatttgaaaagcgtgtatctgataagggacttacatatataggaaatataaataactcttgcaattaataaataacaagataagccaattttaaaaaatggtaaaagattttgaatagatatatctgcaaagcagatataaagatggataagcacattaatagatgcttaatgtaattagtcattaggaaaatgtaaatcaaaaccacatgtggtatcacttcacaccacaggataaaatctttgttcaagaaaaaagagggttagaaaaaaatgtaaagaaattaaaacccttatctaatgytgctgggaatgtaaagtgatgcagccactttggaaaacaaactggcagctccttaaagggttaagcataaagttaccatatgacacagaaattccagtcataagtataactccagaaaaataaaaacatacacaagcacaaaaactcatacataaatgtttaca

SEQ ID NO: 231407 - DNA, 377 bp, Homo sapiens
ctgggttccttgtgctctgttcttaactactttaaagcagtaattgttctgattctaattartgatccttcccaataaaattttaattttgtagatctcttccccccacccctgccccagcctaaccagtgttttcttacttttttgtgtacaggctacatcactggtcttcttttatttgtggctaaataaatgttgtgttagaagagtaaagagttcccagttacatgggatctatagttctacaaaatgaatgtatacataatccatgtaaatccttcacttattttaaaacaactttttaatttttaaattaaatttaatttgtgcatgtgtgtgagaccagagtgagaacagagatggccgccggtgagggg

SEQ ID NO: 231408 - DNA, 377 bp, Homo sapiens
ctgggttccttgtgctctgttcttaactactttaaagcagtaattgttctgattctaattaatgatscttcccaataaaattttaattttgtagatctcttccccccacccctgccccagcctaaccagtgttttcttacttttttgtgtacaggctacatcactggtcttcttttatttgtggctaaataaatgttgtgttagaagagtaaagagttcccagttacatgggatctatagttctacaaaatgaatgtatacataatccatgtaaatccttcacttattttaaaacaactttttaatttttaaattaaatttaatttgtgcatgtgtgtgagaccagagtgagaacagagatggccgccggtgagggg

SEQ ID NO: 231409 - DNA, 434 bp, Homo sapiens
ttccccccacccctgccccagcctaaccagtgttttcttacttttttgtgtacaggctacatcactggtcttcttttatttgtggctaaataaatgttgtgttagaagagtaaagagttcccagttacatgggatctatagttctacaaaatgaatgtatacataatccatgtaaatmcttcacttattttaaaacaactttttaatttttaaattaaatttaatttgtgcatgtgtgtgagaccagagtgagaacagagatggccgccggtgaggggcagtggtctcaccatgttgcccaggcaagtcttgaactccccttcaagtgccaccctcctcacctggcctccctcaccttgcctcttcccctctcactcctatgccagctcctgccattccccaccccctctgtagactgcaagactcaacaagtg

SEQ ID NO: 231410 - DNA, 377 bp, Homo sapiens
ctgggttccttgtgctctgttcttaactactttaaagcagtaattgttctgattctaattaatgatccttcccaataaaattttaattttgtagatctcttccccccacccctgccccagcctaaccagtgttttcttacttttttgtgtacaggctacatcactggtcttcttttatttgtggctaaataaatgttgtgttagaagagtaaagagttcccagttacatgggatctatagttctacaaaatgaatgtatacataatccatgtaaatccttcacttattttaaaacaaytttttaatttttaaattaaatttaatttgtgcatgtgtgtgagaccagagtgagaacagagatggccgccggtgagggg

SEQ ID NO: 231411 - DNA, 421 bp, Homo sapiens
tgccccagcctaaccagtgttttcttacttttttgtgtacaggctacatcactggtcttcttttatttgtggctaaataaatgttgtgttagaagagtaaagagttcccagttacatgggatctatagttctacaaaatgaatgtatacataatccatgtaaatccttcacttattttaaaacaactttttaatttttaaattaaatttaatttgtgcatgtgtgtgagaccagagtgagaacagagatggccgccggtgaggggcagtggtctcaccatgttgcccaggcaagtcttgaactccccttcaagtgccaccctcctcacctggcctccctcaccttgcctcytcccctctcactcctatgccagctcctgccattccccaccccctctgtagactgcaagactcaacaagtg

SEQ ID NO: 231412 - DNA, 554 bp, Homo sapiens
tgtgctgggagtggaggggggctgagtgaaagaaagtaggaatggggtaaaggctggggcaaagagcagactctctccctgcaggggagtatcaggggtctgcagccaagttaaatgacagcatgacttcaggaggccagatttgagggcttttatctaagatgcagcatcggagtttggtttaagagagtaggaagtgatacatttgttactcaaaggacacttctcttttttgaataaattacctgcagagtttaggccaaagaggtgggcaaggtagatttgggaaactgttgcttgctaatatcaccaaacgctttctttttatacttggtggaggctttaattggggcaaggacatttttatacaaagatagagaaaacaatcacctatgraatttgattccttgctccatgccctcactagcacctctcaacatgcttgatgatatttaaaatttcttcatagggaaaaaacttttcatcccacaattagaatcaggcttaacttgctttttgaaaaggtagtatgcaatttgtgttaagatctaaat

SEQ ID NO: 231413 - DNA, 342 bp, Homo sapiens
cattacagtattatgtagaacagtttcattgccctaaaaatctcctgtgctccactgagtcattcctccccctcctcttcctcccaaacccccggtcattactgatctttttactctctaattttgcctctcccagaatgtcatataatagatcatgtagtatgtatccttttcagactggcttctttcacccagcagtatacatttagggttcttctgtgttttttcatggcttgatagctcattttttaaattgcagaataatattccatttgtttgcatgtattgmagtttgtttatccattcttgaattatctatctctaattgggttgttttgtctt

SEQ ID NO: 231414 - DNA, 536 bp, Homo sapiens
gtaagcctacaatgtggacgaatcttgaaaatattgtgctacgtgttatgtcagtcataacagctcccctattgtgcaattccgcttataggaaatgtccacaatatggtaatctatgcatatgggattgatcgcactaggtagttgctacctagggctgagggtcagggagagggtttgagacagaatgaggagtgactaatgtctacagggtttttctctggtcgggagtgactatagtcaaagcaatttaattgtacatttttaagtaactaaaagaatgttattagattgttcgtaaaataaagaacaaatagttgaggcaatgaataaccatttatctgatgttatttttgtgcatttcatgccttcatcaaaatcagtgatataatccatagatacatatatgtactacgtactcacaaaaattaaaataawaaataaaatataaatttaaaatgaaaagcgtaaaaacaaacaccactggtcctcgtttcttcatagatatatgaacttaacaccacgctgatcacatt

SEQ ID NO: 231415 - DNA, 536 bp, Homo sapiens
gtaagcctacaatgtggacgaatcttgaaaatattgtgctacgtgttatgtcagtcataacagctcccctattgtgcaattccgcttataggaaatgtccacaatatggtaatctatgcatatgggattgatcgcactaggtagttgctacctagggctgagggtcagggagagggtttgagacagaatgaggagtgactaatgtctacagggtttttctctggtcgggagtgactatagtcaaagcaatttaattgtacatttttaagtaactaaaagaatgttattagattgttcgtaaaataaagaacaaatagttgaggcaatgaataaccatttatctgatgttatttttgtgcatttcatgccttcatcaaaatcagtgatataatccatagatacatatatgtactacgtactcacaaaaattaaaataataaataaaatataaatttaaaatgaaaagcgtaaaaacaaacaccactggtcctcgtttcttcawagatatatgaacttaacaccacgctgatcacatt

SEQ ID NO: 231416 - DNA, 461 bp, Homo sapiens
atgtccacattcctgtcttttgagggactgtccgaagaggaattttgtctcccctgacgtgcctcctctgacgtagagtgctgaagggaatggtggtatacttcgkatgacagctatgcatatttcgcattaacataagacgcaatcctgacgtggtgcagtggctcacgcctgtaatcccagcactttgggaggccgaggtgggcggatcacgaggtcaggagatcgagaccatcctggctaactcagtgaaaccccgtctctactaaaatacaaaaaattagccgggcgtggtggcgggcacctgtagtcccagctactagggaggctgaggcaggacaatggtgtgaacatgggaggcggaacttgcaatgaaacgagatggcgccactgcactccactccgcctcaaaaaaaaaaaaagaagcaatcctaaaatcatatcagaactgaagagaccag

SEQ ID NO: 231417 - DNA, 565 bp, Homo sapiens
aaagtagttaaactcatagaaacagaaagaagactaaactgtgtcggggttaagtggagaagaaaatgagtaactgttgtttcatggacaacctgttagaatgcaaaacaacccccccaccctttttttttaaactttaagatcagagtatatgtgcaggtttcttatactggcaaacttctgtcatggaggtttgttgtacagattatttggtcatcaaagtattgagcgtagttctcatcatacaacactgaattatacaacacatcctttcataccacctgtaataaaackggaaatcaaaagcagaagcaaaattgccaaatccaaaaacctgtgaaactcaacacactcttgaacatattcttatctgtgtcagttgatttgatattgttaaatgaccatactacacagtgatattcaaattcaacgtaagcctaatgaaaataaaaataatactttgtgaaaaagtattttttacaattcttaacttttacatggaatttcaaaggaccactgatagcccaaacattcttagaaaacaagaacaaagttacatgcacaa

SEQ ID NO: 231418 - DNA, 566 bp, Homo sapiens
ctcaacacactcttgaacatattcttatctgtgtcagttgatttgatattgttaaatgaccatactacacagtgatattcaaattcaacgtaagcctaatgaaaataaaaataatactttgtgaaaaagtattttttacaattcttaacttttacatkgaatttcaaaggaccactgatagcccaaacattcttagaaaacaagaacaaagttacatgcacaacgtttcctgtttttagaacagataacaaagctaaataaaaacagtgtggtacttgccagaagacaaatagatgatggaacagaacacagaactcaaaaaccaaccactgtgtatatgttcaaatgatcttcaacaatgttgctataaccacacaataagagaaagacagtctcttcaatagatggtgttggaaaactctatatccatatgaaaaaactgaggttggatccttcccctgaaccatatacaaaaactgtcttgaatgagttaaatatttaaatgtaagaattataattatacaatctttagaagaaaatataggaagattatgacattgatccca

SEQ ID NO: 231419 - DNA, 566 bp, Homo sapiens
ctcaacacactcttgaacatattcttatctgtgtcagttgatttgatattgttaaatgaccatactacacagtgatattcaaattcaacgtaagcctaatgaaaataaaaataatactttgtgaaaaagtattttttacaattcttaacttttacatggaatttcaaaggaccactgatagcccaaacattcttagaaaacaagaacaaagttacatgcacaacgtttcctgtttttagaacagataacaaagctaaataaaaacagtgtggtacttgccagaagacaaatagatgatggaacagaacacagaactcaaaaaccaaccactgtgtatatgttcaaatgatcttcaacaakgttgctataaccacacaataagagaaagacagtctcttcaatagatggtgttggaaaactctatatccatatgaaaaaactgaggttggatccttcccctgaaccatatacaaaaactgtcttgaatgagttaaatatttaaatgtaagaattataattatacaatctttagaagaaaatataggaagattatgacattgatccca

SEQ ID NO: 231420 - DNA, 507 bp, Homo sapiens
caatgtatacctgaaagaagtatttgcacatccatattcactgtattagtttattcttgcagtgctataagaaaattcctgagacttggtaatttattttaaaaagaggtttaattggcttatggttctgcaggctgtacggcaagcatagcagcttctgctttaggggaggccttgaaaagcttccartcatggcagaaagaaaagggacagagagtcatctcacatggtgggagcaggaacaagagagcacgagagggaaggtgccacatgcttttgaaaaatgagatctcagaagaagtcactcactatggcaaagacagtaccaaaggggctgctgctaaaccattcgtgagaagccaaccctacgatcccatcacctcccaccaggcccacctccaacactagggactgcaacttgacatgagatttgaatggggacccagatccaaactatatcacttacaaaagccaaaaagtgaaaaaactcaaacacccttcaataga

SEQ ID NO: 231421 - DNA, 514 bp, Homo sapiens
caaactatatcacttacaaaagccaaaaagtgaaaaaactcaaacacccttcaatagatgaatgatttaaaaagatgtggcttatacatacaatgaaatattctttagcatcaaatgaaaatatcttgtcagatgctacaataaggawaaatcttaaagccattattttaagtgagataagacaccaacaaagtgacagtgtatgattccatgtatataagatattttaaatagtaaactcctggaaaacggaagtagaaaggtgcttgcctatggttagggttgtgaaacctcagtggtgccaaagatcaaaaagggttatttgggaaaagcaggccctcacccaggtggccaactcaagggcccacagacatggctacagacaaggaaatggggcaccgagcttggtcttactgaagattacaaagcagttctgcaacctctctcaaactccttcagctatagtccaaaagtggtccttcccatcaagtgacctgcagggaaacacacccag

SEQ ID NO: 231422 - DNA, 514 bp, Homo sapiens
caaactatatcacttacaaaagccaaaaagtgaaaaaactcaaacacccttcaatagatgaatgatttaaaaagatgtggcttatacatacaatgaaatattctttagcatcaaatgaaaatatcttgtcagatgctacaataaggataaatcttaaagccattattttaagtgagataagacaccaacaaagtgacagtgtatgattccaygtatataagatattttaaatagtaaactcctggaaaacggaagtagaaaggtgcttgcctatggttagggttgtgaaacctcagtggtgccaaagatcaaaaagggttatttgggaaaagcaggccctcacccaggtggccaactcaagggcccacagacatggctacagacaaggaaatggggcaccgagcttggtcttactgaagattacaaagcagttctgcaacctctctcaaactccttcagctatagtccaaaagtggtccttcccatcaagtgacctgcagggaaacacacccag

SEQ ID NO: 231423 - DNA, 344 bp, Homo sapiens
acccacatggagacttgtgaaacctgttcccaggtagttagtagaagccaatcccattcatacacatggtatttgggccatcatatgcagacaaactgtaaaaccctaccctactgcctgccatatagattaatgtcctcaaggatatttaatctttccatggcccagaaagaatccatgactrtccaaatctctggtaatacaaccatcaaaggcagaccccatatcactcaaacacagatgtatggtaagttctcacttaatgttcaaaataggttcttgaaaactgcatctttaaatgaaacaatgccgctatatgccatttaaacaacagacctagcagc

SEQ ID NO: 231424 - DNA, 571 bp, Homo sapiens
aataaaaatgaaagtatcacataattcagcaataccacctctgggaatactaccaaaggaaataaaattagtacctcaaagaacaatcttcagccccatgttcattttagttttgcttaaaatagccaaaaaaatttatatatatacacacacagtagaatactattcagccataaaagagaaggaaatctagccatttacagcattgatagaccttgaagacattacgctaagtgaaataagccaaacacaaagaaactgcatgttctcagttagatgaggaatctaaaaatgtaaactcataggaacagagagtagaatggtggttgttagtgcctgagggtgggaatatgaggagatgctgttcaaagagtacaaatgattagttgtaagttgagtaagtctgagaaagctaatgtacattagcattagattagcaaaatagcattgtctttatagtaatactgtaaagtatgcttacaatttgctacaacagtagacctcaagtgttcttgtgacaaaaaraaaatggttatctatgtgaggtaataaatgtgttcatcaacttgac

SEQ ID NO: 231425 - DNA, 646 bp, Homo sapiens
agtatcagattatacacttttagaacctaacttacaatagaaacaaaacccttctgcttaaacttctgcaaatacacagtacctcaaaaacatcagaggaaaactgaaatatgtaaactgacttccctacttagtaagccctggattcagctgtaagtttccaccttggtcctgaggtgacattatcctttgcctcacagggccacacctggccctgtgtgccattgattagttttctcccacttgcaggaaagagcacgtaggctctgtacggctttgcaagccctgctctccattgctgggttgagaagagaaacatcaagtgaggacagcattgcttcttcggatgttaaatgtgtttcttaggtaacattaatgtctttctctttgttctatcttcttaatttagaaccagcacaccgttgacactttttaattttttcttgctatttttatcatataaaatgcttccaacgctacagacaaccaaaatattccgttggaaaaaagacaaaaaagtgtgcactgcattggatattactaatttaaacaayataaatggttaaagaagtcagcaaaatgtgtattggctaaatacttatgcacatgtaaaaatctcatggccatgcgctgaaagcatggggaa

SEQ ID NO: 231426 - DNA, 560 bp, Homo sapiens
tgtgtggcacttcccgccttgcactccctcttctgccaccatgggaagaagttccttgcttccygtttcccttccgctgtgattataagtttcctgaggcctcacagtcatgcttcctgttaagcctgtggaactgtgagtcaattaaaccaaacaccgcatgttctcactcataggtgggaactgaacaatgaggacacatggacacagggtggggaacatcacacactggggcctgttgtggggtggggggagcggggagggatagcattaggagatatacctaatgttaaatgacgagttgatgggtgcagcacaccaacatggcacatgtatacatatgtaactaacctgcacgttgtgcacatgtaccctacaacttaaagtataataataaaaaaaattaaacctcttttattcataaatgacccagtctgaggtagttctttctagcagtgtgagaacagactaatacacaaaccatttactaaactgacaaaaaagaaatatatatgtttaataatctaaaaacaaataatagatataatgaaaattagaaa

SEQ ID NO: 231427 - DNA, 491 bp, Homo sapiens
agcacctcccatggccttggcaatgaaagtgaatggactcaagtatatcattatgttcatggtacacctacttcccatgccacactatatgctacaggggaatccatctatctatttagagaatctgttacattcaaggccaaaactccctcaaaatatctgttttaaaaaagtaaatgattacaaagtctcatcttgtctgtttttgggtaaatgtgtctaaaatagatgcttattttgaaattttatttcatgcttaatgtatttttttctaacctatgrtattcatttcttatgtattttaaggggcctttggaaatttatcaaggaatttgtaaaatcagaggaaacagaagataacgctcaagtggctgaacaaatggccagtggaaattcttaacttccatgtatgtagcatggatatttgcagatgcatatacattcataaagatacatttcatttcatcagctttaatctctagtaaaattaa

SEQ ID NO: 231428 - DNA, 418 bp, Homo sapiens
gaattctacattataatgagtaaagttataatctacttaagaattaataatgagttcaaaattcacacatttacattgttgtgatggctaattatgtaaggaattgcctaacacaagccattctttgctgtcatatgagatggactgtgtagaatttggtcactggaaggcttttaccgccggcrtagaaatgccctcatggctattggaaacctttctcttctcctcaccattttctagagttccttataacactcgagttaacacagacatcatctcccctgtaacaaggatgtggactcctccacctgtccttttcaaagatttgggtttgcttcccatgttccctaggtggcaccatctatatctttacagttgtttctcccatctgaagtctgcagatggacactttacctca

SEQ ID NO: 231429 - DNA, 604 bp, Homo sapiens
aggctggttcctacttgctccttcagagagactattttctttatagagagtagaaaatgaggaaaggagacccactggtctcagctgcgaatgagcatttccaggccagtgtttgcagctgtgtctgagcaggacactcccagggctacttgggtttcctccatagtctttactttttaagctttccccaccttcgcagaagaaaaacatctctcccatcaacttcagggaaagcagcaagtgtcttttcatgggggagatattcttctgcacgtaaagtggaaaagggctgagaaaactgggaaaatcatgatgtcacaccattgaaatgcgtctactgaaggagaaggacagaaagccgaggtagagttgaacaggggccactggmacctgtgaactgtctccaggtcctcaggtaaaggggtgagtgatagtgccatagccttgtgcaccacatttttttgatgctgttgtggtcatgagatgggagagttcccttgatcccctcgcaggacttgtgacaggggtgtgcctcatttacttgcccactgtgtgctcaaaccccttgtgggagagggagtatgcaggtgagtgggtacaggag

SEQ ID NO: 231430 - DNA, 505 bp, Homo sapiens
ctgccacacaatatttgcacttgatcttagacatgtatttttctataattatttctctgtctttcctctttaaaatggctctaagtcacctcttagtagaaggcctcttattcctttcccccatcactacmcactataatttctaaagaagtttaacggacttcatattgagttgtttaggtcttactctataaatggctctgcgagtaaaactttgaaaataagattctaattaatgaatccggtattatggattcaatatcataagcctttttctaaactgcaaatgttatatgctaatttgaactgcactccaaggagtaatgactcttggagtttaaggccacagaaaacaggacacagaaatgaatccacatatttaccgccaactgattttcaacaaagatgccaagaacgtacacaagggaaaggataccctcttcaataaatggtgctgagaaaactggatatccatatgaagaagaatgaagctagacccctatct

SEQ ID NO: 231431 - DNA, 348 bp, Homo sapiens
caatgtgttatgagttaggaaagaaaagtaatagatacattatgaatgaaaatcttgagctgtatatgatcattttacattaatttatgatttcaattatatccttgggcctcatttaataaaagtccaggccattgtctgaagtgtcatgaatgtatttctagtgtagtctttttggataactgtctaggatttctgatgattacttggattgaattttatgtgtatatatttggctttttttttaatgcagctatttgataaaactggktgtagcattttcacttacgaggagtgtgtttgataggactttgaattctgaaacacgataaaactatattacttact

SEQ ID NO: 231432 - DNA, 512 bp, Homo sapiens
aggaaaagggatgagaggttactttgaattttctttgaaggtgatagatagtggaatagcctttgatgccaggaatcaactctagtctactcacattaaggacatctgtcctccaaaacaggacacagcaaaaaacagttattgatgggtagctcaagcggggaaggaaaaggaraaaatagttatttctcaggtgtttagagagctatgggaaagggtgaattaaagtggacaacattgcttttggaaaaacatggaacagtgggtattctttacttgtaaaatgcaaaaagattgaaaaaattgttaaatgtgtcttctggctggtttactggcaaatacaagctgttctacccagatatccacagttatatgtttcttttactaaattcactaaaatatttgccacttaacaatttccttattcaaactggctggggggagactcattaaaaagagtaaaggtgacataaagcagaaaaataaaattaaataatattcacatgtcctag

SEQ ID NO: 231433 - DNA, 512 bp, Homo sapiens
aggaaaagggatgagaggttactttgaattttctttgaaggtgatagatagtggaatagcctttgatgccaggaatcaactctagtctactcacattaaggacatctgtcctccaaaacaggacacagcaaaaaacagttattgatgggtagctcaagcggggaaggaaaaggagaaaatagttatttctcaggtgtttagagagctatgggaaagggtgaattaaagtggacaacattgcttttggaaaaacatggaacagtgggtattctttacttgtaaaatgcaaaaagattgaaaaaattgttaaatgtgtcttctggctggtttactggcaaatacaagctgttctacccagatatccacagttatatgtttcttttactaaattcactaaaatatttgccacttaacaatttccttattcaaactggctgggrggagactcattaaaaagagtaaaggtgacataaagcagaaaaataaaattaaataatattcacatgtcctag

SEQ ID NO: 231434 - DNA, 614 bp, Homo sapiens
tgcattcctacacttctcaacatcctttaaatctcccagctatatattcatgtttgaaatttgacatttgttctctaaatataatgaagtcacctttgctttgtctattgtgggaatcaaaaactcaaatgcctacaaaggcaatgtagtaaacacaaataagtggacaatggtagaaataagaaaaaatgcttggtggggtggctcattcctgtaattccagcactttgaaaggctgaggtgggaggaccacttaaggccaactgaaaccagcctgggcaacatagtgagaccctgtctctcaaaaatatgtttaaaaactagtcaggcatggtgatatgcatctttggttctaggtacttracaggctgaggtgtgtattagttcattttcattgctgataaacacatactcaagatggggcaatttacaaaagaaagaggtttaatggacttacagctccacttggctagggaggcctcacaatcatggggcaagatgaaaggcacatctcacatggcggttgacaagagaagagagcttgtgcagggaaactctccttttaaagccatcacatcttgtaagacttatttgctatcatgagaacagcaggg

SEQ ID NO: 231435 - DNA, 616 bp, Homo sapiens
catgttactaaatgaaatttctgctcctgcttcaccagttttttaaaataacgtataccttgcatacacacatacaaattaaatgtgttaatttttctaatgtcttcatataccctgtaaaaatctgtgtgtgactcatcactaaaatcatatatatgtaagtcattatgctactgattctgtcctgggccgcatatkccttccaaggtgaccacagaagtctgttaatctcaactcaatcttgtaggttcatgtgctatcatttacactaaacagtgccctgaaacaacttcttattgcccaatttactaaaaaattagtagttatttaaattattctttaactaattaagcattaatttggagtgatgactttgtgccagataccatctcagacatccaggatataaaaacaaactctatttattggtaaatgttgaacggaaacctcactttccatcctggaattaccctgctttttactctaaagggtagaaggtttggaatctgaggtcaaatcaggagaaaatagtgacttgaaagacaactagttctgtatctatttatttaacattttggatttgtcttactgccacttaagtttcttgaaaatagga

SEQ ID NO: 231436 - DNA, 604 bp, Homo sapiens
cagactgaattttatatttatgtgtatagattaattcataattaataaatttatttgaaatcgtaagtgagggatcaccacagtttcaaaattcaaattggagttataaatgtgaagcagaagaagcagaaggaggaagaggagaaagaagaagaggaacgagtaagaggaagaggagaaaaagtggaaaaaaatgaagaaaagcaatagcaacaataacaaattgatagcctaaagtttgagcatatgagaactggtaatagtgtattgcatttgctgatgacattaagattttccagwtataatttctacgtgtttattttcattggctgacacttattaaagacaagctttttacaagacttaccttataaatacacattttctaaatgcatgatatacgttattcacctggcaaagtagagttttcatggaaaatgaggagagttaaaataaatgccacaatacaatatacactaacagtataattgataatattttataaggggaatttttccatattttatgttagtgccttttctatttcttaaaagatagagacaaaatgactatttgggggctttactataatgttgtttactgc

SEQ ID NO: 231437 - DNA, 479 bp, Homo sapiens
agcctctggtaaccaccattctactcttcagaatcatgagatcaactttttagctcccacatacaagtgagaagatgcaatatttgtctttctgtgcctggcttatttcacttaatagaatgtcctccagcttctattttgctacaaatgacaggatttcgttgtttttatggctgaagagtataccactacatatgtatgaagtaagaaaaagaaagtgttaggactgagaatggtgctctggatgaaaggagaaaatagaaggccttcttcatctgcccccccmaaaaaaaaagaaaagattcctttaggcttggtggaagagagtgaagagtgtggttccagaggcagaaaactatgtgttaactgtatcccctagtaaaatagaaaggtacagtggcatgagtcaatgcatgtaggaacataagcacataagcaagcacataaaaatttcccattttttttaccacacatgaagc

SEQ ID NO: 231438 - DNA, 341 bp, Homo sapiens
tctggatgtttcaatatgcaaccaaaagttagatcatcattcatatgcaagtttaaacaagatgaattctaagatcttgttaaataccaagattccataaatcacaaaaaatgtgcaaaaaaaaaaaacataattgtggaatagsgacaatttcttagtgttaatagagaggaacacttgcttgtgaacacattcttattatctgtgtccatattaaaatctcttgggatttaaatttcttttgtattcataaatatgtgaaatagatgtggctatggaacatagcatattaaatattatttaatatgacatgttacataggcacatgttatattaaatat

SEQ ID NO: 231439 - DNA, 532 bp, Homo sapiens
aacatagatttacaaatagaaaattaaaattgagrggttattgcttgccctaggtaacctactctggaaatggcagtgcagaaatgtatactcaaatgtattcaacctgaaagcccactttatttctataatgaaacctcaaatttttatcagcagtgagggaaaatgagagacattgtttgaaagtcaggttgaagaagtgttttctcatatcactatggtagcacagtaacttaaaatcctggaaaagaggaccatgagacactctatttttaacataacaaatagagcgaaaggaagtattagtcttctctgcaccaggaatttaaaggagctgaagtttttcaatttcttcctctcacttctggaagcaatagcagagcataataagcaggtgctgtggatatgacgacaactaatttgaagagtagaaatgtctcatttgtttcaaacgtaataatccacaaaattttttaagttttggtggactatttataaatatgatgaaaataggatttgtgcataatttaat

SEQ ID NO: 231440 - DNA, 632 bp, Homo sapiens
agaagtgttttctcatatcactatggtagcacagtaacttaaaatcctggaaaagaggaccatgagacactctatttttaacataacaaatagagcgaaaggaagtattagtcttctctgcaccaggaatttaaaggagctgaagtttttcaatttcttcctctcacttctggaagcaatagcagagcataataagcaggtgctgtggatatgacgacaactaatttgaagagtagaaatgtctcatttgtttcaaacgtaataatccacaaaattttttaagttttggtggactatttataaatatgatgaaaataggatttgtgcataatttaatttgttttgtggctracagacacaggtttcttgcacttacagtgaataacaaattaacaggataacccttaagcaattaacccagtaaaaatacaaggattaatcaatcctttccattactgatagccttgtttgttaaaaaaaagtactgagtgatcccacttatatgcggaacctaaaaaagcctaactcataggtctaccagggtttgggggtgggagagagaggaaaatattggtcaaagggtacaaacattcagttataagagggatgagttctggagacctaatgtacgg

SEQ ID NO: 231441 - DNA, 556 bp, Homo sapiens
acagtaagaaaatctctataattcatgactcacaaaacaaacagattataaaagcccctattcaatttagcttacatcaagaatatactcatataggtggtaactttcatagacaggtaaattaatttaggaattagaagtggttttactataccatagattcaacttgatagtatacataaacttgattttagagaaaaattagacaaatattgccagaaaactgcttcagttttctactatgctttgatggtgagaaaaattttttaaccgcccagattcttttttataaaagtcactgataaaagaatgattcaaagtgctgtttcagctggcacctgcccacatgtttatctaaaacttaactaaaatgagccagttrtgcatgtaagatataattagctctcagccagttgtggaaatattagaaatcctaaaagggcattttagaaggtgattttctacttacaaagagagtaaaaaggagggagaaaattttaaaagaacacatatgttactgatttgtttcaaactcaggtcaccaaaagacaaggcc

SEQ ID NO: 231442 - DNA, 439 bp, Homo sapiens
tataggtggtaactttcatagacaggtaaattaatttaggaattagaagtggttttactataccatagattcaacttgatagtatacataaacttgattttagagaaaaattagacaaatattgccagaaaactgcttcagttttctactatgctttgatggtgagaaaaattttttaaccgcccagattcttttttataaaagtcactgataaaagaatgattcaaagtgctgtttcagctggcacctgcccacatgtttatctaaaacttaactaaaatgagccagttgtgcatrtaagatataattagctctcagccagttgtggaaatattagaaatcctaaaagggcattttagaaggtgattttctacttacaaagagagtaaaaaggagggagaaaattttaaaagaacacatatgttactgatttgtttca

SEQ ID NO: 231443 - DNA, 378 bp, Homo sapiens
aatagctaaacaaaattaagaaaacagtacatggaaaaacacaaaaagattgacaaagatatagaaaccatagaaaacaacaaaacagaaatattaaagctgaagaatacaatggctgaaataaaaaattccataaagagattcaacagcagattcagttaagcagaagaaagaaccaccaaacatgaaaatgaatcatttttaattatgtagttagggggraaaaaacaagaaacaaaaggaataaaaagaaaaaggagagcctgtaagacaaatgagataccacactgacatggtggctcacgcctataatcccaaggctttgggaggccaacatgaaaggattgtttgaggccaggcgtttaagaccaggctggg

SEQ ID NO: 231444 - DNA, 561 bp, Homo sapiens
tgccagtagcttacttcaggacttgtgtgtattttacacacaccagaagcacccaacatattgctcctatccatgtccttgatgatggatatctgggttgcccctacctcactgctaccacagataagactataataacacctggtttctcatagggaaaaaaggatttttaagttcactaagtatggtcagattggtcttcagattggatgagcttaagtatggcatgatggtgtccatgtccccayagacattgatattatcttacttttacatctaggcattctaaagcatatttactagatcttatggctgtttaaagttacactttaaaagttacacttctgtgaaggctaatgaagttgagcagctaagttaacatttgtgtgtatctatctatatatgtgtgtgtgtacagatttatatagatacatttattaattaaaaaacctaaaaataaaatcaaagatctttttctgggtattggatttctgaactactcttgttaatatatagaagtacctatattgcccagttgcctttagattttacatatatctt

SEQ ID NO: 231445 - DNA, 424 bp, Homo sapiens
actactcttgttaatatatagaagtacctatattgcccagttgcctttagattttacatatatcttttctagaatgggacacacttgctaactccatctataggccagacatgatgggccatgcctgtaatcccagcaccttgggaggccaaggcaggaggattgcttgagtccaggagtttgagacaagcttgggcaacatagtgagaccctgtctcaaaaacaacaacaacaaattaaaaactagctgggtgtgattttgggtgtctgtattgccagctactcaggaggctgaggtgggagcattgcttgagccaggcagttgaagaaaactcmttctgtaatgttacactaagcagataaaattacttttaacaaattcagattcatagaattttacctcattgttgcttcttttagatct

SEQ ID NO: 231446 - DNA, 630 bp, Homo sapiens
aacgggatctcaagatttttggttcactcctacaccatgtatctgtaaacttttatttacagaaaaatccacctctgaagaatccacctctgaaataaacctggcaagtaactatgcaatttctccttgaaatatttcagtccatcagtattttataactaaaaaattatagaatcataattttaatttatttaacattacattttgctaaattatgtaccaaataatgataatacactttgtatcaattaatttttactatatttatattttgcatattaagtttgtttcccatattgtctttatgttcttaggyggaacttggagttcatgctttgtataaactttttcaaaatatggttaaataaatcaaaatactgtagtaaagtgcatataaaaaagttttcttagacaaaaaatgacattgtgattaactatgttattggtgattacagatttctgattaatattatgtgttttcttattttattagtataaatctaaggaataaattagtagataacagtggtatctactacatgatgtaattccaaacacacatatattttcttcctctcttaacattccataagtgaaggaacataagaattgaaggaattgggaggtagt

SEQ ID NO: 231447 - DNA, 325 bp, Homo sapiens
aatactgtatgatgctgaggtttggagtgtggatctttcactcakgtagtaaactacctgatagatagtttaacgccccccaccacacttcaccctttagtagtccacagtgtctagtgtttccatatttatgtctatatatgctcaatgttaatgacacaagattcttttggtaccgcttcaccagccagaaattcctgcagctgccattacctctgcccagggcctggctggtaacccctgggcttgctccgtctgctcggtctggcaggctgcactcagctgcgctaccagcctggatcccgcgcgtgcacggggattccac

SEQ ID NO: 231448 - DNA, 514 bp, Homo sapiens
aacctcaattttatgaagggaatgttagcaagcctactcaatattttccctggagaaagatttatgtttattgtcttcatcaagaaaacaaaactatgtccccggccctagagaaagacattatctctacctttcaaaggtgtttgctatacaagcattcttgaacaaaagttgtcagtgtctcttaataagaattacagaagtgcatgagacactgtgtgttgtttttcaacagcaaaaatctaccatgcttgtgagggtgcccagctacacttccagaaataatagacttcatgagaattctagagattggacttcctagatttggcagatactatttctaagaagccctctaaaactttaggaaagtgcaagcactattgtttatcattcacttatgcaaaacacaggcatttaatmctgcattgatccattaagaaaaacagtatttttattttagaacttcagatgcttggagtaatctcatgtaaccttcttttgtgggaaataatag

SEQ ID NO: 231449 - DNA, 570 bp, Homo sapiens
aatttctgtctgtagaaaatcttcactaatgcatccaggcctttcttcctagcctttgcccaaatctaggagagattaatagagagtcagatacctttaaggtttggaaagagatatttaccatctattctctctgaaggcggctatctatgaggcttcgtctacgaaacaagggccttgacctctacaactccctcagcttgactcaaggattcctttgtaccgacttcaagtctttacacaaagcttaattcaaccaatggccattcagacacctcttctctccttctctgctgcaccactctgccagtggagcttggggtttttatgggcacaggaaaaggtgtatggcaggccaaaaggcgacatttgggtgggaaaatggggatgtgaagttctcatttagggcmgtgggtccaggcttgaaggtaaaacccttgccaaacaccctgccttttctatctagtattcctctgcctcctgtccatatcaccagtttcttcatggttattatttcctatcctgctaatttgggctacaagggttgtgaaaagttgtcataagcaaaat

SEQ ID NO: 231450 - DNA, 585 bp, Homo sapiens
catcaaaatatctatatttcttctgagatcatgttattcaaaaactaaatattacatttatagctttttcaaatacattttgtattttacattgactttcatcaatagaatataataattatacacatgatggaaaattggaagaataatatactgggcagagcagargactaggtgcatatgcccagcagaagactgggcataaaatattgcccagctgtagcattaactaaaaatgtgtcctttgacaagtcacagaataaagctgttttatttcatttatctataaaatatgaaaaatagactagatgatctccaaggatcttttaacataaaagagttaataaaaaatataaagtgtgctggagatttacaaagggttgtctgttttctttttttccccagtgtaatttgtttcatttcaactcagtaaaaatttatatcatataagaaggcttgtatggacacacagaggagcaagatttgaacactacctctcagtaaatttaatgtatgaagaaacaactgtcatatcattgtgcaggtggtacattacataaagctagagtgtgtgaatgggattcc

SEQ ID NO: 231451 - DNA, 568 bp, Homo sapiens
tcccagtcattttttacctgtaaacactttttacaaaaatgtataatttcataagttgcctgggtatatttaatcatttttatattaataaaacaaagaaaacctttaaaaacataaaaagaacattagcagcatattattacatatgttgttataaaatttatttgaatattatacttggctatattcattacacatgaagtccccgtttgttttaacccatttgcaagtgatatacactgtgattaactttctttaattacatgagaaaatatataatttgtacataagtggatataacatattccattcaggactaccatttatataatgaaattgcrccatcataaattaactgtatttaggacctaatatgtataatacttgaatgctgtatttttaacaaatcctctgtgccattttataagttctccaatttttgtttaaaagttgagacaactgaaaattactcaggtggtcatttgttagcatttccctacaaatggctagcacatagtacgtgaatatagccttacttccaaagtgacaaaatgataaactgagaaac

SEQ ID NO: 231452 - DNA, 550 bp, Homo sapiens
taatttttcatttacatgttaatatcagtgttctttttgctttctttgttaaccaaaggtgcatttataaaaaataaaatgctcctgctgagtcataaacttagttactatctcatgaggatgtttagtttcttttcaactaactgctcatttgtttctatttttaatttatttttaatagacaaaaattayatatatttctacaacaggctgttttgaaatatatacatagtgaaatggctaaattgaggtaattaatagtgtattaccgcacatacttaccatttatttatgatgaaaacacttaaaatctactcttagtaattttgaaaagtacaatacattgtcattaactatagtcactatattttacaatagaacttattcttctcatctaactgaaattttttatccattgactaacatctcctcatcaccctccccctgttctccctcttatttgtttcttgacacatgctaagatgcccttaaagttccattttaagaagaatgtatttcaataattattctatcaatcaattaaaaatag

SEQ ID NO: 231453 - DNA, 550 bp, Homo sapiens
taatttttcatttacatgttaatatcagtgttctttttgctttctttgttaaccaaaggtgcatttataaaaaataaaatgctcctgctgagtcataaacttagttactatctcatgaggatgtttagtttcttttcaactaactgctcatttgtttctatttttaatttatttttaatagacaaaaattatatatatttctacaacaggctgttttgaaatatatacatagtgaaatgkctaaattgaggtaattaatagtgtattaccgcacatacttaccatttatttatgatgaaaacacttaaaatctactcttagtaattttgaaaagtacaatacattgtcattaactatagtcactatattttacaatagaacttattcttctcatctaactgaaattttttatccattgactaacatctcctcatcaccctccccctgttctccctcttatttgtttcttgacacatgctaagatgcccttaaagttccattttaagaagaatgtatttcaataattattctatcaatcaattaaaaatag

SEQ ID NO: 231454 - DNA, 550 bp, Homo sapiens
taatttttcatttacatgttaatatcagtgttctttttgctttctttgttaaccaaaggtgcatttataaaaaataaaatgctcctgctgagtcataaacttagttactatctcatgaggatgtttagtttcttttcaactaactgctcatttgtttctatttttaatttatttttaatagacaaaaattatatatatttctacaacaggctgttttgaaatatatacatagtgaaatggctaaattgaggtaattaatagtgtattaccgcacatacttaccatttatttrtgatgaaaacacttaaaatctactcttagtaattttgaaaagtacaatacattgtcattaactatagtcactatattttacaatagaacttattcttctcatctaactgaaattttttatccattgactaacatctcctcatcaccctccccctgttctccctcttatttgtttcttgacacatgctaagatgcccttaaagttccattttaagaagaatgtatttcaataattattctatcaatcaattaaaaatag

SEQ ID NO: 231455 - DNA, 572 bp, Homo sapiens
taaagactccactagattaaagaaacatgaaataaaatgctggactccatgtgtagtggaaaaatgggtaatgtgctccaattattttagcagacctgtttacacatgccccaggttcccaragggttggctgctaacatcccccactgcatctttctctggagaattgccctgggaagagagaaatgccaagacggttttatgtctcctattatcttcagctatccacagacaatgagcgattgataataggtggcaaaatatcttatctcaatgaaggacaactctgtgatgtaactaatactcttgaattccctgtgaaatcaggctgattttaactttaggtaaaactacgcatttccttggctttttctcttgctttgtcttcacaagtttcaccagagagcgctctgtctataaattacctacacataaatctccatctaaaattctgttttagggagcctcaaaccactatactatcctattgtcacaaaggaaattatgtatgtagacaaaattaaatgagtgggtgaaatcatataaaaataagtattcctaatcagtaataa

SEQ ID NO: 231456 - DNA, 432 bp, Homo sapiens
gtcacttgttgagtcttgcagtctacagagggggtggggaatggcaggggctggcataggagtgagaggggaggaggcaaggtgaggggggccaggtgaggaggggggcacttgaaggggagttcaagaccagcctgggcaacatggtgagaccaccgcccctcaccgccgccatctctgttctcactctggtctcacacacatgmacaaattaaatttaatttaaaaattaaaatttgtcaaaataagtgaaatatttacatggattatgtatatattcattttgtagaactatagatcccatgtaactgggaactctttactcttctaacacaacatttatttagccacaaataaaagaagaccagtgatgtagcctgtacacaaaaaagtaagaaaacactggttaggctggggcaggggtggggggaa

SEQ ID NO: 231457 - DNA, 588 bp, Homo sapiens
ggattgtaacacaaaggaaacatgcttaaagggatggatacccactctccatgatgtgattagttcatgctgcatgcctgtatcaaaacatctcatgcaccccataaatatatatgyttattatatactcacaaaaatgcttgaaaataaaaataaaggaactactgaaggtcaggtcagagtggaaatgtaaaaatactaattagagaataatgtgaatacaacaggaatcctgttggtattctatttatattgtaagcagcagttcaattgttttgaaaaagtaatttcaattttaatcactgaactaaagaaatgggcaaggctgacttccgtaatataggttctacctaaccatctctaacaccgctgtcaaggaggaccagtgttaaggtacattactaacaaccacacaaatttttaaaagaaaagaacactcttagcagcctatggtactttgaaatgaaatattgcctctcattctcacttgtgttgccattccaaaagtatgaatttgctgaggtttatattctgggtattatataaccattggttctgtttggcataaccctattaaatggtgcgcag

SEQ ID NO: 231458 - DNA, 588 bp, Homo sapiens
ggattgtaacacaaaggaaacatgcttaaagggatggatacccactctccatgatgtgattagttcatgctgcatgcctgtatcaaaacatctcatgcaccccataaatatatatgcttattatatactcacaaaaatgcttgaaaataaaaataaaggaactactgaaggtcaggtcagagtggaaatgtaaaaatactaattagagaataatgtgaatacaacaggaatcctgttggtattctrtttatattgtaagcagcagttcaattgttttgaaaaagtaatttcaattttaatcactgaactaaagaaatgggcaaggctgacttccgtaatataggttctacctaaccatctctaacaccgctgtcaaggaggaccagtgttaaggtacattactaacaaccacacaaatttttaaaagaaaagaacactcttagcagcctatggtactttgaaatgaaatattgcctctcattctcacttgtgttgccattccaaaagtatgaatttgctgaggtttatattctgggtattatataaccattggttctgtttggcataaccctattaaatggtgcgcag

SEQ ID NO: 231459 - DNA, 588 bp, Homo sapiens
ggattgtaacacaaaggaaacatgcttaaagggatggatacccactctccatgatgtgattagttcatgctgcatgcctgtatcaaaacatctcatgcaccccataaatatatatgcttattatatactcacaaaaatgcttgaaaataaaaataaaggaactactgaaggtcaggtcagagtggaaatgtaaaaatactaattagagaataatgtgaatacaacaggaatcctgttggtattctatttatattgtaagcagcagttcaattgttttgwaaaagtaatttcaattttaatcactgaactaaagaaatgggcaaggctgacttccgtaatataggttctacctaaccatctctaacaccgctgtcaaggaggaccagtgttaaggtacattactaacaaccacacaaatttttaaaagaaaagaacactcttagcagcctatggtactttgaaatgaaatattgcctctcattctcacttgtgttgccattccaaaagtatgaatttgctgaggtttatattctgggtattatataaccattggttctgtttggcataaccctattaaatggtgcgcag

SEQ ID NO: 231460 - DNA, 432 bp, Homo sapiens
gtcacttgttgagtcttgcagtctacagagggggtggggaatggcaggggctggcataggagtgagaggggaggaggcaaggtgaggggggccaggtgaggaggggggcacttgaaggggagttcaagaccagcctgggcaacatggtgagaccaccgcccctcaccgccgccatctctgttctcactctggtctcacacacatgaacaaattaaatttaatttaaaaattaaaatttgtcaaaataagtgaartatttacatggattatgtatatattcattttgtagaactatagatcccatgtaactgggaactctttactcttctaacacaacatttatttagccacaaataaaagaagaccagtgatgtagcctgtacacaaaaaagtaagaaaacactggttaggctggggcaggggtggggggaa

SEQ ID NO: 231461 - DNA, 432 bp, Homo sapiens
gtcacttgttgagtcttgcagtctacagagggggtggggaatggcaggggctggcataggagtgagaggggaggaggcaaggtgaggggggccaggtgaggaggggggcacttgaaggggagttcaagaccagcctgggcaacatggtgagaccaccgcccctcaccgccgccatctctgttctcactctggtctcacacacatgaacaaattaaatttaatttaaaaattaaaatttgtcaaaataagtgaaakatttacatggattatgtatatattcattttgtagaactatagatcccatgtaactgggaactctttactcttctaacacaacatttatttagccacaaataaaagaagaccagtgatgtagcctgtacacaaaaaagtaagaaaacactggttaggctggggcaggggtggggggaa

SEQ ID NO: 231462 - DNA, 432 bp, Homo sapiens
gtcacttgttgagtcttgcagtctacagagggggtggggaatggcaggggctggcataggagtgagaggggaggaggcaaggtgaggggggccaggtgaggaggggggcacttgaaggggagttcaagaccagcctgggcaacatggtgagaccaccgcccctcaccgccgccatctctgttctcactctggtctcacacacatgaacaaattaaatttaatttaaaaattaaaatttgtcaaaataagtgaaatatttacatggattatgtatayattcattttgtagaactatagatcccatgtaactgggaactctttactcttctaacacaacatttatttagccacaaataaaagaagaccagtgatgtagcctgtacacaaaaaagtaagaaaacactggttaggctggggcaggggtggggggaa

SEQ ID NO: 231463 - DNA, 615 bp, Homo sapiens
aatatcaccctctctccccggatattaaaagtaatattcagggtggtcgacacctcctgcaatattgagtataatatcytctccaaacctggatattaggaacaatatcacaggggcatgtacactcccttcctttcaccatatacaaaaatcaactcaagatggatgaaggacttatgtaagacccaaaactatataaaccctagaagataacttaggaaatatcattctggacatagacgctggcaaagatttcatgatgaagattccaaaagcaattgcaacaagaagaattgaggagtgggacctaatgaaactaaagagcttcagcacagcaaaagaaactatcaacagagaacaccctacagaacagaagaaaatattttcaaattacatatctgaaaaatgtctaacactcagcatgtataaagaatcaataagcaaaaagcaaacccactacaaataggcaaagaacatgaacccccacattcaccatcctcaagtccatgtgcaacttctttctggatgctggacaaggacttgggtaccaagagggcactgaacaggttaacacttaagccgtctgtggattcttttttcaaaagacaacgtatg

SEQ ID NO: 231464 - DNA, 522 bp, Homo sapiens
aatttctttgggttttagctttcaaacatcaagatagtaggtcaatgtctaaatgagtgtatcaaagttctcacaatggcacatgtaaatccacctcttgtctacccaaaactctaaccaagcaaaggcaagttggaagaatcagacaaatgtaagtccctaggatacataaatgccacgggattttatgtttttaactttcaaccacctaagtttcactaagagacatgttatttggagaggttgctaaagtgtatttgtatgatgtctctgtttacggttggtctggacctctttctgtccagtggttgccctcaactgatgagagttacctctctaaagatcatgcttacgtctctggagcagaccacagcactatcaatgtctgacgtccacctttttccaattaatatttctgtacttactgaattggaaaacatacaggtgttttttgcctggtcacttgtggttttacaacactccccccrcttccccaccactgccccaggtgattttgatgcc

SEQ ID NO: 231465 - DNA, 545 bp, Homo sapiens
acatgaacccccacattcaccatcctcaagtccatgtgcaacttctttctggatgctggacaaggacttgggtaccaagagggcactgaacaggttaacacttaagccgtctgtggattcttttttcaaaagacaacgtrtgtgtggaaaacaaccatatgaaaaaatattcaacatcactaatcatcagaaaatcagaaccatgagataccatatcacaccggtcagaatggctattattaaaaaatcaaaacaaaacagacggtgccgagtttgtggaaaaaggggaatgcttatacactgctggtggtgatatagaaaggagacagggaaatactgggtagaagagagtggttccctggcaaagccctgcccacaagcctggaaacccatggccctaaatgggaaaaggcattcctgcttttgcacccaaaagttgtctttcagctcagcatgcaccccctgtcctgtacccgtatatgtcccagaccccaggctccagaagcagacaagcagatgaggagatgaacagaagagcagaattg

SEQ ID NO: 231466 - DNA, 545 bp, Homo sapiens
acatgaacccccacattcaccatcctcaagtccatgtgcaacttctttctggatgctggacaaggacttgggtaccaagagggcactgaacaggttaacacttaagccgtctgtggattcttttttcaaaagacaacgtatgtgtggaaaacaaccatatgaaaaaatattcaacatcactaatcatcagaaaatcagaaccatgagataccatatcacaccggtcagaatggctattattaaaaaatcaaaacaaaacagacggtgccgagtttgtggaaaaargggaatgcttatacactgctggtggtgatatagaaaggagacagggaaatactgggtagaagagagtggttccctggcaaagccctgcccacaagcctggaaacccatggccctaaatgggaaaaggcattcctgcttttgcacccaaaagttgtctttcagctcagcatgcaccccctgtcctgtacccgtatatgtcccagaccccaggctccagaagcagacaagcagatgaggagatgaacagaagagcagaattg

SEQ ID NO: 231467 - DNA, 545 bp, Homo sapiens
acatgaacccccacattcaccatcctcaagtccatgtgcaacttctttctggatgctggacaaggacttgggtaccaagagggcactgaacaggttaacacttaagccgtctgtggattcttttttcaaaagacaacgtatgtgtggaaaacaaccatatgaaaaaatattcaacatcactaatcatcagaaaatcagaaccatgagataccatatcacaccggtcagaatggctattattaaaaaatcaaaacaaaacagacggtgccgagtttgtggaaaaaggggaatgcttatacactgctggtggtgatatagaaaggagacagggaaatactgggtagaagagagtggttccctggcaaagccctgcccacaagcctggaaacccatggccytaaatgggaaaaggcattcctgcttttgcacccaaaagttgtctttcagctcagcatgcaccccctgtcctgtacccgtatatgtcccagaccccaggctccagaagcagacaagcagatgaggagatgaacagaagagcagaattg

SEQ ID NO: 231468 - DNA, 410 bp, Homo sapiens
gtcacagctcttgtttccttctctttgcccacaatgtggcaagcaagggggcatgactcagccctgtttgtgttacagctctttcagcctcttccctaggatttgtcataattaattmtcatattgtcttatttttttacatttgtttcaacttcagaagatgcatggatctaaacacaacataatgtgttagctagctgccatatgaatttctccgtgtttcaccactatgcagcctaaagttattccgtcatccatgactatcctggctaaagagtctaaagatctttgtttggtagctatggcttcagctagttcattcgctaatttacctagagtggttgacagatttctaattatacgttcatgagaggttactccccaccattacaagtgacttctgccaaaca

SEQ ID NO: 231469 - DNA, 410 bp, Homo sapiens
gtcacagctcttgtttccttctctttgcccacaatgtggcaagcaagggggcatgactcagccctgtttgtgttacagctctttcagcctcttccctaggatttgtcataattaattctcatattgtcttatttttttacatttgtttcaacttcagaagatgcatggatctaaacacaacataatgtgttagctagctgccatatgaatttctccgtgtttcaccactatgcagcctaaagttattccgtcatccatgactatcctggctaaagagtctaaagatctttgtttggtagctatggcttcagctagttcattcgctaatttacctagagtggttgacagatttctaattatacrttcatgagaggttactccccaccattacaagtgacttctgccaaaca

SEQ ID NO: 231470 - DNA, 545 bp, Homo sapiens
acatgaacccccacattcaccatcctcaagtccatgtgcaacttctttctggatgctggacaaggacttgggtaccaagagggcactgaacaggttaacacttaagccgtctgtggattcttttttcaaaagacaacgtatgtgtggaaaacaaccatatgaaaaaatattcaacatcactaatcatcagaaaatcagaaccatgagataccatatcacaccggtcagaatggctattattaaaaaatcaaaacaaaacagacggtgccgagtttgtggaaaaaggggaatgcttatacactgctggtggtgatatagaaaggagacagggaaatactgggtagaagagagtggttccctggcaaagccctgcccacaagcctggaaacccatggccctaaatgggaaaaggcattcctgcttttgcacccaaaagttgtctttcagctcagcatgcaccccctgtcctgtacccrtatatgtcccagaccccaggctccagaagcagacaagcagatgaggagatgaacagaagagcagaattg

SEQ ID NO: 231471 - DNA, 381 bp, Homo sapiens
cctaactcagggccaatttgggacatgggctcaatggaaaagagtgcctagatcaattagaaatatccatcatgaacataggaggcaggcattctggccaagggggtgcrtcttcccactttgtaatccagagagcgatttcttcttgctatctgtccctccataaataagcgttgggtgaaggacaagctagttaccattgaggatggaatgaaattctaccagaattgcaaaatgaactgagagccacgaaagtgttcctctgtgaaccagcagagagatctgtggaaggcaaaggaagaggagccaagaggccagataacattcctgcttcccctacattgtgagagtgaaattgtcagcaacctatatcagtaatta

SEQ ID NO: 231472 - DNA, 381 bp, Homo sapiens
cctaactcagggccaatttgggacatgggctcaatggaaaagagtgcctagatcaattagaaatatccatcatgaacataggaggcaggcattctggccaagggggtgcatcttcccactttgtaatccagagwgcgatttcttcttgctatctgtccctccataaataagcgttgggtgaaggacaagctagttaccattgaggatggaatgaaattctaccagaattgcaaaatgaactgagagccacgaaagtgttcctctgtgaaccagcagagagatctgtggaaggcaaaggaagaggagccaagaggccagataacattcctgcttcccctacattgtgagagtgaaattgtcagcaacctatatcagtaatta

SEQ ID NO: 231473 - DNA, 531 bp, Homo sapiens
acctccttgaccataactacagacatagatctttgattgtttcttttcaaatgtttgcttactttagaggtgcagtcaaatgttgtttggaccataagactctgaggctgtgtgtggttgaaactgtcttgagactcaaagagctattgaggaagggatttgatagctgaactcttttgaagattttctctgtctctcacacatctggggctgaatagcttaacgtttaatttctacatcgacgatagtttaatagccattcatgcaaatcagttctgctgtgagttattatcctactccaataccaastaacacattccttaaatttagtgtatgtataaattctacatggtaagtgaagctgtctttatgaattgctgctatagaatatactagattgtgtaggttttagtacaatccaggtaattatcaagcctttgtaatattttcaggaaagtgatcctttcacttcagtttatggaacttgaaaattttttagttgccaccgactagttagatcataaacttaat

SEQ ID NO: 231474 - DNA, 531 bp, Homo sapiens
acctccttgaccataactacagacatagatctttgattgtttcttttcaaatgtttgcttactttagaggtgcagtcaaatgttgtttggaccataagactctgaggctgtgtgtggttgaaactgtcttgagactcaaagagctattgaggaagggatttgatagctgaactcttttgaagattttctctgtctctcacacatctggggctgaatagcttaacgtttaatttctacatcgacgatagtttaatagccattcatgcaaatcagttctgctgtgagttattatcctactccaataccaagtaacrcattccttaaatttagtgtatgtataaattctacatggtaagtgaagctgtctttatgaattgctgctatagaatatactagattgtgtaggttttagtacaatccaggtaattatcaagcctttgtaatattttcaggaaagtgatcctttcacttcagtttatggaacttgaaaattttttagttgccaccgactagttagatcataaacttaat

SEQ ID NO: 231475 - DNA, 531 bp, Homo sapiens
acctccttgaccataactacagacatagatctttgattgtttcttttcaaatgtttgcttactttagaggtgcagtcaaatgttgtttggaccataagactctgaggctgtgtgtggttgaaactgtcttgagactcaaagagctattgaggaagggatttgatagctgaactcttttgaagattttctctgtctctcacacatctggggctgaatagcttaacgtttaatttctacatcgacgatagtttaatagccattcatgcaaatcagttctgctgtgagttattatcctactccaataccaagtaacacattccttaaatttagtgtaygtataaattctacatggtaagtgaagctgtctttatgaattgctgctatagaatatactagattgtgtaggttttagtacaatccaggtaattatcaagcctttgtaatattttcaggaaagtgatcctttcacttcagtttatggaacttgaaaattttttagttgccaccgactagttagatcataaacttaat

SEQ ID NO: 231476 - DNA, 531 bp, Homo sapiens
acctccttgaccataactacagacatagatctttgattgtttcttttcaaatgtttgcttactttagaggtgcagtcaaatgttgtttggaccataagactctgaggctgtgtgtggttgaaactgtcttgagactcaaagagctattgaggaagggatttgatagctgaactcttttgaagattttctctgtctctcacacatctggggctgaatagcttaacgtttaatttctacatcgacgatagtttaatagccattcatgcaaatcagttctgctgtgagttattatcctactccaataccaagtaacacattccttaaatttagtgtatgtataaattctacatggtaagtgaagctgtctttatgaattgctgctatagaatatactagattgtgtaggttttagtacaatccaggtaattatcaagcctttgtaatattttcaggaaagtgatcctttcacttyagtttatggaacttgaaaattttttagttgccaccgactagttagatcataaacttaat

SEQ ID NO: 231477 - DNA, 396 bp, Homo sapiens
aagtaatcattaaaagctgcatttattccctcacttgaacttttgatttcacactattaggactaatcctctaagtctttgctaagttatgttcctccttttcttgtggcttgactctgatgctctctatatgcaacatcaattgatgtaaagtacattcagggcaatagagtttctttaaatattactttgttattcaaaataatcacaaaagcactcatcgtaggaaaacttgtgaggactcaaatatagggaaatactttttctttctaaggcacaattctctaaagaagttcaccttaayttgaatatacatggggaaaatatccttgttcactaatagtctatattcactctgttttcttccctcatagaccagccggttcactattattt

SEQ ID NO: 231478 - DNA, 367 bp, Homo sapiens
atgcatttgtagcacacctgggtcagaggtatcctccaggggaaggatcagacctgcttgaaaacatgtcgttggaattgggaggcttctagtagctataacataagcactgatgtttactgttccctgccctccactttgatcactctgggaaacgtttttttttaaaaaatcaattgtattcaaacataatttacataaaataaatattcctattttaaagtgcacagtttgctgagttttgccagatgtaaccatccagktgaataaaattgattaaactgatctttcaaataataaattaaccttgcaatcttgctagaaatttaatttgttcagtttattatccattctatgtactgctaca

SEQ ID NO: 231479 - DNA, 367 bp, Homo sapiens
atgcatttgtagcacacctgggtcagaggtatcctccaggggaaggatcagacctgcttgaaaacatgtcgttggaattgggaggcttctagtagctataacataagcactgatgtttactgttccctgccctccactttgatcactctgggaaacgtttttttttaaaaaatcaattgtattcaaacataatttacataaaataaatattcctattttaaagtgcacagtttgctgagttttgccagatgtaaccatccagttgaataaaattgattaaactgatctttcaaataataaattaacyttgcaatcttgctagaaatttaatttgttcagtttattatccattctatgtactgctaca

SEQ ID NO: 231480 - DNA, 389 bp, Homo sapiens
tgtgtctgtgccactgcaatgtaccaggtgcacttacgaatcctctacttacaaactgcttttcacaaaatatgaaactccaggcaaagkttcagacatatgacgtttgtttttaaaatctttctacagccttgtatcctttttcctttccttccttttaccctttttaaaatgtattatgagttttatgttagactaacatctgtaatgttgctatatgacagtattcagttgctgtgtttgatgaatcataaaatggtgtaaaacttcaattagtgcactttttaaataaagtatctatgaatgaatccagcaaaatgtttatgatttgagtattcacaaaatgttacttttctctggatctaacaataatgtgaaaacccaaaatg

SEQ ID NO: 231481 - DNA, 597 bp, Homo sapiens
attaatgtacacagatgaaagcaccattatcaagtcagaagagcacaagtcaaaccaccgtaagttgaggactctctgtactttcttaaatgtttgatagaattcacctaagaaaccatgtagcctgtaattatagaaatctttttaaattaaaaaaattcttcaatacatagagagctattactttttctatttcattttgcatcagtttttagaattagttttacaaataatttcccagttattttaattgtcaaatgtattggcctaaagttttcataattgtattgatgtctgtaggttctgtagttacatcctccatttaattctcattatctacattatgtagcttctctaatttttttcaagataaatcttgctagccattgtttattaaaaaawtttttttcaaagaaccaatttgtgggtatattaattagctccaccttttgttatttgctatgttgttggtttacatttttatctttatcatcttccttcttcttaatttggatatactttgctcatttttttagcctcttaaaaaagaacctaaaggtcattgattgaagccttttattttcaatatattacatc

SEQ ID NO: 231482 - DNA, 519 bp, Homo sapiens
aaggcaatgagcaagggaaccgatggagatattcaatatggwccattccacttggacaaaagccagtaaataggggagtataacaggggacaagggccaaacagaaagtatctattacatttgccaatgcagatcaatcatgtcaacaatagaaatggcagttttggcatttggttattcaatgaaactatatttgtagctttttatttacaatgtttcaaggtatgggcgaagatatgaaaatttcattatgttctattgtatttgagatgtaaatgttctggcacaattatatacattttggattatatattgacagtaaattatttctcctttgttagcttcagcataacattaatattttcaacaacttgaatgcatacattgtgttctcactaatagtttagaatagcgaaggggtctttaaagaatttcttatgaagtagaggcattgggtcagacagagccgaaaaccattggcttagattaatcactatttatcctagggctgaagagggc

SEQ ID NO: 231483 - DNA, 519 bp, Homo sapiens
aaggcaatgagcaagggaaccgatggagatattcaatatggaccattccacttggacaaaagccagtaaataggggagtataacaggggacaagggccaaacagaaagtatctattacatttgccaatgcagatcaatcatgtcaacaatagaaatggcagttttggcatttggttattcaatgaaactatatttgtagctttttatttamaatgtttcaaggtatgggcgaagatatgaaaatttcattatgttctattgtatttgagatgtaaatgttctggcacaattatatacattttggattatatattgacagtaaattatttctcctttgttagcttcagcataacattaatattttcaacaacttgaatgcatacattgtgttctcactaatagtttagaatagcgaaggggtctttaaagaatttcttatgaagtagaggcattgggtcagacagagccgaaaaccattggcttagattaatcactatttatcctagggctgaagagggc

SEQ ID NO: 231484 - DNA, 519 bp, Homo sapiens
aaggcaatgagcaagggaaccgatggagatattcaatatggaccattccacttggacaaaagccagtaaataggggagtataacaggggacaagggccaaacagaaagtatctattacatttgccaatgcagatcaatcatgtcaacaatagaaatggcagttttggcatttggttattcaatgaaactatatttgtagctttttatttacaatgtttcaaggtatgggcgaagatatgaaaatttcattatgttctattgtatttgagatgtaaatgttctggcacaattatatacattttggatyatatattgacagtaaattatttctcctttgttagcttcagcataacattaatattttcaacaacttgaatgcatacattgtgttctcactaatagtttagaatagcgaaggggtctttaaagaatttcttatgaagtagaggcattgggtcagacagagccgaaaaccattggcttagattaatcactatttatcctagggctgaagagggc

SEQ ID NO: 231485 - DNA, 368 bp, Homo sapiens
tgaattctaatgcatttaagccatcttgagagtagagcccttagggaaaactacaaatggaaaattcattgatttttgattttgctttcctatggatcaaatttaatactttcttgtaaatctctccctttgcagatcatatgtgataaatagttatccaactttctagatgtccacccagagctgcttccatatgaagaggtggaaacggattctgtgcatgatactggttaggattgggaactgtttttttttaaaggagatttttaaaatttgttttccttgtacacatagccataatattgtgttgctaactgccctctgggaayaaagtcatgtcaatcacaaatatattgcctaaagtggga

SEQ ID NO: 231486 - DNA, 579 bp, Homo sapiens
ctttctggcacaaaaatatcttctttgtagattatggcattaacctctatctccacaccattttggtctctcatccacagatcatcagcctcttgcttagtcttccatttaatgacaatttctatttagtatacaacagtccttccccctgcaatgcaatttcttcactctttaaagctctgagtctggctactggyctctgttatgtactcatccctagagccaagtcttcaaatatttctcagaacttcttcacatctaaaaatctaggattaatttattgctctctgattatattcttctggtatttcaagtatcctgtataacttcttcatctgcccttgcttttcttctacatcaagatgtcaagttcatggacttcccaattaatcattttaaaaatgtatttcaagcctttatgagtcactaaaatatacatatgttctcaggaattatggccctacaatttgtatgtgagaatagttcctgtgtcaggcattatggacataagaggaaataaattctagtccctgcctacaaggagctaattcccagcctaagacagattgcaagccaata

SEQ ID NO: 231487 - DNA, 567 bp, Homo sapiens
aatcatgacccaaggctcatttataactgcagaaatgttcaagatagaccaaggcttgctatgtttaggaactgacaagtacaggtctttataatctaccattttgcctcatttgataccaggtgaccttcataatgcaggcaatagagaattgcaagatttgtcagagatttcaggtctttggaaagctatgttctttcacaagaacagccatggaaacaggaagaaagtcaattcccacttaaggtaatcagaatttacaaatattcctctcttcattgaaatctcaataggcacttcaatattatatttaattaattcttttgttacaatcatgcatcacataacaacattttsgtcaaggatagtgcacatgtatgacagtggtgcaataaaatcataacgctgtacttttactgtacctcttgtatgtttagacatgtatagatacacttactgtatagatataagtaagtatagatatacttaactgttgtgttacaattgcctacagtattcagtacagtaacatgctgcacaggtttgtagcctaggaggaataggcta

SEQ ID NO: 231488 - DNA, 519 bp, Homo sapiens
aatgttcaagatagaccaaggcttgctatgtttaggaactgacaagtacaggtctttataatctaccattttgcctcatttgataccaggtgaccttcataatgcaggcaatagagaattgcaagatttgtcagagatttcaggtctttggaaagctatgttctttcacaagaacagccatggaaacaggaagaaagtcaattcccacttaaggtaatcagaatttacaaatattcctctcttcattgaaatctcaataggcacttcaatattatatttaattaattcttttgttacaatcatgcatcacataacaacattttggtcaaggatagtgcacatgtatgacagtggtgcaataaaatcataacgctgtacttttactgtacctcttgtatgtttagacatgtatagatacacttamtgtatagatataagtaagtatagatatacttaactgttgtgttacaattgcctacagtattcagtacagtaacatgctgcacaggtttgtagcct

SEQ ID NO: 231489 - DNA, 376 bp, Homo sapiens
agtctgtcgacaggaaacctaaacagtttaggttaaggaaaggtctgcgaaagtcatataaattatcaggttcacaggaaactgacatttattgtataaattccatggtcaaatgtattagggctccacgcacacaactgtgcrccatctatgttaccacacagtgcttacttctttcagtctttattcatttctctcctaatggtctgtatggtattattacatagttctaaaaaccttccatgaggcagaaatttcatttaatgatatagctttgaaattatgaaaaacagtagaaactttctacttttttatgaagcagaattgttgaattttcagtttcatttatttaatgttacaagatgacaaacaaatt

SEQ ID NO: 231490 - DNA, 376 bp, Homo sapiens
agtctgtcgacaggaaacctaaacagtttaggttaaggaaaggtctgcgaaagtcatataaattatcaggttcacaggaaactgacatttattgtataaattccatggtcaaatgtattagggctccacgcacacaactgtgcaycatctatgttaccacacagtgcttacttctttcagtctttattcatttctctcctaatggtctgtatggtattattacatagttctaaaaaccttccatgaggcagaaatttcatttaatgatatagctttgaaattatgaaaaacagtagaaactttctacttttttatgaagcagaattgttgaattttcagtttcatttatttaatgttacaagatgacaaacaaatt

SEQ ID NO: 231491 - DNA, 571 bp, Homo sapiens
cacacaactgtgcaccatctatgttaccacacagtgcttacttctttcagtctttattcatttctctcctaatggtctgtatggtattattacatagttctaaaaaccttccatgaggcagaaatttcatttaatgatatagctttgaaattatgaaaaacagtagaaactttctacttttttatgaagcagaattgttgaattttcagtttcatttatttaatgttacaagatgacaaacaaatttctttaattccttcttgttacttttgtctaacatcaaccaaggccatttttttcatttgaaggtgaaaactgctcatcaaaatccagtttaagctgagaaacaaagaactaaattttgcatgagagattatacactgcataagtataaaacaggaccagaaacaatggtggattmacaatttttaaaaagacaaaagcaggttatcattaaatcaattcttaccaacacaccaatttcacctctaggccagaaaattagccacttacccacgggaaaacaatgattgaagacaaagtccaccagtgaaagttggttatttatttt

SEQ ID NO: 231492 - DNA, 267 bp, Homo sapiens
caactaaaatgatatctacagttcctcttaacacttttcttactttcaaatatgtgggtatgcttcattagctgaggccatgttcsatatgcacatctggctacaagggaaactgggaatgtgagccctgatcctaatgtttgtagagtatttagaaatttgagaattccctccaaataaagagttttttaaaacattgttagacaaaaagtttgaattacaaaatgtggtagtagctcaggtctaactcaaatgcagggaaaaaac

SEQ ID NO: 231493 - DNA, 242 bp, Homo sapiens
atattcaaggatttaaggaatagatggtcataagagggaatatatggagaatctcaacagagaagtaaaaatgataaagagataataggacaaattttagaactgagagacagagtgtcttatataaaartgtcattttatgcacataccagtaaattaaagatggcagaaaaaactatcagtgcacttaaaaacagatcaagaacaatttcccaatacagctaatacaaaggagaaaaata

SEQ ID NO: 231494 - DNA, 242 bp, Homo sapiens
atattcaaggatttaaggaatagatggtcataagagggaatatatggagaatctcaacagagaagtaaaaatgataaagagataataggacaaattttagaactgagagacagagtgtcttatataaaagtgtcattttatgyacataccagtaaattaaagatggcagaaaaaactatcagtgcacttaaaaacagatcaagaacaatttcccaatacagctaatacaaaggagaaaaata

SEQ ID NO: 231495 - DNA, 242 bp, Homo sapiens
atattcaaggatttaaggaatagatggtcataagagggaatatatggagaatctcaacagagaagtaaaaatgataaagagataataggacaaattttagaactgagagacagagtgtcttatataaaagtgtcattttatgcacataccagtaaattaaagatggcasaaaaaactatcagtgcacttaaaaacagatcaagaacaatttcccaatacagctaatacaaaggagaaaaata

SEQ ID NO: 231496 - DNA, 242 bp, Homo sapiens
atattcaaggatttaaggaatagatggtcataagagggaatatatggagaatctcaacagagaagtaaaaatgataaagagataataggacaaattttagaactgagagacagagtgtcttatataaaagtgtcattttatgcacataccagtaaattaaagatggcagaaaaaaytatcagtgcacttaaaaacagatcaagaacaatttcccaatacagctaatacaaaggagaaaaata

SEQ ID NO: 231497 - DNA, 469 bp, Homo sapiens
  misc_feature (1)...(469): n = A,T,C or G
tcacagaggggtgtaaaccccctgggatgtggaaagtagtatcatcctctcccctactggatattacaaacaatatcacagatggtgtacacatgaggtgtttacgatattgggagtaatatcatatcccccagtggatattatgaacaatatcacagaggggtgtatacacnctatgaatcatggggagtaatatactcctctcccaccctggatattacatcrcagggaggtgtacatcccctgtgatacagggagtaatatcatccttttccagcctggatattacaaacaatatggcagggggcagtacaccctggcgatatgggtagtaacatcatctcctccccgtgtggatattatgaacaatattctagggggttgtacaccccctgcaatatggggagtaacatcgtcctctcccccactagatgttataaacaatatcgcaaggggggtgtacacttcc

SEQ ID NO: 231498 - DNA, 469 bp, Homo sapiens
  misc_feature (1)...(469): n = A,T,C or G
tcacagaggggtgtaaaccccctgggatgtggaaagtagtatcatcctctcccctactggatattacaaacaatatcacagatggtgtacacatgaggtgtttacgatattgggagtaatatcatatcccccagtggatattatgaacaatatcacagaggggtgtatacacnctatgaatcatggggagtaatatactcctctcccaccctggatattacatcgcagggaggtgtacatcccctgtgatacagggagtaatatcatccttttccagcctggatattacaaacaatatggcagggggcagtacaccctggcgatatgggtagtaacatcatctcctccccgygtggatattatgaacaatattctagggggttgtacaccccctgcaatatggggagtaacatcgtcctctcccccactagatgttataaacaatatcgcaaggggggtgtacacttcc

SEQ ID NO: 231499 - DNA, 469 bp, Homo sapiens
  misc_feature (1)...(469): n = A,T,C or G
tcacagaggggtgtaaaccccctgggatgtggaaagtagtatcatcctctcccctactggatattacaaacaatatcacagatggtgtacacatgaggtgtttacgatattgggagtaatatcatatcccccagtggatattatgaacaatatcacagaggggtgtatacacnctatgaatcatggggagtaatatactcctctcccaccctggatattacatcgcagggaggtgtacatcccctgtgatacagggagtaatatcatccttttccagcctggatattacaaacaatatggcagggggcagtacaccctggcgatatgggtagtaacatcatctcctccccgtgtggatattatgaacaatattctagggggttgtacacmccctgcaatatggggagtaacatcgtcctctcccccactagatgttataaacaatatcgcaaggggggtgtacacttcc

SEQ ID NO: 231500 - DNA, 469 bp, Homo sapiens
  misc_feature (1)...(469): n = A,T,C or G
tcacagaggggtgtaaaccccctgggatgtggaaagtagtatcatcctctcccctactggatattacaaacaatatcacagatggtgtacacatgaggtgtttacgatattgggagtaatatcatatcccccagtggatattatgaacaatatcacagaggggtgtatacacnctatgaatcatggggagtaatatactcctctcccaccctggatattacatcgcagggaggtgtacatcccctgtgatacagggagtaatatcatccttttccagcctggatattacaaacaatatggcagggggcagtacaccctggcgatatgggtagtaacatcatctcctccccgtgtggatattatgaacaatattctagggggttgtacaccccctgcaatatggggagtaacatcgtcctctcccccactagatrttataaacaatatcgcaaggggggtgtacacttcc

SEQ ID NO: 231501 - DNA, 560 bp, Homo sapiens
caggctgcctgactctccagagcccgctgggggccctgtgcacattgttcccctcatccacgcctccccagagccactggtcaggaccaccctctggacacagccccaggagctgggtaggaccagactggtctccacattccatatgcccgggcatgggggcacaggcccaaggggcactgtcctgtctgcagatgctgcgggaaatcacagatcaggaacacaacgtggtggcactgaaggaggccatcaaggacaaggaggaacctctgcacatagcccagacccggctgtacctgcyctcacaccggcccaacatgcagctgtgccgcgaagcagcccagttcaggtactgcctgggcctctgaggcagtcccaggtgcccccgtccacctcctcgctgtgacccctctcataaacactccaatctccacacacacatcccccacaggtgctgagaggggagggagagtttgcggccacacacaacacgcaagcacgccttaaacacacagatatagacatgacactgggcaggtcatgggtcgggggccttccag

SEQ ID NO: 231502 - DNA, 531 bp, Homo sapiens
acataataaaatatatagataatgaaatctggaaacataaaaatattccctttttacttctgaagaggctaaaagttcaaagaagataacaatacactcaataatgataaaaaatagaaagtgagaaattatttttaatattgtaagattcatattcctgtcttcccaaggattatttatttattaataaactttactagaagttttgtacatgctcactgcagcaatcacasataagaaaaaggaaaagaactttacttaaaatacaaatgctcagaaattacaaattttatattttgtacatattttttgataaaacaagaccatagtatgtttgtatgtataacttaattgatttttttctcactagctataacaaaatacatcttcgcacatcaatatacttctgtatctattgccaccttcaatggtcacatattattccatcctgtggatgcaactgaagtttatttataggatccactctttgggttctttttaaaataagtgaggtgaaaaataaagtgcatg

SEQ ID NO: 231503 - DNA, 531 bp, Homo sapiens
acataataaaatatatagataatgaaatctggaaacataaaaatattccctttttacttctgaagaggctaaaagttcaaagaagataacaatacactcaataatgataaaaaatagaaagtgagaaattatttttaatattgtaagattcatattcctgtcttcccaaggattatttatttattaataaactttactagaagttttgtacatgctcactgcagcaatcacagataagaaaaaggaaaagaactttacttaaaatacaaatgctcagaaattacaaattttatattttgtacatattttttgataaaacaagaccatagtatgtttgtatgtataacttaattgatttttttctcactagctataacaaaatacatcttcgcacatcaatatacttctgtatctattgcsaccttcaatggtcacatattattccatcctgtggatgcaactgaagtttatttataggatccactctttgggttctttttaaaataagtgaggtgaaaaataaagtgcatg

SEQ ID NO: 231504 - DNA, 595 bp, Homo sapiens
acctataactcatcagttaccagtgccatgcacctaatttgaagaaacagctggtattcaagaggatgtaagtctaatgttaattaagcacrgacttatgaagaaccaggatggccacctttccgtcttaagtccttaaaacttttgttattaaaagttctgcattccataactcatcatggaaagagaaaatgatccaaattaaatatattgctgtggtgatctctaaattgctaaaatagtttataatcaatgtttggtttgtcaaacctatattcctaggaaaacaatcaaaacttcaggtgcatttggttacctgatgggccatttaaacattttataaagggatttcattcagttgtcattttcagtgcatgttttctgattgtaaaaaagctcttccatgcaagagggttgatgttaaaacagtagattattatgctgaagtgtattttcaccagataaagaaagacttttatggttcacagaggacagccaaccccttcacaatctagaatctgatgactggatcttctgagaacatcagaggactgcccttgccattcacatgacagcaaaacattaaaaccttaaa

SEQ ID NO: 231505 - DNA, 595 bp, Homo sapiens
acctataactcatcagttaccagtgccatgcacctaatttgaagaaacagctggtattcaagaggatgtaagtctaatgttaattaagcacagacttatgaagaaccaggatggccacctttccgtcttaagtccttaaaacttttgttattaaaagttctgcattccataactcatcatggaaagagaaaatgatccaaattaaatatattgctgtggtgatctctaaattgctaaaatagtttataatcaatgtttggtttgtcaaacctatattcctaggaaaacaatcaaaacttcaggtgcatttggttacctgatgggccatttaaacattttataaagggatttcattcagttgtcattttcagtgcatgttttctgattgtaaaaaagctcttccatgcaagagggttgatgttaaaacagtagattattatgctgaagtgtattttcaccagataaagaaagacttytatggttcacagaggacagccaaccccttcacaatctagaatctgatgactggatcttctgagaacatcagaggactgcccttgccattcacatgacagcaaaacattaaaaccttaaa

SEQ ID NO: 231506 - DNA, 443 bp, Homo sapiens
taacacctttccctgtatccaagccctcatattatgctctgacaataaattgggcttttccatctgacttgtccagtgaatggacaatggaaaatgtgatgcaaatatccattggttcttgcctttttggacacagtcatattgtgaagaggtctggagctaccctgttggaracacagggcctagccaagagtcaccacaaaccaccagattgtgaaggaaactatcttaaaccaaccaggctcagtcaaggcaccaggtgactaaggcctgttttgtgatccaggcaacacaaatatatcaactacccagctgaacccaccacaccaaaatgcagatccacagaacttcaaacaaataaaatggtggttgttttttataagctagtaaggtttaattagttccttaaacagcaaatattaactgttacacctaagtgaata

SEQ ID NO: 231507 - DNA, 443 bp, Homo sapiens
taacacctttccctgtatccaagccctcatattatgctctgacaataaattgggcttttccatctgacttgtccagtgaatggacaatggaaaatgtgatgcaaatatccattggttcttgcctttttggacacagtcatattgtgaagaggtctggagctaccctgttggaaacacagggcctagccaagagtcaccacaaaccaccagattgtgaaggaaactatcttaaaccaaccaggctcagtcaaggcaccaggtgactaaggcctgttttgtgatccaggcaacacaaatatatcaactacccagstgaacccaccacaccaaaatgcagatccacagaacttcaaacaaataaaatggtggttgttttttataagctagtaaggtttaattagttccttaaacagcaaatattaactgttacacctaagtgaata

SEQ ID NO: 231508 - DNA, 443 bp, Homo sapiens
taacacctttccctgtatccaagccctcatattatgctctgacaataaattgggcttttccatctgacttgtccagtgaatggacaatggaaaatgtgatgcaaatatccattggttcttgcctttttggacacagtcatattgtgaagaggtctggagctaccctgttggaaacacagggcctagccaagagtcaccacaaaccaccagattgtgaaggaaactatcttaaaccaaccaggctcagtcaaggcaccaggtgactaaggcctgttttgtgatccaggcaacacaaatatatcaactacccagctgaayccaccacaccaaaatgcagatccacagaacttcaaacaaataaaatggtggttgttttttataagctagtaaggtttaattagttccttaaacagcaaatattaactgttacacctaagtgaata

SEQ ID NO: 231509 - DNA, 443 bp, Homo sapiens
taacacctttccctgtatccaagccctcatattatgctctgacaataaattgggcttttccatctgacttgtccagtgaatggacaatggaaaatgtgatgcaaatatccattggttcttgcctttttggacacagtcatattgtgaagaggtctggagctaccctgttggaaacacagggcctagccaagagtcaccacaaaccaccagattgtgaaggaaactatcttaaaccaaccaggctcagtcaaggcaccaggtgactaaggcctgttttgtgatccaggcaacacaaatatatcaactacccagctgaacccaccacaccaaaatgcagatccacagaacttcaaacaaataaaatggtggttgttttttataagcyagtaaggtttaattagttccttaaacagcaaatattaactgttacacctaagtgaata

SEQ ID NO: 231510 - DNA, 534 bp, Homo sapiens
cccttcctcagtgtgactcttgcctaaaatctatccctggttttctcttttcctaagcatgccctgacttgttctttcatctcctctgaacttgcaattgctcctcagtgactctattctgcagatccagaaaactcaaccttaatcttcccagagccctgttgtctccaatattggaatatctagccttgctttctcagacgcctagattacaggcctctctcttgaacacctattggtaaggtatccggggatcctttaaatacacratgattggcagggtttacataggggaaatcagtgtctgacaattcgccttccaggatatggattgtcattccctctctttgtgggccccagtctcctatacataaaagtagagattgtaatagtcatttgacttgcagatacctcaccccgaacccacctactataatgtaaaagccaagaatgcaaaccctttcctcaccccgtgaaggtaaagtcctcagagccaaggagagaaggctcagggatggtacctaggtgtttcca

SEQ ID NO: 231511 - DNA, 534 bp, Homo sapiens
cccttcctcagtgtgactcttgcctaaaatctatccctggttttctcttttcctaagcatgccctgacttgttctttcatctcctctgaacttgcaattgctcctcagtgactctattctgcagatccagaaaactcaaccttaatcttcccagagccctgttgtctccaatattggaatatctagccttgctttctcagacgcctagattacaggcctctctcttgaacacctattggtaaggtatccggggatcctttaaatacacgatgattggcagggtttacataggggaaatcagtgtctgacaattcgccttccaggatatggattgtcattccctctctttgtgggccccagtctcctatacataaaagtagagattgtaatastcatttgacttgcagatacctcaccccgaacccacctactataatgtaaaagccaagaatgcaaaccctttcctcaccccgtgaaggtaaagtcctcagagccaaggagagaaggctcagggatggtacctaggtgtttcca

SEQ ID NO: 231512 - DNA, 497 bp, Homo sapiens
gggttttggagaagggaatgaaggaattgtgctgtatcagaggtccccacctaacagcacagggmctttttctgtgctcttgccaggccgttgtattaggctgatacaaaagtaattttggttttgtcattgaaagtaatgagaccatctgacttacaatgtctatgtcataaccaactcctaatagcctcctaggacagctttgccctgacatacactgtcctggaaccacgtctgctttgtaactcctgaggtagctgccaccatgaccaatgccttctcatctttactctacatgcaggtaacagttataattatatctctgtgtattcacagaacatctagtacatctgggacttctacaaaatttccctagctgattttggtgttctagtgtcctggcagctctagccatgaagggatgatgctttatcagcatttctgttgagttttttttcctttttctcacaaactgattccacttttcccacatacgt

SEQ ID NO: 231513 - DNA, 570 bp, Homo sapiens
ttatttactgtctagtataatgcagataatttctccctcttgggaagggtacagccaagtgaacttcccataatacaagttgrggtttcttgagcttgggtttttcttccacagcgtaatgtgcaggtgccacttggctctctttgtgttaccctgggaaagctgatggctgtaggtgcatgtttattttcgggttctctattctgtttcattggtctttgtgtctgttttcatatcgctaccatgctattttgtctattgtggccttagggtatagtatgaagtcaagtaatgtgatgtctccagctttgttcttcttgcttaggtttcctttggttgtctgggctctttaaaaatccatatgaaatttagaatattttttttctaattctgtgaaaaacgacattggttgtttcataggaatagtgttgaatgtgtagattgcttttggcagtatagccattttaacaatattgatctttctaatccatgagcatggaatagttttccatttgctttgtcatctatgatttctttctgcagtgtttcgtacttctccttttagatatc

SEQ ID NO: 231514 - DNA, 570 bp, Homo sapiens
ttatttactgtctagtataatgcagataatttctccctcttgggaagggtacagccaagtgaacttcccataatacaagttgaggtttcttgagcttgggtttttcttccacagcgtaatgtgcaggtgccacttggctctctttgtgttaycctgggaaagctgatggctgtaggtgcatgtttattttcgggttctctattctgtttcattggtctttgtgtctgttttcatatcgctaccatgctattttgtctattgtggccttagggtatagtatgaagtcaagtaatgtgatgtctccagctttgttcttcttgcttaggtttcctttggttgtctgggctctttaaaaatccatatgaaatttagaatattttttttctaattctgtgaaaaacgacattggttgtttcataggaatagtgttgaatgtgtagattgcttttggcagtatagccattttaacaatattgatctttctaatccatgagcatggaatagttttccatttgctttgtcatctatgatttctttctgcagtgtttcgtacttctccttttagatatc

SEQ ID NO: 231515 - DNA, 570 bp, Homo sapiens
ttatttactgtctagtataatgcagataatttctccctcttgggaagggtacagccaagtgaacttcccataatacaagttgaggtttcttgagcttgggtttttcttccacagcgtaatgtgcaggtgccacttggctctctttgtgttaccctgggaaagctgatggctgtaggtgcatgtttattttcgggttctctattctgtttcaytggtctttgtgtctgttttcatatcgctaccatgctattttgtctattgtggccttagggtatagtatgaagtcaagtaatgtgatgtctccagctttgttcttcttgcttaggtttcctttggttgtctgggctctttaaaaatccatatgaaatttagaatattttttttctaattctgtgaaaaacgacattggttgtttcataggaatagtgttgaatgtgtagattgcttttggcagtatagccattttaacaatattgatctttctaatccatgagcatggaatagttttccatttgctttgtcatctatgatttctttctgcagtgtttcgtacttctccttttagatatc

SEQ ID NO: 231516 - DNA, 582 bp, Homo sapiens
ggaggatgagtgtaaaaaactaacttcaaattctgagtgtggggagcagctaccagaggagattaaasaaaagaaagaaaaacttttaaaagtatgttttactagcccgttggctccacctgctgaattaagtgaatggccacctcctctctctcctctaaatgggtgagaaaatcaattagctgaaaaacttactgctcctgtagttacaacattaaaacctggagcaattggtggtggtagacaaaattctattcaaaaagctaaagccaagggagaccttgaagcatggcaatttcccgttactataatccagcaagtaggacagaatatagctaattaggctgctttctcttttaagttactaaagaatttaagcaagccattagtcaatatggactgaactctctttttgtgcaaactttatttaaaaatatggctcttgataatagattactaccatataattaggatactttgacaaaacctgttctcactccatctcagtacttgcagtttaaaacttggtaggctgatgaagctcaaactcaggcaaaagaaaacacacaagtgcagccacct

SEQ ID NO: 231517 - DNA, 460 bp, Homo sapiens
cctaaagctaaagcagaaaaggagggagaggttcatccctatccttctgcacaccctcattactattttgaagaaaacgaccctccagatctttcttttctggaggacactgggtgaaaagtagttgccctggtgackgttcgagcagcgccttgagcgactgctcttagttctattcaggcaggaatacagcaagctagacaaaagtgggatttagaggcttggcagttccctgtttgaatacaccccccagatcaacagggaaatattatagctacatttgagccttttccttttaaattactcaaaaaaattaaacaagctataaatcagtatggaccaggttctccttttgaaatgggactgttaaagaatgttgctgtttccagtcggatgattcctactgactgggacacttttactctagcttgtctaactcctgctcagttcttacaattta

SEQ ID NO: 231518 - DNA, 532 bp, Homo sapiens
gtggctgggctggtttacatgcacaagtggtcatgcaggatgatgccatagaacagcttagagragtgtgcattagagcttggaataaatcacttcatgtggagaacaatacccttcctttagtgctataaaacagggaccaagagaaccatatgtggattttatagcttggttacaggagtctcttaaaaagatgattgcagatttggctgcttaggatatagtgttgcagttattggttttgacaatgctaatccttattgccaggctgctctgcgacctatcagagggaaagcacatttagttgattataacaaggcctgtgatgatatcagagataatctacataaagctactttgttggcacaggcgatggcaggactgagagtggataaaggaaatactctatttcctggagcttgttttaactgtgggaagcatggtcatactaaaaagaatgtaaaaaaaaaaaatcaccgagtcaggccaccagataggggaaaaaacaaaactgctgatcctgaaatatgtc

SEQ ID NO: 231519 - DNA, 532 bp, Homo sapiens
gtggctgggctggtttacatgcacaagtggtcatgcaggatgatgccatagaacagcttagagaagtgtgcattagagcttggaataaatcacttcatgtggagaacaatacccttcctttagtgctataaaacagggaccaagagaaccatatgtggattttatagcttggttacaggagtctcttaaaaagatgattgcagatttggctgcttaggatatagtgttgcagttattggttttgacaatgctaatccttattgccaggctgctctgcgacctatcagagggaaagcacatttagttgattataacaaggcctgtgatgatatcagagataatctacataaagctactttgttggcacaggcgatggcaggactgagagtggrtaaaggaaatactctatttcctggagcttgttttaactgtgggaagcatggtcatactaaaaagaatgtaaaaaaaaaaaatcaccgagtcaggccaccagataggggaaaaaacaaaactgctgatcctgaaatatgtc

SEQ ID NO: 231520 - DNA, 532 bp, Homo sapiens
gtggctgggctggtttacatgcacaagtggtcatgcaggatgatgccatagaacagcttagagaagtgtgcattagagcttggaataaatcacttcatgtggagaacaatacccttcctttagtgctataaaacagggaccaagagaaccatatgtggattttatagcttggttacaggagtctcttaaaaagatgattgcagatttggctgcttaggatatagtgttgcagttattggttttgacaatgctaatccttattgccaggctgctctgcgacctatcagagggaaagcacatttagttgattataacaaggcctgtgatgatatcagagataatctacataaagctactttgttggcacaggcgatggcaggactgagagtggataaaggaaatactctatttcctggagcttgttttaactgtgggaagcatggtcatactaaaaagaatgtaaaaaaaaaaaatcaccgagtcaggccaccagataggggaaaawacaaaactgctgatcctgaaatatgtc

SEQ ID NO: 231521 - DNA, 403 bp, Homo sapiens
ggtcattccacacagttaattgaaaatgctcagttaagatttgatacagatgaacaactgataataaaaacaaaaacgggggagaaacagggattatgggatagcccatacacaattgaatcttgcattattaactttcaaatttttgagcctgcccaaaggccagatgttaccagcagctgaacagcatctacagaaaccagctgcaaagacagaagcagamcaactggtttggtggagagatccaataacaaaaagttgggaaataggtaaaattataacttggcatagaggttatgcttgtgtttctccaggactgaatcaacaactgatttagataccatcaagacacctgaaattttatcatgagccagatgctgaggaagaaagaaaaagcacaatc

SEQ ID NO: 231522 - DNA, 403 bp, Homo sapiens
ggtcattccacacagttaattgaaaatgctcagttaagatttgatacagatgaacaactgataataaaaacaaaaacgggggagaaacagggattatgggatagcccatacacaattgaatcttgcattattaactttcaaatttttgagcctgcccaaaggccagatgttaccagcagctgaacagcatctacagaaaccagctgcaaagacagaagcagaccaactggtttggtggagagatccaataacaaaaasttgggaaataggtaaaattataacttggcatagaggttatgcttgtgtttctccaggactgaatcaacaactgatttagataccatcaagacacctgaaattttatcatgagccagatgctgaggaagaaagaaaaagcacaatc

SEQ ID NO: 231523 - DNA, 403 bp, Homo sapiens
ggtcattccacacagttaattgaaaatgctcagttaagatttgatacagatgaacaactgataataaaaacaaaaacgggggagaaacagggattatgggatagcccatacacaattgaatcttgcattattaactttcaaatttttgagcctgcccaaaggccagatgttaccagcagctgaacagcatctacagaaaccagctgcaaagacagaagcagaccaactggtttggtggagagatccaataacaaaaagttgggaaataggtaaaattataacttggcatagaggttatgcttgtgtttctccaggacygaatcaacaactgatttagataccatcaagacacctgaaattttatcatgagccagatgctgaggaagaaagaaaaagcacaatc

SEQ ID NO: 231524 - DNA, 403 bp, Homo sapiens
ggtcattccacacagttaattgaaaatgctcagttaagatttgatacagatgaacaactgataataaaaacaaaaacgggggagaaacagggattatgggatagcccatacacaattgaatcttgcattattaactttcaaatttttgagcctgcccaaaggccagatgttaccagcagctgaacagcatctacagaaaccagctgcaaagacagaagcagaccaactggtttggtggagagatccaataacaaaaagttgggaaataggtaaaattataacttggcatagaggttatgcttgtgtttctccaggactgaatcaacaactgayttagataccatcaagacacctgaaattttatcatgagccagatgctgaggaagaaagaaaaagcacaatc

SEQ ID NO: 231525 - DNA, 495 bp, Homo sapiens
  misc_feature (1)...(495): n = A,T,C or G
tagttactatttttaaaaaccctaaagtgaaaaagtctcagttcttttgcctatctattttttttttccctgcctactttgaatctcctcatttgtctactggtgttcacataacacttactgtctgtggtgttactaattcaaggtcacttggctnaaaaaaaacaaaagaatgaaacaattctttatttttttctctttttgagacaagktctcactctaaggtctcactctgttccccagactggagtgcagtagtgagatcatagctcactgttatctcaacctcccaggctcaaacaatcctcctgcctcatcctctctagttgctgggacaataagcatgcaccaccatgcctggcaattttttatcttattcttagtagagattgggtctcactatgttgcccaggctggtctcaaactcctgagctcaagtgatcctcttgcctcagcctctcaaagtgctgggatacaggcatgaaccactgtgcc

SEQ ID NO: 231526 - DNA, 303 bp, Homo sapiens
ccatcttaaaaaatatgttttaggaacacataattctaaattatgaaattattctcatatgtaagatactgctatatgacaattcmagatttcttgcttcctaggttttttattaaaataagggttactaagtgttaatatcttgctagatatgtgtgattaagactactagatacaagagaaacaattctgtatgcaaaatgtataccggtttttgtttcagagaaagtaaattcgcttagagatttttaaggattattttaaattgaaggaataaaaaagatagataaaactacatgtgta

SEQ ID NO: 231527 - DNA, 303 bp, Homo sapiens
ccatcttaaaaaatatgttttaggaacacataattctaaattatgaaattattctcatatgtaagatactgctatatgacaattccagatttcttgcttcctaggttttttattaaaataagggttactaagtgttaatatcttgstagatatgtgtgattaagactactagatacaagagaaacaattctgtatgcaaaatgtataccggtttttgtttcagagaaagtaaattcgcttagagatttttaaggattattttaaattgaaggaataaaaaagatagataaaactacatgtgta

SEQ ID NO: 231528 - DNA, 198 bp, Homo sapiens
aatataaatattttaaatgttatataaattataaaaatctaatatggtatcagtsataattttgatgatgttaaatattctctaaagttgtatatgtatagatatattattaatataaatattctaaagattatataaaatttgtggaagtctgatggatctgatgtgttgccgtcagtcatgattctggctgttatc

SEQ ID NO: 231529 - DNA, 219 bp, Homo sapiens
tttgtaactaaggcaatgaagatcatctgtctcctcccttccccattaattgtgaactttagttttataagctcctaagaggcagaaaacaaattggagmctcgtcttctatttgggagtgtatggcatgtatttattgtcctaggtgctgggtttatttctttcagctaatgacagttttccatgctttatggtaagtgaccataaagtaagtggtaa

SEQ ID NO: 231530 - DNA, 219 bp, Homo sapiens
tttgtaactaaggcaatgaagatcatctgtctcctcccttccccattaattgtgaactttagttttataagctcctaagaggcagaaaacaaattggagcctcgtcwtctatttgggagtgtatggcatgtatttattgtcctaggtgctgggtttatttctttcagctaatgacagttttccatgctttatggtaagtgaccataaagtaagtggtaa

SEQ ID NO: 231531 - DNA, 584 bp, Homo sapiens
ataagcttccctttagcaagggtttcagatctttcttctttttartttaagcatctgcagctgtaagcttccctttagcatgggtttgagatctttcttctttttaatttaaggatctgtagctgtaagcttccctttagcatgggtttgagatctttcttctttttaatttaagcatctggagctgtaagcttccctttagcactgcctttgttgcctcctcctgagtttgggtatgtcatggtttcgttttcatttgcttaaacattttttgtcctattgtaatataattgtgttgtttttaataaaggtaattaatgaaacacataatgaattgtacttctgtttttataacattttaagcattcttaactcagaaatgtaaattttagaaaaaaattccaggccaggcacagtggctcacacctgtaatcccagcacttgaggaggccgaggcaggaggatcatctgaggtcgggagttggagaccaccctggccaacatggtgaaaccctgtctttactaaaaatagaaaaaaaaaatatataaaagttagctgggtgtcatggcgggtgcctgtaatc

SEQ ID NO: 231532 - DNA, 584 bp, Homo sapiens
ataagcttccctttagcaagggtttcagatctttcttctttttaatttaagcatctgcagctgtaagcttccctttagcatgggtttgagatctttcttctttttaatttaaggatctgtagctgtaagcttccctttagcatgggtttgagatctttcttctttttaatttaagcatctggagctgtaagcttccctttagcactgcctttgttgcctcctcctgagtttgggtatgtcatggtttcgttttcatttgcttaaacattttttgtcctattgtaatataattgtgttgtttttaataaaggtaattaatgaaacacataatgaattgtrcttctgtttttataacattttaagcattcttaactcagaaatgtaaattttagaaaaaaattccaggccaggcacagtggctcacacctgtaatcccagcacttgaggaggccgaggcaggaggatcatctgaggtcgggagttggagaccaccctggccaacatggtgaaaccctgtctttactaaaaatagaaaaaaaaaatatataaaagttagctgggtgtcatggcgggtgcctgtaatc

SEQ ID NO: 231533 - DNA, 584 bp, Homo sapiens
ataagcttccctttagcaagggtttcagatctttcttctttttaatttaagcatctgcagctgtaagcttccctttagcatgggtttgagatctttcttctttttaatttaaggatctgtagctgtaagcttccctttagcatgggtttgagatctttcttctttttaatttaagcatctggagctgtaagcttccctttagcactgcctttgttgcctcctcctgagtttgggtatgtcatggtttcgttttcatttgcttaaacattttttgtcctattgtaatataattgtgttgtttttaataaaggtaattaatgaaacacataatgaattgtacttctgtttttataacattttaagcattcttaactcagaaatgtaaattttagaaaaaaattccaggccaggcacagtggctcacacctgtaatcccagcacttgaggaggccgaggcaggaggatcatctgaggtcrggagttggagaccaccctggccaacatggtgaaaccctgtctttactaaaaatagaaaaaaaaaatatataaaagttagctgggtgtcatggcgggtgcctgtaatc

SEQ ID NO: 231534 - DNA, 360 bp, Homo sapiens
ggattccagaacattcctgctgtggtctgattgttcctcaaataggattccagaacactgctacgaggttctgaatttttgcccctcacataggattgcagaacactgctacaagggtttgaaagttttcccctcacataggattccacaacactcctgctgtgatctgaatgtttgtccctcacataggattcccgagcactcctgytgtggtctgaatgtttttccctcacataggattcctgaagactgctgctgtcactatagtcgttgcgagtgtctgaatgtttgaccttcaccaaacactaaatatcctgcccctttagtcttggactttccagcctccagatctgtgagcaa

SEQ ID NO: 231535 - DNA, 324 bp, Homo sapiens
atggttcccagaactttaacaagcacaataatccactcttagatacttgaaagtcagataagaagacatctatcccttaactagttgttatacactctatgtaaataaaaccatataatttaaatttcctcaattaattctcacagacagtacccaacctcacatcaccatgatctytgacatgtcaatgttttattgtaaatcgtgacagactatctacatatatactcatgatttacaatttgagattgtcaacccagccagtaacctacgtagcactgaattcaaataccagaaaaaggacccagattccctcaccaccta

SEQ ID NO: 231536 - DNA, 324 bp, Homo sapiens
atggttcccagaactttaacaagcacaataatccactcttagatacttgaaagtcagataagaagacatctatcccttaactagttgttatacactctatgtaaataaaaccatataatttaaatttcctcaattaattctcacagacagtacccaacctcacatcaccatgatctctgacatgtcaatgttttattktaaatcgtgacagactatctacatatatactcatgatttacaatttgagattgtcaacccagccagtaacctacgtagcactgaattcaaataccagaaaaaggacccagattccctcaccaccta

SEQ ID NO: 231537 - DNA, 324 bp, Homo sapiens
atggttcccagaactttaacaagcacaataatccactcttagatacttgaaagtcagataagaagacatctatcccttaactagttgttatacactctatgtaaataaaaccatataatttaaatttcctcaattaattctcacagacagtacccaacctcacatcaccatgatctctgacatgtcaatgttttattgtaaatcrtgacagactatctacatatatactcatgatttacaatttgagattgtcaacccagccagtaacctacgtagcactgaattcaaataccagaaaaaggacccagattccctcaccaccta

SEQ ID NO: 231538 - DNA, 599 bp, Homo sapiens
aacctttactcaaaattcttaaggctcaacaattactaacaatcatacatttgactttgtaaaatttatctcattttcaactgagacacactcacgttttagaactctatattaccttttagaactctatatttcaattacttagtgtctttcttgtagaaacagggtttcaagctaaataaatactccatgtgacattaaaatgttgtatgggatgtaggaaaatctttattgtataaggctgtctcacccaaaccatcctcaccttcgaaatgacaataatatcccccaatcattaagacaaaaaaacttctacacaccttagaacccatggaaaagcaattctcaaggaaaaacaaatgttaacaaccatcgayactgaaatattcctgataaatccgtaagaaaacatttatgttttgaatggtgtctttagggtgccatcataaaacttaaatgcattaatttctttttcttcatagtttttataaattatgtcaccaaagtttatttatgtaatagggtgtatgctgcatgaatgaagagagacaacaataacaatattacccccatcaagtttacttaaggacttttcagaa

SEQ ID NO: 231539 - DNA, 339 bp, Homo sapiens
tggttgggcaccttggtgtctctgcttccacagactctgttccactgttttgctttgttgtttgtggctttgtcttcctcattctaaccrataaggcatagctgttcagaatggcttaaggctaactgcagcatggctggtttacttgcagctttgtctgaatcacattttattttccgttaactagattgaaccaccaacccacatcatactacaattaatgttttattctttatttcaagacgttatgcaaaagtattcataaaaaatgattttctgaaatttagatacagtatatttttagatttatcctgatctttagccttgctaggctgccaa

SEQ ID NO: 231540 - DNA, 633 bp, Homo sapiens
cccacatcatactacaattaatgttttattctttatttcaagacrttatgcaaaagtattcataaaaaatgattttctgaaatttagatacagtatatttttagatttatcctgatctttagccttgctaggctgccaaagggagaaattaaagaaaaaaaaaaacacctttatttttatcaggtacacccaatcaagacatattcattgccctgaaaggagattacaaaactcattttccacatttcattctcagtgactccatgctggttttgaatagttgttactttccataacaaaattggttctgaatttggtctgagatcaacatcactcagtaatcattcattacaaggaaatttatttctcttccctttctcctcttatttcataaattattgttgccattgttgttagtttaagaaacatcctgtaatatatagctccttttttttctttttaaaattctagatatcaattacagtggcctgactgtctcatgggcaaactccttccttgttttgggatgtatttcatctgagccagaattgctaaacttgttcagagctattacaatcttttcacccgctttaaacttaaatttctctcaacaacattcattctatcctttct

SEQ ID NO: 231541 - DNA, 554 bp, Homo sapiens
ctttttgttgtttttgttgtcgttgttttttttttgagacagagtctcgctctgtcacccaggctggggtacaatggcgcggtctcagctcactgcaacctctgcctcctgggttcaagtgatttttctgcctcagcctccctagtagctgggactacaggcrcctgccaccacgccgggctaatttttgtatttttagtagaggcggggtttcactatgttggccagacttgtctcgaactgctgacctcatgttctgcctgcctggacctcccaaagtgctggggttacaggcatgaagaagctttaaggaatatgcatttaataaaagctataagggagaaatatgaaaaaaattttcaagctatgagatttacatatatatgtgtatatatatatatatacatataaattctatatatccgtctagtgaatatcttgatacatcgatctttattaaccaagaggaattatcttcccttttaaattgtcccagttactagagtcatttttaaataaaaatattttcattttcttgcaatattagctgctag

SEQ ID NO: 231542 - DNA, 609 bp, Homo sapiens
attgtttgtataaaaatgtagtttaatttgtataccttctttagagatttccacttcagctggtcagattaaacttcaattgtttaatccacaatagaagttgcaaaaactcgtctctcgttatgtgtcaatatattatgtggaaaaaaaaattctatttttaacttattttcccttatggaattttgtagctaccttattcacaaactattgtgaacataaaatgataacttttcattttcagatcaacaaagaaattatgaaaagagaatttttgctatgattatatagtaaattataaccaaattattgctaaaatcattgttttaatagcataattataatttgcrttactcataataaaaaaagaaaatattcataaaataaaattattttttgcctcctaatttccacatttaatttgttcttgccagcatttatgtatatgttgaccataactcagtagctaaaaaaggtaaaagaactttctctttcacaccaacagaaagagacttctaaattaaagctactttttattttcagtcttttcacaataggaaatgatgatctattatttcattggatttgggcttttgacaacaaaagtaa

SEQ ID NO: 231543 - DNA, 562 bp, Homo sapiens
ggtatttacctgacagaaaattttactccaattttactgggagttttatgaccacttaagaccttgacctttcaccatccctccaaaatgggaattagagtcagcattgactttgcttgttatcattgaaaaaactatgctccagataaaactttgctttcagtggctaatgcaagtttcttattcatgtgttcattatgagtgaacttgaccattgcaatagtttccataatcgcttccctaccgttagaacaatttttgatgatatcaccctcatgcttcacttgcttaattagaccttagtgcatcaatgagtctttttaactttcttctgcagaggctcttcttgcccagggctaacctytgtctctaagttttatgctgttctttttagccaaggctttttatatttgagtacagttgctttctagacaatgtaagatttattgataacaaaatgtatctttacccatttatttaatactgtctgagtggggaagggatttgatgtttattgaataactactatgtataaggttgtgtgtcatgcatgtcacattca

SEQ ID NO: 231544 - DNA, 581 bp, Homo sapiens
gaaattaaaactcagaatgattaatcaacctacccagtcacacaaagtagcaaggctcagatttctgcttgatatgctgcttttaaaataagtttctgattcttttatgtaaatatctaggtgatgtgtggctgagtcgtatgatagacgtgttcaattattttagaaackctggaacaattttcctagtggttttataattttacagtatcaccagcagtttatgagttttccagtgccatcacattttgccagaactttgtattttcagtaatttaaaatttcagccactctactaggcatcaacctaaataatagacaaagagagattctccaaagataatcagtttatttaggaaggagcagaagcattgccatacagagtacacgagccatggcaactataggcacaattgaggaggttgaggcacaaggaggcttttaaaggcaaaaggaggagtccatgtcagttattttgcaacaaagagaacaatggttagaagggtttattgcaggagttgactgtcagctcatgagtggagactgtatcaggcacaggttcttatacttatggttaaatg

SEQ ID NO: 231545 - DNA, 397 bp, Homo sapiens
tcgcaaattaataaattaataagtgctattgagctccatcttcatgttggtccagtccaaaggatcaggtttctggcaagaatcatgtttagtagttactttgattagtactccaaatacgcttctctaagtataaagttctgatgggaaacccagattgctgttagtagtgatcctggtaagctactgctgctactactttctacttctatgctttctactactaccattaatttaataagagtaaagtcctcttgcttccygccagtatccctttccaggaaatttccaaaaaaaatggctacaagcctatgcaaattaagtgatatttttctgtcttttgaatcttaaatatcaactagaatttgtaacccctaatatgtgatctgaaagcctc

SEQ ID NO: 231546 - DNA, 513 bp, Homo sapiens
ggttttttgtggagtctttttttttgtatgtttttgttgtttcccatttgtttgtttttcttttaacagtcaggccactcttctatagggctgctgtggtttcctgggggtctgctccatactctagttgcctcagttttcccctcacctggaggtatcaccagtaaaggctgtaaaactgaaaagatggcagcctgatccttcctctgcaagctcagtccagaaggttactgacctgttcctggcccaaacrtccctgtaggttgctggagacccctgttggatggtcacaccctgtcaggaggaacaacataagggactcacttaaagaagcagtctggctgctttttgtcagagcaggtgtgctgtactgggggaacccttcctcatctggaccatctggcctctccaaagttggcaggctggaatgggtgattcaattgaatgacagagatggtgactgtccctctcctcaggagctcagtccaaggaagagatcagagctgtctgtat

SEQ ID NO: 231547 - DNA, 513 bp, Homo sapiens
ggttttttgtggagtctttttttttgtatgtttttgttgtttcccatttgtttgtttttcttttaacagtcaggccactcttctatagggctgctgtggtttcctgggggtctgctccatactctagttgcctcagttttcccctcacctggaggtatcaccagtaaaggctgtaaaactgaaaagatggcagcctgatccttcctctgcaagctcagtccagaaggttactgacctgttcctggcccaaacatccctgtaggttgctggagacccctgttggatggtcacaccctgtcaggaggaacaacataagggactcacttaaagaagcagtctggctgctttttgtcagagcaggtgtgctgtactgggggaacccttcctcatctggaccatctggcctctccaaagttggcaggctggaatgggtgattcaattgaatgacagagatggtgrctgtccctctcctcaggagctcagtccaaggaagagatcagagctgtctgtat

SEQ ID NO: 231548 - DNA, 315 bp, Homo sapiens
tcatacaaaattgactaacatgcatgtgtgttcatggcagtcatacaaaatatgaaaactcaaagggccaagtaacagacacctttatatcatgttgaggtaacaaaaagaatcggggcttggagcttggtaaaacaggttatgggagggagggaaagagaagggcatggggcaagaatagccttgttgtatagataaaacctcacaggtagcagctttcagaaagaatagatgttatctctgataaagcttctctctctmtctatatatataaaacatatgtatataacatatatatatctaattatatgatct

SEQ ID NO: 231549 - DNA, 365 bp, Homo sapiens
aacatttcattctgttttacttttaaatgggtattattgtctttgatatttgacactgtcaattaaaatgtcacaccaatcagaaaagcccattcatacttaataggtagactgcagaacagaatgtacctttgactgatttacggcttgaaaatcctacataaacaaygttgatatttccatttttaccaagtatcagcataagacatttcacaactgttgtttaagcaaaacacaactgttcatcgctataaaaaacagtagcaagtaacagaatgttagtttaaaaaaatactgcctatttactaaaaatgagtagttgttacagtagtatgttttaacctttaacttggtaagctttatgt

SEQ ID NO: 231550 - DNA, 512 bp, Homo sapiens
ctaggaagtgaatacactttgttttctgcaacacgtttctattcccgccactactccaccaagaacsttttttatacaagaatcatttttatacaaatctccatctcagtatttgcttctagggaactcgatctgagacaactccaggcttgtatcctttattattggtgtgtaaaaaagattattaggagataattggtgaagaccaatcctcttactgaactaagcaaaattattcagaaattgatcatttagctttgattctaccttccatgaatattgcacttttctctctaagatgtgacagttaccttgttaacatatattctttttctgttctaacaacagaatttagcatttttctcagtaacttatttctggatttaacttatttctattcttaaaatttcttggttttattttgcatttgtcttggttttgtgccctgcttttcatctttggaaagccgctttagattcaagcttattgtagattcccccaaactatcctat

SEQ ID NO: 231551 - DNA, 557 bp, Homo sapiens
tataagaaacactatgggttaaaaggttaaggtaaacattgctaatctgccttttttattcctttgagtgtacaagcagsgtggctgtggttaatgtacaaattgagtatgataaacataaaagtttttctgtatatctaactcaaagttatcaaacataaacaatagaaaaagtatgtactacaattttaaataatgcaccagatcacccacaaagatgaccactttttggttaatttacttctctaaaaattaagattatttttccccaccaaatataatttctctttattaaacccaatgcatttcatcttccccaaatttggaataaaccagaattgttaactttaattttacaacatccacccatgtattctagcacaccttatgtggagaaaaacattacttcatatgaagataaacactagaaaaatattattgttttgtgtaaaaattaatatgttaattgttcactttcctgaatttttctaagttggtgctagcaggaagatatttgaaaatgtttagtacatgtaatcacagtgaagagttgatac

SEQ ID NO: 231552 - DNA, 609 bp, Homo sapiens
catatatgaacaaatatgtataaaaatatttttgctttttttgctcagtagtaaagtgcttcaaacatttttctactatctttttttttcctttctttgttcactgagttatmtaccttgaacatttttcctcacataaaaatatttcctaatttttatggctgtataatattctgctctattgataggtagaatatatgtatataatatatcttatatatgtgtgtgcatatctgtaattagtgttttgttttttgatttctagattgttttaattcaataacaaacattgctacccagagtaaagctgcacacttgtgatttcacttgtatgtatgcagatctgtagtagaaatacctagaaataaaattgctagttcaaagtgtacagtacttgaaatatttgtaggtactggtaacattgcattagagttagttctgatacacactcccactaaaagtgtatgagacatcttgctatataggtatataagtcatgttatctgagcttcttgattaaacattattaggaatcttattctcaaaacttagtttgttttgctgcaaatgtgtttagcagtgctctaacttttctctcttctaatgtgt

SEQ ID NO: 231553 - DNA, 591 bp, Homo sapiens
tattgataggtagaatatatgtatataatatatcttatatatgtgtgtgcatatctgtaattagtgttttgttttttgatttctagattgttttaattcaataacaaacattgctacccagagtaaarctgcacacttgtgatttcacttgtatgtatgcagatctgtagtagaaatacctagaaataaaattgctagttcaaagtgtacagtacttgaaatatttgtaggtactggtaacattgcattagagttagttctgatacacactcccactaaaagtgtatgagacatcttgctatataggtatataagtcatgttatctgagcttcttgattaaacattattaggaatcttattctcaaaacttagtttgttttgctgcaaatgtgtttagcagtgctctaacttttctctcttctaatgtgtcaagggatatggcaatctcctatcagtaacagtggtctattaatgaaattcttctcaagtagaaagacaaaatatactccaccataagttgcatcgaaaccttgatgaaaggagatgatcaagcatgggattagtattctctccaccaagaatttacaaac

SEQ ID NO: 231554 - DNA, 536 bp, Homo sapiens
aggagggtaacttcaaaaatattagtactaatgtcagtattgaggaaattactgyaaccatatagaactttcacttattttgagcagctctgtcatcatgctgaccatgggatccaatgtatgtgctgttaataattgcatgcttagcaggaggcaacaattgctataattaaaaattagtttctatgttaaaaaacactcaatactagtaatgatggacttttaagccataacagtaaaaattaatgggatagatcatagatgtggaatattgcaaaatgtatgagatgagatactagctaataatttaggcttttaattgcaatcttattatcaacattttccaaacatgtactgagcatctagtgacatatgattcaaaacatactgtattagtccgttttcatgctgctgataaagacatatgagagactgggaagaaaaagaggtttaattggacttagagttctacatggctggggaggcctcagattcatggcaggaggggaaaggcacttcttacatggcagcagcaa

SEQ ID NO: 231555 - DNA, 432 bp, Homo sapiens
ttttagaaacggaaatagctatctgtttgaaattatttaggttcattcttactggagtcagggggttggaaaaccttgcctccagtgggctcttctggcactgtcattaggaaaaaaattactaaagtgttactcaastttttctcaaccttacttcagagatgcaaagcttaatttagaatacacacgtgtcacatttgtctcaattcaactccaatcctgaaatatgaaaaatctatgcatagatctcctcaacttactatggccatctcctatttacaagcccatcgtttctaacagaaaaaaaaattaaaaaataaagattaaacgtctcctgcttagcatctgcaatccattcctgatcccatcctgaaaaaccaaacaatctgccttaaaatgctaacctgatgcctatttcccagctttttttaa

SEQ ID NO: 231556 - DNA, 536 bp, Homo sapiens
aggagggtaacttcaaaaatattagtactaatgtcagtattgaggaaattactgcaaccatatagaactttcacttattttgagcagctctgtcatcatgctgaccatgggatccaatgtatgtgctgttaataattgcatgcttagcaggaggcaacaattgctataattaaaaattagtttctatgttaaaaaacactcaatactagtaatgatggwcttttaagccataacagtaaaaattaatgggatagatcatagatgtggaatattgcaaaatgtatgagatgagatactagctaataatttaggcttttaattgcaatcttattatcaacattttccaaacatgtactgagcatctagtgacatatgattcaaaacatactgtattagtccgttttcatgctgctgataaagacatatgagagactgggaagaaaaagaggtttaattggacttagagttctacatggctggggaggcctcagattcatggcaggaggggaaaggcacttcttacatggcagcagcaa

SEQ ID NO: 231557 - DNA, 536 bp, Homo sapiens
aggagggtaacttcaaaaatattagtactaatgtcagtattgaggaaattactgcaaccatatagaactttcacttattttgagcagctctgtcatcatgctgaccatgggatccaatgtatgtgctgttaataattgcatgcttagcaggaggcaacaattgctataattaaaaattagtttctatgttaaaaaacactcaatactagtaatgatggacttttaagccataacagtaaaaattaatgggatagatcatagatgtggaatattgcaaaatgtatgagatgagatactagctaataatttaggcttttaattgcaatcttattatcaacattttccaaacatgtactgagcatctagtgacatatgattcaaaacatactgtattagtccgttttcatgctgctgataaagacatatsagagactgggaagaaaaagaggtttaattggacttagagttctacatggctggggaggcctcagattcatggcaggaggggaaaggcacttcttacatggcagcagcaa

SEQ ID NO: 231558 - DNA, 543 bp, Homo sapiens
ctgttcacaatataaacccattattgtagaggtaaaaatacaaggcacttatattttgtttcattagtagttgaccaatctatgtgttgaccaactgtgtaaaaatgttaagctaaggaggcaaaattattgaatatagtaaataaaaaatgcaatgtaagtcaggtgcatcgttggaaaatatttaaaatgaaatctgaaagagtacaaatttaagaataattgaacatgtttgtatatatggcaaactgagatttttaaaaactaaaattatttagcctatttcccttgttcrtaagggagggttctaaaagcaactagaatccaggggtcctaaaaactttattatatttcctattaatgcataccatcctaaagttggagttataaaaaataggaatacattttatttctttcaatatacttgagttgagatttttaagatgtgtttgtttatgtttgaaggtaagtgagcagaaaaactaggtgtttttgaaagagttttacaattattagtaatttagaaactattgatacctccaa

SEQ ID NO: 231559 - DNA, 543 bp, Homo sapiens
aatgtggctattatgtatattcctaatttaaaaagaaaaatataattcactttgcacatatatttcctttgttaaaataatcagaaaactttaaaaatattggttcagttagtatttataatgaataaatgtgtgtatgaaattttcttattgatggaaaatattaattagctagttaagtttattggcttttgtttaatattcagctcaaggcacaatacaggtgaattgaatgtgtmatgttattggtcaattatgttatatttgaattattcataacccaagtactaatgccctcattctatagcacgtatccatgggggaacaaggttttcacatacatatttggtcagtttacattattagctgaatatcatgaattctgttataggtgccagaatagaaatcaccatggaaaatatgcttaatggttatcctgcagatgttgcattatgaaactatactcatgctattaatcttctgaagcctattaccattcctacagacaagaccatcaatacactaatgttgttaattgcctaa

SEQ ID NO: 231560 - DNA, 486 bp, Homo sapiens
atatcatgaattctgttataggtgccagaatagaaatcaccatggaaaatatgcttaatggttatyctgcagatgttgcattatgaaactatactcatgctattaatcttctgaagcctattaccattcctacagacaagaccatcaatacactaatgttgttaattgcctaatttcagtagtcttgaaaacagaggttagaagcagtcttgattaaaaacccccaacaacaacaacaacaacaacaacaacaaactgaaaataaccctgatgaatagttgtaaatcataaaacaaagaaactctaaaacctttataaagacagccttctgatagtatacactgaactatcattaattctgggtatatcattgtaaataaacttcagaaattgtacttagttcctaaatcaatgtgtttaaaattataatattttattcctcaaaacaatttaaatatctctgtaatattttgtttcttatcagtc

SEQ ID NO: 231561 - DNA, 255 bp, Homo sapiens
taggcaggctttcctttctccagttattgatagcacgtgcttgtaaaagtaaccaaaacaatagtaaaatatattaattcataaagataagtgtttttttccctgatttttctgattctgttgtatcatgtgtagactatatgaaactttaagatagtatttatttattgaygaggtgcaagttctatgcactaaatatgctgtgtgtcaatgagtcaacaagtgacttgagtctaagtttttggtctgcaattc

SEQ ID NO: 231562 - DNA, 570 bp, Homo sapiens
tgtggggttggagcttccacacagagtccccactagggcactgcctagtggagctgtgagaagagagccactgtcctccagaccccagaatggtagattcactgacagcttgcaccgtgtgcctggaaaagccacagacactcaatgccagccagtgaaatcagccaggaggggaactgtgccctgcaaagccacaggggcagagctgcccaaggccatggcagcccctctcttgcatcagtgtgccttggatgtgagacatagtgtaaaaggagatcattttagagatttaagatttgactgccccactggaattcagacttttatggggcctgtagccccttcgttttggccaatytatttcggtattgactcaatgccttacccccattgtatctaggaagtaactaacttgcttttcactttacaggcttataggcagaagggacttgcgctgtctcagaagagactttggactgtgaacttttgagttaatgatgaaatgggttatgactttggaggactggtggaaagacataattggttttgaaatgtaaggacatgatattt

SEQ ID NO: 231563 - DNA, 419 bp, Homo sapiens
gatctataaactacacatgccattcattctagtagaaatgaatcattactaaaacatttcaatggaatgtttgctgtagatcagatttcattaatttcaataagcaattattagctgttataaatagaaccatccaaatattgtatttaaatactattagtatcaattaaaaagtcaacagtgtatttcatatccaaaatcaaatttgtattgtcttttgctatgtgttgcttataagcaaataattattttcttaataaaaatgaaatagtaagggaaatattttgttaataaatgtataatttgcatatggacttgtgaaaacaaaatatkaaaagtagaactttgaaaaggaggtacataattgtcaaaaataataactcattctgaatgaatgtcttttggagcatttattacat

SEQ ID NO: 231564 - DNA, 579 bp, Homo sapiens
ggaagaacaaactatcaactaaggaatattcttaaccagagtttaatatgcacagagagtaaggccagaggtagtttatatttctctgaagctatgggaaatacatttttaaaactcagaataatttgctatttaaaacatgattcccctgaattttataaatggtttaacagctcacaaaagatattgacaactgttctaacaggcgtatttgtattaaatatttcctaaatttttatttataatttgtaaaccatgagttaagtagatttttaaaatagtaattggaaatattatgtcctccacttcattttttgttttggttttgcttttgattctttcagcagtatattgtaattgctttccattgtacaatatgtttatgacccattcctccactcttttcccacccttattgcccacagagttgtgtttgttatggatctagttgtgagacagcgttttctcaggatgtctttgcattttttaggatcrgttgtccttgtgcctggaacattttaatgagaacactatggtatgagctgtagtcagctatcacacacacacacaagtatgtta

SEQ ID NO: 231565 - DNA, 618 bp, Homo sapiens
cataattgttctttatctatttgaggtrcagtataagatgaaaagtgaagtaccatatcaggataaattttactctaagtgactcttataactgtctaataggatttcaaaaattcttctacatagtctcattaacaaagacgtagtctaaaaatcatatcatctgactacaatatttttaagtaactgaataaatatgcaacattttttaatatgaaatatttttctttgtacaaaattaggttgaaaacaaaattatttttcaagttattaggctaaattaccttctgaaatctatgatattgaagtagaaggtgattttccttcaactcccattggcaaattttactttttaatatgtctggcattatattattttacatcacagataaactgaacgttgaacttttggaaaaaaatgttgaggaaataagagtaataactctgctattatacacggcatcctttcctctgcctcacatgattagaaaaacattagtatttcaatccgtgtccattgttgtagtcatgctagaaattaagatagaagtaaaggatgagtatataaatataaatacaattaactgaagttttagacagaaatcaaagccttcaaca

SEQ ID NO: 231566 - DNA, 618 bp, Homo sapiens
cataattgttctttatctatttgaggtacagtataagatgaaaagtgaagtaccatatcaggataaattttactctaagtgactcttataactgtctaataggatttcaaaaattcttctacatagtctcattaacaaagacgtagtcyaaaaatcatatcatctgactacaatatttttaagtaactgaataaatatgcaacattttttaatatgaaatatttttctttgtacaaaattaggttgaaaacaaaattatttttcaagttattaggctaaattaccttctgaaatctatgatattgaagtagaaggtgattttccttcaactcccattggcaaattttactttttaatatgtctggcattatattattttacatcacagataaactgaacgttgaacttttggaaaaaaatgttgaggaaataagagtaataactctgctattatacacggcatcctttcctctgcctcacatgattagaaaaacattagtatttcaatccgtgtccattgttgtagtcatgctagaaattaagatagaagtaaaggatgagtatataaatataaatacaattaactgaagttttagacagaaatcaaagccttcaaca

SEQ ID NO: 231567 - DNA, 505 bp, Homo sapiens
ttggggccattatttctttaaataaactttctactcacttcttttctcttcttctaaaattyctataatgagatatttgtttgcttaatgatgcttaataagtaccttagattatcttcacttgtttatcattcttgttttctttctactcctctgatgggataatttcaaatgaactgttttcaagttttctggttctttcttgtgcttgatcaagtctactgttgaacgtctctaatgaatttttttatttcagttattatattcttctgctccagaatctctagggtttatttaatgtataattctctttgtagaagttctcattttgattatgtattatagtccagatttttgtttaattatctatctgtgttctcttataactcattgagcttctttaagataaatattttgaattctttgtcgtgtaaataatagatctctatgtctttagaatctcaatttcttctgaatcagtttattttgattcttttcatacagg

SEQ ID NO: 231568 - DNA, 505 bp, Homo sapiens
ttggggccattatttctttaaataaactttctactcacttcttttctcttcttctaaaattcctataatgagatatttgtttgcttaatgatgcttaataagtaccttagattatcttcacttgtttatcattcttgttttctttctactcctctgatgggataatttcaaatgaactgttttcaagttttctggttctttcttgtgcttgatcaagtctactgttgaaygtctctaatgaatttttttatttcagttattatattcttctgctccagaatctctagggtttatttaatgtataattctctttgtagaagttctcattttgattatgtattatagtccagatttttgtttaattatctatctgtgttctcttataactcattgagcttctttaagataaatattttgaattctttgtcgtgtaaataatagatctctatgtctttagaatctcaatttcttctgaatcagtttattttgattcttttcatacagg

SEQ ID NO: 231569 - DNA, 525 bp, Homo sapiens
ctagggtttatttaatgtataattctctttgtagaagttctcattttgattatgtattatagtccagatttttgtttaattatctatctgtgttctcttataactcattgagcttctttaagataaatattttgaattctttgtcgtgtaaataatagatctctatgtctttagaatctcaatttcttctgaatcagtttwttttgattcttttcatacaggattttggtcaatatatcatttttaaatagatgttcctataggggtagaagatctgagacttcttattttgccatcttgttgatgtttctctgtgtttttgatttgtgaaatggataatttttaccaaaactgtgatgccagggtatcattattaaaaatagttgtggcaaaaaagtgatgatgttattttttattgctttcacaaatttacagtaacatggcaaacaaatgagtttgactattatttgtgtaatttcaccagtaagtgttaattttgatcacaatagacattgttaagcatta

SEQ ID NO: 231570 - DNA, 534 bp, Homo sapiens
agtgttgatatgatttagatctgtgcacccacccaaatctcatgttgaattgtaatccacaatgttggaagtggggcctgggaggaatgtgattggatcatgggggtggattttcctcttggtactgtgtcacaatattgagtgaactcttaagggatctggttgtttaaaagtgtgtgacagctcccctttcctctcttgctcctcctgccatgtaagatgttcctgcttctcttttgccttctgccatgattgtaagctttctgaggcctccccagaagccaaagcctttaggcttcttgtactgcagaacctgtagaactgtcagccaattaaacgttttttctttataaattacccagtcttaggtatttcttcatagcagtgtaagaatgaagtaaaacagaaaattggtactgaggagtggggctttgctacagataccagaaaatgtggaagcacytttggacccgggtaatgggcaaagtttggaaaagtgtggaaagctcagaagaagacagaaagacgagggaa

SEQ ID NO: 231571 - DNA, 482 bp, Homo sapiens
atttagactttgggggaatgttgggatrgaatgatcatattttgcaatgtgaaaaaaacataagatttggaagggtcaggagtagaatgatatggtttgtatctctgtccctgcccatgttgaattgtaatctccaatgttggaggtgggagatgattggatcttgggggtggattttccccttggtactctgacaatggtgagtgagttatcatgacatctcattgtttaaacctgtgtggcacctcccctggctcccttgcttcttttcctgccatgtaagacctgcctgcttcccctttgccctccaccatgactataagtttcctgaggcctccccagaagcataaggtgctatgctttctgtacaacctgcaaaactgtgatccaattaaacctcttttctttataaatgttccagtctcaggtatttgttttatggcagtgcagaaatggactaataccttatattaggtacagca

SEQ ID NO: 231572 - DNA, 482 bp, Homo sapiens
atttagactttgggggaatgttgggatagaatgatcatattttgcaatgtgaaaaaaacataagatttggaagggtcaggagtagaatgatatggtttgtatctctgtccctgcccatgttgaattgtaatctccaatgttggaggtgggagatgattggatcttgggggtggattttccccttggtactctgacaatggtgagtgagttatcatgacatctcattgtttaaacctgtgtggcacctcccctggcycccttgcttcttttcctgccatgtaagacctgcctgcttcccctttgccctccaccatgactataagtttcctgaggcctccccagaagcataaggtgctatgctttctgtacaacctgcaaaactgtgatccaattaaacctcttttctttataaatgttccagtctcaggtatttgttttatggcagtgcagaaatggactaataccttatattaggtacagca

SEQ ID NO: 231573 - DNA, 566 bp, Homo sapiens
accaaaatgaagcatgtctttgcttctgctatgtatacttgcagtgacaagtaacttgcaatgttattcactrttagctactacagtagttatttatttatttatttatttatttatttatttatttattcttatttttgacaggaatatgtgtgccccaaacctcagcattacacaatatactcgtctaacaaatctgcacatatccctctgaatctaaaataaaagttgaaattattttaaagagacaataatatttaggtatatcctcattcaaacatatttttcaatgtggaaatcacgtgatgaaataagtccctcaatttaaaatgtgtaatagtttgcctaactggggaagcctttttgccgtacttattcctgagcatgtgtgggagctgcgatgtaaggtacagccccatctctgccctagtttgtaatgtcgtcatctttcccctgagttgtttagcagaagatttttatctttttctcctgcgtatggtcaacatctttatgctcaacgttgcctgcaactagcaaactattagaaagcaagtcaagcactaaaa

SEQ ID NO: 231574 - DNA, 566 bp, Homo sapiens
accaaaatgaagcatgtctttgcttctgctatgtatacttgcagtgacaagtaacttgcaatgttattcactgttagctactacagtagttatttatttatttatttatttatttatttatttatttattcttatttttgacaggaatatgtgtgccccaaacctcagcattacacaatatactcgtctaacaaatctgcacatatccctctgaatctaaaataaaagttgaaattattttaaagagacaataatatttaggtatatcctcattcaaacatatttttyaatgtggaaatcacgtgatgaaataagtccctcaatttaaaatgtgtaatagtttgcctaactggggaagcctttttgccgtacttattcctgagcatgtgtgggagctgcgatgtaaggtacagccccatctctgccctagtttgtaatgtcgtcatctttcccctgagttgtttagcagaagatttttatctttttctcctgcgtatggtcaacatctttatgctcaacgttgcctgcaactagcaaactattagaaagcaagtcaagcactaaaa

SEQ ID NO: 231575 - DNA, 524 bp, Homo sapiens
atgctctgaaagtgtggattcctctcccccttgagtgctggctgtagattgcggcttggcactcctgggctgcccagtgcagctctgagcgatctcagtgcttatgtttcttccccagattggaagaagcagatgaagggatcttaatagtgttgtgtccaaaggtcctttgtttgtcccctaggggttccaccccagggagatgcaggtcagcaatckctcagtgcaatcagcccaggatggagggtctgctgtgggcccaagccaggagttccctgtctggttactagtggttgatttgggtggaactggcctcctctcctagggtcgaccgcagcttgttagaggtatgaataaggcctttggggtctttgctcctttgttagtctgaggatggcaagggcagttccactgcagaggcagtggcaaagaggctttcagttgaccctggaggttttgtccagggagttgccaagttgctactggcttggtagccctggaggcgggtagctgggccccaggcc

SEQ ID NO: 231576 - DNA, 614 bp, Homo sapiens
gggtctttgctcctttgttagtctgaggatggcaagggcagttccactgcagaggcagtggcaaagaggctttcagttgaccctggaggttttgtccagggagttgccaagttgctactggcttggtagccctggaggcgggtagctgggccccaggccctcaaggacctgacctgggagaagatatgggaacggcttctcycatgtaagagtctgaccacttttctgtagatctgctgtggtaaacttgtagcctactccagtccctagtcaccttggattttccagaacctggaggtgtcaccagtggaggctgtgaaacaaacaaacaaacaaacaaatgtcagcctctccctccctctgggagctttgttccagggaggtatggtcctgttgctagcccaaaggcacctgtaggaagtggctggagacctcagttgagaggacctgcccagtgaggaggagcgggataaaggtcccacttaggaaagtagtgtggccaggttttggtacagcagctgttctgtgcagggagtccgcttcagcccctggtcacctcagacactccaaggcccaaaggctagaatgcctaagttgctcaaacagcaaagatg

SEQ ID NO: 231577 - DNA, 614 bp, Homo sapiens
gggtctttgctcctttgttagtctgaggatggcaagggcagttccactgcagaggcagtggcaaagaggctttcagttgaccctggaggttttgtccagggagttgccaagttgctactggcttggtagccctggaggcgggtagctgggccccaggccctcaaggacctgacctgggagaagatatgggaacggcttctctcatgtaagagtctgamcacttttctgtagatctgctgtggtaaacttgtagcctactccagtccctagtcaccttggattttccagaacctggaggtgtcaccagtggaggctgtgaaacaaacaaacaaacaaacaaatgtcagcctctccctccctctgggagctttgttccagggaggtatggtcctgttgctagcccaaaggcacctgtaggaagtggctggagacctcagttgagaggacctgcccagtgaggaggagcgggataaaggtcccacttaggaaagtagtgtggccaggttttggtacagcagctgttctgtgcagggagtccgcttcagcccctggtcacctcagacactccaaggcccaaaggctagaatgcctaagttgctcaaacagcaaagatg

SEQ ID NO: 231578 - DNA, 510 bp, Homo sapiens
taaggaaaacctagttaataaatagcagtcataggaccattactcacatttcccaattgtcagaattgagttttttccattattttcctcctttacttcctttgctgatgaattcacaaatatgcagtttttcatgaacaaccattcaatattatgtacctctgaggtcttttcatgggttatgaaaactcataacttacaacktataaaataaaatattcataaaatattaagactgcagactcaatgtttaaaaatatactatactctagagtcatataacacagtcctaatgattttgaactacactacacggtgaccactattagctccaatttataataaggatttgattcttcccaaggcaatgagagtaaatccccacacaatttctcactaactcattccaagcaattttcaggggtggattagtcaatgaaatgtggcattcttttgctgcattgtgtgatgtgacttgaaataaattgaaacaaatcggtttaatttgcc

SEQ ID NO: 231579 - DNA, 543 bp, Homo sapiens
agaagtttgacatagctatagagatatgtgagggcacttcattattttattcaagaaatcgaggtatcattttagtatgtgattcaatgtattcattggatttggttatttcaatttgtcattaaagtgtgatagcytaggaattggttgagcttttctgaaaaggtgacttaagatggaaaaataaatggctaaaaacaagagacaaaagcagataatccacacaggaacattttaaaatatattgtacaataaacactttcatcccttgtaatcaaagaatagagcttgatagtcagtctgccgatcaatacctaattcctcatgtttattacatggattactacataattgtaaaacccttcttcaaacacaaaaacataaatcatgttcctacatgtaacatgacatagaaaatgaagagtacttctttctaatttcatctgcatatttcaaataagagtactgtgaggctacagtatctagacatttgaaacaattctatgcaacaactggggaaattagcgtcttctatacaaagaa

SEQ ID NO: 231580 - DNA, 543 bp, Homo sapiens
agaagtttgacatagctatagagatatgtgagggcacttcattattttattcaagaaatcgaggtatcattttagtatgtgattcaatgtattcattggatttggttatttcaatttgtcattaaagtgtgatagcctaggaattggttgagcttttctgaaaaggtgacttaagatggaaaaataaatggctaaaaacaagagacaaaagcagataatccacacaggaacattttaaaatatattgtacaataaacactttcatcccttgtaatcaaagaatagagcttgatagtcagtctgccgatcaatacctaattcctcatgtttattacatggattactacataattgtaaaacccttcttcaaacacaaaaacataaatcatgttcctacatgtaacatgacatagaaaatgaagagtacttctttctaatttcatctgcatatttcaaataagagtactgtgargctacagtatctagacatttgaaacaattctatgcaacaactggggaaattagcgtcttctatacaaagaa

SEQ ID NO: 231581 - DNA, 561 bp, Homo sapiens
tgacttggggtaattcagggttcttattaaatttataattttttttaaacaaagattggaagcaaacaaaaaacttaagatttggcaatgctaggtatttaattttttctgaatatttttcttataaagaaaaatctggttatcactttggaggcaaggattttaaatgaccacacttgaaagcatagggcataaaactgattgaatcatttcagtgtggcaagatgtggtagacagagcagacgagacacgytctgcacatggagctgattccattcctgtcttggaaagttaaaattgcttggttcttgttgcaatagacttggtatgcagagccacccgaggacaagatcctgacctaatggctaccatctaaaaattgcagtgctaacccagagtaaaggttctgagactactcacctagattttataacccagttttccttctcatagtgctctatttctaggcaagttacttagctcttttatgtcccagctcacttaattctaaaatggtcatagtgataaaagcatctttctttgttggacaacctcctggtc

SEQ ID NO: 231582 - DNA, 561 bp, Homo sapiens
tgacttggggtaattcagggttcttattaaatttataattttttttaaacaaagattggaagcaaacaaaaaacttaagatttggcaatgctaggtatttaattttttctgaatatttttcttataaagaaaaatctggttatcactttggaggcaaggattttaaatgaccacacttgaaagcatagggcataaaactgattgaatcatttcagtgtggcaagatgtggtagacagagcagacgagacacgttctgcacatggagctgattccattcctgtcttggaaagttaaaattgcttggttcttgttgcaatagacttggtatgcagagccacccgaggacaagatcctgacctaatggctaccatctaaaaattgcagtgctaayccagagtaaaggttctgagactactcacctagattttataacccagttttccttctcatagtgctctatttctaggcaagttacttagctcttttatgtcccagctcacttaattctaaaatggtcatagtgataaaagcatctttctttgttggacaacctcctggtc

SEQ ID NO: 231583 - DNA, 605 bp, Homo sapiens
ttatgatctgtttatttctatggtataaattgtcaggtcttctctttcatttctgattttatttgtgtcttttttcttcttttttagtaggtctagctaaaggtttgtcaattttgtttatcattaaaaaaaagtctagttttggccaggtgtggtggcccaagcctgtaatcccagcactttaggaagcggaggttggtgggtcacgagatcaggagatcgagaccattctggctgacacggtgaaaccccgtctctactaaaaaaatacaaaaaaattagccgggcgtggtggcgggcgcctgtagtcccagctactcaggaggctgaggtgggagaatggcgtgaacccaggaggcggagcttgmagtgagccgagatcgcgccactgcacttcagcctgggtgacaaagcaagactccatctcaaaaaaaaaaaaaaaaaaaaaaaaaaaaaagtctagttttgttgattttttttactattgtttttctgtagtctatttgttctgttctaaactttatttcctttttttttctgctaacttggggcttaatttgttctttatttctactttcttgagatttaatattcggttgtctatt

SEQ ID NO: 231584 - DNA, 498 bp, Homo sapiens
cactacggtgagaggcagttatagtaaaatcgttttgcagaaactgacgtgtcagccctctcttttatgaaaaaaaaaaatctgaaattttgaccaaaacacgtcctatgttcatctgggatgaaaagctgtaamgactgagtttgagtttgagtttgaaattataaaataatccaaaggaaatatgcttaagtcacaagagaaatatttctagtgacaaaatgtacccaaacacagatcgcaaatcagaaatcagagagatatctttatactgaagttagggagaagcaaagtaggaggaagtgagacattttcttttcccattctgtgctaccatttttgaaaactccaagtttcatcagttagcctacatctgatgaagattggtaaattcatgcaagaaggaatgttccttggactaccataagcttttcttacccattttactttgattgggtaacagctgacagtttataatagaataacaggctatggtaa

SEQ ID NO: 231585 - DNA, 549 bp, Homo sapiens
gcagtacaatgcacactattatatttcagcatgggcaagcaatcagtgaaccaggtccaagcatttagggaaacctctgtgagtggaaaacctcattaagccagcagttttacttaaggcagtgaagtgagagacaaatttcccyccaaaggggtagcttttactttttagtataaatctgagatgctgctaaggccgtgtcagctgaactcctaaaaataccatttttgtttctcttgataagcaaggctggtgggcccatctcaccttgtttttcattaagtctaaggtgatccatcacaagatatgaacattaagctggagactcacaggcctgcatgtgacatgaattcagctttttcaaaagaagtatacttggtatttagctcagacaggtgaaaccattgctctgggaaatagcttatccagtaccatgactgcagccaattttcaagctaaaatattgtctttgtcctcctgtgatcatatatcatttctcctaggctacctgggagaggataggagggcaggttgtagagtgaattacat

SEQ ID NO: 231586 - DNA, 536 bp, Homo sapiens
gttgtggggttcggggatgggggatggatagcattaggatatataccttatgtaaatgacgagttaatgggtgcagcacaccagcatggaacatgtatacatatgtaacaaacctgcatsttgttcacatgtaccctagaacttaaagtatacaaaaaaaaatctttctgttctggacattctaatgcatttgatagaaccctcaaacaggatgccctttttataaatatttatctattcaaaaggtacgtaatttcttttacatctttggtaactttagggattaaacagattagaaaattttttcaatatatactgcaaaatcaaattgggtctttattttactagctccgtggccttatgtaataaaataacaacaaaatcaatcaaacaaacaacaaaacaaaacacaaatgtgtatatttgaaaggtatgtgtgagaaatttctcttctaaactctattttttcttatctaaagacaacagatttgttaataatttctgcttcttcatcgaactacctgtatatttgtgtg

SEQ ID NO: 231587 - DNA, 536 bp, Homo sapiens
gttgtggggttcggggatgggggatggatagcattaggatatataccttatgtaaatgacgagttaatgggtgcagcacaccagcatggaacatgtatacatatgtaacaaacctgcatcttgttcacatgtaccctagaacttaaagtatacaaaaaaaaatctttctgttctggacattctaatgcatttgatagaaccctcaaacaggatgccctttttataaatatttatctwttcaaaaggtacgtaatttcttttacatctttggtaactttagggattaaacagattagaaaattttttcaatatatactgcaaaatcaaattgggtctttattttactagctccgtggccttatgtaataaaataacaacaaaatcaatcaaacaaacaacaaaacaaaacacaaatgtgtatatttgaaaggtatgtgtgagaaatttctcttctaaactctattttttcttatctaaagacaacagatttgttaataatttctgcttcttcatcgaactacctgtatatttgtgtg

SEQ ID NO: 231588 - DNA, 536 bp, Homo sapiens
gttgtggggttcggggatgggggatggatagcattaggatatataccttatgtaaatgacgagttaatgggtgcagcacaccagcatggaacatgtatacatatgtaacaaacctgcatcttgttcacatgtaccctagaacttaaagtatacaaaaaaaaatctttctgttctggacattctaatgcatttgatagaaccctcaaacaggatgccctttttataaatatttatctattcaaaaggtaygtaatttcttttacatctttggtaactttagggattaaacagattagaaaattttttcaatatatactgcaaaatcaaattgggtctttattttactagctccgtggccttatgtaataaaataacaacaaaatcaatcaaacaaacaacaaaacaaaacacaaatgtgtatatttgaaaggtatgtgtgagaaatttctcttctaaactctattttttcttatctaaagacaacagatttgttaataatttctgcttcttcatcgaactacctgtatatttgtgtg

SEQ ID NO: 231589 - DNA, 583 bp, Homo sapiens
aacaattctgtctctctccactccccagcttgcatgctgtttcatccttgtgaaggcagtatggcttaatggtcaagactgcacaatctgaaactaaactgctcggctcacctcaggtatttagtagcccagtgaccttgggcaagttaccttccttttatttctcatgttcctcacctgtaaaatagatgtaattatggtagcctttatgatagggtggttgtgtytgtatggttcctgtaatccttttctcagtctctaattattctcctataccctcccactattctataacgttatgaattttagaggttatgtatggggaatccttgataccctaaattctgaaaaagctttaggcacatgaatgttctcaataaatatttcgtgtttaaatgactctgaaagggagactcatactctgatagtaatatctgatactgatgtctaatactatattttataaatgtatatttcctcttatattctgaactgtttcttcctcatagtgttgcccagcatagagtttgtattcacctagcatcaataagtaatttttggagtgatcacagaataattataa

SEQ ID NO: 231590 - DNA, 586 bp, Homo sapiens
ttcaagatcttttatcaacaattctgtctctctccactccccagcttgcatgctgtttcatccttgtgaaggcagtatggcttaatggtcaagactgcacaatctgaaactaaactgctcggctcacctcaggtatttagtagcccagtgaccttgggcaagttaccttccttttatttctcatgttcctcacctgtaaaatagatgtaattatggtagcctttatgatagggtggttgtgtttgtatkgttcctgtaatccttttctcagtctctaattattctcctataccctcccactattctataacgttatgaattttagaggttatgtatggggaatccttgataccctaaattctgaaaaagctttaggcacatgaatgttctcaataaatatttcgtgtttaaatgactctgaaagggagactcatactctgatagtaatatctgatactgatgtctaatactatattttataaatgtatatttcctcttatattctgaactgtttcttcctcatagtgttgcccagcatagagtttgtattcacctagcatcaataagtaatttttggagtgatcac

SEQ ID NO: 231591 - DNA, 496 bp, Homo sapiens
gagtttgagcaagacctgccaccatggtcaaaagtgcactgggacctaaataaacttcaaatgcagtctaggccacaaggactacaagtcctagatgagtcctactgctgaattgggctcagagccagaggatgtgggtggtatgtgactaytgaggcatcaaacagggtggatgaaggagtgctatgtcaccccttttccaaacccaggcttcagagctcatgcctccaaaggagatgcctacctttcaactgaggagatgagaaggaagaataaagagaactttgtcttgcatcttggatacaagctcagccacattaggatagagcactaggcagagtcataaggccccttttccaggccctagctcccagatgacatttctagatacactttggccagaagggagcccactgcctttaggaaaaggactttgtcctagcagaattctttgcctgcaggctaaagtgcccttggcccctaaatagtacgccat

SEQ ID NO: 231592 - DNA, 496 bp, Homo sapiens
gagtttgagcaagacctgccaccatggtcaaaagtgcactgggacctaaataaacttcaaatgcagtctaggccacaaggactacaagtcctagatgagtcctactgctgaattgggctcagagccagaggatgtgggtggtatgtgactattgaggcatcaaacagggtggatgarggagtgctatgtcaccccttttccaaacccaggcttcagagctcatgcctccaaaggagatgcctacctttcaactgaggagatgagaaggaagaataaagagaactttgtcttgcatcttggatacaagctcagccacattaggatagagcactaggcagagtcataaggccccttttccaggccctagctcccagatgacatttctagatacactttggccagaagggagcccactgcctttaggaaaaggactttgtcctagcagaattctttgcctgcaggctaaagtgcccttggcccctaaatagtacgccat

SEQ ID NO: 231593 - DNA, 496 bp, Homo sapiens
gagtttgagcaagacctgccaccatggtcaaaagtgcactgggacctaaataaacttcaaatgcagtctaggccacaaggactacaagtcctagatgagtcctactgctgaattgggctcagagccagaggatgtgggtggtatgtgactattgaggcatcaaacagggtggatgaaggagtgctatgtcaccccttttccaaacccaggcttcagagctcatgcctccaaaggagatgcctacctttcaactgaggagatgagaaggaagaataaagagaactttgycttgcatcttggatacaagctcagccacattaggatagagcactaggcagagtcataaggccccttttccaggccctagctcccagatgacatttctagatacactttggccagaagggagcccactgcctttaggaaaaggactttgtcctagcagaattctttgcctgcaggctaaagtgcccttggcccctaaatagtacgccat

SEQ ID NO: 231594 - DNA, 496 bp, Homo sapiens
gagtttgagcaagacctgccaccatggtcaaaagtgcactgggacctaaataaacttcaaatgcagtctaggccacaaggactacaagtcctagatgagtcctactgctgaattgggctcagagccagaggatgtgggtggtatgtgactattgaggcatcaaacagggtggatgaaggagtgctatgtcaccccttttccaaacccaggcttcagagctcatgcctccaaaggagatgcctacctttcaactgaggagatgagaaggaagaataaagagaactttgtcttgcatcttggatacaagctcagccacattaggatagagcactaggcagagtcataaggccccttttccaggccctagctcccagatgacatttctagatacacyttggccagaagggagcccactgcctttaggaaaaggactttgtcctagcagaattctttgcctgcaggctaaagtgcccttggcccctaaatagtacgccat

SEQ ID NO: 231595 - DNA, 286 bp, Homo sapiens
tcctagctgtggtggctatgagcaaaaaccgttgcctgagacaatagatagaaaaggaagggaactttgtcttgcgccttaggtaccagattgtccacagtgggatgaagcaccaaggaggctcttgggatttccaaagccaggayttggattttggaagacatttctggaccttctctgggtcagagaggagacctcagcctgaaggatgaatcccaggccaggcagcattcaccacaagctgactgaggaacccttggaccctaagggaacattggcggtaggc

SEQ ID NO: 231596 - DNA, 286 bp, Homo sapiens
tcctagctgtggtggctatgagcaaaaaccgttgcctgagacaatagatagaaaaggaagggaactttgtcttgcgccttaggtaccagattgtccacagtgggatgaagcaccaaggaggctcttgggatttccaaagccaggatttggattttggaagacatttctggaccttctctgggtcagagaggagacctcagcctgaaggatgaatcccaggccaggcagcattcaccacaagctgactgaggarcccttggaccctaagggaacattggcggtaggc

SEQ ID NO: 231597 - DNA, 586 bp, Homo sapiens
acaaaaattagctgggtgtggtgtcactggcctgtaatttcagctactagggaggctgagggacaagaatcacttgaacacagcaggtagaggttgcagtgagctgagatcacgctgctgtactccagcctgggtggcacagcattactctgtctccatcaatcaatcaatcaatcaatcaatcaagtatgctatgctaggccatgacgttcagcagattagatgtattaaatgyatttttgacttaggatgttttcaatttatgattggtttaagaataatttaataattattatatgtgatatatgatatataattatatatttataattatatacattcattttacattcttcttacattgttgtacctgatttagaatacgcatgttgatcaagctagtagtcatgtatatcattcaaaaataaatattttccagcgtgtatgctgaagtcatcttttatcatctaacttgatggttaaacaaccagttttggtgaccatgtggctgaataactgaggcaactccatactggtgaatccgcctctctcctcttggttctgtcattcacacagcagtggagag

SEQ ID NO: 231598 - DNA, 586 bp, Homo sapiens
acaaaaattagctgggtgtggtgtcactggcctgtaatttcagctactagggaggctgagggacaagaatcacttgaacacagcaggtagaggttgcagtgagctgagatcacgctgctgtactccagcctgggtggcacagcattactctgtctccatcaatcaatcaatcaatcaatcaatcaagtatgctatgctaggccatgacgttcagcagattagatgtattaaatgtatttttgacttaggatgttttcaatttatgattggtttaagaataatttaataattattatatgtgatatatgatatataattatatatttataattatatacattcattttacattcttcttacattgttgtacctgatttagaatacgcatgttgatcaagmtagtagtcatgtatatcattcaaaaataaatattttccagcgtgtatgctgaagtcatcttttatcatctaacttgatggttaaacaaccagttttggtgaccatgtggctgaataactgaggcaactccatactggtgaatccgcctctctcctcttggttctgtcattcacacagcagtggagag

SEQ ID NO: 231599 - DNA, 586 bp, Homo sapiens
acaaaaattagctgggtgtggtgtcactggcctgtaatttcagctactagggaggctgagggacaagaatcacttgaacacagcaggtagaggttgcagtgagctgagatcacgctgctgtactccagcctgggtggcacagcattactctgtctccatcaatcaatcaatcaatcaatcaatcaagtatgctatgctaggccatgacgttcagcagattagatgtattaaatgtatttttgacttaggatgttttcaatttatgattggtttaagaataatttaataattattatatgtgatatatgatatataattatatatttataattatatacattcattttacattcttcttacattgttgtacctgatttagaatacgcatgttgatcaagctagtagtcatgtatatcattcaaaaataaatattttccagcgtgtatgctgaagtcatcttttatcatctaactkgatggttaaacaaccagttttggtgaccatgtggctgaataactgaggcaactccatactggtgaatccgcctctctcctcttggttctgtcattcacacagcagtggagag

SEQ ID NO: 231600 - DNA, 361 bp, Homo sapiens
catattttattctgtgatgtaatagtaatggaaaacagaaaagtgtggaggctaagatccttttatattcatataaaattttgcatatatttgcatttaaatatgcaaaaaatttacttccctacattctattatatagaagtagtccttatggttttgtaaacaaaaactggtctrtaattattttttctttgttgttttagcaccaatattgcaagagttgtttggaagttaaaaagggagatgcattatttgtacttcttaatgtataatgtgaagttgaagtggaattatcattgagtttattactcttgtttcaataatgttaaaacaagttatctgtgaatttgcattacaggat

SEQ ID NO: 231601 - DNA, 576 bp, Homo sapiens
ttaccttcacccagcagttgccccacccagaggcctatgacttagaaagaatttccttgaataggattttctttaccattggagtagcgcatttaaaaaaaaactaaagaaatggggaaaaataatgaaaattaaataataagaaagtctcctctatgcttatgtctaccttgcagtctttgtaaaaggacggtaaaaaaaatcttggcaacaaaacaggatttagaaatttgtgatccaatgtctgcagttgttctatctctatccttcacaaatatgaaaaacagaaggtaaatggcatttattctagagaaaaggagtggcaacttagagatgaaactcttcctttatttaggtaataaatgatcagaatgattcaaacaagtttggattttatgtacctatctgttttcttcataaggtactacctcttaaaaatactatcttaagctatttatgtgttgcaaacattttgaacatatcatatttttcatccacagattatttaaaacacaaactcacaaaaacactratgcatataatgagatttaaaagttaaggcattttaatacctga

SEQ ID NO: 231602 - DNA, 570 bp, Homo sapiens
tgtgttgtctctttatgacatgtaagagttcttaaatattcttgctatgagtctcatcagatttatgatttgcaaatattttcttctatcttgtgggttttcttttcagtttcttaagattgtcccttcaggcacagaagttgtattttggattaagtccaacgtatgtattttttcatttattacttgtattttgatgtcatatctaagtaaccactgccagtttgrtggttagaaatatgtgtgccaatgttttcttattacaaatttgtaccttttcttcttacatttctatatctgatctattttgagttaatttttgtatgtgatatgaagtatgagtacaacttccttctgtgtgtgtgaatatccaatggactcagcaccattgattgaaaatactgttctttccctgttgaatgccttcgcactcttgtcaaaatcaattaaccatgtttgtttgttttctctggactctcaactctactctattgatttgcaagtctatcatatgctgctgccatactacctggcttactgttactttgttacaatttttgaaagcagaaa

SEQ ID NO: 231603 - DNA, 570 bp, Homo sapiens
tgtgttgtctctttatgacatgtaagagttcttaaatattcttgctatgagtctcatcagatttatgatttgcaaatattttcttctatcttgtgggttttcttttcagtttcttaagattgtcccttcaggcacagaagttgtattttggattaagtccaacgtatgtattttttcatttattacttgtattttgatgtcatatctaagtaaccactgccagtttgatggttagaaatatgtgtgccaatgttttcttattacaaatttgtaccttttcttcttayatttctatatctgatctattttgagttaatttttgtatgtgatatgaagtatgagtacaacttccttctgtgtgtgtgaatatccaatggactcagcaccattgattgaaaatactgttctttccctgttgaatgccttcgcactcttgtcaaaatcaattaaccatgtttgtttgttttctctggactctcaactctactctattgatttgcaagtctatcatatgctgctgccatactacctggcttactgttactttgttacaatttttgaaagcagaaa

SEQ ID NO: 231604 - DNA, 563 bp, Homo sapiens
tcgcatgtgaaaatgaagagaaaaaaagcagcaagcgtcatgaagatacagaaataaatatgaactcatctggttttgacattttacaaactaaatgtgtgaatccaaaagtatgatatcaagcagggagtggtggctcacacctgtaatcccagcactttgggaggccaaaacaggtggatcacttkaggccaggagttctatactaccttgggcaacatggcaaaactccatctctacttaaaatacaaaaattagccaggcatagtggcacaggcctgtaatcccagctactcaggaggctgaggtacgggaactgcttcagcctgggaggtggaggttgcagtgagccaagatcgtgccactgcactccagcctgggtgacagagcaagactgtctggggaaaaaaaaaaaaaaaaaaaaaaaagacatattacaacagtgccagaccagaaaaatgacgggtggttcacaacactgatcacagactgaggttcagcttgtttcaaagcaatgttctctgttgtcaacaatcagatttgggtcacccacatgctagcaa

SEQ ID NO: 231605 - DNA, 445 bp, Homo sapiens
tgacaggccatataattcacaccctcaaatacctgagcatctgccacttgctttgtactgtttcatgatcagtagaaaaaaaaaaaaagaacagacaaaactctcgattctcagagagctgacaaacagcggacagaggtaagcaaacagcctgatacttacttgggggaaaatgccacagggaacacrctgagtaggaggagggtaggatctagagctagcctgcctgggtttggatctcagctccgtcacttactagaggttgggcaagtgtctgaacctcttgtcttctcagtgacttcatctggaaagtgaggacacctacaagcacttgcctacagagtggatggtttaacatgcacggagactttcaacagatctgtatgcagcaagtgcccaataaatgctggcttgtgttctctgctaggtttgggccacccaggat

SEQ ID NO: 231606 - DNA, 391 bp, Homo sapiens
aagcttgctagttattacagtcatctcagttttgttttgttttttgagacagagttttgtgcttgttgcccagactggagtgcaatggtatgatcttggcttaccrcaacctctgtctcctgggttcatgtgattctcctgcctcagcctcctgagtagctgggattacaggcatgcaccaccacgcccagctaattttgtatttttagtagagatggggtttctccgtgttggtcaggctggtctcgaactcccaatctcaggtgatccacccacctcagcctcccaaagtgctgggattacaggtgtgagccatggcacccagccactatagggtaattttttttaatcagactaggctcttgaagttgtttgtgaacagaaatttaac

SEQ ID NO: 231607 - DNA, 497 bp, Homo sapiens
agatgaaccccacctggatgtctgaaagctcagtgggtggtgaacgtggatgtctgcagccggtcggggctggcaacctaagtttgggagttatcggcatattgatgttattttaagctgtgggactggacacaattatccagagagaatgtgttttgttttctagtgtggttttctccccccagcctccccctagtgcctgtcatgaatctatttgatgaatatttttagcatatcccacatgctcacctctctgacatttccaagaagttcctgaaggctcgggctgagcctccccttcttcatcgcctggtttctcagtgattaacagacagagctaaatattcattgctctgccacagatgcccttgggaaattgcttaaggtcatgtgggatctcgggccttgtaggcagcacgatgccttctgggtggaacagctgttggcatggccttcagagcttctcctccagcccagrccagggcttcttggaattc

SEQ ID NO: 231608 - DNA, 547 bp, Homo sapiens
ggcacagcaggaacaattaggggtactacttggttgagtttagagtattctgttgtcattcttcagaatatgtcagctttttttgtagtgttcaatctggcgaattaaatgggaatatgatggatacaacaacccctacatcatttargtgtctaaaggtgacactgatccctgccatttatccagagtattttaattcaccatttttctaggggttaaagggctgtttcagtaatgcaggttgtcttataagacaaaggcctttttgttgtctgcaagcaagggaggaggtacactagtttttcacagggaggagtgggccacttctacaagcctagagggtttagaggaattggagaatcgagatttttgagtgcatcaacccagatctaccagccgaagtctcagcatcctactccttcctaaccagggccctgaccttagcatacaagacttgctgtggttgaggattcaacgtcctctggagatctgctactctttcccccgccagctttactgtggaatgattgacaattaaaaatggaat

SEQ ID NO: 231609 - DNA, 552 bp, Homo sapiens
tatctggcacagcaggaacaattaggggtactacttggttgagtttagagtattctgttgtcattcttcagaatatgtcagctttttttgtagtgttcaatctggcgaattaaatgggaatatgatggatacaacaacccctacatcatttaggygtctaaaggtgacactgatccctgccatttatccagagtattttaattcaccatttttctaggggttaaagggctgtttcagtaatgcaggttgtcttataagacaaaggcctttttgttgtctgcaagcaagggaggaggtacactagtttttcacagggaggagtgggccacttctacaagcctagagggtttagaggaattggagaatcgagatttttgagtgcatcaacccagatctaccagccgaagtctcagcatcctactccttcctaaccagggccctgaccttagcatacaagacttgctgtggttgaggattcaacgtcctctggagatctgctactctttcccccgccagctttactgtggaatgattgacaattaaaaatggaat

SEQ ID NO: 231610 - DNA, 547 bp, Homo sapiens
ggcacagcaggaacaattaggggtactacttggttgagtttagagtattctgttgtcattcttcagaatatgtcagctttttttgtagtgttcaatctggcgaattaaatgggaatatgatggatacaacaacccctacatcatttaggtgtctaaaggtgacactgatccctgccatttatccagagtattttaattcaccatttttctaggggttaaagggctgtttcagtaatgcaggttgtcttataagacaaargcctttttgttgtctgcaagcaagggaggaggtacactagtttttcacagggaggagtgggccacttctacaagcctagagggtttagaggaattggagaatcgagatttttgagtgcatcaacccagatctaccagccgaagtctcagcatcctactccttcctaaccagggccctgaccttagcatacaagacttgctgtggttgaggattcaacgtcctctggagatctgctactctttcccccgccagctttactgtggaatgattgacaattaaaaatggaat

SEQ ID NO: 231611 - DNA, 588 bp, Homo sapiens
aagttggttcttggcttttgggcttcaaaagtctccttcttagagaagaggtgagaactcaggaagcacagagttggggaagaactgatgggggcggtggagcttcctagaaaacttgccctcccactaggaagtgcattcttttttttttttttttttgaaactgagtctcactccgtcgcccaggctggagtgcaatggcacaatctcggctcactgcagcctccrcctcctgggtccaagccattctcctgcctcagcctcctgagtagctggtattacaggcgcctgccaccatgcctcactaatttttgtttcagtagagatggagtttcaccatgttggccaggcaggtctcaaactcctgacctcaattgatccacccgactcagcctcccaaagttctgggaggtgcattctaacaggctcctgggtaaagctgggcttctgctcagactcactttgagaactgaggtgctagaagctgtgaaagaaggaccctgaaggaggatccggaatgcatcagcagaatcccagcagatctcccagctgggatgagtgcaggccagagagtaaacaccagcccag

SEQ ID NO: 231612 - DNA, 633 bp, Homo sapiens
actgtactgttaaaatagttaaaatagtaaatgttatatgtttaccatcatagcaaaaaaggtaggtgagaaacaggatactcacagggtgagaaagaatcatccagaattacttgctacacscaaagaagggtcttccccatgaaggggcagctctcagagcctcagggttggcaggctggcagtggaacccctgttgtctgtgccctgtggggaaaccctgtaacgtgcatgtcatcacccacagagtggtctggtgaaggatggtccacctgaatcagattccacctggagattccacttcctaggaaatcgggggagagggggacaagtgtaagcgccccacacaaatcagatgcactcaggacacagggtctgccaccggacacccagttggccttctcaacaggccatgtcatgaggtgaatcactgttctgggttgaaagaggctcaagagccaatacaaccaaatgcaacagctaaatgagaggaagctggtttgaaacagctggcttcccaggcatttgaagagacctggggagagttgactccagaccagttagcggatgctgtggaaggctgaaaatggcccctcaaagaagcctgcatcctacccctggaacctgtgaaca

SEQ ID NO: 231613 - DNA, 394 bp, Homo sapiens
acagcaggaaatgcagccagttaatttaaaagctgactccagttcttgggatggaagtgggaaagggtggccaggatacagcgccatttcccattcccaggaaaactgcaatggtcacaagactactgccacacattttgattccaaaagttgcttagaaggtagagctttagagaacataaatggtctgtgggaggkgggagagtggaccacacacgccacccagtaagacccgtggctactccttcactgtggcatcagagtcttggattgctccagagagattttggttgtttctatcacgtttctccatgaaatgaattagagtttgacagtgagaggcagtcacatgggtgtgccccacatcttctcactccttttgtagcagaccacg

SEQ ID NO: 231614 - DNA, 568 bp, Homo sapiens
gaatgctgctgtttgtccttaataaataaaacattaaattaaaaaatgaagtatttagatataaagagggacaatgcctccgactaagtctcaaatgtctcagaaaataataaatacagtaaatatgcatctgtctgtatgtgtggagagagaaggagaaatggaggagaagagaaaaaaaatgataaaataaatgaagctagatacaaattactaaagaagccagaaagaggtataggggaattcatactactattcttgcaactttcttgcaagtttgaaattgaaacaagatgaaaagttgccaaaaacaaaattgtgaaagaattcttccattcccccaacacagtaaaaagaaaaggaggaaaaaacaaaagaaggaaggaagaaggttaaggcaggggagtgaaggaccraagtagggagagaagaaaggaagggatggagaaaggcagggattggggggaggaagggcttcctgtctctaaagtctgttattctcactatatacacagcactgcctatttacagtagaaaaaggttctgggttagtaatctacccatcatt

SEQ ID NO: 231615 - DNA, 392 bp, Homo sapiens
aatgggcatgtattatgtttgtgaatttttttttaatataaagaggatggctggggaggccaaggcaggcagatcacttgaggtcaggagttcaagaccagcctgtccaatatggcaaaaaaccatctctactaaaaatacaaaaatcagctgggcatggtgatgtgtccctgtaatcccagctactcgggaggctgaggcataagaatcacttgaacctgggaggcagaggttgcagtgagctgagattgcaacactgcactccagcctgggtgacggagcgagactccatctcaaaaaaaaaaaaaamaaaaaaaagagaatggcttaattttacgtggcaatataaccaatgttccctggaaatccagccatggaagtatcactcaatc

SEQ ID NO: 231616 - DNA, 512 bp, Homo sapiens
gaaatgcatgtcagtcccagagctggactctcagtgaccaagagataagatttttgggatcacttctgactcattagaacaccatgaaaaataaaagtttcaaaaaatgcctgcatgtgataagtaaaatgaaatgagacagtagggtcaatgcactatgagagaacccctcattttaataaaataatcattrcagcccttgattctactaacaatgacaaaataaggtagcaagaagggagaaaaagcttttcaaggtaagggcaatatttatgtcattaagatgcaccaagttaccttctactctgggtatatatataatgaatccagctaaaccatggacaagaaacatttggaaattagataaaattgattcctagactccagtaaaagttcaaggggaggggaggaggcgaggagcagactcagatgggaaacaagtcattatcaactcctctggaatagcaataaacttcagtatagttaaagcatttttctatggaattttataa

SEQ ID NO: 231617 - DNA, 512 bp, Homo sapiens
gaaatgcatgtcagtcccagagctggactctcagtgaccaagagataagatttttgggatcacttctgactcattagaacaccatgaaaaataaaagtttcaaaaaatgcctgcatgtgataagtaaaatgaaatgagacagtagggtcaatgcactatgagagaacccctcattttaataaaataatcattacagcccttgattctactaacaatgacaaaataaggtagcaagaagggagaaaaagcttttcaaggtaagggcaatatttatgtcattaagatgcaccaagttaccttctactctgggtayatatataatgaatccagctaaaccatggacaagaaacatttggaaattagataaaattgattcctagactccagtaaaagttcaaggggaggggaggaggcgaggagcagactcagatgggaaacaagtcattatcaactcctctggaatagcaataaacttcagtatagttaaagcatttttctatggaattttataa

SEQ ID NO: 231618 - DNA, 486 bp, Homo sapiens
agaataatataaagtaaataaaattgggtaagaagctagaatgtgacacaggtgaggtgtgagcatattcaagaatgttgaacagcttcaacttggatgcttcaggaaagctacttggtagaagtgacggatgagcagaaaagtaaaaggtgaagagaaggagcagaatgtgtgtgaagaagattttagacaaagtcctaaaaacggaaagtaaaaaatcaagaagcccgatgtggctcatcaggaagggggaatgtgcacatagatgaggtaaaaaatattcaggagttaaaattaagagataatctcccatctaaaatgaaattgatagatgctaaattcttcaygaatacatcgaaggatatcatgaaaaccatgtggagataaactacttatattatgtggattcattttgattactaattgagtagggagaaaaatgttaccttttccttcagcagcttagtctggttcctgttcaactcg

SEQ ID NO: 231619 - DNA, 425 bp, Homo sapiens
caggacccagctctgccccctctcctcatccctgccccggctcccagcactacccctcccctgccaggatgcaggccaggattctgctgggagcctcctctcttccccactcacccatgcaggacaggcccccagcagatggcaggcccgggacagaagcggctgccaggctgtgtgtgtgagccattactcctcacggtggccccaggcaggtgcagccttatccccactctttggatggggacattgaggctcagcagttactgtgacttggcctcttcccaggactcggaagcagcagccaggaggcccaggcccacctgcygctgtccacacgtccactctggggccggtccccacaggcctccggaacagcttaattctgtctctctggagaccctaatccagaaggctgtgggcaagat

SEQ ID NO: 231620 - DNA, 660 bp, Homo sapiens
gtattatatgttctaattgtaatgcctaaaatttagaaaactgaaagatattttcacataatatattggtttctattgctgctgtaataatttgccacaaatttcgtggcttaaaacaatatctttttttctcatagttctataagtgataaatctggtatgccttattaggtttcctgctccaggtmtcataagaccaacgtaaagcaaaatcaaggtatcattcactgggtatcactctatctggaggctttggagaagaatctacttccaaggttattcaggttgtttacaaaatccagtttcttacaggagtgtcattgatggctgtcagcttgatgtctgctactgtaccccaaggctatatgtcattccctctcaagtgacctcttccaacttcaaagcaacaagggcacattgaatccttttcctgctttgaatcgctctgacttcttcagccatcagctggaaaaaaattctctgcttttaaaatctcaaatggttaggccaggcctctgggataatctagtattttaaagtcagctgtgccacataatatgtaataatggcagagatgtctctcatagtcacatgttccagggatcagaatatgtcatcttgctggtggggagggttaggattctgcctgtgatacacaga

SEQ ID NO: 231621 - DNA, 660 bp, Homo sapiens
gtattatatgttctaattgtaatgcctaaaatttagaaaactgaaagatattttcacataatatattggtttctattgctgctgtaataatttgccacaaatttcgtggcttaaaacaatatctttttttctcatagttctataagtgataaatctggtatgccttattaggtttcctgctccaggtctcataagaccaacgtaaagcaaaatcaaggtatcattcactgggtatcactctatctggaggctttggagaagaatctacttccaaggttattcaggttgtttacaaaatccagtttcttacaggagtgtcattgatggctgtcagcttgatgtctgctactgtaccccaaggctatatgtcattccctctcaagtgacctcttccaacttcaaagcaacaagggcacattgaatccttttcctgctttgaatckctctgacttcttcagccatcagctggaaaaaaattctctgcttttaaaatctcaaatggttaggccaggcctctgggataatctagtattttaaagtcagctgtgccacataatatgtaataatggcagagatgtctctcatagtcacatgttccagggatcagaatatgtcatcttgctggtggggagggttaggattctgcctgtgatacacaga

SEQ ID NO: 231622 - DNA, 603 bp, Homo sapiens
tgttggatggaggttatagatggctcttattatgtcaaggtattttcctttgattgcttgttttctgagggtttttaacatgaatcagtgtagaattttgtcaaaacagttttctatgtctattgagataatcatgtggtatttgtttcctattctstctgtgtgattggtaaatcatatttatagatttgcttatgttaatcagccttaaatcccatggataaagcccacttgatggtggtgaattaatttattaatgtgctgcttgatttggtttgctaggattttgttgatgattttcgcatctatgttcatcaaggatattggcctgaagtttttgcttttttgttgtgtctctgaaacaacatggttttgtatcagaatgatggtgacttgccctcctccttagttttttgaaatagtttcagtaagaattgtagtagctcttttttacacacctgatggaatttggctgtgaatctgcctggtccagtacttgttctggttggtgggttttttattcctgattcaattgtgtaacttgtttttggtctgtttaaggattcaatttcttcctggttccatcttgggagggtgtaggtg

SEQ ID NO: 231623 - DNA, 569 bp, Homo sapiens
ggcccagaatatggtctatgtgtataaatgtttcatgaaatcttgataataatatatatgtgattgttattaaataaataattctataaatgtcaaagaggtcaagttaattgtagtgctacataggtcaactatgttcttacttattttgtaactaaaagaagaggtgttactgtctccaactataataaagtatctgttgtttttttttttttcttggagtttcatcagttttttgtttcacatattaggtaatggctttctttgtccctgataattttcattgttctaaagacttccctgtctgaaattaatataatttatttagctttcttctagttggtgttagtatggtacatttttctttgtgcttttaattttacttatgaatctctttatatgtaaagagatgctcgtactcagcacagtcggtcttgtttttatccattctaacaatttctaccttttgtggttgttgttgaarcttgtccacagctgaacaatttctatttttaattggtatatttagacctttcacatttaaagttattattttcatataggtagat

SEQ ID NO: 231624 - DNA, 649 bp, Homo sapiens
actctcagtaagtctgctttattctagctgggctggcagttgattagatagtgcctacccacaatgagcgggggcggggtctttctctccsagttcactgactcaaatgtttatctcctttggcaacaccctcacagacacacccaggagcaatactttacatccttcaatccaatctagtttacacttaatattaaccatcacgggacatgatctcattctattttatggctgcgtagtattccatagtgtgtttgtacctttttttttaacccagtctaccattgatgggcatttaggttgattccatgtctttgttattgtgaatagtactgcaatgaacatatgtgtgtatgtgtatataatagaatgctttatatttccttggatatatactcagtaatgggattgttgtgctgagtgtatttctgtctttaggtttttgagggatcattttttctacagccaaacagtatcctattttatcatttaactatggcacatttaggttattcattcatcccgtcatgatgttttatttatcttccatttttgtctattatgacagtgctatgcttctacaaatattgtttacaagcttttgcatgactttgtgtttttaattatcttcttaatatatttccagcta

SEQ ID NO: 231625 - DNA, 649 bp, Homo sapiens
actctcagtaagtctgctttattctagctgggctggcagttgattagatagtgcctacccacaatgagcgggggcggggtctttctctccgagttcactgactcaaatgtttatctcctttggcaacaccctcacagacacacccaggagcaatactttacatccttcaatccaatctagtttacacttaatattaaccatcacgggacatgatctcattctattttatggctgcrtagtattccatagtgtgtttgtacctttttttttaacccagtctaccattgatgggcatttaggttgattccatgtctttgttattgtgaatagtactgcaatgaacatatgtgtgtatgtgtatataatagaatgctttatatttccttggatatatactcagtaatgggattgttgtgctgagtgtatttctgtctttaggtttttgagggatcattttttctacagccaaacagtatcctattttatcatttaactatggcacatttaggttattcattcatcccgtcatgatgttttatttatcttccatttttgtctattatgacagtgctatgcttctacaaatattgtttacaagcttttgcatgactttgtgtttttaattatcttcttaatatatttccagcta

SEQ ID NO: 231626 - DNA, 537 bp, Homo sapiens
gcaaggtggctcacgcctgtaatcccagcaccttgggaggctgaggtgggcagatcacaaggtcaggagatcgagaccatcctggctaacacggtgaaaccccctctttactaaaaatacaaaamaattagctaggtgtggtggagtgtgcctagtcccagctactcgggaagctgaggcaggagaacagcatgaacctgggaagtggagcttgcagtgagctgagattgcgccactgctctccagcctgggcaacagagtgagactccatctcaaaaatataaataaataaaaataaattacactatcacattttaaattataattttgctaaataaaatacaattttaattttatttaatgaagtgatttaagcaaaagtttgcatattacaatacattaaaagataccaaaaaatgcttttaaaagttgagactatttccattattttacaatcattttaattttgatgaaagtgaatttggcaaattagtctttatgaacaatctttgtgaaaactcttcattaaatgacttg

SEQ ID NO: 231627 - DNA, 482 bp, Homo sapiens
cctggcccatataggtcttttaaattggctctgctcaaattctgttcaataaggaatatcagataagactttttaaagctgagcccagccatgggtttgtaccctcaaataactatgagttgggtaaatttttattttcttgaggtcccaagataacttggggctcctgggactgttagaaagtgatattctttactcaccacaggttagraaccctgtacagggactttgtagacaagatctgaggccaatttttccaaggggcttttattggctctgcaagtcaagcttgattccttaaagggaaacacactctttcagtcaaaaccctggtaaaacaaccagtttctccaattacatcttgttgcaaaagaaaatagattcttactgtacttatgcaaacaactatattgccataagttaagaatactcacaaatactttgcaaattctggagaaacaaacatgctctaaattttgttc

SEQ ID NO: 231628 - DNA, 482 bp, Homo sapiens
cctggcccatataggtcttttaaattggctctgctcaaattctgttcaataaggaatatcagataagactttttaaagctgagcccagccatgggtttgtaccctcaaataactatgagttgggtaaatttttattttcttgaggtcccaagataacttggggctcctgggactgttagaaagtgatattctttactcaccacaggttaggaaccctgtacagggactktgtagacaagatctgaggccaatttttccaaggggcttttattggctctgcaagtcaagcttgattccttaaagggaaacacactctttcagtcaaaaccctggtaaaacaaccagtttctccaattacatcttgttgcaaaagaaaatagattcttactgtacttatgcaaacaactatattgccataagttaagaatactcacaaatactttgcaaattctggagaaacaaacatgctctaaattttgttc

SEQ ID NO: 231629 - DNA, 614 bp, Homo sapiens
ccaatttttccaaggggcttttattggctctgcaagtcaagcttgattccttaaagggaaacacactctttcagtcaaaaccctggtaaaacaaccagtttctccaattacatcttgttgcaaaagaaaatagattcttactgtacttatgcaaacaactatattgccataagttaagaatactcacaaatactttgcaaattctggagaaacaaacatgctctaaattttgttcacaagagcataccttattcaattgttaaaaaatgtattctacctttgggtccctcagagctaattttcctttccaaggcttcaacctgaagcttggaactgaatttgggacagaaaggtgcctyaagagggtgcatggacttattaagttaactcccagttgggccttacctaactgaagtgagtgcctggtggggtcactcctccattgcttccttattataggcagaatgctaaggtgaagctgtggaaccaggttctcttcaaacaagggagagaaaaggagtcgtgagaagtggggacttggcctagtaagatgctctccaaaaggaaatgacctctcacataaaaaagtttcctgtcttctcagggctatgtta

SEQ ID NO: 231630 - DNA, 614 bp, Homo sapiens
ccaatttttccaaggggcttttattggctctgcaagtcaagcttgattccttaaagggaaacacactctttcagtcaaaaccctggtaaaacaaccagtttctccaattacatcttgttgcaaaagaaaatagattcttactgtacttatgcaaacaactatattgccataagttaagaatactcacaaatactttgcaaattctggagaaacaaacatgctctaaattttgttcacaagagcataccttattcaattgttaaaaaatgtattctacctttgggtccctcagagctaattttcctttccaaggcttcaacctgaagcttggaactgaatttgggacagaaaggtgcctcaagagggtgcatggacttattaagttaactcccagttgggccttacctaactgaagtgagtgcctggtggggtcactcctccattgcttccttattataggcagaatgctaaggtgaagctgtggaaccaggttctcttcaaacaagggagagaaaakgagtcgtgagaagtggggacttggcctagtaagatgctctccaaaaggaaatgacctctcacataaaaaagtttcctgtcttctcagggctatgtta

SEQ ID NO: 231631 - DNA, 559 bp, Homo sapiens
accactgatcctatgcttgctttgcaattcgtgttcaccccacagctgggccaggcatgcyccagcccacctgtgttatagctcttacttgccttaggtggttcccgagttcttgccctgtgtccaagaagaatgaggttacactgacaattgaagggtgaggtgtgtggagcagaattttattgagtgatggtagagttctcaatgtggaaagattgcaagggtggtcccccacctcaagtcaggtgatctccccaacagtgtgactgagtctgggatttttatgggctcagatggggaagtatgtgctgattggtttgtgagtatgcaaaaaaaaggctaaaaaacaggtgccactcaaaggtgggcaggacagtgtgaaaaaccaattagggaagaataggcatatgtacagtaagtgaagggtaaggatcaatcagaggaaagcatgccaaatgggaagagaggttctcaatctggtttgtgaaattgacttgtagcttggctttcagactttaaactggctttggcttgaaggtcaggtttcactggggacatg

SEQ ID NO: 231632 - DNA, 559 bp, Homo sapiens
accactgatcctatgcttgctttgcaattcgtgttcaccccacagctgggccaggcatgccccagcccacctgtgttatagctcttacttgccttaggtggttcccgagttcttgccctgtgtccaagaagaatgaggttacactgacaattgaagggtgaggtgtgtggagcagaattttattgagtgatggtagagttctcaatgtggaaagattgcaagggtggtcccccacctcaagtcaggtgatctccccaacagtgtgactgagtctgggatttttatgggctcagatggggaagtatgtgctgattggtttgtgagtatgcaaaaaaaaggctaaaaaacaggtgccactcaaaggtgggcaggacagtgtgaaaaaccaattagggaagaataggcatatgtacartaagtgaagggtaaggatcaatcagaggaaagcatgccaaatgggaagagaggttctcaatctggtttgtgaaattgacttgtagcttggctttcagactttaaactggctttggcttgaaggtcaggtttcactggggacatg

SEQ ID NO: 231633 - DNA, 593 bp, Homo sapiens
ttgttttgtgcaagaggcttagctttcaacctatcttggctttcaacatacctgtctcactaagattaatcatttctagcttttgttttaaagtaaaaaacatctaaactttcctgtcccttgaacagttaaagaaccttgtaggattattaattgacgtaattttaatattgttttgtcttargaaaaagaaggccagaggagaagtaaaaaacagggaaaggccagtctatggagcagtaagaatacacacaacattcatcgattaaggttgtcatcttacactgtgccccaaaacaccatataattttgtgatgtcccagaacaattacaatagtaacaatctagagcactgatcacaaatcatcctaaaagatacaataataataaaaatgtttgaaatattgtgaatattatgtgacacagacacaaggtgagcacatgctgtcaaaaaaaaatggtgccataaacttgcttgacacaaggttgcacaaaccttcaatttgtaaaaaaaatgtaatacctgagaagcacaataaagcaaaatgcagtaaaacatggtatgtctgtacatcctttaacagcacaggaca

SEQ ID NO: 231634 - DNA, 566 bp, Homo sapiens
tttcatagaaaacattaaaatttaatgtcacatgtaataagatttggtgtcataaatactaaatatagataattatgtttaaggaatacagctrtgaaataaacaaattaagtatgtaatcagaataatgattatttgtatcaaatattattatttatttatttatttattttgagacaggctgtcactctgccgcccaggatggagtgcagtggcacgatctcagctcaccgcaaacttggccttctgggctcaagcaattctcctgcctcagccctcccaactccaagtagctgggattacaggcacaagccaccaggcctagctaatgttttttgtattttttgtagagacagggtttcactatgttgccctggctgggctcaaactcctgagatctagcaatacacccgcctcagcctcccaaagtgctagaattacaggtgtgagccacctcacttggcctttatcaaattttagagacaatcatgatatttgtccaatctatacacttattacaaatgtgctcatatggtatggtgacattgcaaatgactgtttcgtct

SEQ ID NO: 231635 - DNA, 566 bp, Homo sapiens
tttcatagaaaacattaaaatttaatgtcacatgtaataagatttggtgtcataaatactaaatatagataattatgtttaaggaatacagctatgaaataaacaaattaagtatgtaatcagaataatgattatttgtatcaaatattattatttatttatttatttattttgagacaggctgtcactctgccgcccaggatggagtgcagtggcacgatctcagctcaccgcaaacttggcyttctgggctcaagcaattctcctgcctcagccctcccaactccaagtagctgggattacaggcacaagccaccaggcctagctaatgttttttgtattttttgtagagacagggtttcactatgttgccctggctgggctcaaactcctgagatctagcaatacacccgcctcagcctcccaaagtgctagaattacaggtgtgagccacctcacttggcctttatcaaattttagagacaatcatgatatttgtccaatctatacacttattacaaatgtgctcatatggtatggtgacattgcaaatgactgtttcgtct

SEQ ID NO: 231636 - DNA, 566 bp, Homo sapiens
tttcatagaaaacattaaaatttaatgtcacatgtaataagatttggtgtcataaatactaaatatagataattatgtttaaggaatacagctatgaaataaacaaattaagtatgtaatcagaataatgattatttgtatcaaatattattatttatttatttatttattttgagacaggctgtcactctgccgcccaggatggagtgcagtggcacgatctcagctcaccgcaaacttggccttctgggctcaagcaattctcctgcctcagccctcccaactccaagtagctgggattacaggcacaagccaccaggcctagctaatgttttttgtattttttgtagagacagggtttcactatgttgccctggctgggctcaaactcytgagatctagcaatacacccgcctcagcctcccaaagtgctagaattacaggtgtgagccacctcacttggcctttatcaaattttagagacaatcatgatatttgtccaatctatacacttattacaaatgtgctcatatggtatggtgacattgcaaatgactgtttcgtct

SEQ ID NO: 231637 - DNA, 566 bp, Homo sapiens
aaattaagtaaatattagtcttgtagggtgggcctaatctaatatgactggtgtgtttttaagaagactaagtttgtacacacagtgacaccagacatgtacatccacagaaggatggccatggaaagacacagtgaggcctcagaagaaactaagcctgccaacaacttgaccaggacttctagttttcagaactataaaaaagcaatttctgttttttaagccaccctatcagtggtattttgttacagtagccctagctcactaatacagtgaggatgtttttttgggacacatagtatgtaccaggcgctttctttgtggaagagtggaagaatttagcaaattccaggaaatatttttgtgctttctatctggcttccctttgacgtcataatcraattagtttttgtacacagttttaagctatcgcttcgcagtaccaggcattttcttgcttctactcccctgttgtggaggtgtctgttatggaatatgtacctggaataatcttctcattttctggagatttaaactctcaaaataactaaaaaattccactatct

SEQ ID NO: 231638 - DNA, 566 bp, Homo sapiens
aaattaagtaaatattagtcttgtagggtgggcctaatctaatatgactggtgtgtttttaagaagactaagtttgtacacacagtgacaccagacatgtacatccacagaaggatggccatggaaagacacagtgaggcctcagaagaaactaagcctgccaacaacttgaccaggacttctagttttcagaactataaaaaagcaatttctgttttttaagccaccctatcagtggtattttgttacagtagccctagctcactaatacagtgaggatgtttttttgggacacatagtatgtaccaggcgctttctttgtggaagagtggaagaatttagcaaattccaggaaatatttttgtgctttctatctggcttccctttgacgtcataatcgaattagtttttgtacacagttttaagctatcgcttcgcagtaccaggcattttctygcttctactcccctgttgtggaggtgtctgttatggaatatgtacctggaataatcttctcattttctggagatttaaactctcaaaataactaaaaaattccactatct

SEQ ID NO: 231639 - DNA, 547 bp, Homo sapiens
taaatgaagaaactgaagctcaagagtggtaacttgccaaaagtcacacaacaaaggaatgtcagggtcagcctttgcacgtttgttagactcaagtctgaataattacaactgcattaggtggatttgggctaggtcatgaggcaataggataaggatgcagggaatgggaagattagcctgttagtagagctgaagaccattatatcttatgttcatttgttcacttaatatttactttcttcttacatgtgccacatcctctacaatgatgattgagaggtaagaatttgatgccctaaactagatgttccataatcttgcaattactttttttaattaaacctgttaatttatgactatttcattagctaccataagcattttctaagtgaaagtctagttcacctgtcaaatatagatagggaagtataaatgaaatgaactatgaggtgactagctgaggaaaggtawacaatatgaaaagcattaaaagggaatgagacagaaacacaaaagatttaatgtaggccagggtcagaatttg

SEQ ID NO: 231640 - DNA, 543 bp, Homo sapiens
tacggtggctcacgcctgtaatcccagcaccttgggaggccgaggtgtgtggatcacctgaggtcaggagttcgagaccagcttggccgacatggtaaaacctcgtctctactaaaaatgcaaaaaacatagccgggcatggtggcaggcgcctgtaatcccagctactcaataggctgagtcatgagaatcgcttgaaccgtggaggaggagtttacagtgagccaagattgtaccattgctctccagtctgggctacaagagctaaactccatgtcaaaaaacaaaacaaaacaaaacaaaaaawcaaaaaggtaatagaagggaaatcatactctattactctataagagatatcattaaaaagataaaagcccctgcatataacttcatatttatagatcaaatactgaattagcttcttcagaattcaaaaagaagtctctaatgttttctatcaacatttctattcaactagagtaactaaactgtataacagaaaaaaaaagaaatagaagtacaaaattggaaccctgaaaataa

SEQ ID NO: 231641 - DNA, 543 bp, Homo sapiens
tacggtggctcacgcctgtaatcccagcaccttgggaggccgaggtgtgtggatcacctgaggtcaggagttcgagaccagcttggccgacatggtaaaacctcgtctctactaaaaatgcaaaaaacatagccgggcatggtggcaggcgcctgtaatcccagctactcaataggctgagtcatgagaatcgcttgaaccgtggaggaggagtttacagtgagccaagattgtaccattgctctccagtctgggctacaagagctaaactccatgtcaaaaaacaaaacaaaacaaaacaaaaaaacamaaaggtaatagaagggaaatcatactctattactctataagagatatcattaaaaagataaaagcccctgcatataacttcatatttatagatcaaatactgaattagcttcttcagaattcaaaaagaagtctctaatgttttctatcaacatttctattcaactagagtaactaaactgtataacagaaaaaaaaagaaatagaagtacaaaattggaaccctgaaaataa

SEQ ID NO: 231642 - DNA, 604 bp, Homo sapiens
atctgggcctttggagggactatctttccttctttggaacctacagactatagcagagctccagcagcaatgctatgaaaacaagtccatcttctgaatggaatccataggattaggatgatagaactgaccgccagaaggaatcagaccaaccagccttggattgcttcccccagattttatattttgtgaaaaacaaacaaataaaactctaccttgtttaagtcaccttcattttgtgtccctgttaatactggtaaatgcaatcttaatgcatacatatatgtactagttgagctttttgtgttttatcagtgatttttatactacattgaatgctcatatttatatctttaacaataagtttaaaattgtatacatttttctattyaaatttttattattttaagtgacatagtccttaatgtgccagatgaactttaatagtatgctccctaattatccaagcacatttcaatgtcaacttttattacatcaaccaaatatcaagttgatatcaaccaaaacaggctaagtgtttttctgcagagaattttaacagcacaaatatggactcatttctgatatataatctttctatgat

SEQ ID NO: 231643 - DNA, 528 bp, Homo sapiens
gtcatttgtaacaacatgggtacacctggaagacactaggctaagtaaagtaagccaggcacagacamaaataccacagcatctcacttatatgtggaacagtcaaactcccagaagcagagtagaacgttagttgccacagcctggagagttggaaaactagttcaatatttgaaaaatgaccaatgtaatccattatttgactaaaataaaaaggaaaagtcacatgatcatataaactgatgcagaaaaaaagtgataagatttaatctcatttcatgattttttgatatgtcagaaaaataggaataaaggagaatgttctgaacttgataaagaacatctacaaacagcaacaataaaaacaactagcattaatcttacacttaatcttatactgaatggtgaaagacaagatgatctcccctaatatcagggacaaggcgaggatgtccattcttatctcttttaataaaaataatgatagaagtttcagacagtgcaataagcaaaaaaaaaaaatatata

SEQ ID NO: 231644 - DNA, 528 bp, Homo sapiens
gtcatttgtaacaacatgggtacacctggaagacactaggctaagtaaagtaagccaggcacagacacaaataccacagcatctcacttatatgtggaacagtcaaactcccagaagcagagtagaacgttagttgccacagcctggagagttggaaaactagttcaatatttgaaaaatgaccaatgtaatccattatttgactaaaataaaaaggaaaagtcacatgatcatataaactgatgcagaaaaaaagtgataagatttaatctcatttcatgattttttgatatgtcagaaaaataggaataaaggagaatgttctgaacttgataamgaacatctacaaacagcaacaataaaaacaactagcattaatcttacacttaatcttatactgaatggtgaaagacaagatgatctcccctaatatcagggacaaggcgaggatgtccattcttatctcttttaataaaaataatgatagaagtttcagacagtgcaataagcaaaaaaaaaaaatatata

SEQ ID NO: 231645 - DNA, 369 bp, Homo sapiens
gtacaatataatggcttttggtttacttacagagttataaagcaatcacaactatgcaactggaggattttcataaatctctctaaagttgtattactattagaaataataatccattctacccacttctgagtgccttgcaataacaaatctacattgtgtctttgtgattttgcctattattcacatttcattataaacagaataatacaaatatkgccctgacgactggcttccttcagttaacagtgttttcaaggttcatccatgttgcagtttgggtcagtaatttatctttttaattgccaagtaatatttcattgtgtaaatttactacattttgtttatccattcatcacttcatggaca

SEQ ID NO: 231646 - DNA, 369 bp, Homo sapiens
gtacaatataatggcttttggtttacttacagagttataaagcaatcacaactatgcaactggaggattttcataaatctctctaaagttgtattactattagaaataataatccattctacccacttctgagtgccttgcaataacaaatctacattgtgtctttgtgattttgcctattattcacatttcattataaacagaataatacaaatattgccctgaygactggcttccttcagttaacagtgttttcaaggttcatccatgttgcagtttgggtcagtaatttatctttttaattgccaagtaatatttcattgtgtaaatttactacattttgtttatccattcatcacttcatggaca

SEQ ID NO: 231647 - DNA, 542 bp, Homo sapiens
ccaatcatctgtgatatatatggttttaaaaataagaaatagaaatttttgcctaytttaagataagagaagtagtttgaaaggcaagcagttaacagacgatacgttgattttcaaccatttgcttatctgacctcatgtcctttaccatcatcatttggtctcattcacaaagacaggtccaaagccgatctcttgtaccaaacagtcaagttgtggaagcaaaggaagaatacttgaagaaaattaaaaacgctattccagtgaatgaaaagaaagcaaagcagccttcttgctgattgacagggagaaagttgtagtagttttcatagaggatcaaaccagtcacatttccttaagccaaagcctaacccagagtaagttcttaaatctcttcaattttatgaaggctgagagaggtgggaacgctgcagaagaaaagttggaaactagctgagattggttcatgaggattaaggaaagaagccattttcaaaacacaaaagtataaagtgaagcagcaaattatgatgtattataga

SEQ ID NO: 231648 - DNA, 542 bp, Homo sapiens
ccaatcatctgtgatatatatggttttaaaaataagaaatagaaatttttgcctactttaagataagagaagtagtttgaaaggcaagcagttaacagacgatacgttgattttcaaccatttgcttatctgacctcatgtcctttaccatcatcatytggtctcattcacaaagacaggtccaaagccgatctcttgtaccaaacagtcaagttgtggaagcaaaggaagaatacttgaagaaaattaaaaacgctattccagtgaatgaaaagaaagcaaagcagccttcttgctgattgacagggagaaagttgtagtagttttcatagaggatcaaaccagtcacatttccttaagccaaagcctaacccagagtaagttcttaaatctcttcaattttatgaaggctgagagaggtgggaacgctgcagaagaaaagttggaaactagctgagattggttcatgaggattaaggaaagaagccattttcaaaacacaaaagtataaagtgaagcagcaaattatgatgtattataga

SEQ ID NO: 231649 - DNA, 542 bp, Homo sapiens
ccaatcatctgtgatatatatggttttaaaaataagaaatagaaatttttgcctactttaagataagagaagtagtttgaaaggcaagcagttaacagacgatacgttgattttcaaccatttgcttatctgacctcatgtcctttaccatcatcatttggtctcattcayaaagacaggtccaaagccgatctcttgtaccaaacagtcaagttgtggaagcaaaggaagaatacttgaagaaaattaaaaacgctattccagtgaatgaaaagaaagcaaagcagccttcttgctgattgacagggagaaagttgtagtagttttcatagaggatcaaaccagtcacatttccttaagccaaagcctaacccagagtaagttcttaaatctcttcaattttatgaaggctgagagaggtgggaacgctgcagaagaaaagttggaaactagctgagattggttcatgaggattaaggaaagaagccattttcaaaacacaaaagtataaagtgaagcagcaaattatgatgtattataga

SEQ ID NO: 231650 - DNA, 544 bp, Homo sapiens
ccccaatcatctgtgatatatatggttttaaaaataagaaatagaaatttttgcctactttaagataagagaagtagtttgaaaggcaagcagttaacagacgatacgttgattttcaaccatttgcttatctgacctcatgtcctttaccatcatcatttggtctcattcacaaagacaggtccaaagccgatctcttgtaccaaacagtcaagttgtggaagcaaaggaagaatacttgaagaaaattaaaaacgctattccagtgaatgaaaagaaagcaaagcagccttcttgctgattgacagggagaaagttgtagtagttttcatagaggatcaaaccagtcacatttccttaagccaaagcctaacccagagtaagttcttaaatctcttcaattttatgaaggctgagagaggtgggaacgctgcagaagaaaagttggaaactagctgagattggttcatgaggattaaggaaagaagccattttcaaaacayaaaagtataaagtgaagcagcaaattatgatgtattataga

SEQ ID NO: 231651 - DNA, 442 bp, Homo sapiens
cccagattattgaaatagcaatactaacagtaatagcaaatagaaatactaaatagtaaatagaaatcgtaatcgcaaatctaatccctggtgtttttctatttttttatattgtaatacaatattgtagataattggcattaatataatcgtatttgtagatgaaataaaaagtggcatttttaattttatttgacttatagctgatacaggaaagtagrctatagataatcacacagaaaaagtacaattttaaaaatccttcagacatgagtattacatttttatgttctcaaaggattatcttaatatctgatacatatcaggtatccatctctttgtctctgtctctctctctctctctcatacacacacaaacatgcgcacacactgtaattcttgccataaataaaaagtggttatgacagctgacataaaaatg

SEQ ID NO: 231652 - DNA, 573 bp, Homo sapiens
ctagaaattattttattgaatgttaggcagtattttcaaattttgtaaatatccagattatgttacctttattcaagatagtttcatctttgctgctgctgtgaaattactacttcaattccatcatgtctgggctaaataaagcctaagttaaactttttttaggtctctgttctatctctgtgtcacatttgttcctgaagwgcagctaactatattctttatatttaatttatttattctttttagttgcgttatgtttctaatccacttttttttttttttttttgagagggagtctcactttgtctcccatgctggagtacagtggcgcgacctcagctcactgcaacccccacttcccgggttcaagggattctcctgccttaacctcccgagtagctgggattaccggcgcccgtcaccaggcctggttaatttttgtatttttagtagagacggggtttcatcatgttggccaggctggtctttaactcctgacctcgaatgatccaccctcctcggcctcccaaaatgacgggattacaggcctgagccaccgtgcccagccta

SEQ ID NO: 231653 - DNA, 489 bp, Homo sapiens
cctgtgccagttcaaggaagagcgagaggtcagtggggtcagcgcggagcgatgggggccggaggagatgaggggagaggggctgtgtgtcacgatcagtgcagtaggatgcgtaatgaagggccctggcccaggtggccakggaggcctcccagagcaaggagtgtccaagctgcgggtggcagagaggggtgggagagctcggaagacctgatcccagtgcggccccaacactaacatcctctgtggtccaagatcagcccacatcccctgagctcagtttcctcatctgcaacatgagggagctggcctagctacagcccctctttctctaatctgacacctgccgctggggccagggctccagcctgactgcgtaatgcacagggacccccagctagctcagggtaggcggcgttcgtgaaaggtcctcacaccctccagtccaggcttttgcaacccctgggcctcagctggatgtgtgagtgg

SEQ ID NO: 231654 - DNA, 503 bp, Homo sapiens
atcacggctcactgcaacctcaacctcccaagctcaagtgatcctcctgcttcagcctcccaagtagttagaactacaggcatgygccactataccctactaattttttcttttaagaggcatttttttattttcatcacattgcccaggctggtcttaacctggcctcaagcaatccacctgccttggcctccccaagtactgggattacaggcatgagccaccttgccctaccacaagaaaaatgtatttaaagggccttgtacaatgcctggcaaatgataggtgctcaaggagtatctattgcctgacaagtcaattaaaaatgcaataaatactgctgctgcagccccacagagaaaaagactgatggttatcttggaaaggaggaagacggtccagacggaagccacacaactggctgcagaggtaagaacggaaggaagtcctgtacaagatgtgaaagaccgccagcaacttgagataggctttgttctgccagc

SEQ ID NO: 231655 - DNA, 618 bp, Homo sapiens
taggttttgtgaggtggaaataaggactttggtttactgttttttagagggcaagagtagaggggaactccttgtgttggaatatcctgtttataggagaaaacaaaacctggtttgttttaggatttatctctttccctaaagttttagtttgattatgttacatttagcatgagtgactccattttggtttggtctggtctgtcggggcctagtacacatgctcagtccaaaacaatgaccttccaaaattttgtttaaaaagcgcccccttttggtcaggttctcatttaggcaactgtgtgatcaaaacttagggccttagcaccactctcatttaccatcattttgggtttctagtcttagcatgtcatttataggttatgatgtcctcgtggtcacacaagtccttgagtttttgtcactycagtcaatgaaagactatttgacattctagagacggctgcatgcaaacatttaaaacatttgagagaatacagtgtaccagggaaactaccattatgtttatcagaagggcgatgccaggagtttggagtctgctccttagccaggatccccgtgaaccaaaccaactaaaatcaaatagatcaaagaatg

SEQ ID NO: 231656 - DNA, 541 bp, Homo sapiens
tctcctgccaatgttccctttaacctatgctggcaatgttctctttaacctatgatgtaagttaaaaagagtgggccaatattctgtttctgatcaactatgaagcaacaaatgtacaactaaaatttttcacctaaagtggcctttcttcctccatcaaggcgtaagtttgttcatgtataaggttagctgagaaatcctccacgaataaaagtatacctcatgaatgcacacaaaagaccccttttcagttcattgttcatagaggcataagcaaggagaacaatgagagataagagtcttatgatagcagaaaaattttgatctgtgatcttggagaaaagctgtccatgtctggatgccacctgtttctggggagaaacttccctggctagctttatcttaaggtctccaaagtgtgtacagtttcaagagtttrgagtggcccttctgagtgagattatgaactcaatgttccaggccccaaagttttcctgcagtgtgagtggcaagggcagtgtttgatgttctcagaagaccc

SEQ ID NO: 231657 - DNA, 392 bp, Homo sapiens
taaatatattcaggcaatttgtactatgtgcagcaatctgtgataggaactgttggtggaaaattttaaacacttctttcagtaattgttataacttgggaaaacaaattattgaataaccaaattaacaacttctgaacacagcacaattaaattggaaaataaaaaataatgactaaaaatagctgaaaataccccttaaacactttggattataagatatycctttatatatttcatggaacaaaaaatatcataatggaaattttaaaaaatgaacactaaattattataaaataacatatatcttaaaatgttacaaaagtagtatatttataccaaaattatagactttagtgcccaaattgaaaaaagagacataaaccaagaag

SEQ ID NO: 231658 - DNA, 491 bp, Homo sapiens
gatgtatgagctgattgttttgccacctgctacacaggtgttcaaacatggcagaatgtgagtgagcttctccactcctggtaataatcaacggggttccgagtgctgagttcctcccacattgctgctcttcagggagtgagcctcatggccctggagttctccattagactagtccgacaaagcggggcatgttctaactatccaagaaaaccatgctccttacatatttagctattatgattactttccaccacagcagtcctagcctctatgatacaaagaaatcagaaaaaaaaaaataaattggatccaatctatattgaatggctaagtttttatyaattcagttacctatgccacaaatatctactgtatgccttctgtgctccaggcaatatgctcgggttttggagacacagagcaacaaaatatacagtttacaaatgagtggacgttcttgaaacaaaggctgggagggatggagggag

SEQ ID NO: 231659 - DNA, 580 bp, Homo sapiens
tgatcgttgtaaatactgcaggcacactgaagtaggcagaataaaaatgttaatttcacctttttctctaaaccaattctattcccctccccccaaagctgctgttcttaatttggtgcttacacttccagatcatgctacatatttacatacacatgtgtacacactggatagaatatgtataggcagaaatgcaygtataagtagtaaacgacaatccaatatcacttaaattattatgtgcatgtgggagatttttaggttttttttttttttttcacttattatttttgagacagggtcttgctctgtcacccaggctggtgtgcagtggcatgatctcagctcactgcagccttgacctcttggactcaagtgatccccccacctcagcgcccccatgtagctgggactacaggtgcacaccaccagtccaggctagtttttttttttggtatttgtcatagaggtggggttttgccatattgcccaggctggcttcaaactcctgagctcaagcaatccacccaccttggcttcccaaagtgctggaattacaggcatgagtcattgcacccaa

SEQ ID NO: 231660 - DNA, 580 bp, Homo sapiens
tgatcgttgtaaatactgcaggcacactgaagtaggcagaataaaaatgttaatttcacctttttctctaaaccaattctattcccctccccccaaagctgctgttcttaatttggtgcttacacttccagatcatgctacatatttacatacacatgtgtacacactggatagaatatgtataggcagaaatgcatrtataagtagtaaacgacaatccaatatcacttaaattattatgtgcatgtgggagatttttaggttttttttttttttttcacttattatttttgagacagggtcttgctctgtcacccaggctggtgtgcagtggcatgatctcagctcactgcagccttgacctcttggactcaagtgatccccccacctcagcgcccccatgtagctgggactacaggtgcacaccaccagtccaggctagtttttttttttggtatttgtcatagaggtggggttttgccatattgcccaggctggcttcaaactcctgagctcaagcaatccacccaccttggcttcccaaagtgctggaattacaggcatgagtcattgcacccaa

SEQ ID NO: 231661 - DNA, 616 bp, Homo sapiens
atgtgctctctgctacacagaaaagcagtctccaaggggagcatccattttccatttggaattcaagcagaagcagcgtccctgagccaggaaggtgggccacaaagaagagaaggtagatccatgtgtgcagggtggggccatggctgtagcagcaatgcccattcctggccacaagcacagatgaaggtgctaccaggatccagaaccaggcactgaagagggaagtgggcaagccatgtaagtgatcacaaagcacttaggtcacgagaagaggcgacccagaccccactcccctaaccatcatgacaagaaggaagaaccagctccctgccaaggggagctttttaattagtatgttcatttaactgatgccagctctcatttcagaatgtaaattcagtctttcccaaaaaatccttggatatcttcaggaagtcccaagttactgttaaatgtggacactttcatcccttctaccttggctttttcagaagcagacgcagatttgagatcccagtagaaagaatttatttggcaggtgcaaggtaccccagcaagggagcarggacatgggaccaggaggggaaggtgagaccaggaagggaaggcagcg

SEQ ID NO: 231662 - DNA, 440 bp, Homo sapiens
gcttctgtgctgcaggcaactgtgagaaactacttcgacacgagagggcttaaaaaaccccatatatacacgtgatatcctccaggcccctgtgccctccttgcttagaattcccactggagtcatccctttcctaagacacatcataggacacacttatttttagcttattgtttattgcctgtctgccccagccccaactataaggtctgayagggacagggtctgaggcttctgtgaggcttgcacctggggtggcagcctgcatagcaggagctccggcagtggccaccgaccctgtgaatgacccagggctctcagaggatgtgccgctcagaggaaagccttggagctgaggttgtgcagggagccaggggacatctcaccaaggtcctgggaattcatgttttatcttgggcttgttgatctttaaacaggaa

SEQ ID NO: 231663 - DNA, 579 bp, Homo sapiens
ccaggaaatttctccattcggcagaggcccccactggagggctgggactattaggaaaccgtttttcaggatcaagagcaccaacttctctccatttgcaagggctttccccactggtgtctttaatcaccccaagcatgacttggctctggaaaacactacagtggaaggcttcctgactgattcctgcttttcttagggccagtgtttccttcctggctttcacgctgcctccttgagtgacctgcacagggcaggactctgatgttgtgtttcctctttggaaagtgagagggggaaggagtgaagcatgggccatcccaaaatatgccagattgggatattgattattttgagttgaaaatattggatacattgtagtttcggataggactaactgacctgtctcttcaygcctgcagcaagccataaagattcctctgggaaggagacccttcctgtagcaggatgagaaaatgccccttatcatcagagactgggcattggagctgcaatgggcctgagtaaacatatttaacacagtatcccttatcttccactggttttacaccctcctca

SEQ ID NO: 231664 - DNA, 579 bp, Homo sapiens
ccaggaaatttctccattcggcagaggcccccactggagggctgggactattaggaaaccgtttttcaggatcaagagcaccaacttctctccatttgcaagggctttccccactggtgtctttaatcaccccaagcatgacttggctctggaaaacactacagtggaaggcttcctgactgattcctgcttttcttagggccagtgtttccttcctggctttcacgctgcctccttgagtgacctgcacagggcaggactctgatgttgtgtttcctctttggaaagtgagagggggaaggagtgaagcatgggccatcccaaaatatgccagattgggatattgattattttgagttgaaaatattggatacattgtagtttcggataggactaactgacctgtctcttcatgcctgcagcaagccataaagattcctctgggaaggagacccttcctgtagcaggatgagaaaatgccccttatcatcagasactgggcattggagctgcaatgggcctgagtaaacatatttaacacagtatcccttatcttccactggttttacaccctcctca

SEQ ID NO: 231665 - DNA, 469 bp, Homo sapiens
actacaccaataattacatcaaatataaatgctccagctacaacaacttaaagagattgacaggacaaaaaagcaagacccaagtatgtattatccataagaaatacagtttttttttttttgaaagagrgtcttgctctgttgcccaaatgtgagtgcagaggcatggatcttggctcactgcagcctcaacctcctggggtcaagtgatagtcccacctcagcctcccaagtagctgggtctggctaatttttgcactttttttttttttttttaaagaaacaggggctcactgtgttgcccaggctggtctcgaactgctgagctcaagcattacacctgcttcagcttcccaaagtgttgggattacaggcatgagccaccatgcctggccaagaagtacactttaaatgtatatcatatataccttaagaataaaataatggatacagatatgccatgcaaata

SEQ ID NO: 231666 - DNA, 534 bp, Homo sapiens
cttgttctatattacaccccactgtggctctaggagcacctctgtttttgttttgttttgttttttcacagcacttgttatcttctgacacactattgttatctatctatctatctatccatcatccatctatccagctctatctctcctaccatctgtctgcctatcacccatctctctatccacctatcatctattaatttatctatccatccatccacctatctatgtgtctatctatgtatctatggatctatctatatctatcatctatctatctatctatctatctatctatcyatccatccatccatccgtctgcctatttatccatctatctgtgctttcatccatccatgtttctatctacccatccatctattatttatccatccatctatccattcatccacccatgtatctatctatctatcttccatccatccatttatccatccatctatccattcatccacccatgtatgtatgtatgtatgtatgtatgtatgtatgtatgtatgtgtctatctatct

SEQ ID NO: 231667 - DNA, 534 bp, Homo sapiens
cttgttctatattacaccccactgtggctctaggagcacctctgtttttgttttgttttgttttttcacagcacttgttatcttctgacacactattgttatctatctatctatctatccatcatccatctatccagctctatctctcctaccatctgtctgcctatcacccatctctctatccacctatcatctattaatttatctatccatccatccacctatctatgtgtctatctatgtatctatggatctatctatatctatcatctatctatctatctatctatctatctatccatccatccatccatccgtctgcctatttatccatctatctrtgctttcatccatccatgtttctatctacccatccatctattatttatccatccatctatccattcatccacccatgtatctatctatctatcttccatccatccatttatccatccatctatccattcatccacccatgtatgtatgtatgtatgtatgtatgtatgtatgtatgtatgtgtctatctatct

SEQ ID NO: 231668 - DNA, 455 bp, Homo sapiens
taaatggatgcacagattaagatgataatcatagaaaatcaatagttgatatgggccagaccctaggcagatctcatcttagtttaaccaaatgcctttcataatttgacttgccttttaataaaaatagccacaatttattgactattttctttgagccatatggtggtcttagaggtttttttgagtgggtatataacccatatgtgatatatactatcattgtccttatggcacatacaagaataaacaagaagactcaagcttagggkatgcaagtaccttgcccgtagctaggaagtagtagtttcagggtttggacagaggtagttgagttctagggcctgaatttataagcaccgtacatagagttctatctatacatgctcctgttttagagctgaacccagaactgcaaggaaaatatgctgctcagctcaggaattcttaagtcc

SEQ ID NO: 231669 - DNA, 610 bp, Homo sapiens
aatttgaattatataaacagagaatcatggcccctcaatttacagaattgagccagtttacaggacccagaaaccccttgaatgaatggggaggctggtccccttgagggaaggaccccactacattaccaacaatttatgcactgactctttctcccatcctctccccaaggagacctctggccttttaccagggtaactgcattgaggaaaggggaatgatcaaacctttcaaggactactggacactgactctgagctaacattaatcctaagggaccccaaacatcactgtggtcctccagttaaagtagcggcttatggaagtccagagattagttttaactcaggtccgacttgcggtgggtccattgcatccccggactcatcatgtggccattttcccagtgccagaatgcgtaattggcatggacatacttcacagctggcactaccctcacattggctccctggctggtaggatgagggctataatggtgggaaaggctaaaaggaagccattagagctgcctctacctcgaaaaatagtaaaycataaacaacattgcatccctagagggactgcagagattagtgccaccatgaagga

SEQ ID NO: 231670 - DNA, 579 bp, Homo sapiens
cctatcacaccttcaatcatgtatcatagtctacaagtaaaagtcaaaatgctttattrccaagaacatccacttatctttctacatcagtcatagcccaccccttagcacctttcctctgtccatagcaaaccccactgtcctctacctgtaccttctaccctttcctacccctattccccatttcttccaggagagcctcctcccatcactgcacatcagatgtgctgcagcctttgcaggtgtggaagaagggccatttctgtcttgatattcaagttggttgtctatccctcctgtaattctccatcaccttttctgtgcctctcatgaactcacagcactttggatagaggaagctctctgctctctacttaatgagtaaacaagtgagtgcatttataatactgtgtataggatgcattcaacacaatgtggcttaccctgcatcattgggacatgaaataaaacgtgtaagtgagttatccagggatcttaaatgtaatagcacttaaactattcaactattttatgaaaatgtttctaaaatgagttaaaaatgcctctgccctcttaacc

SEQ ID NO: 231671 - DNA, 471 bp, Homo sapiens
tgttttacttctgtgcaacmtgcatctttgaaattattattgaaagtaaaatatttattttctttaaaaataaagataagtgggaacttcagcttctagaaaaatgaagcagatgtacttttccctattttttcttctaaatacaactaaaaatcctgagtattatatacaaaacaaatatcagaaagctctgaaaggtggatggggagggaggaagatgggccaggagccaggagacctgacaaacaacacaatgatgagctatatggattttctttttgattcatgtatcccagactgaatgctggaaaagccagcaacctagaaatgcaaataggtacagacaaaaaagccttagcaaaaacctgctctctctagcaaacggacaaggtaaggggtggcctaccaagaaagaacacttttggtgaacaatcactccgctacagcatcacagaaaacgtggaagtccag

SEQ ID NO: 231672 - DNA, 471 bp, Homo sapiens
tgttttacttctgtgcaacatgcatctttgaaattattattgaaagtaaaatatttattttctttaaaaataaagataagtgggaacttcagcttctagaaaaatgaagcagatgtacttttccctattttttcttctaaatacaactaaaaatcctgagyattatatacaaaacaaatatcagaaagctctgaaaggtggatggggagggaggaagatgggccaggagccaggagacctgacaaacaacacaatgatgagctatatggattttctttttgattcatgtatcccagactgaatgctggaaaagccagcaacctagaaatgcaaataggtacagacaaaaaagccttagcaaaaacctgctctctctagcaaacggacaaggtaaggggtggcctaccaagaaagaacacttttggtgaacaatcactccgctacagcatcacagaaaacgtggaagtccag

SEQ ID NO: 231673 - DNA, 471 bp, Homo sapiens
tgttttacttctgtgcaacatgcatctttgaaattattattgaaagtaaaatatttattttctttaaaaataaagataagtgggaacttcagcttctagaaaaatgaagcagatgtacttttccctattttttcttctaaatacaactaaaaatcctgagtattatatacaaaacaaatatcagaaagctctgaaaggtggatggggagggaggaagatgggccaggagccaggagacctgacraacaacacaatgatgagctatatggattttctttttgattcatgtatcccagactgaatgctggaaaagccagcaacctagaaatgcaaataggtacagacaaaaaagccttagcaaaaacctgctctctctagcaaacggacaaggtaaggggtggcctaccaagaaagaacacttttggtgaacaatcactccgctacagcatcacagaaaacgtggaagtccag

SEQ ID NO: 231674 - DNA, 471 bp, Homo sapiens
tgttttacttctgtgcaacatgcatctttgaaattattattgaaagtaaaatatttattttctttaaaaataaagataagtgggaacttcagcttctagaaaaatgaagcagatgtacttttccctattttttcttctaaatacaactaaaaatcctgagtattatatacaaaacaaatatcagaaagctctgaaaggtggatggggagggaggaagatgggccaggagccaggagacctgacaaacaacacaatgatgagctatatggattttctttttgattcatgtatcccagactgaatgctggaaaagccagcaacctagaaatgcaaataggtacagacaaaaaagccttagcaaaaacctgctstctctagcaaacggacaaggtaaggggtggcctaccaagaaagaacacttttggtgaacaatcactccgctacagcatcacagaaaacgtggaagtccag

SEQ ID NO: 231675 - DNA, 526 bp, Homo sapiens
aattccaaaaaaatgttcaagtgaaacacaggaggtcaggaaacagaaaacaaaaatgaaaaacagtgggagaatcagaaataaaataaagtggcaaatgtaatgcctaataagccaataataattttaaatgtaaatggtgtacatacaccaattaaaagacccagacattggcaaagtagatttaaaaatatcacccaagtatattttgtccataagaaatttacttcaaatataacaaagtacgtaagttgaaagtaaaggatgraaaaaggtatcttatgcaaatatttatcaaagaaaatcagagtgaagaaaattaccagtgacagagagcaacattgtataacaatgaaaaagtcaatctactaaaaagacatagtaatcctaaatgcataggcagcaaacaatagagctgcaatatgtaaagtaaaagtttatagaactgaaaggagaactaggcaaatccacaattttcactggacattaacacctctctcaataatttataaaacaactaggcaga

SEQ ID NO: 231676 - DNA, 526 bp, Homo sapiens
aattccaaaaaaatgttcaagtgaaacacaggaggtcaggaaacagaaaacaaaaatgaaaaacagtgggagaatcagaaataaaataaagtggcaaatgtaatgcctaataagccaataataattttaaatgtaaatggtgtacatacaccaattaaaagacccagacattggcaaagtagatttaaaaatatcacccaagtatattttgtccataagaaatttacttcaaatataacaaagtacgtaagttgaaagtaaaggatggaaaaagrtatcttatgcaaatatttatcaaagaaaatcagagtgaagaaaattaccagtgacagagagcaacattgtataacaatgaaaaagtcaatctactaaaaagacatagtaatcctaaatgcataggcagcaaacaatagagctgcaatatgtaaagtaaaagtttatagaactgaaaggagaactaggcaaatccacaattttcactggacattaacacctctctcaataatttataaaacaactaggcaga

SEQ ID NO: 231677 - DNA, 552 bp, Homo sapiens
ctccccaacaaaaagaccccaaaagcctaatgcacaagccactcgtaacctaggagaggggaatgcaggactggctgtctgtctagttttcagtcagggacttctatacgtggttgttgtcttaaagtcattgggccaggtgcggtggctcatgcctataatcccagcattttgggaggctgtggcgggtggatcatttgaggtcaggagttcgagaccagcttggccaacatggtgagaccctgtctctatgaaaaatataaaaatcagctgggcatgatagtacatgcctgtaatcccagctactcgggaggctgaggcaggagaattgcttgaatctgggaggtggaggttgcagtgagccaagatcrtgccgctgcactccagcctgggtgacagagtgagactgtctcaaaaaaaaaaaaaaaaaaaaaagtcattggggtaggaattccttagtccgtgggacagtgaggggagtaggaaaggttcatgcacttggtaggagtttggccagtcagctacctccaccccttcacctctctcaccaga

SEQ ID NO: 231678 - DNA, 404 bp, Homo sapiens
ttgcttcctttcttttttttttttgagayaggttcttgctctgtcatccaggctggagtgcagtggaggtgcagcctttaactcctgggcttaagtgatcctcctgcttcagcctcccaagtatctgggaccacagatgtgcctcaccatgcccagctaatttttaaattttttgtagagacagaatctcactatgttgcccaggctgatctcaaactcctagcctcaagtgatctgcctgcctcggccttccaaaatgttgggattacaggcgtgagccactgcgcccagcctgctctgtttctttattccttcttccctgaggtgatctattaaaatattactggtttctgttttttccactggtagttttttcagactcctgttagttaaatgttagatct

SEQ ID NO: 231679 - DNA, 404 bp, Homo sapiens
ttgcttcctttcttttttttttttgagacaggktcttgctctgtcatccaggctggagtgcagtggaggtgcagcctttaactcctgggcttaagtgatcctcctgcttcagcctcccaagtatctgggaccacagatgtgcctcaccatgcccagctaatttttaaattttttgtagagacagaatctcactatgttgcccaggctgatctcaaactcctagcctcaagtgatctgcctgcctcggccttccaaaatgttgggattacaggcgtgagccactgcgcccagcctgctctgtttctttattccttcttccctgaggtgatctattaaaatattactggtttctgttttttccactggtagttttttcagactcctgttagttaaatgttagatct

SEQ ID NO: 231680 - DNA, 485 bp, Homo sapiens
catgaaaattaagaactatccaaactattgaacctctattagctgtctgtttccccccacaacctccactccttgtgcaaatcatattcaacccattcgtgataatgttctcactggcacgcctggaaactattaaaaacagatgtccagaccacactgcagacatctgggatggarcaactctggtggggtcataaacatgtctctgtgcgtggaggataagcccccttcaggtgtctgtttagggtcttcttataataccaaatatgtaacttccaaacgagaaactagaggcagcttgcatttgcatttactttggcattttttttcttatttttaagtttgctttcacggattctgaaacgtaaactcttatcttgagctgctgaggccttcataaagattacagtgagaccacacatttatacattgaaactggagattcgacttgtgtatgttacccaccctggaaacaccagatccta

SEQ ID NO: 231681 - DNA, 485 bp, Homo sapiens
catgaaaattaagaactatccaaactattgaacctctattagctgtctgtttccccccacaacctccactccttgtgcaaatcatattcaacccattcgtgataatgttctcactggcacgcctggaaactattaaaaacagatgtccagaccacactgcagacatctgggatggagcaactctggtggggtcataaacatgtctctgtgcgtggaggataagcccccttcaggtgtctgtttagggtcttcttataataccaaatatgtaacttccaaacgagaaactagaggcagcttgcatttgcatttactttggcattttttttcttatttttaagtytgctttcacggattctgaaacgtaaactcttatcttgagctgctgaggccttcataaagattacagtgagaccacacatttatacattgaaactggagattcgacttgtgtatgttacccaccctggaaacaccagatccta

SEQ ID NO: 231682 - DNA, 614 bp, Homo sapiens
tttttcaatttgttgcaaatctcaaaaaaaaattctaatatatttgttggaaaaaatctgcaaataaacggacccacgaagttcaaacacatgctcaaggacgctgtacctattttacagataagttagaacctgatcaggattccttatttaagacatacttactttatttcttaattatgaaaacagtatttgccrtaagttgatttcatttgttcagatatcagtgtgttgtaaaattattcttacccctagaaacaagaatttaagagccatctcctatcaattacatgaaaacccaggaaaaatcataagcaaattcccgctgctattattaacacctctcattgatctaacgagtattatctactgtaacatgtccccctcctgcctcaagcttctgagctgtatcctgcctccaagagcgtatgtcacattgagaaataccaacagatttaaacagatttaacaagacttaattaagaagttcgaaagtctttcctaaaatttagatgctgtcttccaaagtcaaaccaaaatcattgctcatgtctgtactgatgactttctcaccagtgtgtgcaagttagagcccactggaattctcctacatt

SEQ ID NO: 231683 - DNA, 546 bp, Homo sapiens
ttgccactctaaattattattgatatagcttgattaatatctatcatattactatgttctatttcttgatcttattctttgttcctagttttatcttccactctttttctgccttttgtgatttgagcattttttccattttctatttttcttgcatattagttcctcttcctctttttcttcttcatcttccttgtcctcctcttcctcctcctcctcttctccttcakctctcttcttcttattttactttttatggtggttgccctaaaccttctactatacatttacaactaatttaaatctaccttcaaataacataccaattcacaggtagggtagtgcgaatactttataacaataaaataatcctaattcctccctctgatcccttgcatcattgctgtcatttatttcacttctatgtgagcacatatatatgtgtgtatattatattaatatatacacactcaagatatgtgagtaatatggaaacacacatattcaaatacattgttgctattatcatttagaacagtcatctgt

SEQ ID NO: 231684 - DNA, 546 bp, Homo sapiens
ttgccactctaaattattattgatatagcttgattaatatctatcatattactatgttctatttcttgatcttattctttgttcctagttttatcttccactctttttctgccttttgtgatttgagcattttttccattttctatttttcttgcatattagttcctcttcctctttttcttcttcatcttccttgtcctcctcttcctcctcctcctcttctccttcagctctcttcttcttattttactttttatggtggttgccctaaaccttctactatacatttacaactaatttaaatctaccttcaaataacataccaattcacaggtagggtagtgcgaatactttataacaataaaataatcctaattcctccctcygatcccttgcatcattgctgtcatttatttcacttctatgtgagcacatatatatgtgtgtatattatattaatatatacacactcaagatatgtgagtaatatggaaacacacatattcaaatacattgttgctattatcatttagaacagtcatctgt

SEQ ID NO: 231685 - DNA, 537 bp, Homo sapiens
tcctggcgtcagcctaaaattcattccacacacccaacactaaaagtaagtgctaagtaaaggagatccagccacaggaattagaaaagagagggacagaggctgcagccaaacttccttcaccacctaatagtcaaaaagaaactayatatcaggtctttttaaatctattcttgagaatcaatcctattttcttttctttttctttttctttctttttttttttttttttttttttttttttgagatgtagtctcgctctgtcacccaggctggagtgcagtggggcagtcttggctcactgcaacctccgcctcccgggctcatgccactctcctgcctcagcctgaattaatcctatttcaaatttcatactttcttttccccaggctagagccattagctgggctgctttgggggtcagcagtgttgaggattctgactctgagacattcccgtgtccatgctcagccctagctctcaggtatccaaaacagggagaagggacaaaggagaaagcaaaatcttcatgtgctc

SEQ ID NO: 231686 - DNA, 537 bp, Homo sapiens
tcctggcgtcagcctaaaattcattccacacacccaacactaaaagtaagtgctaagtaaaggagatccagccacaggaattagaaaagagagggacagaggctgcagccaaacttccttcaccacctaatagtcaaaaagaaactatatatcaggtctttttaaatctattcttgagaatcaatcctattttcttttctttttctttttctttctttttttttttttttttttttttttttttgagatgtagtctcgctctgtcacccaggctggagtgcagtggggcagtcttggctcactgcaacctccgcctcccgggctcatgccaytctcctgcctcagcctgaattaatcctatttcaaatttcatactttcttttccccaggctagagccattagctgggctgctttgggggtcagcagtgttgaggattctgactctgagacattcccgtgtccatgctcagccctagctctcaggtatccaaaacagggagaagggacaaaggagaaagcaaaatcttcatgtgctc

SEQ ID NO: 231687 - DNA, 508 bp, Homo sapiens
tctttgtaatttggaccacatttgtggaatgagcattgccttcgagacgtgaccttggctagttatgcatgggagtagccatagtaaaatccttcttcggtgaagtaatagtgtaacataatatgcacagtctactgtatttttcaacctacccaaagcaattttctcttttcagtaagttatgctgygcttatttacatacgatcattatattccttgccaagataatgtaaatatgaagaataactaacaggcattttaattaaaggttttgtaattttaagtcaatacaggcagtataggtagtggttgagcgcgtggtctctggctcattatctcatctctgccatttgccaaagatgtgaacttgaacaagtcacttaaatgctcaatgccttagtttcttctatttaaaataagaatgatcccaatagaacctttctcctgaacatgttgtaaatattgaatggttaactgtatgatgtagttaaaataatgcctggcatgt

SEQ ID NO: 231688 - DNA, 574 bp, Homo sapiens
ctgttcacaatagcaaagacttggaaccaacccaaatgcccatcaacgatagactggataaagaaaggtggcacatatacaccatggaatactatgcagccataaaaaaggatgagttcatgtccttttcagggacgtggatgaggctggaaactgtcattctcagcaaactaacacaggaacaaaaaaccaaacacagcatgttctcactcataggkagttggacaatgagaacacatggtcacagggaggggaacaccacacaccggggcctgtcatgggatgggggactaggggagggataataacaggagaaatacctaatgtagatgatgggttgataggtgccacaaacaaccatggcacatgtatacctatgtaacaaacctgcactttctgcacatgtaccccagaacttataataactaaaaaaaaaaaaaactcataaaatttttaatacaagagaacttcttcaacttcataagtcctaccaaaagtctgttgtatgtactaatataattattttagggcattccctttaattaagggaaaagatacgatgatcatcaatatc

SEQ ID NO: 231689 - DNA, 421 bp, Homo sapiens
tgaagtgatgcctcaccctgcttcggctcacactcagtgggctgcacccactgtcctgcccccactgtccgatgaaccccagtgagatgaacctggtamctcagttggaaatgcagaaatcacccatcctgcatcgctcatgctgggagctgcagactcagtaatctgttcttgatcacagaagtcagaaatggaaatacacatttgggaatcatgaatatatagatgataattaaaacaaggacgttcctaggcttctctttctttacagcaactgaaaaagggcactcagaaacatctattttctttaccagctttacagaacaccttccacactgaataacttgtcctaatacttctttcttcaaattttcaaagaatatctcttcaccttccaataatatttactgataaaggaatt

SEQ ID NO: 231690 - DNA, 421 bp, Homo sapiens
tgaagtgatgcctcaccctgcttcggctcacactcagtgggctgcacccactgtcctgcccccactgtccgatgaaccccagtgagatgaacctggtacctcagttggaaatgcagaaatcacccatcctgcatcgctcatgctgggagctgcagactcartaatctgttcttgatcacagaagtcagaaatggaaatacacatttgggaatcatgaatatatagatgataattaaaacaaggacgttcctaggcttctctttctttacagcaactgaaaaagggcactcagaaacatctattttctttaccagctttacagaacaccttccacactgaataacttgtcctaatacttctttcttcaaattttcaaagaatatctcttcaccttccaataatatttactgataaaggaatt

SEQ ID NO: 231691 - DNA, 456 bp, Homo sapiens
ttatgagaatctaaatagtgcctgatgatctgaggtggaacagtttcatcctggaaccatccccctgtccctggaaaaattgtattctacaaaaccagtccctgaggccgggcacgagtgactcacatctgtaatcctagcactttgggaggccgaggcaggtggatcacctaagrtcgggagtttgagaccagcctgaccaacaaggagaaaccctggctctactaaaaacacaaagttagccaggcgtggtggcacatgcctgtaatcccagctactcgggaggctgagacaggagaatcgcttgaacccgggaagcggaggttgcagtgagccgagatcgtgccactgcactccagcctggcaacagagcaagactccacctcaaaaaaaaaaaaaaaaacacgccggtccctggtgccaaaaaggttgggaactgctgttttaaaggactta

SEQ ID NO: 231692 - DNA, 470 bp, Homo sapiens
gatctgaggtggaacagtttcatcctggaaccatccccctgtccctggaaaaattgtattctacaaaaccagtccctgaggccgggcacgagtgactcacatctgtaatcctagcactttgggaggccgaggcaggtggatcacctaaggtcgggagttkgagaccagcctgaccaacaaggagaaaccctggctctactaaaaacacaaagttagccaggcgtggtggcacatgcctgtaatcccagctactcgggaggctgagacaggagaatcgcttgaacccgggaagcggaggttgcagtgagccgagatcgtgccactgcactccagcctggcaacagagcaagactccacctcaaaaaaaaaaaaaaaaacacgccggtccctggtgccaaaaaggttgggaactgctgttttaaaggacttagtgatttaactttttgttcagataggaaatagataaaatg

SEQ ID NO: 231693 - DNA, 563 bp, Homo sapiens
ataatgtttaatattttggagcttaaaaataaggtttgagtggaaactttatgtgcacatagaaacctgtacatgaatgttcrtaacagctttatttgtaagagcaaatactggaaatccaaatgtctttcaatgggtgaataattgaaccatggaatattactcaacaataaaaaagaataaactgttgttacatgtaacaacccagaaggttttagagggcagtatgctgagtgaaaacaaaaaatgtcaatttcaaaaggttacattctgtacaactccatttataaacattctcaaaatgacaatggagaacaaattagtggttgccagggatcagagagtgtaaatataaaaaaatagcatgatggagttcttaggctgatgggacagtttggtatttgattgtggtgataattacatgaatctatacatgggattaagttgcaccaaactagacacacacacacacacacacacaagcaaaggcacacacacagacaagcacagtcatatgtcatttaacaacagggatacattctgagaaatgtgaacatcataga

SEQ ID NO: 231694 - DNA, 563 bp, Homo sapiens
ataatgtttaatattttggagcttaaaaataaggtttgagtggaaactttatgtgcacatagaaacctgtacatgaatgttcataacagctttatttgtaagagcaaatactggaaatccaaatgtctttcaatgggtraataattgaaccatggaatattactcaacaataaaaaagaataaactgttgttacatgtaacaacccagaaggttttagagggcagtatgctgagtgaaaacaaaaaatgtcaatttcaaaaggttacattctgtacaactccatttataaacattctcaaaatgacaatggagaacaaattagtggttgccagggatcagagagtgtaaatataaaaaaatagcatgatggagttcttaggctgatgggacagtttggtatttgattgtggtgataattacatgaatctatacatgggattaagttgcaccaaactagacacacacacacacacacacacaagcaaaggcacacacacagacaagcacagtcatatgtcatttaacaacagggatacattctgagaaatgtgaacatcataga

SEQ ID NO: 231695 - DNA, 467 bp, Homo sapiens
aaaattttgatttagatctgattaagacctttaatatctgaagatgaatatttccttttagatcaaagtaactagaaaagttatgaacccaacctaaaatgtcatcaaggggaggagaaaggattgtcaatttcatgtcctaaaggcagggataagaaaggaataacatttctttcagattgtacactactgaataccattcatcaataattcaattacagaaacataagtatctgtataataaccatatcatgctgttttatatctgtagataatcacaggttacagatagaaagtagcttacaagaattataaggatttataaatgtttatctcttaatcttttaaaaatgtagtttcggctttctgcaatgtataataatacatataccatsaattctaaacatattactaggcacaaagatgtttataaaatttttatgggtttctcaacatttatttcatca

SEQ ID NO: 231696 - DNA, 607 bp, Homo sapiens
aaacccttctgcatgggtttaatatggacaaaaaaattttaaggtgcttatttcatttggtcttggttgatcttatcaaggaaccctccttttgtcctctgcctcccacttggtctagaatacctctctagacaccatcaaaatcccttctcagattaaatgaaagaaaatcatggccaacatagagtcaactcttacatcacacttttcaactacaatacaaatttcactaattcaatctaattagtgggagaccaatctcaccataatagttcaactgtctcactatatttatgcaagtgcagtttttctacttctcaatagatgtcatggctataatatggtaaagttgactctgaagactacattgaaaatgacatcatcacttcagatgcaaattcaagcatgccatcaggatgggtgtttcttggaatttcccagtttcactcagatactaccttcactgttatttgccatagtttttatctacctattytatttccttaatttaaaaaaatcagtttatgtttattaaatatgactatttaaaaagacaagtatataccactgtcataagtcaatagccagttatcatttcctctatata

SEQ ID NO: 231697 - DNA, 593 bp, Homo sapiens
ggatattcaacccatatatcactcaatgataaacatttcaatcattcaagtcaataaatattattgagtgtcccctataagtttggcttttttcctaagaattgctaatacaaactccctgccccactggtgcctacattcttgtcaggggacrcaggcaatacacaaataaaccatacataacttatataatatataaatacatatatatgtgcacacacatacacagttatgtacacatatacatatcagatggtgtcaaggatggccttattgataagtgacatttgagaagaaacccaaaggaggtatgggagagcaccaagcacacatatccaagtgaagagcttgtcaaggcaaagaaatagtaagtgcaaaggtcctgaggctatttggtacttggtttgtttaagaacgttcaggaaggacagcagaattcaccagagtgaaacaggaagaaaatggtgggagatgagctcagagagtaacagtggggaggggatttgaaggtcaaattgaggtctgtggatttcattccaaaagatgagaagttcttgggaaaggtgacaggatctgacctttttctaaggatc

SEQ ID NO: 231698 - DNA, 593 bp, Homo sapiens
ggatattcaacccatatatcactcaatgataaacatttcaatcattcaagtcaataaatattattgagtgtcccctataagtttggcttttttcctaagaattgctaatacaaactccctgccccactggtgcctacattcttgtcaggggacacaggcaatacacaaataaaccatacataacttatataatatataaatacatatatatgtgcacacacatacacagttatgtacacatatacatatcagatggtgtcaaggatggccttattgataagtgacatttgagaagaaacccaaaggaggtatgggagagcaccaagcacacatatccragtgaagagcttgtcaaggcaaagaaatagtaagtgcaaaggtcctgaggctatttggtacttggtttgtttaagaacgttcaggaaggacagcagaattcaccagagtgaaacaggaagaaaatggtgggagatgagctcagagagtaacagtggggaggggatttgaaggtcaaattgaggtctgtggatttcattccaaaagatgagaagttcttgggaaaggtgacaggatctgacctttttctaaggatc

SEQ ID NO: 231699 - DNA, 564 bp, Homo sapiens
aagggagactggggggagattttaaacaaccagagatcacaatagttcactcaccactatcacaagaacagcacccagtggatcacctgaggtcaggagtcccagaccagcctgaccaacatggtgaaaccccgtctccactaaaaatacaaaaaattagctgagcgtggtggcgggcaactgtaattccagctattcgggaggctgaggcaggagaatcccttgaactgggagacagaggttgcagggagtggagatagcaccactgcactccagcctggtcagtagagtgagactccgtctcaaaaaaacacacaaaaaaagaacagcacccaggggatggcgctaaagcattcatgagaaatccgcccccatgatccagtcacctcccaccaggccccacctccaacaatgggggctacatttcaacctgacatttgggtagggacatacatttaaaccatatcagtgagttasagcaattcaacttggtctaccttgcagaaacaatgttcagtgtgaacccatgcaaagaatagcaataaagcaagccaaagaattcta

SEQ ID NO: 231700 - DNA, 554 bp, Homo sapiens
tgctggtccttcttaccaactttcccaggatgtattttttatggctagctcaaacacttctctcaaatgtaatagagggccttcacagctgagtttcagggtttggagagaattaaaacctttttcctgacacagactctcaatgttaccaggaagatgctatagaaaagctccacagcatcttgaagaatatgctgtctttttgacaacaaagccatttgtggcctatggcctactatacccaagacgcttcccctagccctctgacatacaggtctggggttgcggattagtgaatggggtaagaagggcacactaaaagaaaaatattatagtgttatatgttctacttagtttgaaaacaggttggtattgctttaagaaacaataatgtacccaagaggttctctcacttacgtgataccctgagtatctgggtcttgggaaaccattccgagtgaagacaacacctggtgtgctgcatgtaacagaaaggtctcagcaggtgcytgaatcagacatgaaccacctttctctcttctgggatatgaact

SEQ ID NO: 231701 - DNA, 519 bp, Homo sapiens
atgaagtgggtggtagatatcttcaataggacagatggatcatctggagctccgtgtgtgtgttgtggcgggagggaagggggatctggggatctggggttatttatttatttttggggaggagagaatggcttggcacaattaattkttaaactcactttggcatatggtgcagccgggaagaaaaggcagcctcaaaatagagaacagagcaaatggtaatgcctaaaaatgtagaaggctaggaaaagagcttgttaaggatacaaatcataaatggtttcaaatcaccatgtgaaagtgtaagaaaaagctagtacctctttgaaggcccacagaagggactgcagaactcatgaactagatggaaacaaagtcagaccagcataggctgaagaacgcgggccaaaggaaacatcacacaaggttccttgaccatcccccattcctgctttcattcatatccttcccaaaatgctgttccagttccccttcaggtctacccctctgtgatgcctt

SEQ ID NO: 231702 - DNA, 581 bp, Homo sapiens
aagatgcatgtttttcttctgaaggtgatgccaaacacttttccaaagtgagttgttcagtttatactcccaccagcaatgtaggagaattgcagttgtttcacatccttgacgatacttagtattgtcagaccttctaattttacccatgctgatagacatataaaagtttgtaaataaagttttattgaaatggtgtctcatttgaggttttaatttgcatttcactgatgactaatgaaagtgagacttttttcatatgcttattgaccattctggatatgctgttttgtgaagtatacacctatgtgaagtatggcttatctgcctttttcttattgatttgtaggagttcctttttcakatttttttttagagacaggttctctctctgccactcaggctggagtgcagtggcacgatcatagctcaatgcagcctccaactcctgggctcaaacaatcctcccacctcagccttcagagtagctgagactacagatgagtgccaccacacccagctaattttgttttatttatttatttttaattttttaggataggatctggctatgttgcccg

SEQ ID NO: 231703 - DNA, 581 bp, Homo sapiens
aagatgcatgtttttcttctgaaggtgatgccaaacacttttccaaagtgagttgttcagtttatactcccaccagcaatgtaggagaattgcagttgtttcacatccttgacgatacttagtattgtcagaccttctaattttacccatgctgatagacatataaaagtttgtaaataaagttttattgaaatggtgtctcatttgaggttttaatttgcatttcactgatgactaatgaaagtgagacttttttcatatgcttattgaccattctggatatgctgttttgtgaagtatacacctatgtgaagtatggcttatctgcctttttcttattgatttgtaggagttcctttttcatatttttttttagagacaggttctctctctgccactcaggctggagtgcagtggcacgatcatagctcaatgcagcctccaactcctgggctcaaacaatcctcccacctcagccttcwgagtagctgagactacagatgagtgccaccacacccagctaattttgttttatttatttatttttaattttttaggataggatctggctatgttgcccg

SEQ ID NO: 231704 - DNA, 606 bp, Homo sapiens
cttgattgtaatcaatatctgaagtcccattttgattgccagctccacaaacatatattagggcagaaactagatattcttttctatcttattaaaattgcagtggaaagctcatttgtccctaagattttcattgacattcccttataccatatgaagatcacaatacactctttcaaatgtttttagtaaacaggccagttagattaaggaagaaagcttaaagtcagtattcataaaactattaaaatgtttcctgataaggtgttaatatcgaaaatatataagaaactcctgcaattcaatagcataaaagcaaaagccctattaaaaatgggcaaaggacttgaacagacacaatggccaacaggtatataaaaggtgctcagcatcactaattatcagagaaatgcaaatcaaaaccacaaggagatatcactttacacctgtaataatggctcttatctttttttttttaagaagagaagtgttggtgaggatgtggagaaaaggaaaccctggtacactctttctagaaatgtaaattggcagtctttatggacagtatgggagttcctsaaaaaattaaaaatagggctaccatat

SEQ ID NO: 231705 - DNA, 517 bp, Homo sapiens
cagttgttcctgtggtttcagctgaaatagagcagttatcctctctagggtttttggcttgctatattgcacctttcctgcttttaaaagagcacaagcttttgttgaggctattttttctgtgtccattggcattttcaggtttccagccttttcagctccaaatatgggctatgtaaggcaaaaaggatacccagggactcctcaccactctgccgttcttttggtactgatatccctcactgtctcagaaacttctgggttttttggctrtaaaattctagttgtacttagcagaaaaaaaaatacagaaaacacatcacctccatcttctttttaaaaattgatttctacttttccagaaaataggagaggtaggaacacatcccaaatcattctacgagaccagtattaccttgatagcaaaaccaaagacatcgcaagaaaagaaagagaccaatattcattatgtacatagatgaaaaatcctcaacaaaatacttacaaactaaatcca

SEQ ID NO: 231706 - DNA, 517 bp, Homo sapiens
cagttgttcctgtggtttcagctgaaatagagcagttatcctctctagggtttttggcttgctatattgcacctttcctgcttttaaaagagcacaagcttttgttgaggctattttttctgtgtccattggcattttcaggtttccagccttttcagctccaaatatgggctatgtaaggcaaaaaggatacccagggactcctcaccactctgccgttcttttggtactgatatccctcactgtctcagaaacttctgggttttttggctgtaaaattctagttgtacttagcagaaaaaaaaatacagaaaacacatcacctccatcttctttttaaaaattgatttctacttttccagaaaataggagaggtaggaacacatcccaaatcattctacgagaccagtattaccytgatagcaaaaccaaagacatcgcaagaaaagaaagagaccaatattcattatgtacatagatgaaaaatcctcaacaaaatacttacaaactaaatcca

SEQ ID NO: 231707 - DNA, 459 bp, Homo sapiens
gaggtgaagataatgagggctgagagagggagaccatacgcagggcactattggatatctgtctgctttaaaggtttctaacccacgagctacactccaccttctactctgagcagatctctcagaggcacacagcgggaactctattctaatgaccctgtccatgcccaaagtacccagtaggaccattaacttcattgatcctcttacgatgatcaaaggaggttatgaggaggaaggggctaggagagagacattacaaagctctgtttctgagtggtgtactgtctgtttctttcctccagacagtgataagtagagacatgatcgctgctcaagttaacaatakgtactgagctcccaattgagaggtcaagagctctggtgtagaagtcacacagactgggtttgaatcccagctcttccgcagcttaccaggcatgggacccaggcaagatg

SEQ ID NO: 231708 - DNA, 567 bp, Homo sapiens
aagggcaataatcctaaggactagtggaaaataagaaaaaagagcttttgaatgaaatttgagagaaaatgggaaatcaaggagctgatagattgttctgagggtaggaaaccagtcaygattagatgcttaagatctacagattgggagcttgtcaatagtgttttaaaggaagacagagaagttcataggaagagcattcacttctacatgtgaaattcaggggaagcctattcttctccttaggtgtgcatgtctatgtaaatgtacatgcacagtgcatatgtaacatgcatcagaattaacattcattcagtactcactatgccttaggctctgttaccctctatgtatgtgttttcctatttagttcccgtgactgccgtatggtatagctacttttattaccttcattttacagtacagttaagcagttaggaaataaggtcaatgtcacacagctagaaagtggcaacatttggattgcgtatgtgtgtgtgcgtgaacatacatttccaacattttggcctcttaaatccttaacatcatatcaaattgggagaattc

SEQ ID NO: 231709 - DNA, 568 bp, Homo sapiens
gaattcaaatggttaaaaatcaaagggcaataatcctaaggactagtggaaaataagaaaaaagagcttttgaatgaaatttgagagaaaatgggaaatcaaggagctgatagattgttctgagggtaggaaaccagtcatgattagatgcttaagatctacagattgggagcttgtcaatagtgttttaaaggaagacagagaagttcatakgaagagcattcacttctacatgtgaaattcaggggaagcctattcttctccttaggtgtgcatgtctatgtaaatgtacatgcacagtgcatatgtaacatgcatcagaattaacattcattcagtactcactatgccttaggctctgttaccctctatgtatgtgttttcctatttagttcccgtgactgccgtatggtatagctacttttattaccttcattttacagtacagttaagcagttaggaaataaggtcaatgtcacacagctagaaagtggcaacatttggattgcgtatgtgtgtgtgcgtgaacatacatttccaacattttggcctcttaaatccttaacat

SEQ ID NO: 231710 - DNA, 629 bp, Homo sapiens
atttaactgcgtttttttgtataagtttttctcagacaacaatttcagaacactaaacttgtcattacaaaatggtcaaatatttaatattcttggattttggtggaagaaaaatatgtcaattcatatataaaatgttagcaaggcttaattttgggtaatttctggatgttacctaaatatataaaagttccatcatttcttcctgtgctctaatgaatcgtaagggttgtgcacagactattttacagccactcctctaatagttgagagaagtgcaactttccctacctgttgggaagccaggaaatttctacaaataagacggcatgcaatggccaggtttggatcctctcttcttcctctgatgaggaaagtatgtcacaaaagatgatgggtactcaaycttctctctccagcctgcgtttatctcactgaacacccaaactccagtccacaatgaggtcatttccttcttaccgtctacaacacttactcccatcctatctcttccccttccctgcgccttgtcccccaacccccaattctacttaggttctcaagatctcaatgcgttggaaataccttcccaaactttcatttgctcttcacattcctttctaattggg

SEQ ID NO: 231711 - DNA, 629 bp, Homo sapiens
atttaactgcgtttttttgtataagtttttctcagacaacaatttcagaacactaaacttgtcattacaaaatggtcaaatatttaatattcttggattttggtggaagaaaaatatgtcaattcatatataaaatgttagcaaggcttaattttgggtaatttctggatgttacctaaatatataaaagttccatcatttcttcctgtgctctaatgaatcgtaagggttgtgcacagactattttacagccactcctctaatagttgagagaagtgcaactttccctacctgttgggaagccaggaaatttctacaaataagacggcatgcaatggccaggtttggatcctctcttcttcctctgatgaggaaagtatgtcacaaaagatgatgggtactcaaccttctctctccagcctgcgtttatctcacygaacacccaaactccagtccacaatgaggtcatttccttcttaccgtctacaacacttactcccatcctatctcttccccttccctgcgccttgtcccccaacccccaattctacttaggttctcaagatctcaatgcgttggaaataccttcccaaactttcatttgctcttcacattcctttctaattggg

SEQ ID NO: 231712 - DNA, 416 bp, Homo sapiens
agtggacctgaacatttctagtggcaataatttttgtttattctttatttaaataactccttcagttagtttagggcagtggttttcagcagagatagttttgctcccaataggacatttgtcaatgactggagacatttaggtcacaagctggggarctgatagtggcatccagtggatgaaccacggatcctgctaagcattccataacgcacaaaatatccccttcaacacacacacacacacacacacacacacacacacacaccccaaatgagatgcatcagaacccccaccaagcatggaaataaaggaaaaattctgaggcccttcaagggagagagaccctgaaaaggctattatccatgtacggagagtggataacaaataaatattgaaaacaaccatatgccagt

SEQ ID NO: 231713 - DNA, 479 bp, Homo sapiens
tccataacgcacaaaatatccccttcaacacacacacacacacacacacacacacacacacacaccccaaatgagatgcatcagaacccccaccaagcatggaaataaaggaaaaattctgaggcccttcaagggagagagaccctgaaaaggctattatccatgtacggagagtggataacaaataaatattgaaaacaaccatatgccagtaaaattggcattgacaaataattctacactaggaattctccactttggcgctgctgacatttgaggcagtgctttgtgttactgaactggactcaggtccgcttgcctggcacagtcaagccaaacaccaacgcttaggtttgcagcaagaaaaagaagggtgtttatttacaggcacaatctgataagaagmatatagtgataatttaaaaaacagcctcccaagcaagtcagagtcaccaggtgttttggttccctatagaaat

SEQ ID NO: 231714 - DNA, 479 bp, Homo sapiens
tccataacgcacaaaatatccccttcaacacacacacacacacacacacacacacacacacacaccccaaatgagatgcatcagaacccccaccaagcatggaaataaaggaaaaattctgaggcccttcaagggagagagaccctgaaaaggctattatccatgtacggagagtggataacaaataaatattgaaaacaaccatatgccagtaaaattggcattgacaaataattctacactaggaattctccactttggcgctgctgacatttgaggcagtgctttgtgttactgaactggactcaggtccgcttgcctggcacagtcaagccaaacaccaacgcttaggtttgcagcaagaaaaagaagggtgtttatttacaggcacaatctgataagaagaatatagtrataatttaaaaaacagcctcccaagcaagtcagagtcaccaggtgttttggttccctatagaaat

SEQ ID NO: 231715 - DNA, 538 bp, Homo sapiens
gcaagtttaatttgctctttgtctccaaacttcataaattggaagcatagaaattgacgtgggattttttttttttaaggtggaagctcagatatggttgggacccatattcttttcttacgtaagcatataaagctatttattttatttaagtacctctttagctgcgtctgcaaatgttatgttattttcattttcatttaggtcaatgttttttaactttctctgtgccctgcacaagttattcagtaatgtataactgaatttctatgtatttgggtatatttctaatatctttttgatttgatgtataattttttgtcagatagcataccctgtttgatatcagccctattctatttattgggacttgttttgtggttacttaaaaggaacatgtattctgctgttttggrtagcatattctataaatgtcgataaggtcaagttgattgatagcagtaggcaaatcttttgtatctttacttttcttctacttaaaaaaattatttcatgagacagttgttgaaatctccaa

SEQ ID NO: 231716 - DNA, 538 bp, Homo sapiens
gcaagtttaatttgctctttgtctccaaacttcataaattggaagcatagaaattgacgtgggattttttttttttaaggtggaagctcagatatggttgggacccatattcttttcttacgtaagcatataaagctatttattttatttaagtacctctttagctgcgtctgcaaatgttatgttattttcattttcatttaggtcaatgttttttaactttctctgtgccctgcacaagttattcagtaatgtataactgaatttctatgtatttgggtatatttctaatatctttttgatttgatgtataattttttgtcagatagcataccctgtttgatatcagccctattctatttattgggacttgttttgtggttacttaaaaggaacatgtattctgctgttttggatagcatrttctataaatgtcgataaggtcaagttgattgatagcagtaggcaaatcttttgtatctttacttttcttctacttaaaaaaattatttcatgagacagttgttgaaatctccaa

SEQ ID NO: 231717 - DNA, 538 bp, Homo sapiens
gcaagtttaatttgctctttgtctccaaacttcataaattggaagcatagaaattgacgtgggattttttttttttaaggtggaagctcagatatggttgggacccatattcttttcttacgtaagcatataaagctatttattttatttaagtacctctttagctgcgtctgcaaatgttatgttattttcattttcatttaggtcaatgttttttaactttctctgtgccctgcacaagttattcagtaatgtataactgaatttctatgtatttgggtatatttctaatatctttttgatttgatgtataattttttgtcagatagcataccctgtttgatatcagccctattctatttattgggacttgttttgtggttacttaaaaggaacatgtattctgctgttttggatagcatattctataaatgtcgataaggtcaagttgattgatagcagtaggcaaatcttttgtatctttacttttyttctacttaaaaaaattatttcatgagacagttgttgaaatctccaa

SEQ ID NO: 231718 - DNA, 475 bp, Homo sapiens
cttacaaaggacagactcgaaattaaacccagatctatttaacttcaaagcacgcatttgattaaggcatttatcttcatgactggagaaaactcaatttaactagatactagtttaggtccttcagccagggccacattamggaaacctcaaatcattaaatattagcaacctgagaaaataagatttgctccattagggccacatgaaagctacagataattaaagatgatttggtgtctgccttgctttctaggtttccatttgtgtatttagagtttcccttcttcagacagttttgcaggccgacttattagacggacagcatttttcaattattttcgtcactcttctgaatcctggtcaacaacctcctttggaaacactgacagtggtggagcatgggacatttcacttatatgaacaaatgtctcctggataatggaatgttgcagcttgaacataataacaaagg

SEQ ID NO: 231719 - DNA, 475 bp, Homo sapiens
cttacaaaggacagactcgaaattaaacccagatctatttaacttcaaagcacgcatttgattaaggcatttatcttcatgactggagaaaactcaatttaactagatactagtttaggtccttcagccagggccacattaaggaaacctcaaatcattaaatattagcaacctgagaaaataagatttgctccattagggccacatgaaagctacagataattaaagatgatttggtgtctgccttgctttctaggtttccatttgtgtatttagagtttcccttcttcagacagttttgcaggccgacttattagacggacagcatttttcaattattttcrtcactcttctgaatcctggtcaacaacctcctttggaaacactgacagtggtggagcatgggacatttcacttatatgaacaaatgtctcctggataatggaatgttgcagcttgaacataataacaaagg

SEQ ID NO: 231720 - DNA, 475 bp, Homo sapiens
cttacaaaggacagactcgaaattaaacccagatctatttaacttcaaagcacgcatttgattaaggcatttatcttcatgactggagaaaactcaatttaactagatactagtttaggtccttcagccagggccacattaaggaaacctcaaatcattaaatattagcaacctgagaaaataagatttgctccattagggccacatgaaagctacagataattaaagatgatttggtgtctgccttgctttctaggtttccatttgtgtatttagagtttcccttcttcagacagttttgcaggccgacttattagacggacagcatttttcaattattttcgtcactcttctgaatcctggtcaacaacctcctttggaaacactgacagtggtggagcatgggrcatttcacttatatgaacaaatgtctcctggataatggaatgttgcagcttgaacataataacaaagg

SEQ ID NO: 231721 - DNA, 456 bp, Homo sapiens
ctgtgaatggtaatcttgagcatgcttaaggaatatgctgagaccagtgtttcctatcccgacatatccccagtttgccatttaaataggctctgaaagtgtcacatcatagttggctggttttctcagctagrtttcaactagagagccaggataaggtaagcataatacaacaaccaagaaaagcaaagtgagagaagccagcacatatgcaacaagaagcggctggtctgcttgagggttgaacagggtgaagaggaagatgcactgcagtgcgttctgccaagtcctctgatgtatcatggaatagatgaagtggagaaccccttggctacatcaacttccgatgtggttggcttaattcagtgattatcatcaatggtttaaaatacttatctcagttaaatacctattgtttgaaacctatcgcttaactatcctagatcctggaactac

SEQ ID NO: 231722 - DNA, 456 bp, Homo sapiens
ctgtgaatggtaatcttgagcatgcttaaggaatatgctgagaccagtgtttcctatcccgacatatccccagtttgccatttaaataggctctgaaagtgtcacatcatagttggctggttttctcagctaggtttcaactagagagccaggataaggtaagcataatacaacaaccaagaaaagcaaagtgagagaagccagcacatatgyaacaagaagcggctggtctgcttgagggttgaacagggtgaagaggaagatgcactgcagtgcgttctgccaagtcctctgatgtatcatggaatagatgaagtggagaaccccttggctacatcaacttccgatgtggttggcttaattcagtgattatcatcaatggtttaaaatacttatctcagttaaatacctattgtttgaaacctatcgcttaactatcctagatcctggaactac

SEQ ID NO: 231723 - DNA, 464 bp, Homo sapiens
ctgtgaatggtaatcttgagcatgcttaaggaatatgctgagaccagtgtttcctatcccgacatatccccagtttgccatttaaataggctctgaaagtgtcacatcatagttggctggttttctcagctaggtttcaactagagagccaggataaggtaagcataatacaacaaccaagaaaagcaaagtgagagaagccagcacatatgcaacaagaagcrgctggtctgcttgagggttgaacagggtgaagaggaagatgcactgcagtgcgttctgccaagtcctctgatgtatcatggaatagatgaagtggagaaccccttggctacatcaacttccgatgtggttggcttaattcagtgattatcatcaatggtttaaaatacttatctcagttaaatacctattgtttgaaacctatcgcttaactatcctagatcctggaactacagacaaac

SEQ ID NO: 231724 - DNA, 463 bp, Homo sapiens
tacttagctgtgaatggtaatcttgagcatgcttaaggaatatgctgagaccagtgtttcctatcccgacatatccccagtttgccatttaaataggctctgaaagtgtcacatcatagttggctggttttctcagctaggtttcaactagagagccaggataaggtaagcataatacaacaaccaagaaaagcaaagtgagagaagccagcacatatgcaacaagaagcggctggtctgcttgagggttgaacagggtgaagaggaagatgcactgcagtgcrttctgccaagtcctctgatgtatcatggaatagatgaagtggagaaccccttggctacatcaacttccgatgtggttggcttaattcagtgattatcatcaatggtttaaaatacttatctcagttaaatacctattgtttgaaacctatcgcttaactatcctagatcctggaactac

SEQ ID NO: 231725 - DNA, 512 bp, Homo sapiens
ctgtctctttcctaattgctctggctaggacttccaatactatgttgaatagaactggcaagagtrggcagccttatcttgttctgggtcttagaaaaataggtttcaacatttttgccatttaatatggtatcagctggggtttgtcatatatggcctttaacatgttgaggtgtgttccttctatacctaatttgtggagagtttttattattacagaatgttgaactttgtcaaatgctttttctgcaactattgaaatgattatatggttttgtctgtaattcttttaatacaatgtatcatgtttattgacttatgtattttcaaccatccttgaatatctgtgaggaatcccacttaataatggtcaatgatctttttgatatgctactgaatttggtttactagtattttgttgagaatttttgcatgtaagttcatcagggttattggcctgtaattttctttctttttaaaatgtccttgcctgacagaaaaccaaacaccag

SEQ ID NO: 231726 - DNA, 512 bp, Homo sapiens
ctgtctctttcctaattgctctggctaggacttccaatactatgttgaatagaactggcaagagtaggcagccttatcttgttctgggtcttagaaaaataggtttcaacatttttgccattkaatatggtatcagctggggtttgtcatatatggcctttaacatgttgaggtgtgttccttctatacctaatttgtggagagtttttattattacagaatgttgaactttgtcaaatgctttttctgcaactattgaaatgattatatggttttgtctgtaattcttttaatacaatgtatcatgtttattgacttatgtattttcaaccatccttgaatatctgtgaggaatcccacttaataatggtcaatgatctttttgatatgctactgaatttggtttactagtattttgttgagaatttttgcatgtaagttcatcagggttattggcctgtaattttctttctttttaaaatgtccttgcctgacagaaaaccaaacaccag

SEQ ID NO: 231727 - DNA, 461 bp, Homo sapiens
gatgtaatgctggggcacaccagaagcctgaggtccatctcaggcccactgtgtacctgaagcccagggctgctaaggcctrccagagcctgggactgctgaagtaggcccagtggctgtatgggcctggaatctagtctgttatgcaagcctgaagcctggggctgcatggtcctgcttggcaccagggcaggtctgcaggcttagtctgtgggtactggcttggagtgtggggctattaatgtcttcctggtgctgagttttactgtcacaggcccagtgttggagtccaaggcaaagttctgtgctcactttcctctttttcccccaagtggacagtgtttctctccacactgtgctgaccggggttgggggagagtgaggcaggtaatgtgaaactgtcctttctattctccttaatgtgtattttttagttattattttgctgcaaccaggaactg

SEQ ID NO: 231728 - DNA, 485 bp, Homo sapiens
ggagtttacaaagtttatatctaacattgcatatggagttaagaaacctcattccttttgggcatagaactatggtatttaggttctttctactcctagaaaagtgctgagccagaaaaatcaggagtatatatataaagtttacaactcatgatgtactcataagccctagttgcctgaataacttttcctttcaatctctcatctttcctactgatatgtaatatggcaataaaagataaatttcatgatgactgtttggtgcccattcttctttcctatgccttctccatcttgaatgtcaaaaaagggttctgtcacgtagactctcacagaaaattagctaaaaggtgatatttcagtccagctctctgaactggaactgagtctacagagttaggtcctgctttgtggatgtttggcagcatcgaagtrtaagagagcactgggtcactctaccaggctctggaattattatgttagtg

SEQ ID NO: 231729 - DNA, 635 bp, Homo sapiens
tgaattcaattctgaaatatctcaagggaggtcatggattatttaaaaggaaatcacttgcaacaataaacataaaacaatgcagaaatagtataaactcatctagattgaagaaacacaaacattgagtactagcatcttcttgggatgacttaaaattaggacaaatacttagttaccttactacccaaagtgacatttcttcccattttagagctgtgctgtccacacgtacaattaaaattttctagtagctagccaaagtatttaaaaagagaaattaacttaataatttacctaatttaatgtagtatgtccaaaatattaccttttcaacatgcaatcaatataaaatttactaacgagatggtcttccacatctggtgtactgtttactccacagagtggcaagctgcctttccaaccctcacttagccacatgyggctaccgtattggatggcagtcttagggaatttcaatatcaactgattctttaattctgaatttgagaatttctttttataatacacacggtcgctaaggcgcttagagatctgtgaggcgcatggagattattttactctccggtcccttttgatccaagatcccacagcattaaaagcagtaagaggga

SEQ ID NO: 231730 - DNA, 621 bp, Homo sapiens
agtactagcatcttcttgggatgacttaaaattaggacaaatacttagttaccttactacccaaagtgacatttcttcccattttagagctgtgctgtccacacgtacaattaaaattttctagtagctagccaaagtatttaaaaagagaaattaacttaataatttacctaatttaatgtagtatgtccaaaatattaccttttcaacatgcaatcaatataaaatttactaacgagatggtcttccacatctggtgtactgtttactccacagagtggcaagctgcctttccaaccctcacttagccacatgcggctaccgtattggatggcagtcttagggaatttcaatatcaactgattctttaattctgartttgagaatttctttttataatacacacggtcgctaaggcgcttagagatctgtgaggcgcatggagattattttactctccggtcccttttgatccaagatcccacagcattaaaagcagtaagagggaaggcaatgggcatcccttgcgcccaggaacgtggcctggagggcctggctgctccgagcagtagcagtgcccggcggggaggctgcagacgcggcgttggaagttggatttct

SEQ ID NO: 231731 - DNA, 623 bp, Homo sapiens
tgcaaagttttaaaagagagcattcacaatggatgcaaacacttatgataacaagtgttgctttaatggagtgaagcttctaattaggagcctatctgcaagcagaataaataaggaagagactggcagtgcccacaactgcagtcttgccattcccagataggaatctcctagttaatctccattaactggatctcaagcttgtccatggccatcactactgaagatttactaactgctcacagggtgcctagcagagtaaaaagtgacatcaaaaggaagcaaaataaacacaacctctctctagaagcttygtctctatacttaatattatttcatgaaggtgcaacaaatttcatataaaatcccattataataaatttaaagggcccttccaaattcatcacatgaaaaggacaaagtaagattacccttttttgtttcataactttttgaaacaaaacagaatttgatttgaatggacatttacgatcttgaaatgcatgcttagccttgtaactatgaaaatacctacaactttattttgcccagtgctatgtttagatttttaacagtaaattaagaaaggcatttcttaacacttgcccagctgtgacaaaatt

SEQ ID NO: 231732 - DNA, 580 bp, Homo sapiens
accttcgtccaccccacactattgttaaattactgttgttttccctatactatctttgctttcatttctcctgtttgccccttctcatattgtattgtcttagtccattttctattgcttataaccaaatacctgaaaatgagttatttataagaaaaggaacttattttttagttatggaggttgagcagtccaaatcaaggggtcgcatttggtgagagtcttcttgctggtgggaactctgcaaagtccccaggtggtacaggttatcacatggccagggggattagcatggtagatcaggtctctcttcttcttaagaagctaccaatcccactcccatgataacctattaattcatgaatgggttaatccattcatgaaggcagagcccgcatgatccaatcacctcctacaggccccttctctcaatactgccacactggggattaaatttcaacatcagttttggaatgaacaaatattcaaaccatagcatataccctctatctacatyatctttctcacacatccccataggtccaagcacttacccatctttcaaagcccaattcaagct

SEQ ID NO: 231733 - DNA, 410 bp, Homo sapiens
aggacaattcttggttcataaatggctgtcttttcactgtgtcctcacctgacagcagacatgagggtgacctcaggagtctctttatatggacactaatctcatttatgagggctctgcactcagacttaatcacctaccaaaggccttacctcctaataacatcacactgggggtgacgatttcaacatatgaattttgtggagacattaacattcagtctatacaagataaaaataaattgggtttgagaatttggataaaataaatatragtaaactaatgagaatataatttgtaccctaatatgtattttataatttttattaataataaatttatttacaaataattatacatttctctgatctctttttagagttacacttcttatttctattttgcatctt

SEQ ID NO: 231734 - DNA, 560 bp, Homo sapiens
gtatcaccaatacaaatgtgaacaaagggaaaaaggccaataatgttttagcattgccatgaaaataatattgaacttgtgatttccctaaaagggtcctagggatgttcagcagcccatacccagaaatctgctggttcagatactttattttattagaagttgcattagtgatactgtaatttacttagctggaatatgtgtataaagaaacccctcctcctgaatgattttgtttcctcaggtacagatcacatagaaaaaacataaaaagtgtttgatacactccctatatgtgccagttttcagaataaggaagtggttctctaacattctttaaaggttaccaattaaggttttattacaatattagatgagcttatgagtttaaacatatgtgatgggtttcaactcaattcaattgtcatccttattggtgatgctcaaattattccatctttgcctgatgagaacttattcaggttggccactgatttttttttggcrtgatcttaatcatctttgataaattccttgctttctgatatgaaaaaaatttc

SEQ ID NO: 231735 - DNA, 648 bp, Homo sapiens
agtcttaaactatttttacgtaactgagaagaagtaaaaaaatgaaactatagcttttaaagaaagcagagtgtgagatgaggaattcataataatcttactccaagaccattatacattcttttacactatatatcttttctttcatgaaaaatgtttgacatttaccttcagttgtgtaatcacttcaatggttgttgtcrtgataccactacagttgatttcctgccagtaactttttggaagtttcggtctctgtctagacaggtacatgaggcagcaatagaagtggggcatggggaccagcacccctgttgctcaaaaggcagcagccacatagttgtgggtaaaggtttccttttctggcttttgcagacattctgtttttgaactggggacagagactgtgagggggcaaggagttaatttgaatctctactgattttactgtttttcacagtaaagaggggctttttttctcagtatagttgaggaaattcctcccaggttctggaattctattcttcttcatcctccactcttctactcacctccccctcaatcccctatagtcggctcccttcctgctcctaccccaccccagacctttcagtgaaatatacacttaggagctgcttgccagatgcc

SEQ ID NO: 231736 - DNA, 648 bp, Homo sapiens
agtcttaaactatttttacgtaactgagaagaagtaaaaaaatgaaactatagcttttaaagaaagcagagtgtgagatgaggaattcataataatcttactccaagaccattatacattcttttacactatatatcttttctttcatgaaaaatgtttgacatttaccttcagttgtgtaatcacttcaatggttgttgtcatgataccactacagttgatttcctgccagtaactttttggaagtttcggtctctgtctagacaggtacatgaggcagcratagaagtggggcatggggaccagcacccctgttgctcaaaaggcagcagccacatagttgtgggtaaaggtttccttttctggcttttgcagacattctgtttttgaactggggacagagactgtgagggggcaaggagttaatttgaatctctactgattttactgtttttcacagtaaagaggggctttttttctcagtatagttgaggaaattcctcccaggttctggaattctattcttcttcatcctccactcttctactcacctccccctcaatcccctatagtcggctcccttcctgctcctaccccaccccagacctttcagtgaaatatacacttaggagctgcttgccagatgcc

SEQ ID NO: 231737 - DNA, 627 bp, Homo sapiens
ttatgtctgccattccttttcacatctggagcggacttctctgcttgcttgaaccacctacctccttctccctgtggagtttagaaaagtaaaatattgttttccattcgcacctagattcgctttttaaaataagactcacacaagttgggagaagcttcatgctgttggtggtctcgtcagatatattaataacataaggaaaaagccttgaaatatgtcaaatcacaaaaacagtagtgagtttatatttattatcatttgtgaagaatgctttaccacattatttccttcaatcctcacagcaaacccttaaggtagagactgtttttcccattcctgttttatacacagggaaaatgaggcttaaagagcttaagtaacttacacaaagtcacataattagaaaatttcatttgaaagccacatgtactgacctcagagcccgtgggtctcatcactgtgcaatttctccaagaaacattgctttataagatttggcaactgtctgtttctctgttggtgaaaaatagrtatggtatagggagtgggtatgtcttagagatttttatttaaaaaaaaagaggaagacttagccgcctgtgccctcaagaacttattgtggca

SEQ ID NO: 231738 - DNA, 421 bp, Homo sapiens
gaattcttcaggatgaggtgatctgggcttgcggtcaggtctagatatgagttgggagaagctttggaggcatckcaggagagtgtaaaagacaagcagacgtgtagcgtgggaaaggaacgtttaagggagagcaagctcctctcttttaaaggtaatgagaaaggtatgtttaaagttaagatacaagagattatggcccttaacagtatactgtgaatagaaaattataatgcagataatttataaaatacttcctaaggtggcataacatttttataagaaaattgttgggcttgcagggctgtaacccccattgtggacaacagacaagttaatgtcaaaatatagaagatttgattttagtgagctgacttgcattgcatgatcagctgtatgatgttaatagtaaatagtatat

SEQ ID NO: 231739 - DNA, 574 bp, Homo sapiens
ggtaataataatcatagtatgttctataagcataccgtcatggcaattatattggtgataattgaagtatgagttagcagattaatgttaatggtgatttcaaagacaattagtatacaataatagatgattttcctgtggaataggttgatgagagacagagacagaaggagggagagaatgagaacttcaagtgagcagcccaggagcctgatgagagccaggcaacagaartgttgtatccaaagacccaccatattttaacgaactgcagtagaggccagacactggcgttcagcacactccagcatttatggctatttctgttctgggcttgtgctgcgtaattataaggcctgtgtcttgatcacattttggatggtattcggagaacctgaatcacaagacagaggaaaaatctaaaggcatctatcactgtgattccagacaatccaatctaaacctgccctcctgcagctgtcaaattgatttcctgtcacagctctcttggtggctattttcgaatctcccccccgtcctcctagaaactctgcccttgcccctctcatgggct

SEQ ID NO: 231740 - DNA, 440 bp, Homo sapiens
gaattcttcttttaaagagtcttgatgatgtctgcagtatgatttttattttttgggmgcttacaaggcttggagaggttgcagagatagagactaggaaaacaaaacaaaacaaaggagaacaaaattgatttaaccttttccaaaagttttccaattcaataagcaagcggttgaatctaagcagcacaaaatttccaggaaagactcaggcatccttcttccttccaactttccttttcttcctcttctttgtccatctagatctgtcaagggattgtgggcacacagcagagccatgacagatgggcagtgcactgtaatctactgctgcctttcaatttcagagggatcattgtgacaatgaaggggttaaaactgtcaacacctatcagagcttggagataattagtgtaatataaacccaagaactttgatgg

SEQ ID NO: 231741 - DNA, 555 bp, Homo sapiens
gcttttatatagttattttgtatattggtacaatgttaaaggtgatgaattaaggaacatcaccaagagaggacaatttcttctaacttctctttttaaatttaatctggctgaggtttagtattaggactaatacaagtgtcttgctctgacatgcatcaagcaagagctagctattttacttcatagctagtttcttgcactctgtggagactgccagggccgcagctcacagcctgttctgagctgcagtgctttatcccaccttgctctccaggcttctgacttcaggcctgtgggggccgggaggtgggcagcggcagtggcctgaggagccctgtagaactacggctgaaaaagaaagtagattgaggtggggggaggaaattaacaggaatctagagtttttctaattcttatcgtcttatcgttcttgtgtttggaygctggtagtttttttttttttagacagagtctcgctctgtcacccaggctggagtgtagtggcacaatcttggctcacagtgactttcgcctcccaggttcaaggaattc

SEQ ID NO: 231742 - DNA, 383 bp, Homo sapiens
cgcctgcccctttttgattatctcattyatagacatctcccatcacaaaatacttcagtcatagggcaatcaaagatacctataaataaactcttgagggaagacaaataagaaaatctaacccataattgtccctctgcattgaaaaaacactggacaaataatgcaatctggctgccattctgttatcaacaaattatataacctttaacaaactacttaacctctgctaagtgaaacctcatttttagctatgagcaatgggtgtatgattaggtggtctttaaagtgccttccaacacacaagggccattaccccatatcctcttcacatatgtcaaaagtgttatcagattatgagagcaaaaaaaaaaaaaacagtt

SEQ ID NO: 231743 - DNA, 550 bp, Homo sapiens
ctcttccacttaaagctttttggtggcttcatttgctcttaggctaagatcaaagtacttgatgtggcctacagggtgctggggggccaagcacctgtctgcttccctgtgtcgcctccctactctctcctccccagcrtgcctgggcttctcaaaagtcctctgactcctcctttccccacactcctagtacacataactactgtactcccgggatctgctctaggtactttgcaaagggtgatctcatttaaacgtcacgtccacagtagatgattagtcgtgtttttaaaatgagaaaaccagagctcagagaggttaagtgtcttgcttagtgttgaagaacagccagtcagtgagatctagcccagcctgggagatctgggcctaagtctgctgctgctgcactgacttgtccggtgttggcacctgaggagaacacatctgcagtgacgtgtaaggagttggaggatcttcctgtctgccccctcaccagagtaacattgtcccttcctacacttctctgtgtttggtttttcttcaccagccc

SEQ ID NO: 231744 - DNA, 591 bp, Homo sapiens
ttgcctttcaacaaagggtgactaattaatgtaacagttgattatgtagctcccttaatttgttactggttttcaaataccaaagtaattacatcactaaaagaggacagttgttagaaagtcagtctacagaagagattcaaaaaggattgcctctgttggttctaaagtcctgtttcggtgtagtcttgtgtttgggtctgatttggcagccattcacaagtccctgagtagaagtcagacccagtaccatgccaggggtaagaaggatagagtgcctcctgtggtgagcagatgtggatgggctgtggggtcasaccatctgggttcaaatcctgactgtgctgctgaccagcagtgttcacagtgcccatctctggaaatggcaccactcatagtatctgcctcatggcgatgatgggaggattaaagtgcttaaaccatgtctggcatatgataaaagctaaaaaacatttaatattattattattcatgatttaccttctgcttttctctcctgcatcatgtccaccatggatctaatttcccaagcacactcagcccctgatgaccctgtgcctactcatgcgt

SEQ ID NO: 231745 - DNA, 567 bp, Homo sapiens
gtgtatgcacttagggaaaagcttggaagagtatacacttgaatgcaaccataaatgtacctgggtggtgttatgggtggctttcctctcctttttctcttctacactttccaaatgttaagtcttgaacatgtttccctttgtaattagaaagttaaaaaaataaaaagcacttgtttaaaagaactgaaatacaaaaattttaaaaatacatttgttattttttatttggaaaaaaggtcatattcactcctcatcagctaatacgactttgtcagtgcctggtacctgttattatgtgyattagccaaagggaagcaagttgtgaactttagaaaggcaaatttcactgcatctcctggttctggtggtagtgaggctgcctttggatgggtgatcaccctgctctgtcttacaggtgcagcccagctgcccaggatggctggcaaacacgcaacagttttgccgggggactttgagttgccttgggtaggaaaagttttagctctggttgttctcttttgattaggcttagcctcttggaatctgatcagtattagtttacat

SEQ ID NO: 231746 - DNA, 567 bp, Homo sapiens
gtgtatgcacttagggaaaagcttggaagagtatacacttgaatgcaaccataaatgtacctgggtggtgttatgggtggctttcctctcctttttctcttctacactttccaaatgttaagtcttgaacatgtttccctttgtaattagaaagttaaaaaaataaaaagcacttgtttaaaagaactgaaatacaaaaattttaaaaatacatttgttattttttatttggaaaaaaggtcatattcactcctcatcagctaatacgactttgtcagtgcctggtacctgttattatgtgtattagccaaagggaagcaagttgtgaactttagaaaggcaaatttcactgcatctcctggttctggtggtagtgaggctgcctttggatgggtgatcaccctgctctgtcttacaggtgcagcccagctgcccaggatggctggcaaacacgcaacagttttgccgggggactttgagttgcctkgggtaggaaaagttttagctctggttgttctcttttgattaggcttagcctcttggaatctgatcagtattagtttacat

SEQ ID NO: 231747 - DNA, 475 bp, Homo sapiens
tgatatatgtaaagcgcttagctctgtgtctggcatacagcatgtaatcagtaagcacttgttttcttttctctttttcattcctactcattcattaaatattcattgaacacccagagtttgataggtactgtatttgatagagggtgtacagacatgaaagagacggtctcatgaagctcagagtggaatggaagaagtagataygtagcagatgaaaaaccagtaagtaacaatacagtatagttatatctgtattagaaatataaatgtattaactatggatacccagaagaagaaattcccagccttgtcttggagagtgagaaggtattcagtgtactgtagctcaagtattttgaagatacttatgctcaatctaattttgggaaagaatgttctctaatattttgtatatgtgggcttcgcttttataattttttaattttacattttagatatagaaatcaggaat

SEQ ID NO: 231748 - DNA, 581 bp, Homo sapiens
gttattatgtgaactaaataaagtgatatatgtgaagctcttagcactgtgtatagcacatagaaagcacctaatagatgctagctaccctcatcatcaccatcaccatcatcattatcatcatcattatcatcatcacatatatccaattaatgcacgctccccactctcttggattttatacatttagctttcatgtataagrccattggttgggaggttttgctttgtactttgtcttcagataattaattttcaatatgtgtcacaacagctttggaagggaaaaaaagaaaaaagcctgctgcttagctctctggcttgccccaccccataatcagaatggccctggtttgggcctcacacagctcactgccaaaaaatgggctgtcttagaatcacatgcaagtcaaaataagtacctcccagctccagaggagggctggactgtaatcttcggtgaagtaattttctccctttgaaagcttagcctggccacttcacagttatcaagattcaagtgccaaggggcagatgccagctttgcagacatagccactatgacacacatgggggacgtc

SEQ ID NO: 231749 - DNA, 617 bp, Homo sapiens
tttcctttaggaggtcacttcttagtccgtttgtgctgctgtaacaaaatgcctgagactgggtaatttataaaaaacaaatttgttttctcacagttctggatcctgggaagtccaggatcaaggggccagcaggtttggtgtccagtgagggccctgatctctctgcttccaagatggtgcctgttactgcatcctccaaagtggatacatgctgtatcctcaaaacagaagggcagaaaggggaatgaactccttctctgaagcctttttataagmacgctaatcccctctatgagtgttctacccttatcacttaatcacctcccggtactatcactctggcaatgaagattcaacacatgcatttgaggggacacattcggccaccatcaaggggctaattatttttctgatttgtatgtatcctggatagctgagattgaagattggggtggaaagggatagtaacatgtattattttactccaaatctatctgagaacacagatttaaaagtcaagtgagggaaagtcactttccttctctttgagttcctgctttacactaggctccattctcagccctgggcacaaaccaaataaaaaaagttccatg

SEQ ID NO: 231750 - DNA, 458 bp, Homo sapiens
tgttgcaggtggaccagtgctagcaggtgcttgtacacacaggcagaaattggtgtagataaaacaagagttcctttcctggctggagggtgtgccccagccctgatgttgtaacaatggctgtgttgtctggactgtgtcatgacagatctgaaaacagtgtctgaacagtagtacatagaagtaggttacagccggctctaagagtaacaggctctgaatttccaagatgagcctgaatttagaatattttgtyccattagaacactcacttctcttgaacacgtggcctgtgagggctggagaggggctcagggtatgggtgtgtcaacctttccttcctctgctggacaattccatttcttcccatatccgccatccaaggcccacccatccttcaggtctggctcaaacggctcctctcctggagacctaccctggttacggcccaaagaatt

SEQ ID NO: 231751 - DNA, 500 bp, Homo sapiens
agtagtacatagaagtaggttacagccggctctaagagtaacaggctctgaatttccaagatgagcctgaatttagaatattttgtcccattagaacactcacttctcttgaacacgtggcctgtgagggctggagaggggctcagggtatgggtgtgtcaacctttccttcctctgctggacaattccatttcttcccatatccgccatccaaggcccacccatccttcaggtctggctcaaacggctcctctcctggagacctaccctggttacggcccaaagaattcatcttctttccctcactccctttatctgcactcttttgttattctaagcatattcttctctgtactatatgtatttctgtttattcaataatatatattatatatatttctgtttatataagccttgatatataaatatcaaggctggagttaggcaggatctgggtttgagtcttaactttctgatgygtgatttcaggcaagttgctc

SEQ ID NO: 231752 - DNA, 428 bp, Homo sapiens
tagtgcctgtagcatagggttattctaaggtgaaaatgaaataacrcccatgaagtactgagtttatagcaaggagtcaatagatgtaaatgattgctgtaataatggttactgtgtgcctcacgaaagattgtttactctccttcattaggctgagggtttgagagcaggaactgtgtatcatcaacatttatatctggattatctggcccagttcctggaatataagtaatgttcactaaatacgttgagtgaatcaacgaattgtttttaatagatgtaaccactgcaacattatagaatttcagagctgaaaggaaccttgttgtcactgaatgaatttaccttcttaatgtaaacaaaaggaaactgaggccaacagatgttaaagagttgagccaaaagtgacaaaccccattcatggcaga

SEQ ID NO: 231753 - DNA, 399 bp, Homo sapiens
aggaagcatccaagcctggattcagactcagggcccccagctccaggttcatgctgtttcccacagtcagtcagaaaggaccatcagtgataggatccaggtccactttcctccaaaccccatgtatgccctaaaaggaaaccacatcattcataaaattagaacrtgaaaataaaaaaggaaaaggaaataaaagaagaaaacgttaaggaaaatcaaagtggcatagcaaaatcatgctgggttctggaggctgtctttgcagactgtttaattggcattatattttgagggttagattagaggaagaagaaaaaagacagtgttcaacctgatttacatgaaaatgagaagaagggaaaaaagtggggtattaaaatgtgtgagttgaatccttag

SEQ ID NO: 231754 - DNA, 483 bp, Homo sapiens
gaattcatattaatagtatttataaaatgtataatgttctaacaaatgtgaattgtttctaatggaatactggtagagaatgaataactggattcaaattattaacttgaaataacctactacaatgataagacctggtgttttgtgagtcaagcgtagatatatagttaggacacaaactgatgaaccaggaaaaaaaaagccataggtgcttaaaaaatattttgtggatagacagatgaatggataaatgaagactgagtaaggaacctgattgtcataatacattaatacacatatatcaatatataatattatagccaatgatagcrtttctgaaattgtatttaaaatgatatctgacaaatgagagttcattttcttaagaaaaatacttttcatcaaaatcagattgattaacttaattcaaaatctctggcttactaaaatgtttttctgaaacatgaatcaattcaagaatgt

SEQ ID NO: 231755 - DNA, 555 bp, Homo sapiens
ttgaatcagagaaattaaagttcttccactaaaaaaaccctggggattctgtgagtgtggctgggatttgagttaaagcttgaagaatgtggatttagatactgcttctaggttgcttatttccaaagatatccctccaattttgatatcacatgtagactccagagagtcatttacaacttcctgtagaacctcttcaccaacatggcccaacattacatcaaattcaaaatttacarcatgaattcaacatacttcccaatttatatttcaacttcaaacaatgaaacaaccattaaaacaaaactgagcaaagaaaaactcatttctatcctgttttcccagatgttgaatacctagtatatcagggtgtctggcaatggcagccaacaaagaaaaatcatgtcatgcatgaatgaaaaagaaaatgaaggaaatgcctgaaaacagaataataagattctatttcaaagactcttaaagccttttgggtctttgattaaatacattttattgtaagcctcgtgcctagcatgctacctgatacctcattgt

SEQ ID NO: 231756 - DNA, 555 bp, Homo sapiens
ttgaatcagagaaattaaagttcttccactaaaaaaaccctggggattctgtgagtgtggctgggatttgagttaaagcttgaagaatgtggatttagatactgcttctaggttgcttatttccaaagatatccctccaattttgatatcacatgtagactccagagagtcatttacaacttcctgtagaacctcttcaccaacatggcccaacattacatcaaattcaaaatttacaacatgaattcaacatacttcccaatttatatttcaacttcaaacaatgaaacaaccattaaracaaaactgagcaaagaaaaactcatttctatcctgttttcccagatgttgaatacctagtatatcagggtgtctggcaatggcagccaacaaagaaaaatcatgtcatgcatgaatgaaaaagaaaatgaaggaaatgcctgaaaacagaataataagattctatttcaaagactcttaaagccttttgggtctttgattaaatacattttattgtaagcctcgtgcctagcatgctacctgatacctcattgt

SEQ ID NO: 231757 - DNA, 572 bp, Homo sapiens
atagacccacacatatacactcaattgatttttgacaggggtgcaaaagcaatccaatggagaaaagaaagccctttcaacaaatagtactggaattattggatacctatattaaaaaataaacctcatgtctacctcacacaggacaaaaaagtaattttaaatatrtgatataaaaaagtaaacagtaaggtaagactataagactttctttttagagttttagattcacagcaaaattgaacagaaggcatatactccttgccttcaaactgtacatttttaaaagcaaacattaagtaaatatctttataaccttggggaaaggaaaaatgtcttggacaggataccaaaaaaacactaaccatacaagaaaaaatagatgaattatgcttcatcgcaattaacatactcatcaaaagatacaattaagaaaataaaaactcaagtcacagattgggagaaaatattcctatacttgtatctcatgaagaacttgtgcccagaataaatgtatataatattttcaaaatgtaaactgtaataattagaaaatttaattttattgatga

SEQ ID NO: 231758 - DNA, 572 bp, Homo sapiens
atagacccacacatatacactcaattgatttttgacaggggtgcaaaagcaatccaatggagaaaagaaagccctttcaacaaatagtactggaattattggatacctatattaaaaaataaacctcatgtctacctcacacaggacaaaaaagtaattttaaatatgtgatataaaaaagtaaacagtaaggtaagactataagactttctttttagagttttagattcacagcaaaattgaacagaaggcatatactccttgccttcaaactgtacatttttaaaagcaaacattaagtaaatatctttataaccttggggaaaggaaaaatgtcttggacaggataccaaaaaaacactaaccatacaagaaaaaatagatgaattatgcttcatcgcaattaacatactcatcaaaagatacaattaagaaaatraaaactcaagtcacagattgggagaaaatattcctatacttgtatctcatgaagaacttgtgcccagaataaatgtatataatattttcaaaatgtaaactgtaataattagaaaatttaattttattgatga

SEQ ID NO: 231759 - DNA, 572 bp, Homo sapiens
atagacccacacatatacactcaattgatttttgacaggggtgcaaaagcaatccaatggagaaaagaaagccctttcaacaaatagtactggaattattggatacctatattaaaaaataaacctcatgtctacctcacacaggacaaaaaagtaattttaaatatgtgatataaaaaagtaaacagtaaggtaagactataagactttctttttagagttttagattcacagcaaaattgaacagaaggcatatactccttgccttcaaactgtacatttttaaaagcaaacattaagtaaatatctttataaccttggggaaaggaaaaatgtcttggacaggataccaaaaaaacactaaccatacaagaaaaaatagatgaattatgcttcatcgcaattaacatactcatcaaaagatacaattaagaaaataaaaactcaagtcacagattgggagaaaatattcctatacttgtatctcatgaagaasttgtgcccagaataaatgtatataatattttcaaaatgtaaactgtaataattagaaaatttaattttattgatga

SEQ ID NO: 231760 - DNA, 501 bp, Homo sapiens
tagctaaaaaacctggtgatcagcagtaactttattgtgtagtactatttgtctaaattcatgtgactttaaaagtaatttttacctttacttaaagcacaatgtatttaccaattaaaatgctgtaaatgcatctcatatagaaagtttaatttgtaaacttctgagtaaaggaatcaaatttagaccaaaatagagtgatggggttttcttagaaacttagtcatctaagtrgagagtatcaaaattttctaacttatgagtagatagagtacatgtttgaaattgagcatgttagtcagagacctggaatgattaaagaaaaaattgtatttaaaagtttaataagaagattaaaaggtcacatttatctcaaacagtagtgatataaaaactatacactacataataaaaaacagataataagattttttgtacatcacaatgacacaaattctaccacattcaaactcccacaggtgggactgataaagacaaatg

SEQ ID NO: 231761 - DNA, 519 bp, Homo sapiens
tgctaatgaaaataatgtaaaaatgagggtgaattgttgaatagtcaaagataaaaatgacagaagcaaattccttcagatgatcacagggtacgtgaggtggagtccatgagtggagtcttttaaaggacataggatacctctcttagtagtggaagagaagacagagggtgaaagtgcaggtgagtgggattgtttatgtttaattctattgcactaaaagtgattacatattccctgaggaaggagatcatatctgttttattctccattatgtcttcaatggtcagcscatagcatgtactagacaaattgtaaatactcaacaaatacatctgaaagaaggagtctttcccaaggatgtagtttattaggtccttccctcagtatctttttctaaaacaccaaaaactttaagtattgttgggcaaaacagtagcccaaaaacttcaggaagttcatggccaatgtagagggagtggcactaggcttggagttgggagacctagatttgagatg

SEQ ID NO: 231762 - DNA, 580 bp, Homo sapiens
tgaccttgtgtggggaccaggggagcatgacagcagtagttgccacctccacaccttctccatctccataggggcaatagagcaagccagagatttcatggcagaatgcaggaggctacacagagcagcaaggcttcycatggcctgcctaagcagaggctgatgatggcaggcatcagcttgtgggaggttaagcacttatccactctccccccacttttctgatttctcatttcttccatgcattaactaccactttgaaagtttcagtgggttaattaaattcttctagtgttgatgctaagaaagctgaaacattttcaactgagattgacactactcaagacataggcttcactgatgtttgttcagtaacactccaatatgtcacaggattgccgagagaacatctgagagctataatgagctaaaagtcaagtacaggggaaaatgtgttccagactgctgcagatgttctcaaatcaaatcttatttctgtgaaatgccatatagaatattcagctgttgaaagatgcaacacgaaaggacagttcaattgatttgcactgtatttaaaaat

SEQ ID NO: 231763 - DNA, 621 bp, Homo sapiens
tttctcttcatttcctatcattctcacctctgttcagtatgtcttgccatgcctgaaataggccatatttgctcacttgtataactacgccttgatatttatactgttgctctttctctggccaggaggacactcttctctcggggtctctgaatggctcaattattttatcattgctatggtttgaatgtcccctccaaaactcatgttgaaactcaatctccaatgtggcagtattgagaggtggggtctgtaagaggtgattggatcatgacagctctgcccttatgaatggattattccattcacagattaatgcactatcatgggagtgggattcatggctttatacgaagagaaagaaagacctgaactagcgcattagcaagcacaggcccctcatcatgtgatgtcctgccccacctcaggactctccagagagtctctgccagcaagaaaactcacaccagatgcagcccctcaaccttggacctctcagcatccataactgtaagaaatacattccctttctttaaaaattgcccagmtttgagtattctaagtaacagaaaatggactaagacatcactcttgtgagggagcttctagcatgcaagcttc

SEQ ID NO: 231764 - DNA, 621 bp, Homo sapiens
tttctcttcatttcctatcattctcacctctgttcagtatgtcttgccatgcctgaaataggccatatttgctcacttgtataactacgccttgatatttatactgttgctctttctctggccaggaggacactcttctctcggggtctctgaatggctcaattattttatcattgctatggtttgaatgtcccctccaaaactcatgttgaaactcaatctccaatgtggcagtattgagaggtggggtctgtaagaggtgattggatcatgacagctctgcccttatgaatggattattccattcacagattaatgcactatcatgggagtgggattcatggctttatacgaagagaaagaaagacctgaactagcgcattagcaagcacaggcccctcatcatgtgatgtcctgccccacctcaggactctccagagagtctctgccagcaagaaaactcacaccagatgcagcccctcaaccttggacctctcagcatccataactgtaagaaatacattccctttctttaaaaattgcccagctttgagtattctaagtaacagaaaatggactaagacatcactcytgtgagggagcttctagcatgcaagcttc

SEQ ID NO: 231765 - DNA, 448 bp, Homo sapiens
cttataaaattatatgattgggtataaacaaactactcacagatagagctcaagaactaagaagaatcagcaattaataagtgaaagagcaagctttcacacgtttattattttgaattcctctttcattttgctagcacatttcttgagtacagtaacagggagggtgggggatgcagagacaaattatakaatagaaatcaggtaacatggttcctagtcctactggaaagtcaactgataaaatgaacccaaggaaattacaaactgtgaatatgcaaatctataaatggggttaaaaatgcttattgatatacccacagcttcataagaattatataaattaacatatggaaaaggctttttgaaaaaatagaagataatattcaatagatcattaatactctttataatatattttgctatggtctaagagctctctaaattc

SEQ ID NO: 231766 - DNA, 448 bp, Homo sapiens
cttataaaattatatgattgggtataaacaaactactcacagatagagctcaagaactaagaagaatcagcaattaataagtgaaagagcaagctttcacacgtttattattttgaattcctctttcattttgctagcacatttcttgagtacagtaacagggagggtgggggatgcagagacaaattatagaatakaaatcaggtaacatggttcctagtcctactggaaagtcaactgataaaatgaacccaaggaaattacaaactgtgaatatgcaaatctataaatggggttaaaaatgcttattgatatacccacagcttcataagaattatataaattaacatatggaaaaggctttttgaaaaaatagaagataatattcaatagatcattaatactctttataatatattttgctatggtctaagagctctctaaattc

SEQ ID NO: 231767 - DNA, 448 bp, Homo sapiens
cttataaaattatatgattgggtataaacaaactactcacagatagagctcaagaactaagaagaatcagcaattaataagtgaaagagcaagctttcacacgtttattattttgaattcctctttcattttgctagcacatttcttgagtacagtaacagggagggtgggggatgcagagacaaattatagaatagaaatcakgtaacatggttcctagtcctactggaaagtcaactgataaaatgaacccaaggaaattacaaactgtgaatatgcaaatctataaatggggttaaaaatgcttattgatatacccacagcttcataagaattatataaattaacatatggaaaaggctttttgaaaaaatagaagataatattcaatagatcattaatactctttataatatattttgctatggtctaagagctctctaaattc

SEQ ID NO: 231768 - DNA, 578 bp, Homo sapiens
gccagtcttctagaaatctcaaagttttctttactcagcacgtggaaagaatgttcagaattcaaaataattttggaaactgaagaagtcagggataaattacttaataaagacaaaaacaaatatctcacttataaaattatatgattgggtataaacaaactactcacagatagagctcaagaactaagaagaatcagcaattaataagtgaaagagcaagctttcacacgtttattattttgaattcctctttcattttgctagcacatttcttgagtacagtaacagggagggtgggggatgcagagacaaattatagaatagaaatcaggtaacatggttcctagtcctactggaaagtcaactgataaaatgaacccaaggaaattacaaactgtgaatatgcaaatctataaatggggttaaaaatgcttattgatatacccacagcttyataagaattatataaattaacatatggaaaaggctttttgaaaaaatagaagataatattcaatagatcattaatactctttataatatattttgctatggtctaagagctctctaaattc

SEQ ID NO: 231769 - DNA, 532 bp, Homo sapiens
tattgttaatagagatgctctgttcatatacctaggaaatgtgaagagttaatttaaatctcagaattaattaaagtataagatagtgagatgataatggtgatgcttaaggtattatatcggctgccttttattaaggagattttgtgtaccaggctctgagttaggcagctttcacaaagaatcattttataaatgagaaaaacaataccaaggcctgaggtccattggtacttgaggtcagatctgactgattccaaggcttatactcttggacccagtgttccactgtacagtagacacacaaacaattgctttcctatacaccagcattcaaactagcaaaaacgaagtataaaacactcattcttaaataatatatgggactgaaagaaacaacataactacttcagcatagagaagcagctttgaatrtatgacaaaacacaatatgttcttatagtagaagactcatagtaaatacagcgtttatttcaaattgagttatattaaattgagttataataaaaga

SEQ ID NO: 231770 - DNA, 616 bp, Homo sapiens
  misc_feature (1)...(616): n = A,T,C or G
nnnnnnnnnnnnnnnnncatatccttgtccacaccccagactttaaaatatctacacccttcctctgcccacccaccttcccacttcacgctacgcaatgattaccaacaagttcctttggaaatcacaaagccaaaaattggtaaaaagaaatcagaagactcagtgcactgtgacatacaaaaaacaatgtgcttttaacataccacaatggaaagaaaaattctgagtttttttkattagaacatttggcatttgaaagaagaaaactaaattattataaaattatggaatgtactcaacaaaaaagtgacataattaaaaaaataataggttggataatatgaaaatatactatatactcacctatttataaaatctctatatttgatatcttgttattagaatccaaactactccaactagtaaaacattcagatgtatttatactacataaatgagacctatatttttataagtgacacctgaaatgtattttctgagagcatattttgatatttactactggtactaaagtaaaagtacatatacatacgtatatatatatatatatagagagagagaaagagagagagagcacgtgagttatgtaaat

SEQ ID NO: 231771 - DNA, 629 bp, Homo sapiens
tgtgtaagtgaatgaatgcatgcatgataattgagagggggtcaatttattttgcctagtaattcaccttcagtcaacgaccagccaaaagttatgctaatcttttatttggaaggcaccaacaaaagtatatcattagatttagaayaaacgtactgtacatcctggtttcagactttgttgtgaacacagatttcatttcaagttctgacagctagtaaactcagtcaataaagcttatggatgatctttttcagcctggaataaaggaaagtcaaaaaggacaagattctaagatgagtgttctgctagaactatgataggagaatcctccatttgcacattaatattaagatactggattttaccattaacatttcagaaatgaatttttaaaattcttgatgtgactttctgatggtgaggttttcttttctcttttcttcataagatttgacactttgaatccctttttgtcaatgtgttaaccaccagcaggcaatcttaagggtcataatttgctgaatgagtgaaggaaaagatcctttacagtgtaagtatatccagaaaatttccttgaggtattcatatttctgtttttacattaaaccaacctcattaaatctgta

SEQ ID NO: 231772 - DNA, 597 bp, Homo sapiens
tttttttttttttgggaactagggccttcttgaagtgcttttttttggtctatacacacacaccacccccccctcacccgccaaattcaggctgtcctatgtcacctaaatccaatttgaagtcttttctctataaacaatttccttaattttcagtacttctttatacttctaagaggaaacatgatctccacattcctctcaagctgcggcattctaaacatgaactcaagttctcagtcttgtttttagatgagctcttctcttggcagatctctattttcaggtcaccagggaaggcatttagtaaattttttcccttgaagaatctttggctctaacctggaagatctttggctctagcctggttcccattctcctttaatgcaaggatgcaacctgtttttcctagagggattaaagatacatagaagtgaatgtgaatgttaaaagtaatggaccagtgacaaataaattacagagaagataacaaattragacattaacaaagatagctctggtttaatttctctgtagaccctgggtccttctaaccctagaggctgtgcattttctctcctttctaggaggagacaa

SEQ ID NO: 231773 - DNA, 468 bp, Homo sapiens
aataagccagggggaatcagaaaccacacagccccagctasatttcatggctaacataaggaactgtttaaacagaaaaaggacagatccattaatgaggtaatgaattattgcctttatgttgggatagaccagggccaggtagaaaagaatgaaagagaaagacagggagagggagagggagagagagacagaggagaaagtgagctcagcgaattggccgggtgacacactgatgaaggggtcaaaggacactctgagttagtgccctcgggacacacagagaacagtgatcatgaaaagagtgggctcaataattttccataaacttgcttaagattccatgcagttgccatacagcctttgaggtatggtcaacctacagtaagttagtaaatgataaggggaggaagaaatggaaacctaaacatctactgcaaggaaaaccaacagcaatgtcagtaggag

SEQ ID NO: 231774 - DNA, 468 bp, Homo sapiens
aataagccagggggaatcagaaaccacacagccccagctacatttcatggctaacataaggaactgtttaaamagaaaaaggacagatccattaatgaggtaatgaattattgcctttatgttgggatagaccagggccaggtagaaaagaatgaaagagaaagacagggagagggagagggagagagagacagaggagaaagtgagctcagcgaattggccgggtgacacactgatgaaggggtcaaaggacactctgagttagtgccctcgggacacacagagaacagtgatcatgaaaagagtgggctcaataattttccataaacttgcttaagattccatgcagttgccatacagcctttgaggtatggtcaacctacagtaagttagtaaatgataaggggaggaagaaatggaaacctaaacatctactgcaaggaaaaccaacagcaatgtcagtaggag

SEQ ID NO: 231775 - DNA, 468 bp, Homo sapiens
aataagccagggggaatcagaaaccacacagccccagctacatttcatggctaacataaggaactgtttaaacagaaaaaggacagatccattaatgaggtaatgaattattgcctttatgttgggatagaccagggccaggtagaaaagaatgaaagagaaagacagggagagggagagggagagagagacagaggagaaagtgagctcagcgaattggccgggtgacacactgatgaaggggtcaaaggacactctgagttagtgccctcgggacacacagagaacagtgatcatgaaaagagtgggctcaataattttccataaacttgcttaagattccatgcagttgccatacagcctttgaggtatggtcaacctayagtaagttagtaaatgataaggggaggaagaaatggaaacctaaacatctactgcaaggaaaaccaacagcaatgtcagtaggag

SEQ ID NO: 231776 - DNA, 377 bp, Homo sapiens
acactgtcactttcatctcatgctattggcaaaagcaagtcccatggccgaactgaagtcaaggctgggcaaatacactccatcccttttgtgggaggaaccacagtcacatgggcgactgtcttccttatcatcactgtttgctgatgttcctccgatctctctgactttgttttggtctcatatatgggttcctcttctctctcccttcaaacactgtggggccctaagcgttccatgccagctcttctcttctgtctctatgtgtggtctctggrccatcccaaccattctctagttttcagtcaccacgttggcactaaagacccccaaatccattagtgggctctctcctgagtccagttgccaactgggca

SEQ ID NO: 231777 - DNA, 546 bp, Homo sapiens
ggcccctgccacgtctccagcctctgcccttctcccgccacccctacaggcaccgatgtctctagggtgcccggcgtggtagcagttctcatccccctccacaccccaccataagtcatgtcaacagagctgggttggtttatttgtttttttctatgaacaagactgcctagaaaaatggagcacttttgcacaaacaacctcaatgtcacccatggaccttggtcactgtgggacagtctccaaggtttggccggccagcttcccagggcactgacctgagaaagggtttgcgccctggtcgctcygtccatctcccacccgaccctctaaagggctggctggctgggtgggaggggtgtccttggagcccctgagtctgaccttcatgttctgcaggaagccaggggaggggacccaatggagtggaccccaccacatcctttaggctcagaccaggccttacaccctccagaaagctgccttggccactttcctggcatctctggactcctgttctcaccctaattgcatctcatatcatgc

SEQ ID NO: 231778 - DNA, 541 bp, Homo sapiens
tttcaaaacccacatcactcttgtgattgctagctcaatgctgcctttttccctcccactctcaagcatactgtaagctctatgagtgtggagactgtgcatgtttctttcaagactatcttagtgtctagcacatagttggtactcagtaaatatcagttgatggattaaaaaataatgtcaataaaagtgctttttaggtaagaagctagtactataatcwttgtcattattgttattactattagtagtgatagtaggagtaaaggtagttgtagtagttttatattagcagcatagtcaacatcaaatataggatggaaggaggaccacaaaataatacttatcaatattcattgtaagcttttctacttattgccctccatttttttaaactgacagaaataaataactaacaataaacaaaatgaaaaggcagtctatggaacaggggaaaattggaacaccatatttctgaaaaggagataatattcaaaagatgcaaagaactcatacaactcaataacaaaaagcccccaaa

SEQ ID NO: 231779 - DNA, 559 bp, Homo sapiens
caactgtggaaccagtctagaaagaaattagttcaaattaaaacaggtagtgagaggaccccaagaataatatctatgagagtaagaatcaaatggtttctgggcaattgatggtttaaagaaagaacatctgcaggatagtaagaagggtttattctaaatgataagtgtaatgtgtgagaatctggaagctacttgagatagaagaaagaaagaatatttttatttttcccaatgagacatgtgagaaatagtcagaaaatctcagcaaaaacaaaaccaaaccaaagattgtattaaaaaaaaagggctcaaataacrtgagttaaattggcccagattctgagcaattaatggaaagtaaggaaggttccatttaaccttgaccatttactgtctaatagagtcttggagggggaagtataattttagaacattacctggcccaagagtgagcaatgttttcataggaaacattgactatcaacatattgattatcaacctgctgagaagcacggatgacccaattatgatagaaaaacaaaatgtaaatattgt

SEQ ID NO: 231780 - DNA, 569 bp, Homo sapiens
ccagtgaaatttcttttatactggcaggcattttgactcttcacctattgctgttgaatctccaggatatgtacatgttttcacaccgataccttcattgaagaaaatacagcaatctgatatttttatgtgaatcatctttggaattcgtgttcctcacctttggatacaataaatattcaagagaaaaaaaatacaggaaaaaaataattgccctcaatgatgagttctgaaatacttataaggataagtgatgtgttgaaaaattctcaaaagcaattttagaaggaataatttttgcagagagtggctgtctcttgggcaccatarcaagaaaaatagtatattgcccttggtgatggtgcggtcaagtatcaataacaacacgcttcatattttcatgaacaaaacacttcttcataaggtaatgagattatagaaaaatcaactcaaggtaaaaataattactttgcacatggacaaaggataagtggaagaacttatcttctagttcgtggttcatttaacaattaattgctcctttttcaaataggtccactgtgttctgg

SEQ ID NO: 231781 - DNA, 644 bp, Homo sapiens
ttcttattggtgaattatcaataattgtagtgctttcttgaaaagttccctggggtggatttccttagttgcatataattctagcctcttcagcctactaaggataaaagggacatgaagtacacatatctgggaattaattacatttttctgctcaagagccaagtcattttcagaaattgatgtcaaataggtcttccatagctgaaagtgctaggtgtctcttcacatagttaagatttccccctattcagaaatattagtttctgatgacaatggaaaattccaaatgcagcagcttcactgtgttctaataatgttcatgcttagggatcctgaaaccacttgcagtatgcctggtctagccacagcagggagccggcgcccatgccagttcccagagctgaccacccccaccgcagccagmgtgtctggctgtgcaccatggccagactccatgctcactcactcatgcaccccgcactgctccccacctggctcaaccttggtgggcatgggatccaggctggtagtgaaagtcaaatgctgcctgccaggccgggtgggcagaacgagcccagcgggtgagaaaaacttgggcaaacgtgccactggctacagaggtttccggctggtgaagtgac

SEQ ID NO: 231782 - DNA, 644 bp, Homo sapiens
ttcttattggtgaattatcaataattgtagtgctttcttgaaaagttccctggggtggatttccttagttgcatataattctagcctcttcagcctactaaggataaaagggacatgaagtacacatatctgggaattaattacatttttctgctcaagagccaagtcattttcagaaattgatgtcaaataggtcttccatagctgaaagtgctaggtgtctcttcacatagttaagatttccccctattcagaaatattagtttctgatgacaatggaaaattccaaatgcagcagcttcactgtgttctaataatgttcatgcttagggatcctgaaaccacttgcagtatgcctggtctagccacagcagggagccggcgcccatgccagttcccagagctgaccacccccaccgcagccagcgtgtctggctgtgcaccrtggccagactccatgctcactcactcatgcaccccgcactgctccccacctggctcaaccttggtgggcatgggatccaggctggtagtgaaagtcaaatgctgcctgccaggccgggtgggcagaacgagcccagcgggtgagaaaaacttgggcaaacgtgccactggctacagaggtttccggctggtgaagtgac

SEQ ID NO: 231783 - DNA, 644 bp, Homo sapiens
ttcttattggtgaattatcaataattgtagtgctttcttgaaaagttccctggggtggatttccttagttgcatataattctagcctcttcagcctactaaggataaaagggacatgaagtacacatatctgggaattaattacatttttctgctcaagagccaagtcattttcagaaattgatgtcaaataggtcttccatagctgaaagtgctaggtgtctcttcacatagttaagatttccccctattcagaaatattagtttctgatgacaatggaaaattccaaatgcagcagcttcactgtgttctaataatgttcatgcttagggatcctgaaaccacttgcagtatgcctggtctagccacagcagggagccggcgcccatgccagttcccagagctgaccacccccaccgcagccagcgtgtctggctgtgcaccatggccagactccatgctcactcactcatgcaccccgcactgctccccacctggctcaaccttggtgggcatgggatccaggctggtagtgaaagtcraatgctgcctgccaggccgggtgggcagaacgagcccagcgggtgagaaaaacttgggcaaacgtgccactggctacagaggtttccggctggtgaagtgac

SEQ ID NO: 231784 - DNA, 630 bp, Homo sapiens
aacatggaaagaaggcaaggaagargagaatatatcttgtcccatcactggtcatttcaggggagattttggcactgaagacagatcaggagcatatcagataggaacaaaaaaaacaggcttggtagcttaaaaggaggagtcaagtcttaccaactctgaacactcacctcagtagtgatgtttcatttttaccctcttagggtaaaagagtctggtatttctaagtatatgctttctagtgtttgtgtttactatatttaagaaacaccattagatcaattcttattaatgattacttgatattaatcattatgattagacactagtttaaaagcatagattagtttcattaaagacttttcttgagagattatatattaaatgggtggtgtacacattcttactaagaaagttttctgctgtttatatcttaaattaatgtagaatttctcccttaatttctacatagaaacttagtatagataagcttgtgcagtcagctgtgaattcatctaggcctactaccatttcttcatctcctctaaagaataaaatatgaactatcttgttgaaattaagtgctactagatctatactgctagtgatcctgtaatatcaatacatgca

SEQ ID NO: 231785 - DNA, 630 bp, Homo sapiens
aacatggaaagaaggcaaggaagaggagaatatatcttgtcccatcactggtcatttcaggggagattttggcactgaagacagatcaggagcatatcagataggaacaaaaaaaacaggcttggtagcttaaaaggaggagtcaagtcttaccaactctgaacactcacctcagyagtgatgtttcatttttaccctcttagggtaaaagagtctggtatttctaagtatatgctttctagtgtttgtgtttactatatttaagaaacaccattagatcaattcttattaatgattacttgatattaatcattatgattagacactagtttaaaagcatagattagtttcattaaagacttttcttgagagattatatattaaatgggtggtgtacacattcttactaagaaagttttctgctgtttatatcttaaattaatgtagaatttctcccttaatttctacatagaaacttagtatagataagcttgtgcagtcagctgtgaattcatctaggcctactaccatttcttcatctcctctaaagaataaaatatgaactatcttgttgaaattaagtgctactagatctatactgctagtgatcctgtaatatcaatacatgca

SEQ ID NO: 231786 - DNA, 630 bp, Homo sapiens
aacatggaaagaaggcaaggaagaggagaatatatcttgtcccatcactggtcatttcaggggagattttggcactgaagacagatcaggagcatatcagataggaacaaaaaaaacaggcttggtagcttaaaaggaggagtcaagtcttaccaactctgaacactcacctcagtagtgatgtttcatttttaccctcttagggtaaaagagtctggtatttctaagtatatgctttctagtgtttgtgtttactatatttaagaaacaccattagatcaattcwtattaatgattacttgatattaatcattatgattagacactagtttaaaagcatagattagtttcattaaagacttttcttgagagattatatattaaatgggtggtgtacacattcttactaagaaagttttctgctgtttatatcttaaattaatgtagaatttctcccttaatttctacatagaaacttagtatagataagcttgtgcagtcagctgtgaattcatctaggcctactaccatttcttcatctcctctaaagaataaaatatgaactatcttgttgaaattaagtgctactagatctatactgctagtgatcctgtaatatcaatacatgca

SEQ ID NO: 231787 - DNA, 518 bp, Homo sapiens
attgaggcaggatttttatcttttgcctgttgcctttttctccggaattctgaaaactaaaataacaacacaaagaagcaacagcaaaagccacagcagcaatactgcagacctccatctaaactagctactaaggttctttctgcatctggtcccacctgctctgcttttccttttgtattgcacaatttaagattataggatgcagcccattagcttccatttgcttagggggggtccctctctccttccccacccccatctgcatgcacatgtgctcrgccagatgcatgctcacacacgtacacacattatgctttatcccatcatgcttcctggaaattaagatttcaacattgattcctagaaaaaatgttagagacagtcctctgcagaagtaggcattttagtcttctggcacactaagactctgggtgttacatccaagaagggtatacccaagagaaagaatgaatatacatatcattgggtgaatggtctctgtttagttccgtata

SEQ ID NO: 231788 - DNA, 559 bp, Homo sapiens
atcaatgtacaaaaatgttcagagcagtactgtttggatttacaatatttagaaacatccaacacctggatgcattacttttctattgatgtgtaacaaattaccacaaacgaagcagcttaacactcatttgttacttcacagtttttgaaggtcagaatgygggcatggtgtaatataactgtgctctcagctcagagtctcaaaaggtggaaatcaagatgctggctgggctttggtctcatctggagcttgcggtcttcttctaacttcatttgggttattatcagagggttgttccttagggttgcaggactgagagtcctgctttcttgatggctgttgcccagggtcttggccacacagcacttcacaacatggaggcttactttttttttcctatttattaatttatttattaatttattatactttaagttctagggtacatgtgcacaacgtgcaggtttgttacatatgtatacatgtgccacgttggtgtgctgcacccgttaactcatcatttacattaggtatatctcctaatgcaagccaacag

SEQ ID NO: 231789 - DNA, 559 bp, Homo sapiens
atcaatgtacaaaaatgttcagagcagtactgtttggatttacaatatttagaaacatccaacacctggatgcattacttttctattgatgtgtaacaaattaccacaaacgaagcagcttaacactcatttgttacttcacagtttttgaaggtcagaatgtgggcatggtgtaatataactgtgctctcagctcagagtctcaaaaggtggaaatcaagatgctggctgggctktggtctcatctggagcttgcggtcttcttctaacttcatttgggttattatcagagggttgttccttagggttgcaggactgagagtcctgctttcttgatggctgttgcccagggtcttggccacacagcacttcacaacatggaggcttactttttttttcctatttattaatttatttattaatttattatactttaagttctagggtacatgtgcacaacgtgcaggtttgttacatatgtatacatgtgccacgttggtgtgctgcacccgttaactcatcatttacattaggtatatctcctaatgcaagccaacag

SEQ ID NO: 231790 - DNA, 559 bp, Homo sapiens
atcaatgtacaaaaatgttcagagcagtactgtttggatttacaatatttagaaacatccaacacctggatgcattacttttctattgatgtgtaacaaattaccacaaacgaagcagcttaacactcatttgttacttcacagtttttgaaggtcagaatgtgggcatggtgtaatataactgtgctctcagctcagagtctcaaaaggtggaaatcaagatgctggctgggctttggtctcatctggagcttgcggtcttcttctaacttcatttgggttattatcagagggttgttccttagggttgcaggactgagagtcctgctttcttgatggctgttgcccagggtcttggccacacagcacttcacaacatggaggcttactttttttttcctatttattaatttatttattaatttattatactttaagttctagggtacatgtgcacaacgtgcaggtttgttacatatgtatacatgtgccacgttggtgtgctgcacccgttaactcrtcatttacattaggtatatctcctaatgcaagccaacag

SEQ ID NO: 231791 - DNA, 599 bp, Homo sapiens
aaaatatatgttgtttttaccccaatattattcttcccatatgatatggtttggctgtgtccccacccaaatgtcatcttgaattgtagctcccataattcccatgtgttgtggaagggaccaggtgtgagataatygaatcatgggggcggtttcccccctgctgctctcgtggtagtgaataagtctcacgagatctgatggttttataagaggtttccccctttagcttggctctcattctctcttgcctgccaccatgtaagatgtgcctttcaccttccaccatgactgtgaggcctctccagccacgtggaactgtgagtccattaaacctctttttctttataaattacccagtttcatcgagtatgtctttatcatcagtgtaagaatggactaatacaccatataataggccttactatttcaacttagggtaaaaatatatacattatttgtctggtcattgtatttttttatgtttctaagtccacatagagttaaatttcaaggtccttctggttaagagctgtacctcttacatgacttttgtttatggatccattgatttctaacttcctttttagcttaagtga

SEQ ID NO: 231792 - DNA, 599 bp, Homo sapiens
aaaatatatgttgtttttaccccaatattattcttcccatatgatatggtttggctgtgtccccacccaaatgtcatcttgaattgtagctcccataattcccatgtgttgtggaagggaccaggtgtgagataattgaatcatgggggcggyttcccccctgctgctctcgtggtagtgaataagtctcacgagatctgatggttttataagaggtttccccctttagcttggctctcattctctcttgcctgccaccatgtaagatgtgcctttcaccttccaccatgactgtgaggcctctccagccacgtggaactgtgagtccattaaacctctttttctttataaattacccagtttcatcgagtatgtctttatcatcagtgtaagaatggactaatacaccatataataggccttactatttcaacttagggtaaaaatatatacattatttgtctggtcattgtatttttttatgtttctaagtccacatagagttaaatttcaaggtccttctggttaagagctgtacctcttacatgacttttgtttatggatccattgatttctaacttcctttttagcttaagtga

SEQ ID NO: 231793 - DNA, 334 bp, Homo sapiens
gctaacatgttggattttattgggtaatatattttatttataattttcacagttactgttttatgtgaaattggcctatagttttacttgtatatcattatcaggttttggctaagattatgctagctttatcattcatwctgtacagtttttatcttttgtatgaaaatttctgaaataaaataagaattagcacacctttaaaagtagacagaaagcaccaggaaacccacatgggcacaggccttttggtgatggtggagcaaagctgtccagtgctgttcagatcaggtttcttatctcatccatcaatttggcagtttgtattttgcca

SEQ ID NO: 231794 - DNA, 459 bp, Homo sapiens
aatttactctcagtaaaattaattttgtcaaacttttttttcaccatcatttagttgttttcattattttatttttttaaattaaattcaattaaatttaaagttccaggatayatgtgcaggatatgcaggtttgttacataagtaaatgtgtgccatggcggtttgctgcacctataaacccatgacctaggtattaagccccacatgcattagctatttatcctgatgctacccctccccccacctcctgataggccccagtgtgtgttgttgttctccctgtgtccatgttcagctattcagtgttctcattatccagctcccacttataagtgagaacatgcagtgttcggttttctgttcctgtgttagtttgctgaggatgatggcttcccgatctatccatgtccctgcaaaggatgtgatctcgttcctttttatcgctgcctagtattc

SEQ ID NO: 231795 - DNA, 459 bp, Homo sapiens
aatttactctcagtaaaattaattttgtcaaacttttttttcaccatcatttagttgttttcattattttatttttttaaattaaattcaattaaatttaaagttccaggatatatgtgcaggatatgcaggtttgttacataagtaaatgtgtgccatggcggtttgctgcacctataaacccatgacctaggtattaagccccacatgcattagctatttatcctgatgctacccctccccccacctcctgataggccccagtgtgtgttgttgttctccctgtgtccatgttcagctattcagtgttctcattatycagctcccacttataagtgagaacatgcagtgttcggttttctgttcctgtgttagtttgctgaggatgatggcttcccgatctatccatgtccctgcaaaggatgtgatctcgttcctttttatcgctgcctagtattc

SEQ ID NO: 231796 - DNA, 640 bp, Homo sapiens
tctctgtaactttgacaactacagatataaaactcataacagcaaccaacgctttcatcttgctttgtgtccaaaagtgtaatgagacaatgagtctggaacaatgggactgagtccaacctcaagcagaacaacaagaaaggtcactttttccygcattgattctgagtcctgccatgaaagcaaacctcccaggagactgtggaagtctaagccaaacacggggagggcttctcacgcaattaaaatggacaccaacaggatggattattgaaataagagctactgttttctggagtgcttggtttgtgccaagattcattccaaagatgttgcttgctcatgtaataacatctttaatcctcaacaactctgtgaggtagatacttttgcatccccttttacatatggagaaacaggctcagaaagtctaagtagatttctaggcccacagagatagaaacatcttagacattgtgagcccaaaccaggtagtctcttgccttgtatcagacagtcaaaattcatcagtcaacattgctctatatattaaaaaagagtgacagcagcttcctcaccaagtatttgtggttggatagaaggtataagtacatgaaccctaaatctgaaagctgaagac

SEQ ID NO: 231797 - DNA, 552 bp, Homo sapiens
ggtctggaagctctgtgtctgtggagagctctgtgtctgtggagagctctgtgtytgtggaaagctctttggtgtgttgagctctgtggtgtcaagagctctgtggtgtggagagctctgtgtttgtggagacctctgctgtgtggagatctctgtggtgtaaagagctctttgtatgtggacagctctgtggtttagagatctctgtggtgtggcgagctctgtgtttgtggagagctctctgtatgtggagagttctgtgatgtggagagctctgtgtatgtagagagctctgtggtgtggagagctctgtgaatgtggagagctctgtgtctgtggtgagctctgtgtctgtggtgagctctgtgtatgtggagagctctgtgtctgtggtgagctctgtgtctgtggtgagctctgtgtatgtggagagctctgtgtctgtggtgagctctgtgtctgtggtgagctctgtgtatgtggagagctctgtgtctgtggtgagctctgtgtctgtggtgagctctgtgtatgtggagagctctgtgtctg

SEQ ID NO: 231798 - DNA, 528 bp, Homo sapiens
ggacacccctgtgtctgtggagagccctatggtgaggagagcgctgtggtgtgaagagctctgtggtgtggagagttctgtggtgtggaaagctctgtgtatttggagaattctgtggtctggagagctctgtattgtagcgagctctgtgtctgtggagagctaagtggtgtacagagcgctgtgatgtggacagctctgggtatgtggggagttccgtgatgtggggagttctgtggtctggagagctcggtgtatgttgagaggtctgtgctgtgaagagctctgaggcatgaagaacttcctaygtggagagctctgtggtgtgaagaactctgtgatgtgatgtggggagctctcttaatgtggggaactctgtggtgtgaagagctctgtggtgtgaagagctccatgtatgtgaagaggtttgtgtctgtagagagacgtgtgtctgtagagagagctgtgtgtctgcggagagctctgtggtgtgaagaactgtgtgtctttggagagctttgtggtgtg

SEQ ID NO: 231799 - DNA, 528 bp, Homo sapiens
ggacacccctgtgtctgtggagagccctatggtgaggagagcgctgtggtgtgaagagctctgtggtgtggagagttctgtggtgtggaaagctctgtgtatttggagaattctgtggtctggagagctctgtattgtagcgagctctgtgtctgtggagagctaagtggtgtacagagcgctgtgatgtggacagctctgggtatgtggggagttccgtgatgtggggagttctgtggtctggagagctcggtgtatgttgagaggtctgtgctgtgaagagctctgaggcatgaagaacttcctacgtggagagctctgtggtgtgaagaactctgtgatgtgatgtggggagctctcttaatgtggggaactctgtggtgtgaagagctctgtggtgtgaagagctccatgtatgtgaagaggtttgtgtctgtagagagacgtgtgtctgtagagagagctgtgtgtctgyggagagctctgtggtgtgaagaactgtgtgtctttggagagctttgtggtgtg

SEQ ID NO: 231800 - DNA, 571 bp, Homo sapiens
caactctaccattccttttgctttagatgtgcattttcagctatctaatgttcatttgcatgtgaatgtcctataaaggcctcaaactcattggaatataactgaattakgcaccccctcttttagttactctttcaattaatgtttttatcatctaccatactactagtctagactcttcaactccccctcttgctcactgcctttcataagctgtcaagttcagaatattctacccaaaaggaacatggtttctgtctgcacagctgctattaaccccttgctgttatctctttctcatacacttctagtaaatgtctactacaatggatgtctaatatactcatctgagatgactttttgcctcgtactgccgtaacaaaataccatagactgggtagtttaaataataggaatttattttctcataattctgtagaccagaagttcaagatcaaggttctggttgattcagtttctggtgaggcctctcttcttggcatgcatactgacgccttctctctgtgctcacctggcctcacatggcctttcttcattgcatgtgtgtatg

SEQ ID NO: 231801 - DNA, 616 bp, Homo sapiens
cattgtattataaatactgataaaaaataaaaaaaactatctacttttactagtctttggaatttttaagggtaaaggtcatacttyattcattttctagaagaaactaaagaaggaaagaagaagaaagaaaaggaagaaatgaagggagatagataaacaatactagggaataatttccatgattttaacatattttttgcaggaacaagaaatagtataatatttaatacatccaaaatacagtacttaaaaatcttaactctgaagaagggaatgacaacttcttggcatttacaaattgttacaagaaacacttttgagcatcatacttttgggctgagttaaacacaactatgctttgacttttacaaatgtgtgtgtggcttcatcaacatttttctttttgataaatggtaaaaattagtggctcatgctctctaaattcatagttaagaaaaaagttctaccactagattaggtggttttggctgatttactttggtatctacagtttccccattggacattgcaatgtccaaaagagccatatgtggttctccaccattttgtctctcatatcgtttctgatcactctccccctccttccaggctc

SEQ ID NO: 231802 - DNA, 563 bp, Homo sapiens
ctgttactgtcctttgcacctcctgtcctcgggtgctagactgctgtctgcctccccagtgcagtgtgcaaagggctttattattaccagctgagagccaaggcagctgaagggtacactgtcactacagtttgctcccccacatgtcaacatattctgaaagctactgacatctgattttaactccttgctgccttctgttcctctgactttgacagattttaatgagacaaatgctagctgtgggtttcctttttccaccttcccctacctcacccctcaggaactcacttttctgctgccatcctttgtgaaacggcaaactaaatatgaaaaactgctgataaggaggaatagacttatgcccagaggataaacttaacagagctcayctagcctggctggcattgacccctgcctctacatttttagtacatgtctcataaaagagaaactgcctgtgcttctaggattcttttatataagtgccaggagatgtgtcaagtacaacttgcttctccaacatattgatacatttagagtttttaaagaaaactcaagtg

SEQ ID NO: 231803 - DNA, 560 bp, Homo sapiens
tggtttccttggagttcccatcttgggtgccatcatgaggtttccttagctcactttctgaggagtgggccagccttaacaatagggagtctgctgtgaacaaatggggtgggtcaggggcacccattaggaactccaagtaacactttagggatcattgcaggagccaaaggtcctgcatgagcaaatgagagcaagagtagtgtggtaagcagaataatggctccccagctacatccacattctaattctcaaaatctgtgagtgttactttacatttatgtatatggtgaaaagggcttgaaaattttattaaggattttgaaatggggagaatagcctgaaatgatcttggtgggcttgatgtagtcacagtggtccttacaagagggaggcagaagggtcagagtcaggtaagttggggaaatgacaacagaagcaggagctaggatgaygggagaagaagccacgagctaaggaatgaagatggcctctagaaactggaaaaagcaaggaaacagatgctccctagagctgcctaaaggaacgagtcctgctgg

SEQ ID NO: 231804 - DNA, 469 bp, Homo sapiens
agatctgatggtttaaagtgtttgtcagttcattcctcactctctcactttttctctcctgtttccacgtgaagraggtacttgcttccctttcgccttccaccatgattgtaagtttcctgaggcctcctcagccatgcagaactgtaaatccgttaagcttcttttctttataaattactgtctcaggtagctctttatagcagtgtgaaaacagactaatacaggtacataattttgttttgttttccacctaaataaccaattattctagcaccatttattaaataatcatctgtcttatccttaccaatttgtaagccacatccactatatatccatttttcccatgtacactggcctgtttttaggtctttctatcctagtccattgatgtatttgtctattcacctgcaccaatagcttactcttttattgctaagctttatgataaattatatttgatagc

SEQ ID NO: 231805 - DNA, 304 bp, Homo sapiens
aatttcagttgggatttttctgttgttgttgctgtgttgaccaggatggtcttgaactactggcctcaattgatcctcccaccttggcctcccaaagtgttgagattagaggtgtgagcccggcttttattgaaaatgaatttatatatcaatttgaaaagatgatatctttatgatattggatctttccatcaatgaatgtggtatttatgttcatttattaaggtgtttttctrtgtacttcaatgctgttttaaagcttcttccataaagttatagtatatcttttcttagatttacccca

SEQ ID NO: 231806 - DNA, 601 bp, Homo sapiens
tcataccagtactattcacagtagccaaagatgtaaacaacccaatgtccatcaatagatgaatgcataaaccaagtgtggtatatacacacaatgaaaaattactcagtcattaaaagaaatgacatattgatacatattacaaaataggtgggcattgaaaatatagtataagtgaaataagccagacacagaaggacccactgtaagatcacacttacatgaagtatgtagaataggcaaattcatagatagacaaagtagaattagagataatcaggggctgagaaggaagttagtgtttaatgagtacagagtttatgctgggatcatgaaaaagtttggagtatagatttaagaggatcatgacagacaggaawaagtactagattgcagctcccactcagatggacagagcagcatgtggagcctcgtgtcatgaacttttgctccaggactactgcaggaataaatcaggaaagtgaagagaactcacaaattctctgaaggaagtggattgctcctgcaggacccaggagacacctcaaatactagcaggtgtggaatccagggatctgcagacagttcacatcacagaact

SEQ ID NO: 231807 - DNA, 455 bp, Homo sapiens
agtcagcagagtaaacagacaacccacagagtggaagaaaaacttcacaatctatacatctgacaaaggactaatatccagaatytacagcaaactggaacaaattagcaagaaaaaaaaaatcccatcaaaaagtgggctaaggacatgaatagacatttcccaaaagaagatacacaaatgggcaaagaacatatgaaaaaatgctcaacatcactaatgatccaggaaatgcaaatgaaaaccacaatgcaataccgccttattcctgcaagaatggccataaacaaaaattaaaaaataatagatgttggtgtggatgctgtgaacagggaacacgtctacattgcttgtgggagtgtaaactagtacaaccactatggaaaacagtgtggcaattccttaaagaactaaaggtagaactactatttggtccagcaatcccactactgggt

SEQ ID NO: 231808 - DNA, 565 bp, Homo sapiens
ggtttaagaagctttgtgggttagagaaatactaaggtctgaaaaagccagagaagagatcatggagagggtgtgagctgagctaggaaggatgtggaggatttggaagggcaaaaagataaagtgaggacccggtgagagagaaatagagaggtactgaccagtctcatgcttccatgaaaccgtaacaacacttgggctttttcgttcgttcttaccttagaggcacatgstaaaagctaggtttttcaggtttttggtcatggttctaggctacggttccatgaagctcagatttgttaggtgatcttgaggcttaaaaatgaaatagtgagtcttttcttctatttgccccaattgagccatttctgagtataatatcttctgatttacttcattttactggaaaaggtcaaatgatttatgatttataacattatagctgtgatttcagttagatgaatcagatagtaaatcataatcacagaaaaacaatcaacagccttgtagatcagtcagagaatattctacctgaaatttccagtataaaaagagaagtcaataa

SEQ ID NO: 231809 - DNA, 565 bp, Homo sapiens
ggtttaagaagctttgtgggttagagaaatactaaggtctgaaaaagccagagaagagatcatggagagggtgtgagctgagctaggaaggatgtggaggatttggaagggcaaaaagataaagtgaggacccggtgagagagaaatagagaggtactgaccagtctcatgcttccatgaaaccgtaacaacacttgggctttttcgttcgttcttaccttagaggcacatgctaaaagctaggtttttcaggtttttggtcatggttctaggctacggttccatgaagctcagatttgttaggtgatcttgaggcttaaaaatgaaatagtgagtcttttcttctatttgccccarttgagccatttctgagtataatatcttctgatttacttcattttactggaaaaggtcaaatgatttatgatttataacattatagctgtgatttcagttagatgaatcagatagtaaatcataatcacagaaaaacaatcaacagccttgtagatcagtcagagaatattctacctgaaatttccagtataaaaagagaagtcaataa

SEQ ID NO: 231810 - DNA, 597 bp, Homo sapiens
gatgcaaaacagcgaagatggtggcccattctcccctttgggaacacagtcccaggaggtttggaactgctgctgactggaaaaccctggtggggatggttgtagacctaggccgggaaattcttcccagtgaagagaaataggatctgggacmcacataaaaaaatagtctggccacgtcttcatagagctgctgcactgtgtcggaggactgctccagtccctagttgcctctgattctctagagcccaaaggcaataacggctaaggctgcaaaacagcaaagccggcagcctgcccctccctctgggagctccatctcaggcggaggtaaagctgctacctgtggctggccagagttctaagccagtggatcttatcctgtgagatgccatggaagtgcggcctaccgcctgtggctgctcagcccctggattcagcccctttcctaggagtatgtatgggggtccaacctcctgatttgccagagttgcagccacttttcctgggaagcccaggtatctaaagctcctgtggttccatgtgaacctaagaggcctctcttccaagactctacatatctctacatgtcagact

SEQ ID NO: 231811 - DNA, 563 bp, Homo sapiens
ccacacgctctgcccctgattaccacttttttattctctatttgaacctttttttaaaaagatttcacatataagtgagatcatgcaatttttttttctgtgtctggtttatttcattagctgaaggccttccatgtccattcatgttgtggcaaatggtagaaccccctttttaaggctgaataatatttcattatataatatatatacaaatatatataaatgtggtatatatatgatatatatatacacatatgatatgtatatatatatatatatatacatatgatatgtatatatatatcacattttcttatcartgtgcctgtgtccccatgtgcattgcagcaatattcacaatagtcaagatacggaaacaatctaactacttttttttggcacttttctccatctgcccctttgtgtctccctatcccccagcccaggaacttgttcttccctttagctctctgtattcgtttcctagggctcccacaacaaagtgtcacaaagcagttggtttaacatttattttctcagtgttctggaggcttacatcaagg

SEQ ID NO: 231812 - DNA, 501 bp, Homo sapiens
gccctctgtatccataggttccgcatctgtgaatcccaccaaatgcagctcaaaaatattcagaaaaaaaaagaatgattgcatctgtacggaaagcattcagacttttttcttgttattattccctaaacaatagagtgtaacaactatttacatggcatttgcattgtattagctattataagtaatctagagatgatttaaagtatacaggaggatgtacataggttatatgcaaatacgacaccattttatatcagggacttgagtatccatgaattttggtatttgagagaggtcctggaaccaattcctcatggatgccgagggatgactgtattaattttacaacaatttctcttaaaatgggtggcaggtggtggtagaaagtaggccatttttttccagcagtgtttactagtaaaggggaatatttggggatgcagtagkgcaagtgtatccccccctgattgttcaagcaagccatgggagaatgctaac

SEQ ID NO: 231813 - DNA, 426 bp, Homo sapiens
ggtagcgctgttacaacaaatggagtctctagtgcagtttcaggctttaaccaacctctttgtttaccccccratgtgttcaaattttatcatggcctgtgtgtgccataaaataagaaaggttgggacccccaagctttttttaggaagactaacctgctcccagcaccagcttgttcttcattattcctcctgtcaattaaaaaaacttacaataaagtgctgcatacatgcagagaagagcacaaatgataggtttccagactgatcaattatacaaagggaacacatcagtgtagccagtacctgcattaagatgatgaacatcacctggacaccagaagtgccactaccctccttgtaacctctttctgatcactactcatcccctgcaaaggtaactgctaagctgaatcctaacagcat

SEQ ID NO: 231814 - DNA, 572 bp, Homo sapiens
gcatgagacgcttgcatgctttctctctgggtggtggactcacttattttcacttagtgctcactgccttggaccaaacatagtggctggagccaggagtaatctcacaggcccagcctgcatcatgggttctctacctcaggggtggatctgttaccaaaaagggtcagaggaggtgctggcagacaaaagccatggycttgtactacaagggtgacagctgaagtcatcagcttactgatagaaatagtacaagaaaaaaggaaaagtggtctggcaaaggcgataacattggtaagtgtatataagaagtcctgggctagtgacagtgctggaagacacaggaaaaggctttacttgagcacataccataatcaaatgctacatttgttcagggtatttgtttgctatagctagactttttttttctattaaaaattattaaacttttttttcaggaaggtaactttgttcttgtgagtcttctcattctacccattgaaagaattgttttataacatagttctcgataatatgaggtttcttagtgctatggtctgaatgtttttgtc

SEQ ID NO: 231815 - DNA, 572 bp, Homo sapiens
gcatgagacgcttgcatgctttctctctgggtggtggactcacttattttcacttagtgctcactgccttggaccaaacatagtggctggagccaggagtaatctcacaggcccagcctgcatcatgggttctctacctcaggggtggatctgttaccaaaaagggtcagaggaggtgctggcagacaaaagccatggccttgtactacaagggtgacagctgaagtcatcagcttactgatagaaatagtacaagaaaaaaggaaaagtggtctggcaaaggcgataacattggtaagtgtatataagaagtcctgggctagtgacagtgctggaagacacaggaaaaggctttacttgagcacataccataatcaaatgctacatttgttcagggtatttgtttgctatagctagactttttttttctattaaaaattattaaacttttttttcaggaaggtaactttgttcttgtgagtcttctcattctaccyattgaaagaattgttttataacatagttctcgataatatgaggtttcttagtgctatggtctgaatgtttttgtc

SEQ ID NO: 231816 - DNA, 575 bp, Homo sapiens
ccactggcattaagtattgagcagtggagacacatcatatattaaagtttttaaattcaactatgcaagtgatcttttaaataccatgaaaatgccttaaatttcatttgcataggtgcctcwtattatagacttttattactgtatgcattattcatttacacacacatcaatgaacagggttttcaacacaaaacatgtgtgttactctttgtgggtggcttatgggatgttcaacagtactttcgaccatacttactatgtgcctcacatccaaacttcagatgccaaccttgtgtgagatgtgcctccatttaatataatgttgatacatcagagagcattatctctcttaattagcgtaaacacaccctttttgctagtcatactcaatttgcccatctccacttcttgcttttaatgcggcgtaaagtccttgtgagaaggttaaaaaggtggtattaagagaaaatgtgtttagacacattttgggtaaaattactgtgctgttggtcactctgaggaagtccatcttctgccaaagtaagacagctgagaaaataagtgttttaggg

SEQ ID NO: 231817 - DNA, 575 bp, Homo sapiens
ccactggcattaagtattgagcagtggagacacatcatatattaaagtttttaaattcaactatgcaagtgatcttttaaataccatgaaaatgccttaaatttcatttgcataggtgcctcttattatagacttttattactgtatgcattattcatttacacacacatcaatgaacagggttttcaacacaaaacatgtgtgttactctttgtgggtggcttatgggatgttcaacagtactttcgaccatacttactatgtgcctcacatccaaacttcagatgscaaccttgtgtgagatgtgcctccatttaatataatgttgatacatcagagagcattatctctcttaattagcgtaaacacaccctttttgctagtcatactcaatttgcccatctccacttcttgcttttaatgcggcgtaaagtccttgtgagaaggttaaaaaggtggtattaagagaaaatgtgtttagacacattttgggtaaaattactgtgctgttggtcactctgaggaagtccatcttctgccaaagtaagacagctgagaaaataagtgttttaggg

SEQ ID NO: 231818 - DNA, 570 bp, Homo sapiens
ccttttgcagtcgtctatagcagctctccagctttcagcttttcttcttttccaatttattaacccacaggaataagaataatcaaaagcctcctatggctcacagctttccctcatcacargaaagctcctgaatcttacttcttaggcctttgacttttgctacaacaaagctatattttcctttaaacaggaaatctgtgtggggcatcttcctttaagaccttgggcctttcctgaggaatctgaagtgtgaaggagttttgttttccaaggtatatcttgacaggtgtgcttatccctgcattcaaattatttgtctactttggattctgtgtccacttcatctgcctcttgtccagtcatcatgctagtcctcaagcatgaacagtgggaaacacagacgggcctggaatctgggcgccctgtctgggcttacattgacaatgggattaataatctactgtgaggggagatgatattgtggcctttggagatctcctcccacagggctaagagtctttgctctccttgtgtgcacagggcgcgtattgcttctttgaaaagcaa

SEQ ID NO: 231819 - DNA, 589 bp, Homo sapiens
cctctggcagctgcagagtggtgtggagagcaattctgtatgctggaaagagggagagcacagcaattgtgagtaattgaactcagcactgtcctgctagagcagaaaggaaaaccaaaccaaattcagcttacacacacccatggagggagcttttaaaccagccctagccagaggggaattgccaatttccacagtcagaacttgagtttccacaaccctcaccaccatgggctagagtgctctggagccccaaataaactttgagagatagtctaggccacaaggactgcaactcataggtgagtccctagtgctgacctgggcccagtggaatgaggggacacattacctactgagataccagctggggcagctaagggagtactggcatcaccttcccctgaccctgtactataaaatttgtataggtgtcttatagtcttatatgtataggaagttttaaatctgtacctgtgttgagtrtatttactgactataagacttttaaaggtttaaaaataagtgcctatgttatattaatgcaacgtgcagttgagcagataaaggttcaaattctagttttgca

SEQ ID NO: 231820 - DNA, 583 bp, Homo sapiens
ctatccctctccaggtgttaactgttctctctccttgcctcttgagatctagggttagtgccctctccaggtgttattagcctagaggcactgcaccgtctcttattgcttttctaaacaatgtctgcatatttataaataagccctttattaatctcttctcaaatttccaatttgaatatgccatctgtttctaccagggccctaactgatacaaaagtgctttaatcctttcttctcatggagcagcagcatctatatcagctgagagctygttagaaatgtagactcctgggcccctcctagacctactgagacagaatctgcatcttaataggttccccaaaggactgggatggacattaaagtttgaaaagcactggtttaacacatcagtagatgtaataaaatctagcatcagaatgttaatggcttattaagagactattatctggtccccattgtccactgggggatgcttctccagcccttctttcattatttcaaccaaaaagattaaaaaaaatctaaaatgaaaatgttcttgtttggaaaagttgaagaatcttgtgtaaagatttgt

SEQ ID NO: 231821 - DNA, 583 bp, Homo sapiens
ctatccctctccaggtgttaactgttctctctccttgcctcttgagatctagggttagtgccctctccaggtgttattagcctagaggcactgcaccgtctcttattgcttttctaaacaatgtctgcatatttataaataagccctttattaatctcttctcaaatttccaatttgaatatgccatctgtttctaccagggccctaactgatacaaaagtgctttaatcctttcttctcatggagcagcagcatctatatcagctgagagcttgttagaaatgtagactcctgggcccctcctagacctactgagacagaatctgcatcttaataggttccccaaaggactgggatggacattaaagtttgaaaagcactggtttaacacatcagtagatgtaataaaatctagcatcagaatgttaatggcttattaagagactattatctggtccccattgtccactgggggatgcttctccagcccttctttcattatttcaaccaaaaagatwaaaaaaaatctaaaatgaaaatgttcttgtttggaaaagttgaagaatcttgtgtaaagatttgt

SEQ ID NO: 231822 - DNA, 533 bp, Homo sapiens
gtaccttgctgttatcagctgttaatttaccaacccagatcaatcagtcattgcatagaagttgaaggaaattcattatacatttctgaacaatttaagtttaattctgctgaaattctaccaagaaactagaaacattatgaaagacgaataaaaaaagacataaatgaataaagcttccaggggcccctgactgatgcttgagasataaccaacaagttttgttggacattgtggattcacttcttatatttaaaaaactattgatgctgttcttaagtttttttttattttttattttacagcctatgttttaccaacaaaaccttaggtatttatatctacaattcaacctggtatttatttctgaaaaatcagttaaaagtaaaaaaagaggaaaagaagcatatgaaaatgaaaatcattttcaaaagtgacctccgtaactctaataacacaacctgataaagacattagaagaccaaaaataataggctaatatctctcatgaacatagatgctgtggtaaacaa

SEQ ID NO: 231823 - DNA, 609 bp, Homo sapiens
tgcatttcttcctgtttctttccatatccattttttagttcttaaatttttgattctatgtattaaaagatacttctctaaatggttgcttaagaatattaatttattttggagtttagttatggttttcttctgctgtatggtttattgggagagaagtttcaactgaaactcacatttttgtttgcttactttcttcttataggrtctttgcatagcactgggttgcttttttagatttgattcatagatattttgtggacaggatttctagttttaagggtaccctctttcttggtatcatgaagcacagtttctctaatagatgatgctaatggtgatggaaacagggagaggggtgagtatattttatttctctaatttctgtaggattaataattttatatttttcctttttatttctctttttctcttcactgccacatctccaatactgtattttctgtatttgattctccaccagaaacaaggtttcttgtggaaacagaaagtacagtttttctgtatttgtctgtatttgagagttactggttgcaacctccagtatctctcactttaaagtccctttcctataggtgtagttgtgaa

SEQ ID NO: 231824 - DNA, 609 bp, Homo sapiens
tgcatttcttcctgtttctttccatatccattttttagttcttaaatttttgattctatgtattaaaagatacttctctaaatggttgcttaagaatattaatttattttggagtttagttatggttttcttctgctgtatggtttattgggagagaagtttcaactgaaactcacatttttgtttgcttactttcttcttataggatctttgcatagcactgggttgcttttttagatttgwttcatagatattttgtggacaggatttctagttttaagggtaccctctttcttggtatcatgaagcacagtttctctaatagatgatgctaatggtgatggaaacagggagaggggtgagtatattttatttctctaatttctgtaggattaataattttatatttttcctttttatttctctttttctcttcactgccacatctccaatactgtattttctgtatttgattctccaccagaaacaaggtttcttgtggaaacagaaagtacagtttttctgtatttgtctgtatttgagagttactggttgcaacctccagtatctctcactttaaagtccctttcctataggtgtagttgtgaa

SEQ ID NO: 231825 - DNA, 611 bp, Homo sapiens
atggtcttggacacaatttggaagaattttctggattaccaagaagaaaagctcgttctctttccttattttctcccaaacagtctctccttctctctgttctgagccacctgaagctggggggtagagtgacacaagcaccactaccaccaggattttgctgagttagatctaaagccagtccagyactgggtctcacacaaggcctgcagtaaccactccttggctaccacgtattttttttttcgagaaacctccatagtgttctccatagtggctttatttatttcctttccaactgacatcgtataagagttcatctctctatgtatttttgccagcattcacgattgcctgtcttttgcataaaagccatttaaactgcagtgacatgacatttcatggtagtttttatttgcatttctatgatgatcaacaatgttgagtattttttatatacctgttagccatttgtatgtcttcttttgagaaatgtcaattcagatcttttgcccatttttcaaacatattattttttccttttgagatgtttgtgctctttatattgagttgtttgagctcattttaactattcatcccctgtcagatgg

SEQ ID NO: 231826 - DNA, 611 bp, Homo sapiens
atggtcttggacacaatttggaagaattttctggattaccaagaagaaaagctcgttctctttccttattttctcccaaacagtctctccttctctctgttctgagccacctgaagctggggggtagagtgacacaagcaccactaccaccaggattttgctgagttagatctaaagccagtccagcactgggtctcacacaaggcctgcagtaaccactccttggctaccacgtattttttttttcgagaaacctccatagtgttctccatagtggctttattwatttcctttccaactgacatcgtataagagttcatctctctatgtatttttgccagcattcacgattgcctgtcttttgcataaaagccatttaaactgcagtgacatgacatttcatggtagtttttatttgcatttctatgatgatcaacaatgttgagtattttttatatacctgttagccatttgtatgtcttcttttgagaaatgtcaattcagatcttttgcccatttttcaaacatattattttttccttttgagatgtttgtgctctttatattgagttgtttgagctcattttaactattcatcccctgtcagatgg

SEQ ID NO: 231827 - DNA, 459 bp, Homo sapiens
ttccattttcctctaaactctaagatacttytcttttattgtgcaataaatgctatgatctacaggtgctgtgtgcagtaaagcatggataaaactggtggaaaatattttcatgaaggtgctagaaatggtgctggagaacagagcatacaagaaagtgtatgacctttgaattcccaggctgaagtcaagaagcatgtataactatgtttcactctaacactcatttttaaaaaagcacaaatgttgggattatgggctgaatctttcctactttgacctgcttcgccattgtgagaatataggaattttggagagcagcaaggttttctgcagggttatactttattgatagatacctctttctatatatgtgttagatatatgtatgtaatacatatcacaataaatatttcaaattccagagtaataaaatggaaatcatgaggaaaatgttaa

SEQ ID NO: 231828 - DNA, 612 bp, Homo sapiens
tgctgtgtgcagtaaagcatggataaaactggtggaaaatattttcatgaaggtgctagaaatggtgctggagaacagagcatacaagaaagtgtatgacctttgaattcccaggctgaagtcaagaagcatgtataactatgtttcactctaacactcatttttaaaaaagcacaaatgttgggattatgggctgaatctttcctactttgacctgcttcgccattgtgagaatataggaattttggagagcagcaaggttttctgcagggttatactttattgatagatacctctttctatatatgtgttagatatatgtatgtaatacatatcacaataaatatttcaaattccagagtaataaaatggaaatcatgaggaaaatgttaagatgattagaagacatctctagaattaaaatgcacacaataagtgtccttaagacaataattaatagaagtacaagataagtacttcactawagaaaaaatatcttaaaattttcatgcaatacaaaaaaattcacaaggaaaatatattttgacatcaaacttctcccattaactgctacattagaaattatcatgtaataaacattgtaaaatgagt

SEQ ID NO: 231829 - DNA, 635 bp, Homo sapiens
ggctcaaattatctcccactctgtccctcccataacacatgggagttatgggagtacaattcaagatgcgatttgggtgtggcacagagccaaaccatatcggtacccaatagttagtatttcaacccctgcatccctccctcattgcccactctagtagtgtccactctctatttttgccatttttatgtctatgaactatcaaaaatttcttttagccatgttttttagttctataattgtgtttgctaagttttcttctagaaaacttattagtgagaatgtgcagagtatttggttccctgttcctgcattaattcactttggataatggcctccagctgcatccatgttgctacaaaagacatgattttattctttttttatggctgtgtggtattccatggtgtatatgtaccatgttctatttttccattccccactgatgggcacctaggttgattacatgtctttggcatcatgaatagtrctgcaataaacatacaagcactatgtctttttggtaaaacaatttgtttcctttttggtgtatacccagtaatgggattgctgggttgaatggtagtgctgttttaagttctctaggaaatctccaaactgttttccacagtagc

SEQ ID NO: 231830 - DNA, 603 bp, Homo sapiens
atcttgaattgaattttgtatatgataaaaggtactggtccagattattcttctgcataaggctaaccagttattccagcaccttttattgaatagggaatcttttccccattgcttttttttgtcaactttgttgatgatcaggtgactgcaggtgtgcagttttatttctgggttctatattatgttgcattggtctatgctctgtttatgtatcagtacaatgctgttgtgcttactgtagcctayagtatagtttggagacaggtaacgtgatacctccagctttgttctttttgcttaggattgtgctggctattcaggttcttttttggctccatattaattttaaaatagttttttctaattatgtgaagaatgtcattggtagtttgataggaatagtattgaatttgtaggttgcttaggtgttgtggctattttaaagatattgatttttccaatccatgagcatggaatgattttccatttgtttaagttatccatgatttcttttagccatgttttgtagttcttcttgtagagatcttttacctccttggttagttgtatttctaggtattttatttttgtggctattgt

SEQ ID NO: 231831 - DNA, 603 bp, Homo sapiens
atcttgaattgaattttgtatatgataaaaggtactggtccagattattcttctgcataaggctaaccagttattccagcaccttttattgaatagggaatcttttccccattgcttttttttgtcaactttgttgatgatcaggtgactgcaggtgtgcagttttatttctgggttctatattatgttgcattggtctatgctctgtttatgtatcagtacaatgctgttgtgcttactgtagcctatagtatagtttggagacaggtaacgtgatacctccagctttgttctttttgcttaggattgygctggctattcaggttcttttttggctccatattaattttaaaatagttttttctaattatgtgaagaatgtcattggtagtttgataggaatagtattgaatttgtaggttgcttaggtgttgtggctattttaaagatattgatttttccaatccatgagcatggaatgattttccatttgtttaagttatccatgatttcttttagccatgttttgtagttcttcttgtagagatcttttacctccttggttagttgtatttctaggtattttatttttgtggctattgt

SEQ ID NO: 231832 - DNA, 509 bp, Homo sapiens
accagcttaatgttatttttgctgaggatctcggtttctgccgatgtccaaacaagtgaatggaattggatgatcagttctaacattstaattctagcctgtctataagacagtaaataggggttatttagatgactacgatatcctgttgactaattttctcttttagataagttacaacttttcacctttctggagccacatttggagtgatctagaaattgattcctcacctgacaaaaggctttctttgtaaaatcccaaccagtgaaactgacctcttcctgaaggtgaactggtttaggtcaaatgggtgcatctcatacgctccagtcttacgtctgagctactaattaatgttcctttaatcttcaaaatgataatgataaatgttgatagagaaccgcttttctaagaaagatctgaatattggccttactctgctcccattcgaaaaatttagataagcacatgatttcaaaagacaggattttggcttgttttacact

SEQ ID NO: 231833 - DNA, 512 bp, Homo sapiens
gaattctgtaaggaacagggtaagagggaggtcagggatctagaggcaatgggaagcttgtctatagttttgtcaagctgagggcaatgttatgcctgcattggtcactagaataatactccttgacgtgcaatgaacgagccatcctggcacatatttgtttttwgtttctcaggctgtgccatacttcatgtgaatctgttcattccatgatgtaatcatataatgtttctgaatggtaccaggaaaaataaatgtcataatttgggttaagatgatgtactgggcatgtatatctacatcctcccttggctccaatcattgacaattctgtggataaaaaaagacatactggtacttaccagtttttgaaccaacttcctcccctcttggtccccaacatgctccacaactgtccaatataaggaagtacaaatcaggagtatgtaaaattactaaaaatcaggaagcagatgtttctagattgaaggaaaaacaagattagtagaaat

SEQ ID NO: 231834 - DNA, 509 bp, Homo sapiens
atggaaaggtatgtttatatgttgtttctgtaacttaaaattagctatattggggtgtgtttttaatgttaatgaatagataaaattctcataattttgaactccctttaaaataatctatgtaggattctgagaggccaggggttcaagacaagcctgagcaacaaagggaaatccagtttctataaaaaataaaaatgaaaattagctgggcatagtggcatgtacttatagtcctagctactctggaggctgaggcaggaggatcacttgtgcccagtagtttcagggtatggtgaggtatatgatagtgattttatgaggtcaaaatttatacttttcctttaactgcttaatagaattttaaaaaaaggattagaactctccttcttacaaaataaacaaatgtctagattkgacattaatggatggcatttgtttaaaaattacaatttataggccagacacgatggctcctgcctgtaatcccagcagtttggaaggccgag

SEQ ID NO: 231835 - DNA, 601 bp, Homo sapiens
attgttggttctgcgaacagaactatggaatatatgtaagtataccaagcttacacacaacaatttttataattatttctctatccatctgtatttatattacattatacatgagttcatactgatggcttcgactctaatccagtaacatargatttattctaaccttcttcccttttgtgtctgtagcttcacccttttacaagtaacctggtttccaccttctgctatccttgtaattatctgttcaatactagtatatatgcagagtgctttcagaattatcaaaccatatggagtaaacttttaagttaaagatcctagatggcacggtgttagtgcatatgaagagacagttctagtttcaatcaacttggcaattattttgtttctacattcttttcaagaatgctaatctcaaggttcataatgtaattttagcaataattaagtgcatatttgatgggcaatctgtcagaaacagcaggtattttaaagtatatcctactattaatgaagagcttagtaagtatagtactactactactacttatttcatgtcctattagcattcagagctaatagatactattaagggaaa

SEQ ID NO: 231836 - DNA, 601 bp, Homo sapiens
attgttggttctgcgaacagaactatggaatatatgtaagtataccaagcttacacacaacaatttttataattatttctctatccatctgtatttatattacattatacatgagttcatactgatggcttcgactctaatccagtaacataggatttattctaaccttcttcccttttgtgtctgtagcttcacccttttacaagtaacctggtttccaccttctgctatccttgkaattatctgttcaatactagtatatatgcagagtgctttcagaattatcaaaccatatggagtaaacttttaagttaaagatcctagatggcacggtgttagtgcatatgaagagacagttctagtttcaatcaacttggcaattattttgtttctacattcttttcaagaatgctaatctcaaggttcataatgtaattttagcaataattaagtgcatatttgatgggcaatctgtcagaaacagcaggtattttaaagtatatcctactattaatgaagagcttagtaagtatagtactactactactacttatttcatgtcctattagcattcagagctaatagatactattaagggaaa

SEQ ID NO: 231837 - DNA, 510 bp, Homo sapiens
caaaaaccacaaataaaataatacggtgaaagtcaagatgtgagcaagctcatggtcacacttcctctgcatgacaaatactggagtaccataatagataaaatcagtcgtctctggattagcttttttatagatttcaagaatggcatctgaaaaaggaattaatccaaacataacatatcccagagaggatattttaaaatctgcattccagaagctataactgcctgctaaaaccagaagctgtaaccaagcctacacaaatcaaggggaatttggcagaaaaaaatatgtactctttatgaacttgacctagacattgagatatgacatgcatagggacttattggaaatttgagktaatcagtaagctcatggtatttacttggtggtatcaagcaggttatattccagcaagacatcagtgattcagtatcaaggggaggaaattgctggagttaaatagaaaaaaataacggagactagtgaggttgatgactcttagaattg

SEQ ID NO: 231838 - DNA, 581 bp, Homo sapiens
tgaaaacatataatgtaaaattccaaaaaaattgaaaatataatgaaggcaaaggacattgatttaggaatattattttatattacctctgtggggccaattgcaccatgtgagcctttaaaagcaaaagagcaagctggaaaagtgagtcagaggtttgttgtgagaagggctgcactcaccgttgctggtcttgggggaaaggaagtaggctaggagccaaagaatgtggcaacctctaaaagttgggaatggtccacagtttacaaccagagaaacatagagaccttagttcaacagttgcaagraattgaattctggcaataatacaattgaggaaatacatggattttcttctaggatcttccagaaagaaacagagccctgcagatgcctttatgacccagacacttcttctaacgtatagaactctaagaatatctctcttatgtattctcttttacctttattaaaacacacactacacaatatcaggtttgccaattgacttgccactgtctcaaaagactgtgccctcctcgttggcactgttttcattcttatcaacctgcagagtgcca

SEQ ID NO: 231839 - DNA, 546 bp, Homo sapiens
aaatgaactagaaacaaataggcatttcaaataaacaagataaacaaatgactaataaacatatgaagagaggctcaatctcattgtttatcaggaaaatgcaaactaagccacaatgaaattattatcatcaaattatttgtactataataaccaacacatctataatgctgtgtatgtgccaagcatagctgtaaaagtgttacatgttttctttataatctttacaactatattatttttgttttcatatgaagaaacacaaagcagccaaataatttataaaaacttttrgaactgctgaatgggagagtcagtattggcatattatttatttaagctggaattatcatatgagaaatataacctttcattcttctctgtgaattcctttacatatagtaatatattcttcagaattaaagagcagagaaaaaattacaccgtaaagtttttacagatttatgaatgcataattgatatatcttaaaaactacacctatttaatatataaaatttgatgagtttggatataagtgtacaccc

SEQ ID NO: 231840 - DNA, 448 bp, Homo sapiens
ttttatacactattctaaatttattgtccatcaaagtcattaaatataagtgcttaattattatctataaaaccacattggttagttaaaacataatttgtaagtgtgcatttgatctcccaaaattactcagggcattgaggagctaaacatgaccttcagatggacagatggtttatacagtacggtactgacactggtcctcttgacaaaaaaaaaaaaaaaaaggcataaagacactgtatrcaagttaatgcttatggtattttatttatcaagggtttgatatttgttgcttaaagaatgtaaagttattttgtatataatataaaacctaaatatataattgccaacaagatacaaatgcctaacacataatgcctgaaacattagatactatactttatgctctcgtaagggttagacctccaagagaaaaaaaaaagaa

SEQ ID NO: 231841 - DNA, 448 bp, Homo sapiens
ttttatacactattctaaatttattgtccatcaaagtcattaaatataagtgcttaattattatctataaaaccacattggttagttaaaacataatttgtaagtgtgcatttgatctcccaaaattactcagggcattgaggagctaaacatgaccttcagatggacagatggtttatacagtacggtactgacactggtcctcttgacaaaaaaaaaaaaaaaaaggcataaagacactgtatacaagttaatgcttatggtattttatttatcaagggtttgatatttgttgcttaaagaatgtaaagttattttgtatataatataaaacctaaatatataattgccaacaagatacaaatgcctaacacataatgcctgaaacattagatactatactttatgctctygtaagggttagacctccaagagaaaaaaaaaagaa

SEQ ID NO: 231842 - DNA, 517 bp, Homo sapiens
aattatatgaacatatataatgaaaacatgcaagtttcttaacacctgaagagaattaaatagtacatatcaagacgtgggagacacaacaaatgttctatgcaaagkaaaaattatagccttaaatgcataaattagaaaagaagaaagttgaactctaatgagtttagaaaatcatcaaaagaataaacccaatgattgtagactaaataataagaaaataaattcacaaaatgaaaactaggccaacaaagaggatcaccaaagccaaaaactgattttccaaaattagtaataacatttatcaacctcttcaggcttatcaaggaacaacaaatgttagccagaaaataaatattaagaataaaaatgggtttaatggcatacttagtgattagaaagaaaatgaaggcatgctattaattattttgagtaaatttaaagcataagcagaaatatgcaactatctagaaaaatattacttaccagcatttaatcaagaataaataaaaatcct

SEQ ID NO: 231843 - DNA, 446 bp, Homo sapiens
tataatttcctagcattgttctttcagtcttttccttaaataaattttcttattattgctcttactgataatttccaaaatttatatgaacaattttaatctccatgttttccctctctttctccttcttctcctctttctctctgtctcctcatcttctttgccctcctcctccycccccgggtcctcctcctatattgcaaaacatttgtgtagttttcaatggcctaccacttctaaagaaaatgtactcctcaaagaagtttcagttggatatcaagagaggagcaatagatgaaccaaatctggaaaatagatagttttcaactacacaaatggatggtaagaatgatacatatttttggactaagttgaaataaattagtttatgtaatgtagtacataaaattggtattaatgacacagtcttacaatttggtttaaac

SEQ ID NO: 231844 - DNA, 446 bp, Homo sapiens
tataatttcctagcattgttctttcagtcttttccttaaataaattttcttattattgctcttactgataatttccaaaatttatatgaacaattttaatctccatgttttccctctctttctccttcttctcctctttctctctgtctcctcatcttctttgccctcctcctccccccccgggtcctcctcctatattgcaaaacatttgtgtagttttcaatggcctaccacttctaaagaaaatgtactcctcaaagaagkttcagttggatatcaagagaggagcaatagatgaaccaaatctggaaaatagatagttttcaactacacaaatggatggtaagaatgatacatatttttggactaagttgaaataaattagtttatgtaatgtagtacataaaattggtattaatgacacagtcttacaatttggtttaaac

SEQ ID NO: 231845 - DNA, 446 bp, Homo sapiens
tataatttcctagcattgttctttcagtcttttccttaaataaattttcttattattgctcttactgataatttccaaaatttatatgaacaattttaatctccatgttttccctctctttctccttcttctcctctttctctctgtctcctcatcttctttgccctcctcctccccccccgggtcctcctcctatattgcaaaacatttgtgtagttttcaatggcctaccacttctaaagaaaatgtactcctcaaagaagtttcagttggatatcaagagaggagcaatagatgaacmaaatctggaaaatagatagttttcaactacacaaatggatggtaagaatgatacatatttttggactaagttgaaataaattagtttatgtaatgtagtacataaaattggtattaatgacacagtcttacaatttggtttaaac

SEQ ID NO: 231846 - DNA, 453 bp, Homo sapiens
cagttgtagctataatttcctagcattgttctttcagtcttttccttaaataaattttcttattattgctcttactgataatttccaaaatttatatgaacaattttaatctccatgttttccctctctttctccttcttctcctctttctctctgtctcctcatcttctttgccctcctcctccccccccgggtcctcctcctatattgcaaaacatttgtgtagttttcaatggcctaccacttctaaagaaaatgtactcctcaaagaagtttcagttggatatcaagagaggagcaatagatgaaccaaatctggaaaatagatagttttcaactacacaaatggatggtaagaatgatacatatttttggactaagttgaaataaattagtttatgtaatgyagtacataaaattggtattaatgacacagtcttacaatttggttta

SEQ ID NO: 231847 - DNA, 603 bp, Homo sapiens
ttcaggaaacttacaatcatggtggaaggggaagaaaacatgtccttcttcacatgatggcagcaaggggaagtgccaagcaaaagcagcaaaagcctcttataaaaccatcagatctcttgaaaactcactcactataatgagaagaacatgaaagtaaccacctccatgattcaattatctgcactgggttcttctcatgacacatggggattatgagaacgaaaattcaagatgagacttggatggggaaacagccagtccatatcattggttctttctctcatttttaattttatctactttattccacttataatgaagagattttctagctaaatctttccaacttagcaaatgagaaaaaagaattttttaaaatttacttggaataaatacttatgaagggattcratatttttttcaaaatgaaaatatggaagactttaaaaatatattatattatttattttttacagccctgttaggcgtgtttgatgctttgagaagtatataggtgtgggagaggcaacgtacatgcacaagaaagaagacagataaattaggacccagaacaggcagcagcagatgaaatgcaggata

SEQ ID NO: 231848 - DNA, 647 bp, Homo sapiens
cagtaacaagaactaagaaaattatacaccttgtctaaaaaatcaccctctggaatggtcaacaaatggctgtttcatgtaatcatgctcatggggattatttagcaaagttttgtggttttagccatattttatcatagtttgagcaatgttgtaagggatatgaatcaatcaggcaagattagcttatgtggcaataacaaacaaccactaacactcagtggcttaaagctacaatggttgtatrtttttctttcgtttcttaatttctcacccaagttacatttttaaaaatagtcatttagagtccctgaactgtgtcactatcctcctaataaagtagccactatcagaaatgttctctctagagggaaacaaataaacaaacaatgtcacaaagcattccctgaattttaaatagatttaaatcacctggaaatttaaattgcttgtaaatgagacaaatcatttctggtcccatttcactggaaataatcacaagaagaaacaacttcaaaaagatgggaaaatgcaacatacaaagtgactaaaaagaaaaaagagctagcatatttgtgaagaaatctaatatgtattagactctccataaaataaaagacattgaaacttcttattgtgtaaatgtc

SEQ ID NO: 231849 - DNA, 647 bp, Homo sapiens
cagtaacaagaactaagaaaattatacaccttgtctaaaaaatcaccctctggaatggtcaacaaatggctgtttcatgtaatcatgctcatggggattatttagcaaagttttgtggttttagccatattttatcatagtttgagcaatgttgtaagggatatgaatcaatcaggcaagattagcttatgtggcaataacaaacaaccactaacactcagtggcttaaagctacaatggttgtatatttttctttcgtttcttaatttctcacccaagttacatttttaaaaatagtcatttagagtccctgaactgtgtcactatcctcctaataaagtagccactatcagaaatgttctctctagarggaaacaaataaacaaacaatgtcacaaagcattccctgaattttaaatagatttaaatcacctggaaatttaaattgcttgtaaatgagacaaatcatttctggtcccatttcactggaaataatcacaagaagaaacaacttcaaaaagatgggaaaatgcaacatacaaagtgactaaaaagaaaaaagagctagcatatttgtgaagaaatctaatatgtattagactctccataaaataaaagacattgaaacttcttattgtgtaaatgtc

SEQ ID NO: 231850 - DNA, 643 bp, Homo sapiens
tacttgcatctttggtttaaagctcttcagttgaaatggcaaacacaaattctgagcaggtaatacatcaatgtggatttgtctaagacttaaaagctacagacaattcttcctttgttcttgagttttagtcttatttatccttctattgaatacagtaatcatttctgtctaaaataagagatagtaaaagagatgatattaacttagaattgaaaagaaatgaattttagttatcatgagggccttggagttagggataaatcctcattactaataacctaaaatattcattaaatgacagtgrtagaaaaatgagaagagaaagagtgtatattatatatataggagaaagagtgttggggtttctaataatactttgcctttcttatgctactgttctcctatttaagtcagtgactttcagtgcatttgcaaccataaaatatttaacaactttcacatacatccagcagcagcaaataatataccttcacattgatcctcttaaaggtttagagatgagttggggcatgtcacttcagagatgcttggcatcttaaaatgttctcaggatggtgatgcttgaaaatatgtagttggaaaatactccctcacacatgtgatcctgatatacctacct

SEQ ID NO: 231851 - DNA, 643 bp, Homo sapiens
tacttgcatctttggtttaaagctcttcagttgaaatggcaaacacaaattctgagcaggtaatacatcaatgtggatttgtctaagacttaaaagctacagacaattcttcctttgttcttgagttttagtcttatttatccttctattgaatacagtaatcatttctgtctaaaataagagatagtaaaagagatgatattaacttagaattgaaaagaaatgaattttagttatcatgagggccttggagttagggataaatcctcattactaataacctaaaatattcattaaatgacagtgatagaaaaatgagaagagaaagagtgtatattatatatataggagaaagagtgttggggtttctaataatactttgcctttcttatgctactgttctcctatttaagtcagtgwctttcagtgcatttgcaaccataaaatatttaacaactttcacatacatccagcagcagcaaataatataccttcacattgatcctcttaaaggtttagagatgagttggggcatgtcacttcagagatgcttggcatcttaaaatgttctcaggatggtgatgcttgaaaatatgtagttggaaaatactccctcacacatgtgatcctgatatacctacct

SEQ ID NO: 231852 - DNA, 643 bp, Homo sapiens
tacttgcatctttggtttaaagctcttcagttgaaatggcaaacacaaattctgagcaggtaatacatcaatgtggatttgtctaagacttaaaagctacagacaattcttcctttgttcttgagttttagtcttatttatccttctattgaatacagtaatcatttctgtctaaaataagagatagtaaaagagatgatattaacttagaattgaaaagaaatgaattttagttatcatgagggccttggagttagggataaatcctcattactaataacctaaaatattcattaaatgacagtgatagaaaaatgagaagagaaagagtgtatattatatatataggagaaagagtgttggggtttctaataatactttgcctttcttatgctactgttctcctatttaagtcagtgactttcagtgcatttgcaaccataaaatatttaacaastttcacatacatccagcagcagcaaataatataccttcacattgatcctcttaaaggtttagagatgagttggggcatgtcacttcagagatgcttggcatcttaaaatgttctcaggatggtgatgcttgaaaatatgtagttggaaaatactccctcacacatgtgatcctgatatacctacct

SEQ ID NO: 231853 - DNA, 597 bp, Homo sapiens
aaaaaaacagcaaagagagaattatccctaacttattctacaaggccaatatctcttttatactaaaatcagacaagcacacaatgaaagaagaaaactgcagaccaatattcctgattaacatagatgcaaaaccctcaccaaaatactatccaatcaaattcaacagtgtatcataaagataatacacgacaatcaaatgggttttataccagaaatgcaaagataattcaacatatgcaaatcaataaatatgaacattatataaacaaaattaagtacaaaactcatatgagcatcccaatagatgtaaaaaaagcatttgatgaaatcctgtgtgtcttcatgctaaacaccctcaacaacttaagcatagaagaaacatgccttcaagtgatawaggccagaagatggctgactagaagcagctagtgtgtgccactcccagagagaggagagagtgtggtgagtaaacactattttttgaactgaattgtccagaagagcactttgtgattcattaaggaagcaataggacccacggagaacagagaagtgagataggacagccacccacctgggattggcatggaacaa

SEQ ID NO: 231854 - DNA, 493 bp, Homo sapiens
acacatgacttttaaaaggatacaaatattcaatccattgcagaaataactaataggtcacaagagaaaaacatatcataccaatatattaattttcatttctcaaagaaaaaaatctaatgaaagaaaaacagtcacactattaagatgattatataaaacctaaaggcaaagttatacataaaagcattcacactgaatttaagaacaagagaacaccaactaaaaaaaatcacttttagcactattctgtaattatagcttatgtgattatgaaataaataatatataacagatgtaataaaaattgtagagaatgtactgttgaaaataaagtattttctctgtaggttgcacgcaggrttctatatatttttgttatataaaggtcactaatcctctcattcaaattttctgtatccttaagaattttttgtgctggattaatttgtttctgtttgataggtatttaaaaatatccaaaatggtggta

SEQ ID NO: 231855 - DNA, 404 bp, Homo sapiens
gaattccaaatgttccggttatttattggtatttagcmaactacaccagacctcagtggtttaaaatcattcaagaatcatgtattgtttctattatctgcagcatgagcaatgtaaccacacagcttcagcttgggcagatcaacttaggctggagggtgtgcatcaaaggtgactctcatatgtacaccaaatagtgctggctgttgcttgtgaactcaatggtagtagtttgatgggagtctttgtttctctacacataggcttctccaggggctgcttgggattcctcacaaaatatcgctagtttacaagtgttagaagagattgaggaaactgaaatatttcctatgacctaatcttgaaagtccagaatatcactttcaccaccttctgttggtcaa

SEQ ID NO: 231856 - DNA, 464 bp, Homo sapiens
taaattctttaatggatttaaagagggctgttggttttcagtttagcttttttcttgttatgaggatgggagtgatgccttccaggctctctacatgctagattggaaactggaatgtgctagattttaactatgtaatcatatatgtaatatatacacataggcacagaaatgtaaaatgtgcatgtaataaaacaaagacctcctttaaaaaatgtgaacctgtacaataggcataagtgaattttagcatgccttttactttagatatgtgcagtcaaataaattccactttatagtcatgtttacatgatgaatattttttcctaacactaaattacctctccatgtttaaaawcaaagccttgaagtgccaactgtatttattatgccagaatgttaatatgatttcatatcctttgttcttcctaaatctattcttcttctttccctgaaaccactag

SEQ ID NO: 231857 - DNA, 627 bp, Homo sapiens
agaaagtgtccatttataaccatactggtagagtaaagtaaccaagaaaaactggtgaattatccaaggctagtcacaggttgggatgagtgagaggcctgagggagtagggaagagctttcaagaaactcgtaagacccatagctttacagagggtcattcaacaggagccttggccactggtagtgatgtagccattgctgacccatgcctctggagagaagggctgaggatataagtattctgagagatttctcctcctaccctctcatctactgctgatgcctcatactggctgactccaaagagaattcagagcacaagtgagtctgggtgatgcaatccatggakgctgtctccagcagggcggagatgggtggagtagatctggaggggacatcagagaggcaacaagtaccacatctgttttttaggattggaatttagcatccctgaagcagaaccaaaaaaaaaaataatagttggttgagaatcgatcttgtgtcttaaatcagaaaaaaaaggcagatttttttaaaggataagacaataaaatctagagtactcagagataagcttgaataattcagatcatagctcaacattgttcaagagaaaagtgttcaa

SEQ ID NO: 231858 - DNA, 544 bp, Homo sapiens
agaaaagaattagtcttttttttttttttttttttttgagatggagtctcgctctgtcactcagggtggggtgcagtggcgcgatctcggctcactgcaagctccgcctcccaggttcacgccattctcctgcctcagcctcctgagtagctgggactacaggtgcccgccaccacgaccaggtaatttttttgtagttttagtagagatggggtttcaccgtgttagctaggatgggctcgattttctgaccttgtgatcctcccacttcggcctcccaaagtgctgggattacaggcgtgagccaccrtgcccggcccagaattagtcttaaatccatattgctaagttgtaaaaaagccattttgaaaaggctacttactgtataattccgaggacatgacactctgggaaagagaaaactatacagacaatataaaatcaatggtttttcagggctttggagaacagaggtaaggactgcacagggaatttttagggcagtaaaactatttggtgagataatggaatggttaacacataa

SEQ ID NO: 231859 - DNA, 582 bp, Homo sapiens
ctgggaaatatttggtattgcctttctttgaggatggggtaaattttaatcaatgggccctaattgctttactttagctgggaatgtatttgggaaggggaatgaggttaaagattgataggtttcactaaatggatgaattttaataaatatttgtcatctgaagaggcgaggcagggaatccttgcatatgaacagccatatagagtttggcaagagatatggtccgcattcagcaatagtaccttgctgcttttacttaggacaagtgcgtggtgcctacatttgttcactcagattcccttatcttggactttgaatgaagataggaaaacattctttctggaagccaaaacattgtcagtaacataaagtttccaggggcaaccttagaatactcttagagtattcacagacatgatgaagcacctgtttttttgatggtgggcacaatggtaatgccrctacagtgatcctggcatgattttggttatggttctagtagaatatcttctctatatctaaagatagcccaatctgtttctattctatatctgtttctctagccttttcaatgattgt

SEQ ID NO: 231860 - DNA, 576 bp, Homo sapiens
aaagccaaaagctggggaaataatcacacggcagagttcacaatagctgtcaccaaaaacctggttggaacatcagcaatttatgataagacatgaagacagaagatactttctatgcagtttaagaaagttttttctctgcagagatataatttatttggttgagttttcatttctctgggaaaaataaattgcttttacatgaatggagggctcacctgggttggaggggctcaaattatgtttaaagtggcacagtgaattccaggcatgccacatagctgagagtttattatctggatgatgctatcatctggtgcccattgtttaactctctgggaagtttgtttacatgagaaggctgaatctaacttgaaaagagaccactaacttgaaaacctrgaccacccaattctccctcccaagttgaaggtaacagagcggcggggacaagtttggcagagataactggatttttctaatattcatctctttctctaaagcgagtagctttaccctgaagatgcccacagagttagctctgagacccattaagttaataaaagaaagaagaaa

SEQ ID NO: 231861 - DNA, 524 bp, Homo sapiens
ataaacttaaattgtgtaaatacctcaattaaaaggcagtgtcagatttcataaagcagggatcctcaaatagatactgctttcacaatatgcacttcaaatataaaaatacaaataagtggctgagcacggtggctcacacctgtaatcccagcactttgggaggtcgaggcgggcggatcatgaggtcaggagttcaagaccagcctgaccaacatggtgaaaccccatctcccctaaaaatacaaaaattagctgagcatggtggtgtgyacctgtaatcccagctactcgggaagctgaggcaggagaagcacttgaacccgggaggcagaggttgcagtgagccgagattgtgctactgcactccagcctgggcaacagagcaagactccatctcaaaaaaataaaaataaactaaaataaaagcaatgggaaaagatagaacaagatagcactaacataaaaaaaagctacacaggctacattaatatcagacaaagaagatttcagagcaaataatg

SEQ ID NO: 231862 - DNA, 592 bp, Homo sapiens
aaacacacccaaaagtgaatccaaaacattttgagaatgggaaacatttaaaatcagtccattcaaaaggcacattaaattcaaaaggccaaaaataaaacagatgactgacttctcaaaagaagtgatggaaggcagaagatattgaaaaggtatctataaagaactgaataaatataattgtcaaactagaatttgattcacagtggactcatcctttaaaagagaagatgagaagccaggcatggtggctcacgcctttaatccctgaactttgggaggacaaggcgggtggatcacctgaggtcaggagtttgagaccagcctggccaacatggtgaaaccccgtctctactaaaaatacaaaaattagctggacttgatggcacgttcctgtaatsccagctacccgggaagctgaggcaggagagtcacttgaacccgggaggcggaggttgcagtgagcagagatcgcacaattgcactccagcctgggcgacaaaaacaaaactccatctcaaaaaaaaaaaaaaaaaaaagaagatgagatggaaatatttgccatacatacacatacacacacacacacaca

SEQ ID NO: 231863 - DNA, 466 bp, Homo sapiens
agtatctacctcttctgttctatctatgcagccactgatgcacaaccacaacaatcaagaacaatgatggagacataatmtcaccaaagaaataagatgccagggactgtctgaccttaaagaaatggagatgtataaactgcctgacaaagagtttaacataactgttttaggaagctcagcaaacttcaagaaaatatagagaaatatttcaactaaataaggaaaaatatgtgaccagaatgagaaattcaatagagagattgaaatagtaaaaaatccacacagacattttgaagctgaaaagtataatgaacaaaataaaaagtgcaataaagagcacagacagcagaatttatcaggcagaagggaaaatttgtgaactcaagaccaggttatttaaaaacatacagtaaaaaatgtgaataaaaaagaatgaagaaagttatggaactaatgggacagg

SEQ ID NO: 231864 - DNA, 516 bp, Homo sapiens
cataacctagtgagcattgtactcaatagataatttytcaaccctcaactctctaccttttggagtctctgatacctattattccacgctgtatgtccatgtgtacacattgtttagctcccaattacaatcgataacatgcagtatttcactttctgtttctgaattatttcacctaggataatggctgccagtcccatccatgttgttgagaagacaagattttattcgttttatggctgagtagtattccatggtatgtatcacattttctttatccaatccctcactgatgaatacttaggttgattccatgactttgctcttgtgaaaagtgctgcaataggcatatcagtccagatgtcttttcgatataataatttcttttgcttcattcatttactcagtagtggcattgctgtattgaaaggtagtgctatttttacttctttgaaaaatatttatattttctgtcagcagtgtataggtgttcccttttctgtgcaacctggccta

SEQ ID NO: 231865 - DNA, 556 bp, Homo sapiens
gccacccccaaacctgccactttggcataaggattattttgagctgaaaatatttaagattcaataaatgcagtaaaaagtcttccyatggcttctcttatctgactgaaagcataaacttttgaaatatgaaggcagccaccaatcctctctcctggggaagttttatgaccatgaagaagatgaaagtcagccttgagatggacctttgcaaacaagtcttactccatttgtccccccatatatgtaccttcccagagtttgccaccgttggaatcccaaaatcttttcttttgttcttatcatttctctgcaaatgcattgtttttagttaagatgctattaatacatcagtccaggttctggccacccttctgagggactcatcactgagtttctcctgtgtaggtgtgctgcatgtgttaatgttctgattttcctgttaatctgtcttttgtcagtctgatttgcaaattcatagctggaaaacttagaaaagtagaaaaaaagtgggtttttttccccttctctacgatagcagtcatttaattctaaa

SEQ ID NO: 231866 - DNA, 585 bp, Homo sapiens
gttcttttcctaattactggaccagtaacaagtaaaggtattcaaggtcatcattttttgccatatggactgaggaggagaggaagctggatgcagcaagagagaggaatgaaggcaacactcacagaagagtagagatgagaggcagagagactagttgtgttcaggtctctgcttccagcttgctcctggggtcccactatttcttgccattaggtttttgcgatccagtccttacaatcaggtgtcctgctttgcttaacttaattttagtaagattcttacttataaccaaaagaatataactaatgtagtctgttaaagacactaaaatcctgtttgccacatttatggtaaaatttttagtataatgatttgttatataaacaaaaacatggcaatatcattcttagcctataggctttttaagtgaaaaagaaaactataatttctcctccttctccaccatcttcttcccatcttcctctttcttcttttctgaatcttcttccttttttttggtgctcttggarcctagaacaatgatgggcattaatagatgctcaattaatgtttattgaccta

SEQ ID NO: 231867 - DNA, 575 bp, Homo sapiens
tgtattcaggttttctattcctgattcacttttggtagctacaacatttatgatggcaggaagagaccacacttagacaggtgagccaccatccctgcccttcccatctcttactgcatcctcttacttggctaaagaatcaggaacttggtggaagccaggcagccacacagcaggagcagattcagctcatttcagcccagcttccaggcctccagaaccttgaacacagttcgtatctgtaggttacacttgctgtacaagatagtcactttttatcacctttgtcattacttcaaaggagtaacataaacaatccatgcccttactataaattatacagctctctggaccttctgctgcttaagccaaatgcagcaccagaatagtcacaatttcactggggaaaaagcaggtgtccctaagcagtatctgccactagatcactgccatccaaccccattttccccagtcttgatatttttcactgaaattatccarttttgtctaagtcttcaaatttactggcatcaggttttccacctccctcttttcattattcatctcaattgtgc

SEQ ID NO: 231868 - DNA, 251 bp, Homo sapiens
aagtttctttttggagtgatgaaaacttccaaaattggttatggtaatgattgcataactctgtgaaaatactaaaatmattatattgtatattttgggtaaattttatggtctgtgaattttaaagttgttaaaagataatagcaggtctgtagggcaacagcaatgaaagtgaaatttataaaaagatactatttacaatattactgaaaatgaattagaagtaagtccagcaaaggtatgcaagatct

SEQ ID NO: 231869 - DNA, 631 bp, Homo sapiens
gttcccagtgggttctgatgggagtaaggtgtttggggggacttgcaggcattgtgagaagtgaggcccagtgggtcctagctacctaaggygcataaatggtgaactgtgccttctcacacaaggagcctacgctatgcagcatggaccacgctgggtggaaggctgcctccaaagagtgattcttggaaatcttgaacctgagcaaggctgaccagcctcccacatgcatatgcatgacagcattcttcacattccacccaagatctccatgctaaagcagctccacacgctattcctggaaaggtaaacgtggatggagaaatgaaagcttctcatggccatcaacacacacatttctattcattccagaagcatttattgagcacctgctgtacagcaggcactattctaagtgccggagatccagcagtgatagacaagttccttccctcttggagctgacagttctaatccaaagctttggagggcagtgaccatctccatcttgtcaatatcaaagcattaatagccccctcaacacacaggtgttaggtatctgtagacagaaaatgtccatgtatcctttgcaataattctaaatatcccccacaagttggggacctcaaat

SEQ ID NO: 231870 - DNA, 631 bp, Homo sapiens
gttcccagtgggttctgatgggagtaaggtgtttggggggacttgcaggcattgtgagaagtgaggcccagtgggtcctagctacctaaggtgcataaatggtgaactgtgccttctcacacaaggagcctacgctatgcagcatggaccacgctgggtggaaggctgcctccaaagagtgattcttggaaatcttgaacctgagcaaggctgaccagcctcccacatgcatatgcatgacagcattcttcacattccacccaagatctccatgctaaagcagctccacacgctattcctggaaaggtaaacgtggatggagraatgaaagcttctcatggccatcaacacacacatttctattcattccagaagcatttattgagcacctgctgtacagcaggcactattctaagtgccggagatccagcagtgatagacaagttccttccctcttggagctgacagttctaatccaaagctttggagggcagtgaccatctccatcttgtcaatatcaaagcattaatagccccctcaacacacaggtgttaggtatctgtagacagaaaatgtccatgtatcctttgcaataattctaaatatcccccacaagttggggacctcaaat

SEQ ID NO: 231871 - DNA, 559 bp, Homo sapiens
cagcagtaatagacaaggcagggtgggcttggcgttctcatatgctgttgcagggagtataaattattattgcctgtctgaacaatgcaacaaaagccttaaaaatgggcatgcactagacccaactatttgttttargaaattgtgttgtgctaggaaataattgcagaagtcgtcaaatacaaagctacaagactacgatcgtcacaatagtgttcataatagtgagcaatgagaaacagcctaaaagtttaattacaagacaaccaaacaatgaaatactattacaaacacaaaaaatattagagacgagtatttaatgttccagagaaggtgtctagatgattgttaagggggaaaaaagccatcaactaaacactaaatgcaatgtacagaatgttctgttcatattatgatctatgtgcatacttaggggtggaaaataaacttgaaacacagtccatcaaatgctagcagggtttatctttgagtcacaagataatatgtgatctttttaaactcctctttttggccctagtttttataataactatgtatt

SEQ ID NO: 231872 - DNA, 431 bp, Homo sapiens
atagcatcaaatctcaaagaaataacggccaagagagtttttatttttcattgtaactgagaaagattataaaatattaattttcacctagccttgaagataatggctttgtgcatcaaaatgacttagatatccccaasggaaccaaatatcagaattccatcatatgtaggacagttctttcttttggcagccaaattttgcaactaacatccagcaaagatcaaagagcatttttggactcctgacatccttgtgaagtatttgtccatttttctgtgcattacagtaatcttggagtgctatgtcttgttccaacgaactgcagggtaacgaatgtgccagagatgttctttggcagaatggagaagactgaattatccaagtaaatctgaccagcacaaggacctgttgtaacattgtttatgctc

SEQ ID NO: 231873 - DNA, 447 bp, Homo sapiens
ctacaaaaatctattgaatagcatcaaatctcaaagaaataacggccaagagagtttttatttttcattgtaactgagaaagattataaaatattaattttcacctagccttgaagataatggctttgtgcatcaaaatgacttagatatccccaagggaaccaaatatcagaattccatcatatgtaggacagttctttcttttggcagccaaattttgcaactaacatccagcaaagatcaaagagcatttttggactcctgacatccttgygaagtatttgtccatttttctgtgcattacagtaatcttggagtgctatgtcttgttccaacgaactgcagggtaacgaatgtgccagagatgttctttggcagaatggagaagactgaattatccaagtaaatctgaccagcacaaggacctgttgtaacattgtttatgct

SEQ ID NO: 231874 - DNA, 316 bp, Homo sapiens
accacattttctgagcatgaccagatccctttctcccctactccctctgggtcctacacaagaaagtctattttccactaaggtgttttaggtggcaggaccctcctgagagggagctgaaggacagggctgggtgggaggacctttggcagtggcagtgaaggaagaagaacaacattcctgaacattcagtccacaggccctgctctgtggaccccrcactctctcaccctctctggacaccaacctccggctccatccccagggtgactcacctgcataatgacccctggatctcctttggtacccttgaggc

SEQ ID NO: 231875 - DNA, 390 bp, Homo sapiens
cccttcccacacacgctgtgctcacgcaggtcccatggtcacaataactctggaagaggtgccaaatcctccaaaggactctgcccccctccccacccactcctgtcccatcctgtgatggaagagtggccagcacgggtcgagcactctcgtcttccctgctctgaccaccagggggtgccgtgcaagcagccgattgcctgtcctccaaggactgacccctgggaagaaggaggtggggtggccccttccacgggtcamgatggtgtcagggaagctctgaatgcaaatattaggggctttgcttagccagggctttctcccaccatccgggctgtctacacatcaagaagaaaaggacactttggctagctccattgctttcaactg

SEQ ID NO: 231876 - DNA, 429 bp, Homo sapiens
  misc_feature (1)...(429): n = A,T,C or G
cactaaaattaagtcactcaaaccgaaaccaactatactnnnnnnnnnnnnnnnnnnnnnnnnnnnnnnnnnnnnnnnnnnnnnnnnnnnnnnnnnnnnnnnnnnnnnnnnnnnnnnnnnnnnnnnnnnnnnnnnnnnnctaattcccaaccttcgtgcaaggcctaattcaaagggcatctcttccataaagggttccttgacctcttcagctggttatagtctttccctcatcagaagacccaaracagtctatgtgtacctctcatgacacttggtttatgttttttttttttcagacactggttttgtgggagcaggatttatatctgattcttccttgcatactctatggcaccttgaacactgctttgctcaaagtactaaaaaactgtttaagatttgttatctgaactttggacacagaag

SEQ ID NO: 231877 - DNA, 475 bp, Homo sapiens
caccctaccagaagatagaacatttctatcaacctgtagaattccctcttgctcttctcagtcaacattcccctccctccacaaccagaagcaactactgatccgatttttgttaccacagattagttttaactattctataactttatatcaatggaatcatacrgtataaagtattttgtgtctggcttctttcatgtcctttaatgcttctgagatttatccttgccattacatgtatcagcaatttgttcttttttattgccgagcagtgttctactgtatggatataccagattgcttgtctaggctcttgctgatgggcacctggatgtgatattgtgatacaataagaaatgtgtatttgatccctgaccctggttcctcgcagagagttcccaaaactcttgtaatttcctgagcaagagggatgctaggtgcatcttttgttctaatatttggtctgtggcgccag

SEQ ID NO: 231878 - DNA, 475 bp, Homo sapiens
caccctaccagaagatagaacatttctatcaacctgtagaattccctcttgctcttctcagtcaacattcccctccctccacaaccagaagcaactactgatccgatttttgttaccacagattagttttaactattctataactttatatcaatggaatcatacggtataaagtattttgtgtctggcttctttcatgtcctttaatgcttctgagatttatccttgccattacatgtatcagcaatttgttcttttttattgccgagcagtgttctactgtatggatataccagattgcttgtctaggctcttgctgatgggcacctggatgtgatattgtgatacaataagaaatgtgtatttgatccctgaccctggttcctcgcagagagttcycaaaactcttgtaatttcctgagcaagagggatgctaggtgcatcttttgttctaatatttggtctgtggcgccag

SEQ ID NO: 231879 - DNA, 546 bp, Homo sapiens
aaagccagttcagaaagaagcagctagagattgatgtsaaaaacacatcattcctttcttgcttatataaacaaaacacatgcacatgcactcatacatgcacagacacatagtacgcactgaaattctcataaccatatatagactcaatcactataaggccctcttataaacttcacaaacttgctaatttaagaacctcttcttagttggcaaacattttctatagtgaacacaagatagtaaatagtttaagctttttgatctctgttccatatgatctctgttcaactactcagctctgccattgtagcacaaaagaagctatagaaaaaaaatcttcttaagtagagttaaatatttggactagattcatactcgaactttacctgactagtagtagggtccagattctactgcctttggaggaaaatttatactaaaatttttctttaagaacttttggagaaatataagtactaaagtttaatttgtgcatgtccttctactagcaatttcatcctaggtatgtaacctaagaaaatc

SEQ ID NO: 231880 - DNA, 546 bp, Homo sapiens
aaagccagttcagaaagaagcagctagagattgatgtgaaaaacacatcattcctttcttgcttatataaacaaaacacatgcacatgcactcatacatgcacagacacatagtacgcactgaaattctcataaccawatatagactcaatcactataaggccctcttataaacttcacaaacttgctaatttaagaacctcttcttagttggcaaacattttctatagtgaacacaagatagtaaatagtttaagctttttgatctctgttccatatgatctctgttcaactactcagctctgccattgtagcacaaaagaagctatagaaaaaaaatcttcttaagtagagttaaatatttggactagattcatactcgaactttacctgactagtagtagggtccagattctactgcctttggaggaaaatttatactaaaatttttctttaagaacttttggagaaatataagtactaaagtttaatttgtgcatgtccttctactagcaatttcatcctaggtatgtaacctaagaaaatc

SEQ ID NO: 231881 - DNA, 546 bp, Homo sapiens
aaagccagttcagaaagaagcagctagagattgatgtgaaaaacacatcattcctttcttgcttatataaacaaaacacatgcacatgcactcatacatgcacagacacatagtacgcactgaaattctcataaccatatatagactcaatcactataaggccctcttataaacttcacaaasttgctaatttaagaacctcttcttagttggcaaacattttctatagtgaacacaagatagtaaatagtttaagctttttgatctctgttccatatgatctctgttcaactactcagctctgccattgtagcacaaaagaagctatagaaaaaaaatcttcttaagtagagttaaatatttggactagattcatactcgaactttacctgactagtagtagggtccagattctactgcctttggaggaaaatttatactaaaatttttctttaagaacttttggagaaatataagtactaaagtttaatttgtgcatgtccttctactagcaatttcatcctaggtatgtaacctaagaaaatc

SEQ ID NO: 231882 - DNA, 514 bp, Homo sapiens
gaaaaagctcctcagtcagccagtgttacagcttcaaataaaaggaacacatattgaaggtaagttagcattttatattaaacatttattcagacatgtaaaagaaacaattttattaactcattactaaaatatttaagcaacgaaacctcctgcttgytgcctcttgtcactcacttctctgctcattcatttctattatgtgtttattagatttaggttaacttaatagaaatatgttattgattttattatacatagtttaaaattgtcaattcacttcttgtaagttctacatttactggtggccctataccttctttttttttttttttttgtctttcatttgtttcttgctataaatttccacaaagcagttaaaatgtatctttaaagcaaaacatttccttgtgtatggaaataggataaaatgtttccagagcaattaggatataatgccttgaagtttagaaaactcacactattagtgttttttctccctctccgaagcaga

SEQ ID NO: 231883 - DNA, 516 bp, Homo sapiens
aggtaagttagcattttatattaaacatttattcagacatgtaaaagaaacaattttattaactcattactaaaatatttaagcaacgaaacctcctgcttgttgcctcttgtcactcacttctctgctcattcatttctattatgtgtttattagatttaggttaacttaatagaaatatgttattgattttattatacatagtttaaaattgtcaattcacttcttgtaagttctacatttactggtggccctataccttctttttttttttttttttgkctttcatttgtttcttgctataaatttccacaaagcagttaaaatgtatctttaaagcaaaacatttccttgtgtatggaaataggataaaatgtttccagagcaattaggatataatgccttgaagtttagaaaactcacactattagtgttttttctccctctccgaagcagatacgctgttcagttctttcaaatgtgtgagcagttgtcttaaactataaaatggaacta

SEQ ID NO: 231884 - DNA, 514 bp, Homo sapiens
gaaaaagctcctcagtcagccagtgttacagcttcaaataaaaggaacacatattgaaggtaagttagcattttatattaaacatttattcagacatgtaaaagaaacaattttattaactcattactaaaatatttaagcaacgaaacctcctgcttgttgcctcttgtcactcacttctctgctcattcatttctattatgtgtttattagatttaggttaacttaatagaaatatgttattgattttattatacatagtttaaaattgtcaattcacttcttgtaagttctacatttactggtggccctataccttctttttttttttttttttgtctttcatttgtttcttgctataaatttccacaaagcagttaaaatgtayctttaaagcaaaacatttccttgtgtatggaaataggataaaatgtttccagagcaattaggatataatgccttgaagtttagaaaactcacactattagtgttttttctccctctccgaagcaga

SEQ ID NO: 231885 - DNA, 474 bp, Homo sapiens
aaagccttcttgatgtatttcccaggaaatgagaaagttattctaagggccaggttraagaatccttttaagtcagcacttttctgttttttgtcttcaacaaaattaaagggaggtataacagtggtcaatagctagatttttaaatataatttttgataacatatcactatgaatttgagtgtatgacttggatgaatttctaagaattgagtgatgttataaaaattatattctttatttactatgtaaataaatatttctcatttactatataaaaaaatagttaacgctgaatcctgtctcattctatcagtaagtcctatttatccatggatacattatttaagtagacaaaaagaaaactatctgacaaggcaatgtcttgtcataaaatttcaatttctaggtttgataattattaataacatttatattaataacctactataacttacactaaaacatgcagtc

SEQ ID NO: 231886 - DNA, 474 bp, Homo sapiens
aaagccttcttgatgtatttcccaggaaatgagaaagttattctaagggccaggttaaagaatccttttaagtcagcacttttctgttttttgtcttcaacaaaattaaagggaggtataacagtggtcaatagctagatttttaaatataatttttgataacatatcactatgaatttgagtgtatgacttggatgaatttctaagaattgagtgatgttataaaaattatattctttatttactatgtaaataaatatttctcatttactatataaaaaaatagttaacgctgaatcctgtctcattctatcagtaagtcctatttatcyatggatacattatttaagtagacaaaaagaaaactatctgacaaggcaatgtcttgtcataaaatttcaatttctaggtttgataattattaataacatttatattaataacctactataacttacactaaaacatgcagtc

SEQ ID NO: 231887 - DNA, 474 bp, Homo sapiens
aaagccttcttgatgtatttcccaggaaatgagaaagttattctaagggccaggttaaagaatccttttaagtcagcacttttctgttttttgtcttcaacaaaattaaagggaggtataacagtggtcaatagctagatttttaaatataatttttgataacatatcactatgaatttgagtgtatgacttggatgaatttctaagaattgagtgatgttataaaaattatattctttatttactatgtaaataaatatttctcatttactatataaaaaaatagttaacgctgaatcctgtctcattctatcagtaagtcctatttatccatggatacattattyaagtagacaaaaagaaaactatctgacaaggcaatgtcttgtcataaaatttcaatttctaggtttgataattattaataacatttatattaataacctactataacttacactaaaacatgcagtc

SEQ ID NO: 231888 - DNA, 474 bp, Homo sapiens
aaagccttcttgatgtatttcccaggaaatgagaaagttattctaagggccaggttaaagaatccttttaagtcagcacttttctgttttttgtcttcaacaaaattaaagggaggtataacagtggtcaatagctagatttttaaatataatttttgataacatatcactatgaatttgagtgtatgacttggatgaatttctaagaattgagtgatgttataaaaattatattctttatttactatgtaaataaatatttctcatttactatataaaaaaatagttaacgctgaatcctgtctcattctatcagtaagtcctatttatccatggatacattatttaagtagacaaaaagaaaactatctgacaaggcaatgtcttgtcataaaatttcaatttctaggtttgataattatyaataacatttatattaataacctactataacttacactaaaacatgcagtc

SEQ ID NO: 231889 - DNA, 450 bp, Homo sapiens
tgaatatttccttggctgtgtagacgttttttagtttgatgtaatgccatttgtctaactgtgcttttgttacctgtgcctttggagtctgtaaaaaaaaatcatcaccaagaccaatgtcatgaagattttgcctatgatttcttgtagttttataatttctgggtttacattcaattccttaatctattttgagttgatttttccctgagctatatattttttaaataattttatattttattttagattcgggggtatatgtgcaggtttgttacctgggtatattgtgtgatgctgaggtttggggtatgaatgatcttttcacccagrtactgagaatagtacccaatagatagtttttcagcccttgacaactccttccatctctccactagaaatcccccatgtctattgttgccatctttatatccataattaccaagtgtt

SEQ ID NO: 231890 - DNA, 450 bp, Homo sapiens
tgaatatttccttggctgtgtagacgttttttagtttgatgtaatgccatttgtctaactgtgcttttgttacctgtgcctttggagtctgtaaaaaaaaatcatcaccaagaccaatgtcatgaagattttgcctatgatttcttgtagttttataatttctgggtttacattcaattccttaatctattttgagttgatttttccctgagctatatattttttaaataattttatattttattttagattcgggggtatatgtgcaggtttgttacctgggtatattgtgtgatgctgaggtttggggtatgaatgatcttttcacccagatactgagmatagtacccaatagatagtttttcagcccttgacaactccttccatctctccactagaaatcccccatgtctattgttgccatctttatatccataattaccaagtgtt

SEQ ID NO: 231891 - DNA, 450 bp, Homo sapiens
tgaatatttccttggctgtgtagacgttttttagtttgatgtaatgccatttgtctaactgtgcttttgttacctgtgcctttggagtctgtaaaaaaaaatcatcaccaagaccaatgtcatgaagattttgcctatgatttcttgtagttttataatttctgggtttacattcaattccttaatctattttgagttgatttttccctgagctatatattttttaaataattttatattttattttagattcgggggtatatgtgcaggtttgttacctgggtatattgtgtgatgctgaggtttggggtatgaatgatcttttcacccagatactgagaatagtacccaatagatagtttttcagcccttgacmactccttccatctctccactagaaatcccccatgtctattgttgccatctttatatccataattaccaagtgtt

SEQ ID NO: 231892 - DNA, 582 bp, Homo sapiens
aatggtaatttaatatttaaataaataataaaaataaaatttactagttctttatcttgtatttttctaaggctccttagatcatactttacacaaaattaggttatgtaactaatcagtaaatatatagtcctttttattagtttgttttttacttggaatttgtgaggaaatttatgctcctatttcttcccactaygtaggaaagtttaatataatgcttttactttagagccgtctttcttttagatagatattacaaaatgttcactctatgtggaaatcctactgataaattcttggttttaaaagattttccacaaaatccaatttgtaatattttattattataaatcatatatgatagatggtataaaaatagttgaacttctatttaagttagtatagatatcttaaccgattttttctatgtcttctacctcaacacagttcatcttatggagtatacactatttttaatttgccctcttttgaataaaggcagtgttaagatccttcctcattttaagttgtttttaagaatcatattttataatctcaaaaactatcaaacaacaaata

SEQ ID NO: 231893 - DNA, 429 bp, Homo sapiens
taggagtcagtaaactttctttaaagggccagatagtaaataaattttgctttatgaaccatgtggtttctgttgcacttactctgctgctgcagcatgaaagcaactatcaacaatatttaaacaaatggatgtagctgtgttactatcacaaaaacaggcagccttctggattyggcctgtggactggccatagttggccatctcctaatttagaatgtggattccttaaatttttttctttattcctttttcaaactgacattaaaacacactgacattaaaacacactgatatgtgttttagctacttttatataatttttctcaatgatcatcataatagtttatgaaacaagtggagaaaatactttaaaaaaatttaacattatcaaaaattccaaatgtatacaaatacaaattctcacat

SEQ ID NO: 231894 - DNA, 429 bp, Homo sapiens
taggagtcagtaaactttctttaaagggccagatagtaaataaattttgctttatgaaccatgtggtttctgttgcacttactctgctgctgcagcatgaaagcaactatcaacaatatttaaacaaatggatgtagctgtgttactatcacaaaaacaggcagccttctggattcggcctgtggactggccatagttggccatctcctaatttagaatgtggattccttaaatttttttctttattcctttttcaaactgacattaaaacacactgacattaaaacacactgatatgtgttttagctacttttatatamtttttctcaatgatcatcataatagtttatgaaacaagtggagaaaatactttaaaaaaatttaacattatcaaaaattccaaatgtatacaaatacaaattctcacat

SEQ ID NO: 231895 - DNA, 529 bp, Homo sapiens
tccagcttgtctttgattgcccatgggccagttcacttcagcctctaattggcatgagccagcccttcatttacatagggtgtaaccaatgggagacctctagagggtacttaaaaccccagaagactttgctaccaaggcttttgagccacttgctygggccgctgccattctgtggagtgtactttcactactattgcctcccacttcagtaagtctacactttccttgcttgtttgtgtgtgctgttcagttctgtgttcagtgtgccaaggacctggacatctcaatgatcagaaccttctacccggtaacagtactgagaaaaatactgtaaatttatttaaaatcaactagttatataatttgcaagtggctacttttaattttctaataattacctataggaaatattaggaaaaggtaatttctgtcatcatcaccaccaacaatatttagtgtgcctgtaatgcactagccaggaaagagggagactgagaccgttggggtctgaaaaggagcaaggacc

SEQ ID NO: 231896 - DNA, 529 bp, Homo sapiens
tccagcttgtctttgattgcccatgggccagttcacttcagcctctaattggcatgagccagcccttcatttacatagggtgtaaccaatgggagacctctagagggtacttaaaaccccagaagactttgctaccaaggcttttgagccacttgcttgggccgctgccattctrtggagtgtactttcactactattgcctcccacttcagtaagtctacactttccttgcttgtttgtgtgtgctgttcagttctgtgttcagtgtgccaaggacctggacatctcaatgatcagaaccttctacccggtaacagtactgagaaaaatactgtaaatttatttaaaatcaactagttatataatttgcaagtggctacttttaattttctaataattacctataggaaatattaggaaaaggtaatttctgtcatcatcaccaccaacaatatttagtgtgcctgtaatgcactagccaggaaagagggagactgagaccgttggggtctgaaaaggagcaaggacc

SEQ ID NO: 231897 - DNA, 529 bp, Homo sapiens
tccagcttgtctttgattgcccatgggccagttcacttcagcctctaattggcatgagccagcccttcatttacatagggtgtaaccaatgggagacctctagagggtacttaaaaccccagaagactttgctaccaaggcttttgagccacttgcttgggccgctgccattctgtggagtgtrctttcactactattgcctcccacttcagtaagtctacactttccttgcttgtttgtgtgtgctgttcagttctgtgttcagtgtgccaaggacctggacatctcaatgatcagaaccttctacccggtaacagtactgagaaaaatactgtaaatttatttaaaatcaactagttatataatttgcaagtggctacttttaattttctaataattacctataggaaatattaggaaaaggtaatttctgtcatcatcaccaccaacaatatttagtgtgcctgtaatgcactagccaggaaagagggagactgagaccgttggggtctgaaaaggagcaaggacc

SEQ ID NO: 231898 - DNA, 529 bp, Homo sapiens
tccagcttgtctttgattgcccatgggccagttcacttcagcctctaattggcatgagccagcccttcatttacatagggtgtaaccaatgggagacctctagagggtacttaaaaccccagaagactttgctaccaaggcttttgagccacttgcttgggccgctgccattctgtggagtgtactttcactactattgcctcccacttcagtaagtctacactttccttgcttgtttgtgtgtgctgttcagttctgtgttcagtgtgccaaggacctggacatctcaatgatcagaaccttctacccrgtaacagtactgagaaaaatactgtaaatttatttaaaatcaactagttatataatttgcaagtggctacttttaattttctaataattacctataggaaatattaggaaaaggtaatttctgtcatcatcaccaccaacaatatttagtgtgcctgtaatgcactagccaggaaagagggagactgagaccgttggggtctgaaaaggagcaaggacc

SEQ ID NO: 231899 - DNA, 622 bp, Homo sapiens
acagacttcaaaactttgatacgctttaaagtgtattaaattgtctgtttttgtttgtttgtttgttttgagacggagttttgcttttgttgcccaggctgtagtgcagttgtgcgacctagactcactgcaacccccacctcctgggttcaagctattctcctgcctcagcctcccagattgctgagattacaagcaaacgccaccacccctggctaattttgtatttttagtagagatggggtttcaccaggttggctaggctggtctcaaactcctgacttcaggtgatccacccgcctcggcctcccaaartgctgggattacaggcgtgagccaccatgcccagcctaaattgtctgatttagtctgtgctgagcttgtttttcccaactgttgttgtaggcatgttcatgataatataccgttgatattttaatttttgggttaaattcctataaataaatatgagaaatttgttaggatatttaaagcatcttctaacctttaaaaatatgtgcttttaaaaattattaggttgtagaattgggaaaaaatgcaatttgtcttatctttttctattagcatgtttccagtgtacagttcattcaaaggggggata

SEQ ID NO: 231900 - DNA, 547 bp, Homo sapiens
accttatttatgagagtcttccaagcaatttatttggaaaaaccagataaatacaaatgtacagacagagaaagaagggaatttcatgttaaagggacaactctttaaagggccttaaagtgtagtccatcctgtaggtggtaggaacctgaactgtaccagtgtaattgtggcaagaggggagtctggagacatagattttttagcctaattactaaagatagattgaattagtaggccagtaggaactggtcttgttgggtaggtaggtgccaaccaggatcctgtcagccaggatagggtcaaytggtaactggaatttagtcaaatatgtgtagtttcacaactttgaatatttactaaaataatataatgaatgttggatgctatgcaggtttactgaaaagcagaaaatagtatgagtaaagtttccacttggttcaaattaatttcacctaactttggatttctgattatataggccaacattgatttttaagaaactattttgctttaaagtaaatttaaaaattttaatctacttggt

SEQ ID NO: 231901 - DNA, 547 bp, Homo sapiens
accttatttatgagagtcttccaagcaatttatttggaaaaaccagataaatacaaatgtacagacagagaaagaagggaatttcatgttaaagggacaactctttaaagggccttaaagtgtagtccatcctgtaggtggtaggaacctgaactgtaccagtgtaattgtggcaagaggggagtctggagacatagattttttagcctaattactaaagatagattgaattagtaggccagtaggaactggtcttgttgggtaggtaggtgccaaccaggatcctgtcagccaggatagggtcaattggtaactggaatttagtcaaatatgtgtagtttcacaactttgaatatttactaaaataatataatgaatgttggatgctatgcaggtttactgaaaagcrgaaaatagtatgagtaaagtttccacttggttcaaattaatttcacctaactttggatttctgattatataggccaacattgatttttaagaaactattttgctttaaagtaaatttaaaaattttaatctacttggt

SEQ ID NO: 231902 - DNA, 547 bp, Homo sapiens
accttatttatgagagtcttccaagcaatttatttggaaaaaccagataaatacaaatgtacagacagagaaagaagggaatttcatgttaaagggacaactctttaaagggccttaaagtgtagtccatcctgtaggtggtaggaacctgaactgtaccagtgtaattgtggcaagaggggagtctggagacatagattttttagcctaattactaaagatagattgaattagtaggccagtaggaactggtcttgttgggtaggtaggtgccaaccaggatcctgtcagccaggatagggtcaattggtaactggaatttagtcaaatatgtgtagtttcacaactttgaatatttactaaaataatataatgaatgttggatgctatgcaggtttactgaaaagcagaaaatagtatgagtaaagtttccacttggttcaaattaatttcrcctaactttggatttctgattatataggccaacattgatttttaagaaactattttgctttaaagtaaatttaaaaattttaatctacttggt

SEQ ID NO: 231903 - DNA, 547 bp, Homo sapiens
accttatttatgagagtcttccaagcaatttatttggaaaaaccagataaatacaaatgtacagacagagaaagaagggaatttcatgttaaagggacaactctttaaagggccttaaagtgtagtccatcctgtaggtggtaggaacctgaactgtaccagtgtaattgtggcaagaggggagtctggagacatagattttttagcctaattactaaagatagattgaattagtaggccagtaggaactggtcttgttgggtaggtaggtgccaaccaggatcctgtcagccaggatagggtcaattggtaactggaatttagtcaaatatgtgtagtttcacaactttgaatatttactaaaataatataatgaatgttggatgctatgcaggtttactgaaaagcagaaaatagtatgagtaaagtttccacttggttcaaattaatttcacctaacttyggatttctgattatataggccaacattgatttttaagaaactattttgctttaaagtaaatttaaaaattttaatctacttggt

SEQ ID NO: 231904 - DNA, 523 bp, Homo sapiens
ataccttaatgcttcatttccttcacctgatttttagtttgtatttcctgccttggagtcatcaaaccccctcagcaagttatattagtatcaacatcaaaatagagtgacctgcagaatatcttaatacagtgcttagtggtgatgttcatattggaaaaatttaacaaaacaaagtgcagaagaagtctcaggttgcagtccatatacaaattctagaacatcagaatcacttgggaagattttgacrtcagcaaagtgtgcatctaagaagtcctaactctaagagacaagaggtatcatactcctgtttctacacagaaaatatctgtttgttaatcatattgtttagtggctactacgtgatattttgggtattttacatttattttatatgataggtttgtttttcatattggcattttcccgagttttagaactagttatttaggaaatcagttggcaggggaaggggttgagtggtagctcatgcattattttaagacattggaggacaggttcc

SEQ ID NO: 231905 - DNA, 501 bp, Homo sapiens
ttccacttggttcaaattaatttcacctaactttggatttctgattatataggccaacattgatttttaagaaactattttgctttaaagtaaatttaaaaattttaatctacttggttatagtttaattgagaacgaaggaattggaaaacagttccaaaacacgatggtaaaaaggaaagttattattaaggtgatgtggagtaagatagttattagagtggatcgtgttagagaccaatcttgaattaagatttggagaaagtgaatgacatggattagttgagaaagaactgacagcaagaatacacagtgaacaaggaatgaggggaaagtaggcaaaacattgttaactcttccattattttctttatttttataattattttaataaaataattttacagtaataattcttccatttattwctcgttcacttaggctttttattacctgtttttgggattgttgtggttttgactgttgtgatttaaaattctc

SEQ ID NO: 231906 - DNA, 574 bp, Homo sapiens
ccagtctgttgtgggtcctgtcctcattcttctatacctaacttttgaaagtattattctcatttaaaagstttttttaaaacaaaactcaaggagtaaacatcaagaaaatagcaacaacaaaatctcattaattttatcacactaggaatctcgccagataagccatgtttggcaacaccaggtttatatgactcactctctcggagactgcattctttaatttggttgctccacttgagagttttaatttcctattgttctttaatcatttgtggatgcttttaattaagaggcctcagaattttcacaagtgagttctattatccaacctctttttataaaaataagatatgaaaattagatttaaacattgagtttgtggcataatcaccaaaaaggaaggagtagtttttatttctcaaatctgcttttgtaatatctctcctattgattattccctcaagtattgccactattgccaatttttaaaacttgttttagattaatgaagattttggaaagacatatatctaaatcccctcatatataaaaatagtctaacttaaaccac

SEQ ID NO: 231907 - DNA, 605 bp, Homo sapiens
cagtctgttgtgggtcctgtcctcattcttctatacctaacttttgaaagtattattctcatttaaaagctttttttaaaacaaaactcaaggagtaaacatcaagaaaatagcaacaacaaaatctcattarttttatcacactaggaatctcgccagataagccatgtttggcaacaccaggtttatatgactcactctctcggagactgcattctttaatttggttgctccacttgagagttttaatttcctattgttctttaatcatttgtggatgcttttaattaagaggcctcagaattttcacaagtgagttctattatccaacctctttttataaaaataagatatgaaaattagatttaaacattgagtttgtggcataatcaccaaaaaggaaggagtagtttttatttctcaaatctgcttttgtaatatctctcctattgattattccctcaagtattgccactattgccaatttttaaaacttgttttagattaatgaagattttggaaagacatatatctaaatcccctcatatataaaaatagtctaacttaaaccacacttaaatcaacaaaataaaaaggctgtttgt

SEQ ID NO: 231908 - DNA, 605 bp, Homo sapiens
cagtctgttgtgggtcctgtcctcattcttctatacctaacttttgaaagtattattctcatttaaaagctttttttaaaacaaaactcaaggagtaaacatcaagaaaatagcaacaacaaaatctcattaattttatcacactaggaatctcgccagataagccatgtttggcaacaccaggtttatatgactcactctctcggagactgcattctttaatttggttgctccrcttgagagttttaatttcctattgttctttaatcatttgtggatgcttttaattaagaggcctcagaattttcacaagtgagttctattatccaacctctttttataaaaataagatatgaaaattagatttaaacattgagtttgtggcataatcaccaaaaaggaaggagtagtttttatttctcaaatctgcttttgtaatatctctcctattgattattccctcaagtattgccactattgccaatttttaaaacttgttttagattaatgaagattttggaaagacatatatctaaatcccctcatatataaaaatagtctaacttaaaccacacttaaatcaacaaaataaaaaggctgtttgt

SEQ ID NO: 231909 - DNA, 599 bp, Homo sapiens
gtgggtcctgtcctcattcttctatacctaacttttgaaagtattattctcatttaaaagctttttttaaaacaaaactcaaggagtaaacatcaagaaaatagcaacaacaaaatctcattaattttatcacactaggaatctcgccagataagccatgtttggcaacaccaggtttatatgactcactctctcggagactgcattctttaatttggttgctccacttgagagttttaatttcctattgttctttaatcatttgtggatgcttttaattaagaggcctcagaattttcacaagtgagktctattatccaacctctttttataaaaataagatatgaaaattagatttaaacattgagtttgtggcataatcaccaaaaaggaaggagtagtttttatttctcaaatctgcttttgtaatatctctcctattgattattccctcaagtattgccactattgccaatttttaaaacttgttttagattaatgaagattttggaaagacatatatctaaatcccctcatatataaaaatagtctaacttaaaccacacttaaatcaacaaaataaaaaggctgtttgtagt

SEQ ID NO: 231910 - DNA, 605 bp, Homo sapiens
cagtctgttgtgggtcctgtcctcattcttctatacctaacttttgaaagtattattctcatttaaaagctttttttaaaacaaaactcaaggagtaaacatcaagaaaatagcaacaacaaaatctcattaattttatcacactaggaatctcgccagataagccatgtttggcaacaccaggtttatatgactcactctctcggagactgcattctttaatttggttgctccacttgagagttttaatttcctattgttctttaatcatttgtggatgcttttaattaagaggcctcagaattttcacaagtgagttctattatccaacctctttttataaaaataagatatgaaaattagatttaaacattgagtttgtggcataatcaccaaaaagkaaggagtagtttttatttctcaaatctgcttttgtaatatctctcctattgattattccctcaagtattgccactattgccaatttttaaaacttgttttagattaatgaagattttggaaagacatatatctaaatcccctcatatataaaaatagtctaacttaaaccacacttaaatcaacaaaataaaaaggctgtttgt

SEQ ID NO: 231911 - DNA, 599 bp, Homo sapiens
gtgggtcctgtcctcattcttctatacctaacttttgaaagtattattctcatttaaaagctttttttaaaacaaaactcaaggagtaaacatcaagaaaatagcaacaacaaaatctcattaattttatcacactaggaatctcgccagataagccatgtttggcaacaccaggtttatatgactcactctctcggagactgcattctttaatttggttgctccacttgagagttttaatttcctattgttctttaatcatttgtggatgcttttaattaagaggcctcagaattttcacaagtgagttctattatccaacctctttttataaaaataagatatgaaaattagatttaaacattgagtttgtggcataatcaccaaaaaggaaggagtagtttttatttctcaaatctgcttttgtaatatctctcctattgattattccctcaagtattgccactattgccaatttttaaaacttgytttagattaatgaagattttggaaagacatatatctaaatcccctcatatataaaaatagtctaacttaaaccacacttaaatcaacaaaataaaaaggctgtttgtagt

SEQ ID NO: 231912 - DNA, 599 bp, Homo sapiens
gtgggtcctgtcctcattcttctatacctaacttttgaaagtattattctcatttaaaagctttttttaaaacaaaactcaaggagtaaacatcaagaaaatagcaacaacaaaatctcattaattttatcacactaggaatctcgccagataagccatgtttggcaacaccaggtttatatgactcactctctcggagactgcattctttaatttggttgctccacttgagagttttaatttcctattgttctttaatcatttgtggatgcttttaattaagaggcctcagaattttcacaagtgagttctattatccaacctctttttataaaaataagatatgaaaattagatttaaacattgagtttgtggcataatcaccaaaaaggaaggagtagtttttatttctcaaatctgcttttgtaatatctctcctattgattattccctcaagtattgccactattgccaatttttaaaacttgttttasattaatgaagattttggaaagacatatatctaaatcccctcatatataaaaatagtctaacttaaaccacacttaaatcaacaaaataaaaaggctgtttgtagt

SEQ ID NO: 231913 - DNA, 605 bp, Homo sapiens
cagtctgttgtgggtcctgtcctcattcttctatacctaacttttgaaagtattattctcatttaaaagctttttttaaaacaaaactcaaggagtaaacatcaagaaaatagcaacaacaaaatctcattaattttatcacactaggaatctcgccagataagccatgtttggcaacaccaggtttatatgactcactctctcggagactgcattctttaatttggttgctccacttgagagttttaatttcctattgttctttaatcatttgtggatgcttttaattaagaggcctcagaattttcacaagtgagttctattatccaacctctttttataaaaataagatatgaaaattagatttaaacattgagtttgtggcataatcaccaaaaaggaaggagtagtttttatttctcaaatctgcttttgtaatatctctcctattgattattccctcaagtattgccactattgccaatttttaaaacttgttttagattaatgaagattttggaaagacatatatctaaatcccctcayatataaaaatagtctaacttaaaccacacttaaatcaacaaaataaaaaggctgtttgt

SEQ ID NO: 231914 - DNA, 374 bp, Homo sapiens
aattcaggttcatgaacatatggagataatgatggcttagaaaatttgctttgaccaaactgctgcttttgctgccttgaagctctgtggctatttgctttgtaaatttctccccactgtggtttcagataccttggggaaaatagactcctaggcatacgaggaggacaggatggtagtgggaatgtagaaggataaagkttctactctattgctctggttctacacccttcaattatattacagggggtcaacactgaggtggcacttctaactctcagaactctgttaagaacatctctacctcctagtggtctttttgttgattcctttgtttgttttactaataatgtattgtattttaactgttatag

SEQ ID NO: 231915 - DNA, 374 bp, Homo sapiens
aattcaggttcatgaacatatggagataatgatggcttagaaaatttgctttgaccaaactgctgcttttgctgccttgaagctctgtggctatttgctttgtaaatttctccccactgtggtttcagataccttggggaaaatagactcctaggcatacgaggaggacaggatggtagtgggaatgtagaaggataaaggttctactctaytgctctggttctacacccttcaattatattacagggggtcaacactgaggtggcacttctaactctcagaactctgttaagaacatctctacctcctagtggtctttttgttgattcctttgtttgttttactaataatgtattgtattttaactgttatag

SEQ ID NO: 231916 - DNA, 374 bp, Homo sapiens
aattcaggttcatgaacatatggagataatgatggcttagaaaatttgctttgaccaaactgctgcttttgctgccttgaagctctgtggctatttgctttgtaaatttctccccactgtggtttcagataccttggggaaaatagactcctaggcatacgaggaggacaggatggtagtgggaatgtagaaggataaaggttctactctattgctctggttctacacccttcaattatattacagggggtcaacactgaggtggcacttctaactctcagaactytgttaagaacatctctacctcctagtggtctttttgttgattcctttgtttgttttactaataatgtattgtattttaactgttatag

SEQ ID NO: 231917 - DNA, 374 bp, Homo sapiens
aattcaggttcatgaacatatggagataatgatggcttagaaaatttgctttgaccaaactgctgcttttgctgccttgaagctctgtggctatttgctttgtaaatttctccccactgtggtttcagataccttggggaaaatagactcctaggcatacgaggaggacaggatggtagtgggaatgtagaaggataaaggttctactctattgctctggttctacacccttcaattatattacagggggtcaacactgaggtggcacttctaactctcagaactctgttaagaacatctctacctcctartggtctttttgttgattcctttgtttgttttactaataatgtattgtattttaactgttatag

SEQ ID NO: 231918 - DNA, 385 bp, Homo sapiens
taatgtacatatatttaatactgcctaactttactcytaaaatggttaaaatggtaaattttatgttatgtgtatcttctcacaacttttttttaaagtctaggtttgcagttgttttctgtaccactttaaatgttattttttttgtcttttggtttccattgtttctgttgagaagttagctgtcagtcctaaaattgctcctttgtaggtaatacatcttttgtttcacactgcttttatgttgttctctttgtctttagttttcaatagtttattatatacatagggtattttttctagttctgtaggagatgtgtgatacttctgaaatctgaaatttgatgtcttcagttttagaagatttcctgccattgtctcttca

SEQ ID NO: 231919 - DNA, 385 bp, Homo sapiens
taatgtacatatatttaatactgcctaactttactcttaaaatggttaaaatggtaaattttatgttatgtgtatcttctcacaacttttttttaaagtctaggtttgcagttgttttctgtaccactttaaatgttattttttttgtcttttggtttccattgtttctgttgagaagttagctgtcagtcctaaaattgctcctttgtaggtaatacatcttttgtttcacactgcttttatgttgttctctttgtctttagttttcaatagtttattatatayatagggtattttttctagttctgtaggagatgtgtgatacttctgaaatctgaaatttgatgtcttcagttttagaagatttcctgccattgtctcttca

SEQ ID NO: 231920 - DNA, 385 bp, Homo sapiens
taatgtacatatatttaatactgcctaactttactcttaaaatggttaaaatggtaaattttatgttatgtgtatcttctcacaacttttttttaaagtctaggtttgcagttgttttctgtaccactttaaatgttattttttttgtcttttggtttccattgtttctgttgagaagttagctgtcagtcctaaaattgctcctttgtaggtaatacatcttttgtttcacactgcttttatgttgttctctttgtctttagttttcaatagtttattatatacatagggtattttttctagttctgtaggwgatgtgtgatacttctgaaatctgaaatttgatgtcttcagttttagaagatttcctgccattgtctcttca

SEQ ID NO: 231921 - DNA, 421 bp, Homo sapiens
gacagagcagtctgatgctttctttcagcatctgtgaaattgcgacagcctarcttagcttgcaagtaggctaaaatctcagaacactcagagttcatgacaattttctactgagctatattttagttcactaatgctctcttgattgttgtgactaatccactgttaaatatattgggattttaatttctcttactgtatttttttagttctagaatatccatttgattctttcgtgtagcttctagttctctgttaggattctgaatctaattctcgattttttaaaaaacgtaactttcacaggtatttttaagccccagtttgttaactccagtgtctggattgcctgtgaatttatttatgttgtttgattttttttgatgggcttatctctacaagtcccagccagaagccttgg

SEQ ID NO: 231922 - DNA, 537 bp, Homo sapiens
  misc_feature (1)...(537): n = A,T,C or G
gtccaggagttcaagaccagcctaggcaacacggagaaaccctgtctctaataaaaatatgaaaaattagccaggcatggtggcacatgcctgtagtcccwgctacttggggggttgaggcgggagcttcgcttgagtaggggaggtcgaggctgcagtgagtcctgaccatgccactgcactccagcctgggtgacagaatgagacactgtcttaaaaaaaaaaaaaaaaaaaaaagcaatgcagttttcatcttcacaaaaagttcatatttgtatttgctaagtttgctaaaagcattaattatacttcatctactatttcatcctcaagatgaattactgattttttttttctgtaagagaattctagtaaagcacctcaccaaagacatctttgcagttgaggagcaaaaagcaaataaggtgatatttttctgatttaatcagtgatggaacatagatgatacagaacactggtgggaaatgctataggtatgtctatttataacacacannnnnnnnnnnnnnnnnnnnn

SEQ ID NO: 231923 - DNA, 537 bp, Homo sapiens
  misc_feature (1)...(537): n = A,T,C or G
gtccaggagttcaagaccagcctaggcaacacggagaaaccctgtctctaataaaaatatgaaaaattagccaggcatggtggcacatgcctgtagtcccagctacttggggggttgaggcgggagcttcgcttgagtaggggaggtcgaggctgcagtgagtcctgaccatgccactgcactccagcctgggtgacagaatgagacactgtcttaaaaaaaaaaaaaaaaaaaaaagcaatgcagttttcatcttcacaaaaagttcatatttgtatttgctaagtttgctaaaagcattaattatacttcatctactatttcatcctcaagatgaattactgattttttttttctgtaagagaattctagtaaagcacctcaccaaagayatctttgcagttgaggagcaaaaagcaaataaggtgatatttttctgatttaatcagtgatggaacatagatgatacagaacactggtgggaaatgctataggtatgtctatttataacacacannnnnnnnnnnnnnnnnnnnn

SEQ ID NO: 231924 - DNA, 408 bp, Homo sapiens
ggatctcattgtctctcttgtctgctgctatgtaagacgtgcctctcaccttccaccatgattgtgaggsctcctatgccacatggaactgtgagtccattaaacctttttttccttataaagtaccaagtcttgggcatgtctttatcagcagcatgaaaacagactaatacagtctgtctccccactggaatatcagctccatgaaggtagaagtctcactagttttagtcatcattatattcccaatgtcttgaacagtaaatggaatacaatcctcacgcaattattatttgttgatgttgaatgaatgctgctccttttgcctaatctgccttacatcaggcacaggggaaactcctactcaactttcaaacccaattaaaatgtcacttcttatatgaagca

SEQ ID NO: 231925 - DNA, 408 bp, Homo sapiens
ggatctcattgtctctcttgtctgctgctatgtaagacgtgcctctcaccttccaccatgattgtgagggctcctatgccacatggaactgtgagtccattaaacctttttttcyttataaagtaccaagtcttgggcatgtctttatcagcagcatgaaaacagactaatacagtctgtctccccactggaatatcagctccatgaaggtagaagtctcactagttttagtcatcattatattcccaatgtcttgaacagtaaatggaatacaatcctcacgcaattattatttgttgatgttgaatgaatgctgctccttttgcctaatctgccttacatcaggcacaggggaaactcctactcaactttcaaacccaattaaaatgtcacttcttatatgaagca

SEQ ID NO: 231926 - DNA, 408 bp, Homo sapiens
ggatctcattgtctctcttgtctgctgctatgtaagacgtgcctctcaccttccaccatgattgtgagggctcctatgccacatggaactgtgagtccattaaacctttttttccttataaagtaccaagtcttgggcatgtctttatcagcarcatgaaaacagactaatacagtctgtctccccactggaatatcagctccatgaaggtagaagtctcactagttttagtcatcattatattcccaatgtcttgaacagtaaatggaatacaatcctcacgcaattattatttgttgatgttgaatgaatgctgctccttttgcctaatctgccttacatcaggcacaggggaaactcctactcaactttcaaacccaattaaaatgtcacttcttatatgaagca

SEQ ID NO: 231927 - DNA, 451 bp, Homo sapiens
atggttttgtaggggaaacccctttcacttggatctcattgtctctcttgtctgctgctatgtaagacgtgcctctcaccttccaccatgattgtgagggctcctatgccacatggaactgtgagtccattaaacctttttttccttataaagtaccaagtcttgggcatgtctttatcagcagcatgaaaacagactaatacagtctgtctccccactggaatatcagctccatgaaggtagaagtctcactagttttagtcatcattatattcccaatgtcttgaacagtaaatggaatacaatcmtcacgcaattattatttgttgatgttgaatgaatgctgctccttttgcctaatctgccttacatcaggcacaggggaaactcctactcaactttcaaacccaattaaaatgtcacttcttatatgaagcattctcttctgctc

SEQ ID NO: 231928 - DNA, 380 bp, Homo sapiens
gaaatagtagttgtaaaatattgtgaatgtactaaatgcactgaattgtacattttaaaatagttatttgtatgttatgtgactttcacctcaataaaaaaagcaatcagatcttttgaaaatctgttaccatatataatttacattttctgaattattctcatctttrtttcacatttgtcagtgtttcaacaatgcattatacattttcttaggtttaggtacataagaattaccattcacttcacagtgatggctttccatgaaagaagaaaccaaaaagaatttcaactggatttaaaatagaaaaatactacagagaatcagaacaatgtattgtaagaaacttcagcttcactgtcaggcataggtgtgaattc

SEQ ID NO: 231929 - DNA, 380 bp, Homo sapiens
gaaatagtagttgtaaaatattgtgaatgtactaaatgcactgaattgtacattttaaaatagttatttgtatgttatgtgactttcacctcaataaaaaaagcaatcagatcttttgaaaatctgttaccatatataatttacattttctgaattattctcatctttatttcacatttgtcagtgtttcaacaatgcattatacattttcttargtttaggtacataagaattaccattcacttcacagtgatggctttccatgaaagaagaaaccaaaaagaatttcaactggatttaaaatagaaaaatactacagagaatcagaacaatgtattgtaagaaacttcagcttcactgtcaggcataggtgtgaattc

SEQ ID NO: 231930 - DNA, 426 bp, Homo sapiens
gtaacatggccactgatctgacaggaggtggagctcagacagtaatgcttgcttgccctggctcacctcctgctgttcctaacaggccatgracaagtaccagtccgtggcccaggggttggggacctctgatataatgaacagccctggaagacaatggttccttccactggattaaacagcagacatatggcaggagaattgcttgaacccaggaggcagaggttgcagtgagcagagatcgcgccattgcactccagcctgggtgacaagagcaaaactctgtctcaaaaaaaataattaattaattaaaaataaattaaaagagtagacatacttactgtccataataaaaggttcagattccctaaattcagggtttccctcctccaacacaagcaagccactgcatgtgcaggtagtacc

SEQ ID NO: 231931 - DNA, 573 bp, Homo sapiens
  misc_feature (1)...(573): n = A,T,C or G
aaatttttgaggggtgtttaaaagaaagactaatattctcctggcaaaatgtaattggcagtcccctccccactccaccattgttgaaaatctcttggttcagaagcctsggtttctatcaggggctgaatctccagagattatttggtggactcctggaagataattcaagctgtccctttaaatctatccctctgactttcagtttggccctatttaaatattccagacaatttaaagacttaataaagatgaatatgattaagattagggtttaataacagcattaagaaaagatttttcatttgatggaggtgggctgctgtgaggattgaactggcaccaggcttcccagtccacactgaccagnagggttcctcacctctcccagcaggttaactctctcgggtcagcatcctaggaagaatctgaaacattactcatttttttcataaagaaaaccccccaaccctactgggttggggacaggccactatctcgcccctcccaagtcactctcaagctgagcatgttcttcatatgcaaacctcacgtggttactcattcaattct

SEQ ID NO: 231932 - DNA, 608 bp, Homo sapiens
tgtagttttaaaggccagatacattccctcaattataccaatattcagaaattctattctggggccataactgctcaattctgcatgaagatacacatttaaatttaaatgcagccagagactctgcaaaagcaaatgactgaatgaaagaagcctaaagattttaccagaaagtgcttaggaggggaattctgcttctggctacagtggactagtttgtttcagaccaacagttccatggagaacaactagaragttctatcaattaaatccatgctaaaaacagtaatccggccaggcgcggtggctcatgcctgtaatcccagcacttttggggaggcctaggcaggcagatcacaaggtcaggagtttgagaccagtctggccaatatggtgaaactctgtctctactaaaaatacaaaaattagccaggcgtggtggcaggcgcctgtagtcccaggtactcgggaggctgaggcaggagaattgcttgaacccaggaggcggaggttgcagtgagccaagatcgtgccattgcactcaagcctggggtacagagcaagactccatcaaaacaaacaaacaaacaacaacaaaaaaaaacagt

SEQ ID NO: 231933 - DNA, 418 bp, Homo sapiens
ctgagcttctctaatacctgatcaggatcagttctcagcaacagattttgtcgttaaacatagagttaaaaagcccttacaaataacggtgtggtcttagcattttgctggtaggtagagcgtccatgtctcagggttcccaggacaaagtttatatctgtggtcctggtgtctccttaattcatagtacctcttttcactctcactagtgtcccagtttrgatcataaattatggatccctggattgatcagtaaacgtgggtacagaaagagttaagtgttctgttcaaggcacaaagtgggttggtgacagctgggatggaaaccattgctcttcgtcctaggccaaggctccttgctccccgggtaccctttgttaggttttcacttatttacactttgcctcattgcagagag

SEQ ID NO: 231934 - DNA, 681 bp, Homo sapiens
ttgattttgcacagaggctggcgtatagcacacactcagtaactatttattgattaaataaattaaaggtcatctgattcagctgctttcaagcttttttaaagctagcgcatcctttgttkaaatgcatcttgcatagaagcataaatgaataaaagagataaaagcagaggctctggttaaaattgggagatgggatgtagacactccacttccttcccatcatgactctcttcccatgacctctgccccttaccctcatcaccatcctgcagcagtcccagaggagctccaggacagagcttagttttaaaagcactgatctggttcaacctccatttgatgcttgaattcttgctaattaggctcatgattcttaaacctgactgtccatcaaaatcacctgaaagagtaaaaagtactgattcatagaccctatggctaaagattctgatttaaaaggtttgtggctgagcctgagagtatgcatgtgaaatagtctcactgggtgatggctatgttaattttcctgactgcagaaatcacttcactatgtatatgtagatcaaaacatcacgttgtacaccttaaacatatacaatgaaaatattttttaaaaatattgacccttaccttacaccaaacataaaaatcaattccaggaaaattgtaagttaaatg

SEQ ID NO: 231935 - DNA, 681 bp, Homo sapiens
ttgattttgcacagaggctggcgtatagcacacactcagtaactatttattgattaaataaattaaaggtcatctgattcagctgctttcaagcttttttaaagctagcgcatcctttgttgaaatgcatcttgcatagaagcataaatgaataaaagagataaaagcagaggctctggttaaaattgggagatgggatgtagacactccacttccttcccatcatgactctcttcccatgacctctgccccttaccctcatcaccatcctgcagcagtcccagaggagctccaggacagagcttagttttaaaagcactgatctggttcaacctccatttgatgcttgaattcttgctaattaggctcatgattcttaaacctgactgtccatcaaaatcacctgaaagagtaaaaagtactgattcatagaccctatggctaaagattctgatttaaaaggtttgtggctgagcctgagagtatgcatgtgaaatagtctcactgggtgatggctatgttaattttcctgactgcagaaatcacttcactatgtatatgtagatcaaaacatcaygttgtacaccttaaacatatacaatgaaaatattttttaaaaatattgacccttaccttacaccaaacataaaaatcaattccaggaaaattgtaagttaaatg

SEQ ID NO: 231936 - DNA, 681 bp, Homo sapiens
ttgattttgcacagaggctggcgtatagcacacactcagtaactatttattgattaaataaattaaaggtcatctgattcagctgctttcaagcttttttaaagctagcgcatcctttgttgaaatgcatcttgcatagaagcataaatgaataaaagagataaaagcagaggctctggttaaaattgggagatgggatgtagacactccacttccttcccatcatgactctcttcccatgacctctgccccttaccctcatcaccatcctgcagcagtcccagaggagctccaggacagagcttagttttaaaagcactgatctggttcaacctccatttgatgcttgaattcttgctaattaggctcatgattcttaaacctgactgtccatcaaaatcacctgaaagagtaaaaagtactgattcatagaccctatggctaaagattctgatttaaaaggtttgtggctgagcctgagagtatgcatgtgaaatagtctcactgggtgatggctatgttaattttcctgactgcagaaatcacttcactatgtatatgtagatcaaaacatcacgttgtacacyttaaacatatacaatgaaaatattttttaaaaatattgacccttaccttacaccaaacataaaaatcaattccaggaaaattgtaagttaaatg

SEQ ID NO: 231937 - DNA, 382 bp, Homo sapiens
gagctgcagcagtgatttcacacaaacaggacccaggatgacaacttttattatctaaacatataaccggaggctttggaattgggccagagtcagggaatttaaaagtaagaaaatatttttgaaaaaaagaagtgattgttgcttacgggtttttacacagattccacggctttaaccattccaattcactctgcaacctgtagtaaagatgtccctattgctcagatgtycccctggtagtaaagatgcccctattgctcagatgtcccccaaatcacattgccctgacctcctctagacccatgacccatccatttggagtcactatttcttgctgattaaaagcatagagttgggtcccaactccgctacttgcttg

SEQ ID NO: 231938 - DNA, 456 bp, Homo sapiens
ttttcaaggaattgttgaatgctccataagttcgccagtattgtgttttttccttgtggatatggctggtcttcctaaattatattgtaagattcaggtggcctgggaccaagtcttctttcactgactttctatgtaatctygtgaaagttcttttcttcctgtaggcctcagtttccctatctgttcaattataattttgaatctgataggtggttttcaaattttagtacatagtgcactggggaggtggttgaaaatgcatattcctaggcaccattcctagagattctgatttagtaggactagtctgatttagtccgaccagtaagactggccctgtaatctggatatcttgctagctcctgaggaaattctggcatatgttgtctctggacacatgtttgaatatcattgtactgggtgatcatgtagcactagccttctcattgtttg

SEQ ID NO: 231939 - DNA, 574 bp, Homo sapiens
tctaggaggattgcagcctggcccatgccttgattttagccaatacaatctatatcagacctctgacctccagaattttaagataatatatttgtcttgttttaagtcactaagtttgtcctaatatttttacagtagccattagtaactaatacgccaccattctctcttgcctagagaacttcagctaactccagactggtctctytcttcccactctgcccaccccaacctacgaaatctattctccatacagcagccagaggaatcatttaaaattgaaacttgctaatgtcccttttgtgctgaagatcctcaacagcctcctgtcacacttaggataaaaggcagaccccttatcatggcctcattttcccacctaaggcttgaaggttaataaacttgcccagtcactcctgggaggttagggggagagctgagcctagaactctaagatctggactaagttcctctatttggggatatgtaagcactttctttgatctggactaggttcctacgagcaaggaagttatgagattttccccaaaaatgtcagcacaattgccacaaa

SEQ ID NO: 231940 - DNA, 550 bp, Homo sapiens
cagcctggcccatgccttgattttagccaatacaatctatatcagacctctgacctccagaattttaagataatatatttgtcttgttttaagtcactaagtttgtcctaatatttttacagtagccattagtaactaatacgccaccattctctcttgcctagagaacttcagctaactccagactggtctctctcttcccactctgcccaccccaacctacgaaatctattctccatacagcagccagaggaatcatttaaaattgaaacttgctaatgtcccttttgtgctgaagatcctcaacagcctcctgtcacacttaggataaaaggcagaccccttatcatggcctcattttcccacytaaggcttgaaggttaataaacttgcccagtcactcctgggaggttagggggagagctgagcctagaactctaagatctggactaagttcctctatttggggatatgtaagcactttctttgatctggactaggttcctacgagcaaggaagttatgagattttccccaaaaatgtcagcaca

SEQ ID NO: 231941 - DNA, 580 bp, Homo sapiens
gaaagaaatggattctcccctagagcttctaggaggattgcagcctggcccatgccttgattttagccaatacaatctatatcagacctctgacctccagaattttaagataatatatttgtcttgttttaagtcactaagtttgtcctaatatttttacagtagccattagtaactaatacgccaccattctctcttgcctagagaacttcagctaactccagactggtctctctcttcccactctgcccaccccaacctacgaaatctattctccatacagcagccagaggaatcatttaaaattgaaacttgctaatgtcccttttgtgctgaagatcctcaacagcctcctgtcacacttaggataaaaggcagaccccttatcatggcctcattttcccacctaaggcttgaaggttaataaacttgcccagtcactcctgggaggttagggggagagctgagcctagaactctaagatctggactaagttcctctatttggggatatgtaagcactttctttgatctggactaggttcctamgagcaaggaagttatgagattttccccaaaaa

SEQ ID NO: 231942 - DNA, 557 bp, Homo sapiens
acctttttaaattttaaaaatgagacagtgaatgttttgattgctaggaccatgttatattttatctgtattctctgaatttcatgcaatacctaggaaaaggcctatactcaaatatttttgaaaggaaaaaattaaaaagaaagaaagaaagaaatgaaaataytttagggtatgcaaaaatcccccccatttttcacacacctataatataagttatgttaactattctttatcagaagtgagtgtccttttctttttagtttagtggacaaataagtactagcaatcatctcttacccaattcctctttagaaaatgcagaatgcggagtaagtagagtaatattcccctgtaagaatcctcctacaatttctctgacatcatgaaaacattcatagtaccgctcaatctgagagaaacattaattatattcagaactcttgaatttatgtcttaggagttgcttgagatgaaattagaaaactcctttaaattaatgaaaatcctaaactcatagaagagactcattcagctgccttgttctatcttgcaaa

SEQ ID NO: 231943 - DNA, 600 bp, Homo sapiens
aatgaaattaaactttcatagtctgtatgtccatccatccatccatccatcyatccatccatccatccatccatccatccatccatccatccatccatccatccatttctgctgtctgtctctctatctatctatctatctatctatctatctatctatctatccatccatcatctatctatctattatctatctatctatctttctatctctgtcatctacctatctatcttagaaatgtaagtgtgtcattatttagaagcctgtaaccctggagtgggattttattgtaacccaaagaagttatttttcactcatgcaaaactctgtaattgagtactactacttacctgtgagaaatatttttctcaatatgtgtgactcaaaatactaaagcatattagcttctcaagctattttaagaccataagtcttatccaaaatccttgcattattgttttattgaataaaacatcgttttagtgagaggtgtttaaataagtgttgtaaaaaggaacttagtaaataaatgcatattatgaagatgtgctttcatctgttttccatattaaaacattacattttctatgtaaaattgca

SEQ ID NO: 231944 - DNA, 557 bp, Homo sapiens
aataggaaaaggcatatagagttccaaccctcaggaggaaggaacaagagcagtgtttatatacatttacagagcactaccatgtaccagctactccaccaggcacttccatgcatcattttccttttaatcaaaaagctaacagcagtgggctctgaactatgatgcagcacattagaatagccaagagagaatgttaaatatatggctgttccagggcctagscctgacctatttaaacagaatttctgtttgtgggtttgtagtatttaatataaactcagcaggtgatgctcatgagcacccaagattgagaacttgtgacttgcaatttagttatggaaaacacacacacgtaaacacatcctcaataatgtattcttgtaatactaagcagtttcataacattcacctacccacatgctcatctattttttcactcattcattcacccaatacacatttcaatgccttacatgaacaaaatacaaacagttctcaacttgagatgattcgacttacaatttttcaacttggtacgaaaatgatactcagtt

SEQ ID NO: 231945 - DNA, 579 bp, Homo sapiens
tcttctcataaggatgctaattccatgcatgagtgctgccgtcatgacctcatttcctcctaaggactctacctcctaatatcatcccctcggcggtttggatttcaacatacaaattttggggaggaggcacaaatactttgtccaaaacaatgacgaagatctgtgtcttacttctactccatgtccatcattagttagcataaaatctctgtttcagcagtacagacggatggagcttacatcatcaggaaktttgcaagttgctgtgaagaagcagaactagaaatacttggtgagcagctctgatgattctacagggtgtatagtaagatggcaaacatgccaagacagcaggaaggagggacatgtgatcctggacaggcagtcagggttctgatcctgtttggtctcccaggctattgtaaagatttggattgttacactaaaagcaatgggcagctgttgaaattttgtgaacatagagttcttaacgaggaaactatcagtattctgattttacagatgttgatattgatagtaaccaagaattgagtacctactctgtaccaggcaatt

SEQ ID NO: 231946 - DNA, 554 bp, Homo sapiens
acttcttaccatggcattcaaggtcccttgaaactgcccccctctctagcttcaatccctgccacacagaccttcaaaactaatgctctaataatgcaattatggcttattgccccctaaaagactatgctcttttattattgcatttaggtgggcagggaattcaaagataactaagatcaaatcctagaccttaagaaaattgcaattcagtgtagaagacaggtagatacaccattattaagttacaaaacttcaagctctagataataacaaacacttcctgagcactcaatctgtgccatgtaatacattatataccttgagcacattaattcttttgtattcacaacaatcttatgcatatatttgtccaatgatcttttcttctcttggaacggcacaacccctaccccagctttcctattctaatctgcctaacagattccygtgtatctttcaaaactaaaataggtatcaaggcagctccaagaaatcttccctgacccttctagaaacagttaggcatggctgtggaatgcccttctaccctg

SEQ ID NO: 231947 - DNA, 449 bp, Homo sapiens
ttgggaatagtgctgcaatgaacatgggagtatagatgtctctttgacataccaatttttacactaatttacatcctcaccaaccatgtacaagggttccctttcttccacatcctcaccaacacttgttattattcatctttttkataatagtcattctaacatacatgaagtgatatctcattgtggttttagcttgcatttccccgatgattagagagtttgagcattttttcatagatctgttgactatatctctcttttgggtatatatccaaaagaattgaaatcagtgtgtcaaagacccttcttgcaatatcattctagtttctgggaaatgagacagcatggtgtactgggaggagattcatcttgggagtcaaaagactagattttatttccagctttgtccctacctgactactgtataactctgggtaagtgagata

SEQ ID NO: 231948 - DNA, 449 bp, Homo sapiens
ttgggaatagtgctgcaatgaacatgggagtatagatgtctctttgacataccaatttttacactaatttacatcctcaccaaccatgtacaagggttccctttcttccacatcctcaccaacacttgttattattcatcttttttataatagtcattctaacatrcatgaagtgatatctcattgtggttttagcttgcatttccccgatgattagagagtttgagcattttttcatagatctgttgactatatctctcttttgggtatatatccaaaagaattgaaatcagtgtgtcaaagacccttcttgcaatatcattctagtttctgggaaatgagacagcatggtgtactgggaggagattcatcttgggagtcaaaagactagattttatttccagctttgtccctacctgactactgtataactctgggtaagtgagata

SEQ ID NO: 231949 - DNA, 621 bp, Homo sapiens
gtaaaaaggattttgtcttacaagttggataccagctcagccatcgtagaatagggcacctggcagattcctgaggcccccattctaagccctagctcctggacatttctagacacaccctaggctagaagcrtacccactgtcttaaagggaaggactgagtcctggcaggattcataacctgctgactaaaaagccttaggccttgagtaaacatcagtgttacccaggcagtactcaatgcaggccttgaatgagaccctgcactatgctgactttttgtgttacccagcacattcacagatgtggtggccatgagaagagactcatttggcttgagaaaaggagagagaagaataaggtgaacttagccttgcagccttgcagcttggttatcagttcagccacagtgaggaagagcaccaagcaggctcctggagtactcaattccaggccttgactcctgattgactctgggccagagggtagtccactgccctgaagtaagaaactcatgcctagcagcattcaccacaagctggctgaatggccctttgtccttgagtgaaaactggcagtagccaggtagtacttgctatggccctggggcagtggtggcca

SEQ ID NO: 231950 - DNA, 323 bp, Homo sapiens
aaacttaaaattaacaatctaacaatacatcttaaagaatcagaaaagcaagagaaagccaaacccaaaactagtagaagaaaagaaataatagaaatcagagcagaaataaatgaaattgaaacaaaagatataaaagatcaacaaagtgaaaagttgattttttaaaacataagcaaamccacaaaactttagcaagattcagaaaaagagagagaatacccaaataaataaattcagagatgaagaaggagactttacagtggatactgcagaaattcaaaggatcattagtggctactatgaataacaatctgccaata

SEQ ID NO: 231951 - DNA, 609 bp, Homo sapiens
cccattactgggtatctatcaaaaagaaaggaagtcattgtattaatataaaaaacatacatgcacacacgtttataacagcacaattcacaattacaaatatatggaagcaacctaagtgccaatcgaccaatgaatggataaagaaaatatggtatatatacaccatgaaatgctactcagccataacaaggaacaaaatgttttctgcagcaacttgcatgcagtcggaggccattattctaagtgaagtaactcaggaatggaaaatcaaatatcgtatgttctcacttaaaagtgggagctaagcttgaggacgccaaagtataagaatgatatgatcgactttggggactcagtggggaaggttgaaaggggatgggggataaaatactacatattgggtacagtgtacactgcttgagtgacaagagtgyactaaaatctcagaaatcaccactaaagacccatctatttaaccaaaacatacctgttccccaaaaactattgaaatgaaaaaatcatttcaagctcctcctgaagatgggtaataataaggtggggcttgttcccttttcatgtgttggttctcatttatctgaatgtgaa

SEQ ID NO: 231952 - DNA, 477 bp, Homo sapiens
tggagttgttaagagttttctatatataaaatcatgtaatctgcaaacagagacaatttgacttcttcttttaccatttatttatttatcctgcctagttgctctggctaagacttccagtactatgttgaatagaagtggtgaaagtgattgtccttgttttattccaggtytcaaaggaaaagctctcagctttttctcattcagtaggatgttatctgtgagtctgtcatatatggcctttattgcattgggatacatactttctatacctcatttgttgagagttttttttttttatcatgaacagatgttgaattttgtcaatttttttcaccatctatggaaatgatcatagggtttttggccttctttctgttaatgtgatgtatcacattattgaattgcatatgttgaacaagtgttgcatcccttggatgaatcccacttgatcatagtgaatgatctttttgatat

SEQ ID NO: 231953 - DNA, 477 bp, Homo sapiens
tggagttgttaagagttttctatatataaaatcatgtaatctgcaaacagagacaatttgacttcttcttttaccatttatttatttatcctgcctagttgctctggctaagacttccagtactatgttgaatagaagtggtgaaagtgattgtccttgttttattccaggtctcaaaggaaaagctctcagctttttytcattcagtaggatgttatctgtgagtctgtcatatatggcctttattgcattgggatacatactttctatacctcatttgttgagagttttttttttttatcatgaacagatgttgaattttgtcaatttttttcaccatctatggaaatgatcatagggtttttggccttctttctgttaatgtgatgtatcacattattgaattgcatatgttgaacaagtgttgcatcccttggatgaatcccacttgatcatagtgaatgatctttttgatat

SEQ ID NO: 231954 - DNA, 429 bp, Homo sapiens
accccaatttactaattcttagttgtaccaacttacataagcttctttctcagacacggtttccaaatttgattttcacaccaaccyttatgaagaaggcatatcagaaaactaagagttagtgagagtatggctaagccaacataatactaataatacgaagctgatttagctctcattccatgccaggcatcatgtgttaatatacacctaaacttataccagctctgtgagggaaatgccatgcttgtcccattttatagataaggaaaccaaggtctaaaaagagtaagcccttttttggtaccatgtatgtcccttaagtgtttcctgaggcaggcagagaaatccttcccactttacagatgagaagctgagacataaagaggaagataaacaatgggctcagggtcacccaataaggagtca

SEQ ID NO: 231955 - DNA, 563 bp, Homo sapiens
  misc_feature (1)...(563): n = A,T,C or G
aagactgatctagcttccccattattccgcttgggaataatgcccaaggaccactaggcctgagtctcacagctccaggcctggaaaggagcctacttgtcccgtcacagatcacaactgggcgggccagctctgagcctttgctatttgaagggatgttttgataacctcttaccgctcctccccaaccctgcaaagccccacctgatcaccccacactctgggcctcctcttatctccttactctaagctccccatccattactgtcggctggcaacacaagttttatctgagcctctgtggaatggaattgatttctgtgaataattggaatagctggctagtgacccagtattgctgccaccagggtagttggagcttcaaagctctcatccamctctgcctctctctctccattcccgtggctgttgtctggtccaaaccatcctgaccttctgcttggatcatgattacagcttcctaactgcgctgcctctttctgattaccctgcaccccatcatccactccaatnnnnnnnnnnnnnnnnnnnnnnnnnnnnnn

SEQ ID NO: 231956 - DNA, 548 bp, Homo sapiens
agatctcaatataagccccagggcagcaagactgatctagcttccccattattccgcttgggaataatgcccaaggaccactaggcctgagtctcacagctccaggcctggaaaggagcctacttgtcccgtcacagatcacaactgggcgggccagctctgagcctttgctatttgaagggatgttttgataacctcttaccgctcctccccaaccctgcaaagccccacctgatcaccccacactctgggcctcctcttatctccttactctaagctccccatccattactgtcggctggcaacacaagttttatctgagcctctgtggaatggaattgatttctgtgaataattggaatagctggctagtgacccagtattgctgccaccagggtagttggagcttcaaagctctcatccaactctkcctctctctctccattcccgtggctgttgtctggtccaaaccatcctgaccttctgcttggatcatgattacagcttcctaactgcgctgcctctttctgattaccctgcaccccatc

SEQ ID NO: 231957 - DNA, 570 bp, Homo sapiens
ggttttataaagggcagttcgcctgcacacagtctcttgcctgctgccatgtaagacatgccttgctcctccttcactttctgccatgattgtgaggcctccccagccatgcagaactgtgagtctattaaaccactttttctttataaattacccagactggggtatttcatcatagcagtatgaaaatggactcatacactgtgattaaatatgaaaacttatggttataaaattagaagctagtttaaaaatattcttcatcacttccaaatttggaaacattttactaaaccaactccttgaagtaatcattgggattcatgactayggtgaaaaaatcatatgttgctgcaaatataaaaaaaaactttttttcaaagatttactcaataaagaaattgtacttatgtttaagtacatacaccatgtggaataggagaattctgaggtcaagagagctaagattcagtaatcaggcaattagcgttctccagagaaatggaatcaataggatgaatatatttaaaaagacacttattataaggaattggctcacatgattatgaa

SEQ ID NO: 231958 - DNA, 664 bp, Homo sapiens
  misc_feature (1)...(664): n = A,T,C or G
tgttctgagaattaaaaataagataatagatgtgaagtactggtatattaaaaatagttattgtcttcacaaattttgcaatgctcaaaatatgaacactytgtcattcagtgaatctaggccaaccttgtaatattttctttgtgcatcccatttttcttcttcaaactttttccttttttactttcttaaattctctctctccctaccttntattgnatcatttatctttttactttgttccttaagagtcatctgctttgtaaaacatcttctctatgaagaatttcctaatcccaaggtttcttcctccttttcctctccaacattgtcacatttttctacttctccaatttttgacttcccttttaaccactccttaccaccccatctcttatccactgcaatagaagaggatgaataagaaatgcattgtctcaatatcagtggggataatgttctggtattctacaaaagctcagaatgtttcatctaaaaaatagatctgccaatatcttatttatttaccttttgtcaatataaactattcaatctatagaggtctcaattttcttatatgagatatgaggtaagtaaattacctaatatctaggggccattccaatattaatattccctaggtataagggcttagccaaacaca

SEQ ID NO: 231959 - DNA, 512 bp, Homo sapiens
taacattgtaatgagagagtcggtattttagaaccttaagatgttatacatcataagagacacctaaggtcagctgaagtcaaaccactgtcttkcatccatagataattaaaatgaccccatgtttcaagacgtaagtcaaggattttcaggagtacagtaatatttaatggctaaccttcaggaaattttctctgcaacctgggaaaggtactgaaaagaagcttatggaccaagaagagaatttaatgggctcttaacccctttcaattgaggtacaagatgtgggattaagaaatggagcaactatctaagtctcttcattctattttttcactccgttcagaaagagtccagctagcaaagcagtcacttgaaattgtatgtgcatcttcattcttttgagtactgaactttcacgtttatgagagtcttatataggtatcttagacaatctaaaatctcgattttctacctgtaaattagtgtattatagtgatatcaaaaagagt

SEQ ID NO: 231960 - DNA, 512 bp, Homo sapiens
taacattgtaatgagagagtcggtattttagaaccttaagatgttatacatcataagagacacctaaggtcagctgaagtcaaaccactgtcttgcatccatagataattaaaatgaccccatgtttcaagacgtaagtcaaggattttcaggagtacagtaatatttaatggctaaccttcaggaaattttctctgcaacctgggaaaggtactgaaaagaagcttatggaccaagaagagaatttaatgggctcttaacccctttcaattgaggtacaagatgtgggattargaaatggagcaactatctaagtctcttcattctattttttcactccgttcagaaagagtccagctagcaaagcagtcacttgaaattgtatgtgcatcttcattcttttgagtactgaactttcacgtttatgagagtcttatataggtatcttagacaatctaaaatctcgattttctacctgtaaattagtgtattatagtgatatcaaaaagagt

SEQ ID NO: 231961 - DNA, 567 bp, Homo sapiens
cagggtgaggctccatctcaaaaaaaaaaaaaaaattatactgtgacttttctttaaacttgagcccttaaaatcattggaatgtgtttctgtacatatgtgaaaatttgattgttccattttcatttatttctctcctttttcaataaacgtggtgtcattttcctctttctctacctcttgccttcctgaacaattcagttctaaagacattaatagggtcaagaaaggaaggcatctgttgtgtatggagtcagggtatgagacagaagccccaggggctcaaggaggatacatgtgtagatgggctttccagtgtagagtggcaaaaccttagcaggacaaggagcccatctctgccgaaagacagcctggtatgggctggcagaaagctagtggggtaaggcaagtggctgtgtaggtaagstgcctgtcatgaagtgttggagcccaggtcaagtaaagactttctcacggtggaatatcctcatgccggtgtcagcgcacaggtgaggtgagagggtggaagccaaggccagagtgttagaaccctggtgggtgaagagg

SEQ ID NO: 231962 - DNA, 518 bp, Homo sapiens
tgctgaatcatgtggtaattctatttttaattttttaggctccaccatactgttttctatagcrgctataacattttaattttctcaccaacagggtacaaggataccattttctccatatcctcatttaacttgttactttctgttttttgttccttgagagcaaccattctgatgggtatgaggttgtatctcatagtggttttgatttgtgtttccctactaattggtgatattaagaatatctgtatgcttcttggccatctgtataccttcttaggttaaatgtctgttcatgtcatttacccattattgaactgggctgtttaatgttgtcattgttattgttgactaggaattctctatatattctgaatatcaatactttgttagatacatagtttgcaaatttctcccattgtgtagcatgccttttcactctgtaggtagtatcttttgattcacaaaaggtcttaattttcatgaagtctaatttgtatattttttaattgcctgtg

SEQ ID NO: 231963 - DNA, 518 bp, Homo sapiens
tgctgaatcatgtggtaattctatttttaattttttaggctccaccatactgttttctatagcagctataacattttaattttctcaccaacagggtacaaggataccattttctccatatcctcatttaacttgttactttctgttttttgttccttgagagcaaccattctgatgggtatgaggttgtatctcatagtggttttgatttgtgtttccctactaattggtgatattaagaatatctgtatgcttcttggccatctgtataccttcttaggttaaatgtctgttcatgtcatttacccattattgaaytgggctgtttaatgttgtcattgttattgttgactaggaattctctatatattctgaatatcaatactttgttagatacatagtttgcaaatttctcccattgtgtagcatgccttttcactctgtaggtagtatcttttgattcacaaaaggtcttaattttcatgaagtctaatttgtatattttttaattgcctgtg

SEQ ID NO: 231964 - DNA, 525 bp, Homo sapiens
agtcccattaatggttatatacccaaaggaatataaattgttctattttaaagatacatgcatgtatatcttcattgcagcactacacaatagcaaagacgtggaaccaacttaaatgcccatcaatgatagactggatacagaaaatgttatacacatacacaatggaatagtatgcagccataaaaaggaatgagatcatgttctttgaggggacatatttagagctgggagccattatcctcagcagactaacacaggaacagaaaatcaaacaccacatgttccacttatattgggagctgaacawtgagaaagcatggacaaagggaggggaacaacacacactggggcctgttgggggtgtagcaggggaagagcattaaggaaaatagttaatgcatacagggcttaatacctaggtgatgggttgataggtgcggcaaaccaccatggcacacatttacgtatgtaacctgcacgtcctgcacatgtatcccagaactttaaaaaaataaaaaaaaa

SEQ ID NO: 231965 - DNA, 525 bp, Homo sapiens
agtcccattaatggttatatacccaaaggaatataaattgttctattttaaagatacatgcatgtatatcttcattgcagcactacacaatagcaaagacgtggaaccaacttaaatgcccatcaatgatagactggatacagaaaatgttatacacatacacaatggaatagtatgcagccataaaaaggaatgagatcatgttctttgaggggacatatttagagctgggagccattatcctcagcagactaacacaggaacagaaaatcaaacaccacatgttccacttatattgggagctgaacaatgagaaagcatggacaaagggaggggaacaacacacactggggcctgttgggggtgtagcaggggaagagcattaaggaaaatagttaatgcatacagggcttaatacctaggtgatgggttgataggtgcggcaaaccaccatggcacacatttacgtatgtaacctgcaygtcctgcacatgtatcccagaactttaaaaaaataaaaaaaaa

SEQ ID NO: 231966 - DNA, 609 bp, Homo sapiens
gcaaaattgaggtaagtgaggatgagaaatattagtggcctgcttttcctagaggaatatcataacctacattggtacctggagtgaaagagaaccctatcttcttggctacacatgcctggagtagagcttccatcactgtgagctgagaaagaaggagagaacaaattatggctcaaatattattgacttttgctgtgcttaccatgacttagcagatttccttgataaacacttctccattttctgtatgaccttagaagaacttctagatattttaaattagaagttcttctggcctagtattcttttgtgyaaatgtactacaatttatagcatccttaaatattttttccatctttaactgcttttcagttttttaaaaagttatcatagagaatacatcaccatttgtaatctattgtgatcacctcgtgttaggaggctgtctcttccaaaagttccagatgggaatttagacatagcattttctactttctttgtcccatccttaattgaggtttgaaccacagtgttggcaggtggcagacatggaggtaaacagagaacagagatccaagccaatctcttaatttctggccctgtttc

SEQ ID NO: 231967 - DNA, 586 bp, Homo sapiens
agaaatcttcttcaggatttcattgtctatttgtggggctttgtttctaggtaccttttagaatgcctatcactattaaccaacactagcaccaccaccaccagtaccaacaataaaaacctggttggaattataaatttgattccagtgaatctataaatttgtggagaattgacatctttaaaatatttagtctttcaattcatgaacaagacgtatacttaygtttatttagaacttctgtaatttctctcaataacagtttatacttctctgcattgagatagtgtccattttttataggttgatttataggtattagatgatttgagattccattataactgatatttaaaaatttttaatttctagtatttttgtttttggtatagaattctgcaattgaatttttttctatattggctttttatcctgtaaacttgcaaaattatcttatacatggtttatctgtagatttttttctgattttccgtataaaaattttgtcattggtaaataataacaaatttcccctcatcatgtctttcccttattgcctcttctagggcaccaacctaatagaagg

SEQ ID NO: 231968 - DNA, 165 bp, Homo sapiens
tataatttcaacagagatagaaaatattaaaaacctaccagacagaaattatagagcttaagaatactataactgaaaaatctaatacacrggttcatcagcagactagatcaagcagaagaaattatcagtaaacctgaagccaagttattggaaataattcca

SEQ ID NO: 231969 - DNA, 527 bp, Homo sapiens
tcgctgaattgtttttctcagcatggaacgtccctgagaaagagaatgcgcacctaggggtaggtctatgaactggcccccccggggcgtacctgtctcttatggtcgagattgcagaggtgaaataaactccagtctcccatagcgctcccaggcttattaggaagaggaaattcccgcctaataaattttggtcagaccggttgatctcaaaaccctgtctcctgataagatgttatcaatgacaatggtgcccaaaacttcattagcaattttaatttcgcttcggtcctgtggtcctgtgatctygccctgcctccacttgccttgtgatattctatcaccctgttaagtacttgatgtctgtcacccacacctattcgtatactccctccccttttgaaactccctaaaaaaacttgctggtttttgtggtttgtggggcatcacagatcctaccaacgtgtgatgtctcccccggatgcccagctttaaaatttctctcttttgtactctggccttttatt

SEQ ID NO: 231970 - DNA, 594 bp, Homo sapiens
tcatccttttaaagaacaagcatttgcttttagctgttaagtttactacttttcctctctattatggcttttcttgttaatattggccttctacccttttggatttacattgttctattttttttattttttattaagatggagcctcactctgtcacccatgccagagtacagttgcgcaatctcggctcactacaacctccacctccagggttcaagcgattctcctgcctcagcctcccaagtagctgggactataggtgggcacccccacacctgggtaatttttgtattttttgtagagacagggtttcaccatgttggccaggctggtcttgaactcctgacctcaagtgatgcacctgcctcagcctcccaaagtgctggtattacaggcatgagccactgtgcccagcctgcattgttctttttctgtgtccactgttcaatttctatagctttgaggaccattttcaacaactcamctaattcttccagctctatcatgccaacgtcatcatatgtcattaaaatttaattacaaacactgaatgaagactccccagtcttattctgcttccaaaattgtcctat

SEQ ID NO: 231971 - DNA, 604 bp, Homo sapiens
gggaaaacactagtaagccttcattctacttgtaagacctgccttttctccagtttcatagtaaagaaacaacttttccacctttttctttggtgttggtcaaaaacagcaaaacttctgtattcagatccagaaaaatgagcaagtcatcatttagacaggctaaccgaagtatctggattttaaacaatgtataaccttgaacaatgatgctttcaaatactccatggttccccttttgtcccaggtgtctggagttttccattcctacagtattttctacacatggtccatctgtatcataaactactcctgaggacacttttcctcagcaatatctagtagccttyaatatgagttatgtcatttcttatcacttctattagattacaacctgaaggagcttatgtaataactggtatgtctaaattatagtttatcattgtttttgcctctttgttatgcattcgttttacttctggcactagaacctcatttttcttttacagaagtccttgtagtacagctagagtgggtgttctctctctaaccatgacatgggcctggttaatcacaatgttttatatattctccatatgtctta

SEQ ID NO: 231972 - DNA, 604 bp, Homo sapiens
gggaaaacactagtaagccttcattctacttgtaagacctgccttttctccagtttcatagtaaagaaacaacttttccacctttttctttggtgttggtcaaaaacagcaaaacttctgtattcagatccagaaaaatgagcaagtcatcatttagacaggctaaccgaagtatctggattttaaacaatgtataaccttgaacaatgatgctttcaaatactccatggttccccttttgtcccaggtgtctggagttttccattcctacagtattttctacacatggtccatctgtatcataaactactcctgaggacacttttcctcagcaatatctagtagccttcaatatgagttatgtcatttcttatcacttctattagattacaacctgaaggagcttatgtaataactggtatgtctaaattatagtttatcattgtttttgcctctttgttatkcattcgttttacttctggcactagaacctcatttttcttttacagaagtccttgtagtacagctagagtgggtgttctctctctaaccatgacatgggcctggttaatcacaatgttttatatattctccatatgtctta

SEQ ID NO: 231973 - DNA, 465 bp, Homo sapiens
ttttttttttttttgtgatggagtctagctatgtcccccaggctgcagtgcagtggcacaatctcagctcactgcaacctccgcctcccgggttcacgccattctcctgcctcggcctcccgagtagctgggactacaggtgcctgccacaagcccggctacttttttgtattttcagtagagacagggtttcaccgtgttagccaggatggtctcgatctcctgaccttgggatctgcctgcctcggcctcccaaagtgctgggattacaggcatgagccaccgcaccyggtcttaatctactttttttagattaatgtcttaatctactttgtcttcatctgctttctctccacagatttgcctatgctgaacatttcatacaaatagaatcatacaatatgtgggaatttgtgactggcttcttttacttagcatgttttcaactttcatccatgttatagc

SEQ ID NO: 231974 - DNA, 465 bp, Homo sapiens
ttttttttttttttgtgatggagtctagctatgtcccccaggctgcagtgcagtggcacaatctcagctcactgcaacctccgcctcccgggttcacgccattctcctgcctcggcctcccgagtagctgggactacaggtgcctgccacaagcccggctacttttttgtattttcagtagagacagggtttcaccgtgttagccaggatggtctcgatctcctgaccttgggatctgcctgcctcggcctcccaaagtgctgggattacaggcatgagccaccgcacccggtcttaatctactttttttagattaatgtcttaatctactttgtcttcatctgctttcyctccacagatttgcctatgctgaacatttcatacaaatagaatcatacaatatgtgggaatttgtgactggcttcttttacttagcatgttttcaactttcatccatgttatagc

SEQ ID NO: 231975 - DNA, 578 bp, Homo sapiens
tacctaatacaatgtaaatgtaatgtaaatagctgttatactgtattgttttctgatttgaattattttttattgttgtattgttattttagatttgatgttggttgaatccccagatgcagaatctgcggatacagaggggtgatcgtaccacatactgtgtgacttaaaacaacagaaaattattattttaaagctctggaggtgagaagtctaaaaaccaaggtattggcagggtcatgttctcttcaaagtctctaaggaataatcgtcccttkcctgttttactttctggtggttgtcaacaatccctgcccttccttggtagcctatctgtgttacttcagtctctgccttcatcaccacatgaccatcttctctctctgtttgtttgtgtgtttctaaatattttttcttataagaatactggtcattggctttgaagtaccctaatccagtatgacctcatcgtaagctgattacatctgaaaaaaataccctctctatttccaaataaagttacactccagttccaggtgaatatgaatttggggggacactattccacccaggaaaaa

SEQ ID NO: 231976 - DNA, 627 bp, Homo sapiens
actggtcattggctttgaagtaccctaatccagtatgacctcatcgtaagctgattacatctgaaaaaaataccctctctatttccaaataaagttacactccagttccaggtgaatatgaatttggggggacactattccacccaggaaaaataccttttacagtactttttccttgccttttgtacaaggtacctgcattttcatttttcactaggccccaaacattataactagccctgctgtcaccttatcgataaagctcatgttggaaacatggtttaatgagccagccaaatgaatcggctaactgaactccagaattgtacmgactttcccattcttgcagctagttggttctaggcaagcccatgtgagagaagcatgcctatataagacttatgtctatgtggcatgacagataaatgcttatggcatttgtgtctatgggcaggctgcctcccaagattaagaaaagaaagggctaaacaaagcatggccagttattctttccaagtatccagttagacagggcatttcaccaaccaccagtggtcagaagtatactaatcaagattcccttgctcatggaaacaacattaggaataaaaataaaaagttgccact

SEQ ID NO: 231977 - DNA, 520 bp, Homo sapiens
cttaagtgtacagtacttaaagctaccttgaagrtttagataactaaagaaaaacaacataaacaaatttagatgtatttatttcctactaatggcgtcttagtctcttttctcttgcttataatagaatacttaaaactgggtaatttattttgaaaaaggaatttatatcttacaaaggctgagaagtccaaggttgagggggccacatctggtatggatcttctagccggtggggactctctacagagtccctaggtggctcagggcatcaaatggaagggagacttagtgtgctaactcaggtctctcttcctcttcttataaaattaccagtcccactccttgtgataatacattaatccattaacttattgatcctttaatccgtgaatagattaattcattcatgagggtagagtcgtcacaacccaatcacctcttaaaggccctgtcaatactgccacattggggattacattttaacatgagttttttggaaaaaaaaattcaaaccaca

SEQ ID NO: 231978 - DNA, 538 bp, Homo sapiens
ggagatacacctaatgctaaatgatgagttaacgggtgcagcacaccagcatggcacatgtatgcatatgtaactaacctgcacattgtgcacatgtaccctaaaacttaaagtataataataataaaataaaataaaaaaagaaattaaaacaaacaacaaaaaaaataaaataaaaaatgctcaacatcactaatcatcttggaaatgcaaataaaaaacacagtgaggtattatcttgccccagttagaatggctataatcasaaagacaaaaaataataaatgctggtgagaatgcagagaaggtcacaaagacaaaaaataataaatgctggtgagaatgcagagaagggaacccttatacactgttcatgagaatgtaaattagtacagccattatggaaaacagtgtggggtttctcaaaaaactaaaactagaactactgtatgatctggcaatcctactactgagtatttattcaaaggaaaggaaatcagtatatcgaagggatgcctgcaccccatgtttattatga

SEQ ID NO: 231979 - DNA, 437 bp, Homo sapiens
cccaagtagctaggattataagcatgcaccaccatgcttgcctaatttttgtatttttagtagagatggggtttcgccatgttggtcaggctggtctcaaaagtcctgacttcaggcgattcacccaccttggcctcctgaagtgttgggattacaggcatgagccactgctcctggcctgtatttgtatttgtatttctagaaattttacttggttatttttcatayctgctaggtcacttttttttttttttttttacaatttcctgtttgctgcaaatattttctatctttacttctttaaacatagctattttgtagcttgcatctaattgttcctatacctgaagtctttcagggtctgtttatgtcatctattattgctgctggttctttctcatcataacttactttcgtgtggcttggttaccatgaac

SEQ ID NO: 231980 - DNA, 647 bp, Homo sapiens
gagtagatggaagatagggaacctaggagaatacctctgataagaaaacttatgtatttgataaaatgattaaagtttatagaaaaaaatacatttttaaaaagtcaaggctgttcttttttatactctactataagcttcttgcaactagatgttatattataaattttcttatagctcttacagtacttagaayggtgtcttacttgttatagatgccccataaatatttgttagatgagtgtctgaaaatcaaatttctaaaacactgttttatcttttcagaaggtggattaactatttgcctaaatgcaaagtgtgagcatcaaagaggttgaaaatgtaatatctcattatgtctttactcaagggtgaggagaaaagatgaagaacagtggagaaaagtggagaaaagatgaagtttatgcagcaaattgctaactggaacaaggtatagaattttcaaaacacaagataattagttttactatctcttaaaaaaagaagagtccatttagccaccagagggctctcatcttcccatttaataacaggcctagacccaaacatgagataatgtaaacatgcagttgaaaaccagaagagaatatatatatatatatatatatatatatatatatgttcaa

SEQ ID NO: 231981 - DNA, 522 bp, Homo sapiens
ctcacatacaagagggacaatataaacttggtcaatataaacttctcaaatttctaccccgcagtcactctgaggattcctaaaactttcttttatccatgttgtttaccaatccccaagccctcaagcctaactgtaataataacctcagtccttccaccccaggtgttgaggactgaagactcccttctccatttaagaaatgcaacagaacacraaggtttggagaaaagccacccaggagcagacatggtggtatgaagctctgctggggaggacagcaggtggttccctccattggattagagtcctctgtccaaaaccaagtagctaggaggaacactcagaaatgcccacatacccatccacatgctagagaaggcactgttcccaaatgggtctctgtggtgctcccaaagtcattttattctgtagggactcatgtggtgtgaacgttgcaaaaatcatgtttctttttgcttctagcagctgggaatggcaagcgggtcttagtcttgaatt

SEQ ID NO: 231982 - DNA, 524 bp, Homo sapiens
gaattctttttcaattaaataaccagctcacatacaagagggacaatataaacttggtcaatataaacttctcaaatttctaccccgcagtcactctgaggattcctaaaactttcttttatccatgttgtttaccaatccccaagccctcaagcctaactgtaataataacctcagtccttccaccccaggtgttgaggactgaagactcccttctccatttaagaaatgcaacagaacacgaaggtttggagaaaagccacccaggagcagacatggtggtatgaagctctgctggggaggacagcaggtggttccytccattggattagagtcctctgtccaaaaccaagtagctaggaggaacactcagaaatgcccacatacccatccacatgctagagaaggcactgttcccaaatgggtctctgtggtgctcccaaagtcattttattctgtagggactcatgtggtgtgaacgttgcaaaaatcatgtttctttttgcttctagcagctgggaatg

SEQ ID NO: 231983 - DNA, 520 bp, Homo sapiens
cacatacaagagggacaatataaacttggtcaatataaacttctcaaatttctaccccgcagtcactctgaggattcctaaaactttcttttatccatgttgtttaccaatccccaagccctcaagcctaactgtaataataacctcagtccttccaccccaggtgttgaggactgaagactcccttctccatttaagaaatgcaacagaacacgaaggtttggagaaaagccacccaggagcagacatggtggtatgaagctctgctggggaggacagcaggtggttccctccattggattagagtcctctgtccaaaaccaagtagctaggaggaacactcagaaatgcccacatacccatccacatgctagagaaggcactgttcccaaatgggtctctgtggtrctcccaaagtcattttattctgtagggactcatgtggtgtgaacgttgcaaaaatcatgtttctttttgcttctagcagctgggaatggcaagcgggtcttagtcttgaatt

SEQ ID NO: 231984 - DNA, 492 bp, Homo sapiens
attctccctgatggcttctgggaaatttacttcagtgatgtcattagtgatgggccatatacctcgacttcatcctagctaaaaggtctttgcaagaatcacattttccggtcggggctggggtaggaagtaggaaaagagccttctaaatattgagcggcagtgaagagctaaacatgatccaataagccttctggtgtttcaagcgtatkggtatttcacctcactttgacataaatcatatgacctttgtcagacagcacatatttcaaaaaaaaaaaggaagaacaaattcagtaagagaaaaataaaatatgtttttgcttccaaaaaatctaataattaggctgcgattgacacaaattagaatgctgccaaaaattactggaaacactgactcactctgtatttcaattaacagtttctcagtttcccttacaaacagtgaagctgacaaaaattaattatctcagagggggtaaaatatttcct

SEQ ID NO: 231985 - DNA, 453 bp, Homo sapiens
gcatctcagcaggctccctcccttctactcagtctccttattatccttttgtttcaacccatttttcttctctagtattcttcccttttttcatttttttaactctttaattttttctctcccaattagccccatacatctttgagacaccttactaaaaaagcccatttattaacatgagaagatagaaatgaaaattagaactcagaagaacactgaaacacaaatacaccaaccagaaggcttactgggcttctattgttgagattcaagtttagcaatatgttcccagacagataaagtaaaaagagagagatgaaatgtacacacttcctagtttttrtttttcagagaaattaaagttttccccctaggcattaggcctgaaagaaattactaccactgcattttcattttagcgagactaagcctcatagtgacctcaacagtgtc

SEQ ID NO: 231986 - DNA, 432 bp, Homo sapiens
ggtggctcatgcctgtaatctcagcactttgggaggccgaggagagtgaatcactaggtcaggagttcaagatcatcctgaccaacatgatgaaactcagtctctaataaaaataggtgtgtatttaaaaaggattaatagctcatttttacctggrtagaccagccctgacatccagaatttttgctaagacttaggccatcacccaactggccccatcagaattagtttcctcagcaaggcaggtgcctgttctgtgcttgatgctgttgcatctgctgggaccaggatgttgcttctgttcttctataaaataatgaagaactcaatttttctgagggtccataggctaacggatcattctttcctctactcaccctcttcttcatgccttgaaattttaagccttttctatgctctttgcataaaaat

SEQ ID NO: 231987 - DNA, 610 bp, Homo sapiens
tacaaaataacattactttaggtaattatttgctgttttttagtgtagactttttattctataacagctttagaattacaggaaaattatgaagatagaacagagagctcccattccctccacacccagtttcttctattgttaacattttacactagaatgatataattggtccaactactacaccagtatagatatattgttatcaactaatgtccatacttcattgaaatttccttagtttttacctgattactctttcttttccacagtcccatataggatgccacaacacatttaatcgtcacatctccgtaggctcttcttagctgtgatagtttctgattttccttaatttcgatgactttkgacagttttaaggtttcctggtcaggtgttttgcagagagtgcctcagtcagaatttgtctgatgtttttctcatgattagacaggggttatgggtttttgaaatgaaaatcacagaaggaaagtgccactcattctatcatctccagggtgcatgctatcaaatgaggtatcaacatgacatattactgtcgacattgaccttggacacttgagttagatctgttctgtaacgtgtgttg

SEQ ID NO: 231988 - DNA, 508 bp, Homo sapiens
ctggcatggatgatttcgtgaaagtggcctttgaaaatgtcgggtgagacgttttctgctgttacctacaattctaaaataagtataaaagcagcaagattcggcttccaacagactctctcaggattataaccgcatagcctgatggagtttaccagcaatcatacatacctcgaaattagagtgggaaaaatcattccttgttagctatggttaacagtrttggctgctaaacacaacatatctctcgcgcgcgtgtgtgtgtgatgttcagctaaaggaaatgcagtttatttctaggcttaccctggcttttcctttgttaaaggtgcaccaaaagcttgaggaatatttgatttgggggtgtggcaggtgctaaaagaacttctgttcagtaagttcggagagtaaaaggagacacattggccttactaaatagcaatcacattgcaaactgttaattcccatttcctaatggagtcaccccttagaacatggcctgtagcaa

SEQ ID NO: 231989 - DNA, 406 bp, Homo sapiens
ttttaactggctcctctcagtatccaatagatcaagtagacagtagatacttcctctcctctcccaacacacatacacacagaaagcaaatatacaaggtctgtacaatttaattaataaacttgagccattagatatttataactcatatacgtttccatcaaayagtgaatacatgtcctttctcttttcaggtacatgtgaaacattaaagtaaaaacataaactgtgtattagatcttaaagggaggctcaataaatttcacagtgcaataaaattagaagtaatgaataacagtatgtgtggtggacagattttaaggcccctatgatttccacctcctggtgtttacacccttatgtagttcccttcttcagatatgggtgggacctgtacctttcaacc

SEQ ID NO: 231990 - DNA, 542 bp, Homo sapiens
gtaacgatggtggagggttcctctgtgtatccttcactcacattcccctaatgtaaatgtcttacataaccacagtatatttgtgaaaattaagatttaacattgtcactaaactactaactaaactacagcctttatttggatttcaccgtaacatcctttttctattccaggatctaattcaggatagcacatggcattttattgtcacgtctcctctttggtcatgacagtttatgttttttgtagagacagagtcttgctatgttgcccaaactggtcttgaactcctgagctcaagccatcctcccacctctgcctctcaaagtgttgggattacaggtgtgagccactgtgcctggcctgtgacaagtttcttagtttttccwtgtttctcgtgaccttgacatttctgaagattcatagtcaggtattttgtaaaatgtcccttaatttgtagaatttctctcatgttttctcatgattaggctacagtcaacaggtttttgggacagtgccacagaggtgaagtgcctttctca

SEQ ID NO: 231991 - DNA, 551 bp, Homo sapiens
ctactattttcttccttcacttttgctgcaccagccccttagacaaaacctgtttcagcaagctgggagaggagggcaggaataaacagaggagaagggmggctgactacagcctccttcctggactatggccttcccacttgctcctgggccaagcgtgcagggggcagaagtttgaacctccgatcaagtgagaagtttatcacattgggctgaatattttttaatttaaaaaaaaaaagttgagacagggtcttgctctgtcaccaaggctggagtgcagtggcatgatcacagctcactacaacctcaaacccctgggctcaagagatcctcccatctcagcttcagctaggactaaaggcatgttccactatgccaatctaatttttaaatttttgtagagacatggtctcgttatgttgtccaggctggtcttgaactcctggcctcaagcaatcctacagccctggcctcccaaaatgttgggattgcaggcatgagccactgtgcctggtctgggctgaacattttaattattgaattgaaag

SEQ ID NO: 231992 - DNA, 551 bp, Homo sapiens
ctactattttcttccttcacttttgctgcaccagccccttagacaaaacctgtttcagcaagctgggagaggagggcaggaataaacagaggagaagggargctgactacagcctccttcctggactatggccttcccacttgctcctgggccaagcgtgcagggggcagaagtttgaacctccgatcaagtgagaagtttatcacattgggctgaatattttttaatttaaaaaaaaaaagttgagacagggtcttgctctgtcaccaaggctggagtgcagtggcatgatcacagctcactacaacctcaaacccctgggctcaagagatcctcccatctcagcttcagctaggactaaaggcatgttccactatgccaatctaatttttaaatttttgtagagacatggtctcgttatgttgtccaggctggtcttgaactcctggcctcaagcaatcctacagccctggcctcccaaaatgttgggattgcaggcatgagccactgtgcctggtctgggctgaacattttaattattgaattgaaag

SEQ ID NO: 231993 - DNA, 551 bp, Homo sapiens
ctactattttcttccttcacttttgctgcaccagccccttagacaaaacctgtttcagcaagctgggagaggagggcaggaataaacagaggagaagggaggctgactacagcctccttcctggactatggccttcccacttgctcctgggccaagcgtgcagggggcagaagtttgaacctccgatcaagtgagaagtttatcacattgggctgaatattttttaatttaaaaaaaaaaagttgagacagggtcttgctctgtcaccaaggctggagtgcagtggcatgatcacagctcactacaacctcaaacccctgggctcaagagatcctcccatctcagcttcagctaggactaaaggcatgttccactatgccaatctaatttttaaatttttgtagagacatrgtctcgttatgttgtccaggctggtcttgaactcctggcctcaagcaatcctacagccctggcctcccaaaatgttgggattgcaggcatgagccactgtgcctggtctgggctgaacattttaattattgaattgaaag

SEQ ID NO: 231994 - DNA, 500 bp, Homo sapiens
tcttaaacataaaattagagactttgataaacatacacatctatgtaactgctacgcctttcgagatttagagtatttcattagctggggtagggatgcatctttttttttagatggagtcttgctcttgtcacccaggctggagtgcaatggcgtggtcttggctcactgcaacctccacctcccaggttcaagttattctcctgcctcagcctccccaagtagctgggattacaggcgcctgccatcacacccagctaatttttgtatttttagtagagacgggctttcaccattgttggccaagctggtcctgacctcaggtgatctgcccgcctcgcccttccaaagtgctgggattacagatgtgagccactatgcccggctcacagggatgcatctttaggccatggcctgaggtttcttcaccacttctgcttttcttcttcccattagcaaarccactcaaacttgcaggaagtcattgggtaagctgcctg

SEQ ID NO: 231995 - DNA, 543 bp, Homo sapiens
tcctgaaagaggtagacttctttaagagaaagaaaagtagtttacagaatgtagttgcagaaataatgtgaaagagagcacagattgaggagtaggaaaattaaatttagagtcccarctttgtggagtggcgtgaataaagggaagtgtacatatcactgaattcatgcttttccttaagttatctgttttcagagcagtggaatttttcatcagagataaatatgaaaagaagaaatactacgataaaaatgccatagctattacaaatgtaagtaaaaccttcatctctcatcaattgtttgttgactagatttcaaacttttaacatgcaatacagcttaatttatttattgtgaaaacatactagttgtatatatttacatttgaatattggaacttttttggttatataatgttgagctcttgcagagcagaagtcttgatttagaaaggagcatattctaaatctaataaccacttacatggcatttaattaagttaatttttgaaatttgcaaaaaagctagaaccactaattga

SEQ ID NO: 231996 - DNA, 591 bp, Homo sapiens
caagtactgcgccgactgcgaggccaaaggtagcttggacgtcgtcgctgcccacggtcggggcctcttgcgaccggtgaccttcccgccgctgcggcgctcggggcccgagcggacgcctcggcttcgctggccggctcctgccctgactggagggcgggtggctgagcgggcgggcgcggggctcctgtcgaccctcaagtccgccagaggcggcggcgaggtcaggcccgcaggccctgtcagtggccccagcctcccctcctcccagacacgggtttgagcaggtgccagggtagcgatgctcggaccctccacagggctgggggtaggagcgaggctgggagcgcggaaccgggcacgggtctgggcrgagcttagggttagagagttgccctcctagctctgctcatagctatctctgtgggtggggccgcgcttaggtctggatcccctcctctaccctccggtgtgaccacgtcctcccactccgggctcggattcttggtctcctagatggagccctacctgcctgcccacctgacagcttttgtacaaggcttttatctctgcttcctgaaaaagagtatg

SEQ ID NO: 231997 - DNA, 493 bp, Homo sapiens
agatctgatgactcagtcaaatactcaaatgttttgattcctgaacaactgatctactatttttaaaaatggaaataaatctgaaaattatggcaaaaatcactatctttaatatcaattttcccattcttcctttaagtaataaaggcttctgaattttacctagaaatgyggctgtcctgataggaagactacatttctcagcctctcctgtagaatgtaaacagaaatgatatattttgccattaaccacactgggcctgtgttcccctggcctcttccccttttccatttgctaggagacaataaggaatgaacctgcaaccttggatccaattacaaaagccccatggtgaagatgacagaactactctacccatactggacagttcatgtccagaccaatgtgaaggagaaataaacttctaccctgtttaagccacttttttttttctttgagacagggtctcactctattgcccaggctggagtg

SEQ ID NO: 231998 - DNA, 483 bp, Homo sapiens
gtaggaacccagccatggtgaacgaagccagaggaaacagcagcctcaacccctgcttggagggcagtgccagcagtggcagtgagagctccaaagatagttcgagatgttccaccccgggcctggaccccgagcggcatgagagactccgggagaagatgaggcggcgattggaatctggtgacaagtggttctccctggaattcttccctcctcgaactgctgagggagctgtcaatctcatctcaaggtraactcatgcaaggttaaggtgggaggcgggagtggtggtgcctggggagcaaactgtcagccctgaggctgggctgccctttaacccggcagaaaaaagcagccggagggggcaggaaggagaaggcagagtgggtcatctgatctgcaacttctctgttgcctgtaaaagtccctccacagtgtcaaggtattttagacacactcttcaatgggttaaaaatgttgatt

SEQ ID NO: 231999 - DNA, 620 bp, Homo sapiens
agtgctaagaatatatagtctgtaataaaatgcaaaaaagttgggagtatttttttaaaaaaaggaaattcgaaataagtggagttacatcagttaaaaaaaataaacacaaatgggttaatcctccctaatgcataatgataatctcatattgatttaaaaaggatagttccacaatatgcttcttataaaaggcatatctaataaactgacacaatcagctgtgtcactataggttggtgcaaaagtaattgcggtttggtttttgccattaaaaataattgcrgaaactgcaattatgtttgcaccaagctatagtcacacagctaattaaaataaaggaacgataaaagattataaggcaagtagaaaaaatcagaggaagcagtattagatttcaaagaaaggataattcaaggcaaataattaagcaggaaaataccatatcaacaagtatggtttacaatgacagtattagtcatgagttattttagtagaatatataaacttgaaatattttttgtaaaaatatgctagaagtatacagacaactagagagaaacaatatttgtagaacattataaagcattcaactaatgaaacaaattatatctaaagga

SEQ ID NO: 232000 - DNA, 620 bp, Homo sapiens
agtgctaagaatatatagtctgtaataaaatgcaaaaaagttgggagtatttttttaaaaaaaggaaattcgaaataagtggagttacatcagttaaaaaaaataaacacaaatgggttaatcctccctaatgcataatgataatctcatattgatttaaaaaggatagttccacaatatgcttcttataaaaggcatatctaataaactgacacaatcagctgtgtcactataggttggtgcaaaagtaattgcggtttggtttttgccattaaaaataattgcggaaactgcaattatgtttgcaccaagctatagtcacacagctaattaaaataaaggaacgataaaagattataaggcaagtagaaaaaatcagaggaagcagtattagatttcaaagaaaggataattcaaggcaaataattaagcaggaaaataccatatcaacaagtatggtttacaatgacagtattagtcatgagttattttagtagaatatataaacttgaaatattttttgtaaaaatatgctagaagtatacagacaactagagagaaacaatatwtgtagaacattataaagcattcaactaatgaaacaaattatatctaaagga

SEQ ID NO: 232001 - DNA, 631 bp, Homo sapiens
cagagtgtccaatattactttcataaaagtagaaaacaatggaaatttgaagcctatatggggtattattaatttaataacacctggcagctttaagcataaattaatttttccttgttcttttataaaactaaaaatcattgattaacacaatatgaatacatctttctttgatttattttggcttaggcagatcagttagactctttggaaccattttctctcatatataaagtgagaacaacattatttacctcctggattgctcaatattttaataaatcataatgatacataatatataaatatatggccattatttccattggtgaattctgtactgcttcttgtggttgtctgactattagtgaagggtaagatcagaattgtaacaataagggaactctcrgtctgggtgtagggaagagtctattcaaagatgcacacgtgtaaaaatatggtgttttagaaatatcgtatcattggagcttagggtggaatgtagttaaagattagtctgaagattcttggagaacctgggccttactgaatttgtatcattctgaaagcatcaccaaactattttagaaaggaaaatcatgtaagatttgcattttagaaagatgccatg

SEQ ID NO: 232002 - DNA, 411 bp, Homo sapiens
gaattctgggaagttattttataatatgtccttcagtttgagtctgtctgatgttttctcatgattagatgaaagttatgcaaaaataccacacaagcgatgcactcttctctgtgaatgataactggggyacctggcatcaatatgcccatcctggcaatgttaactttgatcgtttatttgaggtggtatctgtaggatttatctactttaaagttactgtttttttcttttgaaattaataaatataccaggggagagtctttgaggctatataaatattctatttctctccaaatttatactcattaattttagcatacattgctggatgatgcctataaacatttattactatagagtttacctaatactgattttctacttcactaatttttcctacatttatta

SEQ ID NO: 232003 - DNA, 399 bp, Homo sapiens
  misc_feature (1)...(399): n = A,T,C or G
ccaatttagatcttctgtgtattttaacatttcttcacaktagtccagcatattctgcattttattcattccctactgagggctgtttctgttattttccactnnnnnnnnnnnnnnnnnnnnnnnnnnnnnnnnnnnnnnnnnnnnnnnnnnnnnnnnnnnnnnnnnnnnnnnnnnnnnnnnnnnnnnnnnnnnnnnnnnnntatgaacatttctaattttaataaatattgcccaactgctcttcagagttcctgtggcaattcaggttcagaggctggagctttaaatgtaatattttattaattatgtccagctttcaaatggtcagaatatatggcttatgtgatagagtcatgtggacataacgtatatattaatagttatattacattctcc

SEQ ID NO: 232004 - DNA, 463 bp, Homo sapiens
ttgtgaaattattatattttgagaaaggcagaagwtgacattatacagtgctggcccaggaacgctgaatgactagagtagtaaggtagtctgataaatgataccaagatgtggttctgagctccgtgctgtatcaagcattcagtatataaacagagaagaaattcatgaggtttaattgagtttgattctagagtttgagagaaagccagcatttttgcactttagaaaatcttttattttcccggcctttatattgccttttaaggctaccaagggcaggaattttacacaggtctgaataattggccccctcatggatttcatctagcaaacacttgtagtgtggctttgatgccaactactgggccatatggtgaggtttatacaaaataaatacaagctatggtccctgctctccatatagcaggagttcccatttgcagcatacatctaagaattc

SEQ ID NO: 232005 - DNA, 463 bp, Homo sapiens
ttgtgaaattattatattttgagaaaggcagaagatgacattatacagtgctggcccaggaamgctgaatgactagagtagtaaggtagtctgataaatgataccaagatgtggttctgagctccgtgctgtatcaagcattcagtatataaacagagaagaaattcatgaggtttaattgagtttgattctagagtttgagagaaagccagcatttttgcactttagaaaatcttttattttcccggcctttatattgccttttaaggctaccaagggcaggaattttacacaggtctgaataattggccccctcatggatttcatctagcaaacacttgtagtgtggctttgatgccaactactgggccatatggtgaggtttatacaaaataaatacaagctatggtccctgctctccatatagcaggagttcccatttgcagcatacatctaagaattc

SEQ ID NO: 232006 - DNA, 438 bp, Homo sapiens
aaattattatattttgagaaaggcagaagatgacattatacagtgctggcccaggaacgctgaatgactagagtagtaaggtagtctgataaatgataccaagatgtggttctgagctccgtgctgtatcaagcattcagtatataaacagagaagaaattcatgaggtttaattgagtttgattctagagtttgagagaaagccagcatttttgcactttaraaaatcttttattttcccggcctttatattgccttttaaggctaccaagggcaggaattttacacaggtctgaataattggccccctcatggatttcatctagcaaacacttgtagtgtggctttgatgccaactactgggccatatggtgaggtttatacaaaataaatacaagctatggtccctgctctccatatagcaggagttcccatttg

SEQ ID NO: 232007 - DNA, 574 bp, Homo sapiens
caggtatttaaatttcttccaatcttgctctaaattatatttttctttagtaatattaaaaagtaataatagcaattctgatttataaatatttataccctcaatgaataagaccaatttctttagaaaagttttttttaagacagagtctcactctgtcaccyaggctggagtgaaatggcactatcttggctcactgcaacctctgcttcccaggttcaagcgattctcctccctcagcctccttagtagctgggattacaggtgcctgccaccacgcttgattaatttttgtatttttagtagagacaaggttttgccatgttggccaggctggtctcaaattcctgacctcaagtgatccacccgcctcagcctctgaaagtgctgggattacaggtgtgagccactgtgcctggccaagataaatttctttagcattagattcaagacccttcacatctgatttgcctttagggacaccagatagactgtgctagaaaatagtcattgatctatttagggtggctggtgatctacatcaggtactatgaagttggaagagtcatagaac

SEQ ID NO: 232008 - DNA, 574 bp, Homo sapiens
caggtatttaaatttcttccaatcttgctctaaattatatttttctttagtaatattaaaaagtaataatagcaattctgatttataaatatttataccctcaatgaataagaccaatttctttagaaaagttttttttaagacagagtctcactctgtcacccaggctggagtgaaatggcactatcttggctcactgcaacctmtgcttcccaggttcaagcgattctcctccctcagcctccttagtagctgggattacaggtgcctgccaccacgcttgattaatttttgtatttttagtagagacaaggttttgccatgttggccaggctggtctcaaattcctgacctcaagtgatccacccgcctcagcctctgaaagtgctgggattacaggtgtgagccactgtgcctggccaagataaatttctttagcattagattcaagacccttcacatctgatttgcctttagggacaccagatagactgtgctagaaaatagtcattgatctatttagggtggctggtgatctacatcaggtactatgaagttggaagagtcatagaac

SEQ ID NO: 232009 - DNA, 574 bp, Homo sapiens
caggtatttaaatttcttccaatcttgctctaaattatatttttctttagtaatattaaaaagtaataatagcaattctgatttataaatatttataccctcaatgaataagaccaatttctttagaaaagttttttttaagacagagtctcactctgtcacccaggctggagtgaaatggcactatcttggctcactgcaacctctgcttcccaggttcaagcgattctcctccctcagcctccttagtagctgggattacaggtgcctgccaccacgcttgattaatttttgtatttttagtagagacaaggttttgccatgttggccaggctggtctcaaattcctgacctcaagtgatccacccrcctcagcctctgaaagtgctgggattacaggtgtgagccactgtgcctggccaagataaatttctttagcattagattcaagacccttcacatctgatttgcctttagggacaccagatagactgtgctagaaaatagtcattgatctatttagggtggctggtgatctacatcaggtactatgaagttggaagagtcatagaac

SEQ ID NO: 232010 - DNA, 514 bp, Homo sapiens
ggagcaaaatataccagctgacatggtgtagagactgtttttgactcaacttcctccctttctttcctagtatttgcaatgtgggtcgatttcccacattgggaaattgagttgagtcacatggtgactcacctggtgggtcaaggtagtgccctgcatttgcatcccattcagaaggctgggggtaagtccagcaagacctctaaccaaagaagttctgagggcaggctggatactaagaggtgcccacttatagggcrccatgattttagagggaaaattcaagttatagtcaagaagaagaacccaaaccagtcagaaagcaggaccaagttcaggcctgaagaacgtagtgagcttgtaaatagaagaatgtgtaataaggctatgagccagaatgaccagaaacacgtgaagcgtagtgtgtagggtaggttaggacaagtggttcagactaagattgtgtctgatcagagggtaatggaaatctgtttttatgacatgccagctgctt

SEQ ID NO: 232011 - DNA, 559 bp, Homo sapiens
acaggggtcctctgcatttcttgaatttgaatgttggcctctctagtgaggttggggaacttttcatagaagatacactcaaatatgttttccaatttgcttgctttttctccctctctttcagagatgccaatgagtcatagatttggtttctttatatratcccatatttcttggagtcttttttcattcttctttatttgtttttctttatttttgtctcactgagttattttggaaaaccagtctttgagctatgagattttcctcaggttggttgattctgcttttaatacttgcaattgtattctgcaattcttgaagtgagtttttcagctctatcggatcagtttggttctttcttaaaatggccatgtcatctttcatctcctgtatccttttattgtattccttagattccttggattgggttttgactttttttctgaatctcaatgatcttcattcctgtcaatattctgaattctattgctgtcatttcatccatttcagactggttatgaatcattgctgggaaactagtgtggtcctttggagg

SEQ ID NO: 232012 - DNA, 559 bp, Homo sapiens
acaggggtcctctgcatttcttgaatttgaatgttggcctctctagtgaggttggggaacttttcatagaagatacactcaaatatgttttccaatttgcttgctttttctccctctctttcagagatgccaatgagtcatagatttggtttctttatatgatcccatatttcttggagtcttttttcattcttctttatttgtttttctttatttttgtctcactgagttattttggaaaaccagtctttgagctatgagattttcctcaggttggttgattctgctkttaatacttgcaattgtattctgcaattcttgaagtgagtttttcagctctatcggatcagtttggttctttcttaaaatggccatgtcatctttcatctcctgtatccttttattgtattccttagattccttggattgggttttgactttttttctgaatctcaatgatcttcattcctgtcaatattctgaattctattgctgtcatttcatccatttcagactggttatgaatcattgctgggaaactagtgtggtcctttggagg

SEQ ID NO: 232013 - DNA, 586 bp, Homo sapiens
aaccacaaccatagaagagctaatcccaaatggaacaaatttattacatgaaatgaatgactgaagtgatgcaaggggtgcagtgaaagctgtgctgctacatggcctctttagggattaagaccttcattctcaagcaactgggagtgtttctgctgatggttcacaactgaggcctttctcaagcattgcyctaaattaacaggaactgcttcatgcaaatttacctcctcccaggaggcagtttaattcaataaccaatccacgcaggtgtagaaagacaagttatgtggctgccatacaagccaacaaacaagaaaattaaaacaaaacaaaaaactcacctatgggttcagtattgaagggtattaactgtaagggccactattcttttaatgggttacatcatacaattctgttctgtttcagatgccaaaacttaataaaggcataaacaaataatgcctaataaataaacacacataatccagaccacaggttttcttaaaactattttaaagtaatggaactcttttttgtccagattaaaaaaaaattatttcagattacccacatataacaagtc

SEQ ID NO: 232014 - DNA, 593 bp, Homo sapiens
tgattcaattatctcccagcgagtccctcccatgacacatgggaattatgggagctgcaattcaagatgagatttgggtgaggacacaaccaaaccatatcagttggtaaagcataaactatttaaaaaaacaaagccaaggaggaaggaggactgcttgaggccaggagtttgagaccaaactgggcaatgtagcaagatcccatctctacaaaactaaaaaaaataattagctgggtgtagtggtccatgtagtcctgctacttgggaggctgaggcaggaggatcacttaagctcaggagttcaaggctgcagtgagctatgattgtgccacagtactccagcctgggcaataaagcgagactgtctctaaaaataaaaaaatacaaaaataaaaaaaaggagaaaaatccaaacaacttgtttctaaagaaagatgagccaggcatggtggctcactttgggaggtcaaggtgagctgattgcttgcgcccaggagttcsagactagcctgggcaacatggcaaaatcctgtctctacaaaaaaaaagagggaagaaagatgagctttattgtaccctgtaccctgtct

SEQ ID NO: 232015 - DNA, 583 bp, Homo sapiens
accattagttctccagattatttttttaaaaatgggcttcatttgcagaagctcaggatagagggggatggtatagagttcattaaaaaccatttaacactaagctgaatgtcagtatactttgaaagaggcctattagttaatgtacacaagaagctatcagcacttgtgataagtcaaagaaaccaaacagtgaaacccattagatggtacttgtaaggcagttgggttttatgaaatgttttagataaattagattgggattgacagaaaaagtggcattaacaaggaaggatttttatttagaacccttacttggagccaaaaatcctcagttttgactgaccttaaatgattaacttggccacaatgagttggtgacctcataggagatacagaggacataattacaccacaactagaagtgtatttgtttgtctttttgtggccttttcatggatatrgtggatataatagacaggattctcaccaatacaaaaatagtgttactgcttccaaagaccataattaaaaacctccctttcttagtgtagtctgctggcattagagtgaaaaagcaatt

SEQ ID NO: 232016 - DNA, 583 bp, Homo sapiens
accattagttctccagattatttttttaaaaatgggcttcatttgcagaagctcaggatagagggggatggtatagagttcattaaaaaccatttaacactaagctgaatgtcagtatactttgaaagaggcctattagttaatgtacacaagaagctatcagcacttgtgataagtcaaagaaaccaaacagtgaaacccattagatggtacttgtaaggcagttgggttttatgaaatgttttagataaattagattgggattgacagaaaaagtggcattaacaaggaaggatttttatttagaacccttacttggagccaaaaatcctcagttttgactgaccttaaatgattaacttggccacaatgagttggtgacctcataggagatacagaggacataattacaccacaactagaagtgtatttgtttgtctttttgtggccttttcatggatatagtggrtataatagacaggattctcaccaatacaaaaatagtgttactgcttccaaagaccataattaaaaacctccctttcttagtgtagtctgctggcattagagtgaaaaagcaatt

SEQ ID NO: 232017 - DNA, 617 bp, Homo sapiens
caagtattatacagtgtgctagggtacaaagataaataagacagcatatgctttctagtgggcacacaacaaactatttaaaataaaaataaatataggataacataaaaacttaaaattttaccaaaaaataaagaaggcatataggtgtttaaaagtggtgatgatagtagtatgtatgcattgagtacatgccagacaaaattttaagtgatttaaacacattaacccttttaatattcacaacaactcagagaagttggcagtactattaytatcatcattactaaagaaaagtaaactaggcatatggaaactgagtacctgtacaaagtgacacagatagtaagtgccatagccagagttcaaatccagagggtctggactctggagcctgtgtacttaatacttaagcagtgattcttataaagtattgggtaaggggtggccctcagtgtgactgagtagaaaagaaagcctgcaggacttgaggaacaagaacaatgtaggttaagacctgcattatctactgtcagtttcctatataaagaggtgccctattggttgccacctctatatatcttttctagctcctagtcaatcaggccgcaaattta

SEQ ID NO: 232018 - DNA, 577 bp, Homo sapiens
ttttgttatacgtttaggaaatggcatgtattccttagcctgttcagaatttatgcagcaagagtcccttatccaattttatcaactcaaaaacatagaaaaaataggtttctggtcccacaaaactgagacccagaccctaaataatggcagattctccaagatgaaaaccaccctgtgtgcttttcctcataactcacttttttgagaggtggaggtaggggtagatttctgtattcctcaaacagaaaacaggtagaaaaatatattcagcaaactagtgaactaaatatgcttagttaacaacaaaaaacctcacattttaagtttttgaattatatgtagtataattataaggtaataaaattgatttctgtaagattcatctaaatccaccctctctgaattgtatmtataattgtatccataaactattccatcaggagaaattctttaatctgccctattgactagtgtactataattatgaggtattttttgtcgatgttatatgtatagtaaaactgttagtttcttgataattaatgtaaatatattactttccactgtatcttat

SEQ ID NO: 232019 - DNA, 560 bp, Homo sapiens
tcctatgaggatgggattttattattcacatacagaattaaagcttggcacacccaaacctcatttgagccaaacttaggccaaaagaccgaagggttacaagtagggtctttaggccagataaaacagcaatactttattatctttaacttttccttgtccctggtttgagagtagtccctgcaaacctgcagcattctccccaacagactatccaggggaatgtcagagagagtctctttgactccctctttctattgttccctaggcctagaatttctggttcctttttcctgtmagtctctgtatctgagcttttcctcatgtactcaaccctccctactagaggtttcttgcacaccccaagaatcgctgcctctgtctctggccatttcccttgcgggagaactgaaccatggattgggactctgcacttgtttcatatctaggatacatctcagtcatgcacacactcgacctatgaacatgcccaaccaccaaggttgaatttatagtccaattttcttacttcagctcatgcacgaggttgcctggttgcc

SEQ ID NO: 232020 - DNA, 560 bp, Homo sapiens
tcctatgaggatgggattttattattcacatacagaattaaagcttggcacacccaaacctcatttgagccaaacttaggccaaaagaccgaagggttacaagtagggtctttaggccagataaaacagcaatactttattatctttaacttttccttgtccctggtttgagagtagtccctgcaaacctgcagcattctccccaacagactatccaggggaatgtcagagagagtctctttgactccctctttctattgttccctaggcctagaatttctggttcctttttcctgtcagtctctgtatctgagcttttcctcatgtactcaaccctccctactagaggtttcttgcacaccccaagaatcgctgcctctgtctctggccatttcccttgcgggagaactgaaccatggattgggactctgcacttgtttcatatctaggatacatctcagtcatgcacacactcgacctatgaacatgcccaaccaccaaggttgaayttatagtccaattttcttacttcagctcatgcacgaggttgcctggttgcc

SEQ ID NO: 232021 - DNA, 592 bp, Homo sapiens
tgagataaacctaataaaaataacttctatttgccttacgcggtttgaagacttgctattttgcggcttttaaaagtaataaatatcaaaacattgttattccataataaacaatgtcaaaatcctctaatgacatgaattcttatggaagattaaataaatgagaattaaaaatggaaaagagcataaaaattatcttagtcatatcatttgatgctggggtttgtttaaaatggtgattgctttcttgacaagtgtatgtatattttttaatcaaaaaagattttgtgagccgggtaaacatatttcttcactattttccaccacctaacagtttgttctactttgtttagaaagattatctgtggcaggtgctttttttgcctgctatgttaaaaaaaattctatacatgctagatgtttstcatcaactcagcccaaaatacctttttgtcactatttccaaagctagttctttaatattaatatagttctgctttggcaacaacaaagatgaatagctattggtggtgtgggttttgtttctgtctttgactatttagtgtagagaggtatcagtatgaggagttaa

SEQ ID NO: 232022 - DNA, 353 bp, Homo sapiens
atgcacttggagaaaataaatgtgagggagaaagcaagtattgataaaacatttctaatgtctctagttgtttaatctcattggactaaatwaatctgctcattactttaataagacaaattccttatctcaagaacttttaactttttactttgcagtagctttagacttatggagaaactgcaataatgaagctgagtccctatatacactctactcagtttcctttaaggtaaaaatcttatataaccatgggacaattatcaaatatcaattatgaattatcattgcaattttcaatactaagaaattaacataggcacaatgtcattaaccaaactgaatatttaatc

SEQ ID NO: 232023 - DNA, 549 bp, Homo sapiens
gcgtatttcttgttctttaaaagctcccaggatcttagtttggacctgctttttcaaccttacwttctcctagtctccctttgccaactatattctatcccagtggttctctaagtgttattgaaagaccagctgcatcatcttcacttgaagtctagtgcacatgattgtcaactacacagatattttactagtcactaagaggtcatgatgatgatgatgatgatgatgatgatgataactatatatgaaagtcatcgtttatgagaacttttttgttccttttatctgcaactgacaaagatcctgagagatattaaagacatctattcttatagtttccacttaaagatgaggaatttcagcttcagagattatctgtctcaaggttaagctaataagtagctaggaattaaactcagattttcttcttcaaatttcttaccttcccaatatctacattgaaatcctttggtgctatcaggagagaaaacaaataaaactgatgcccattatgtatgaccttaatataacccaggccctgtgtaa

SEQ ID NO: 232024 - DNA, 549 bp, Homo sapiens
gcgtatttcttgttctttaaaagctcccaggatcttagtttggacctgctttttcaaccttactttctcctagtctccctttgccaactatattctatcccagtggttctctaagtgttattgaaagaccagctgcatcatcttcacttgaagtctagtgyacatgattgtcaactacacagatattttactagtcactaagaggtcatgatgatgatgatgatgatgatgatgatgataactatatatgaaagtcatcgtttatgagaacttttttgttccttttatctgcaactgacaaagatcctgagagatattaaagacatctattcttatagtttccacttaaagatgaggaatttcagcttcagagattatctgtctcaaggttaagctaataagtagctaggaattaaactcagattttcttcttcaaatttcttaccttcccaatatctacattgaaatcctttggtgctatcaggagagaaaacaaataaaactgatgcccattatgtatgaccttaatataacccaggccctgtgtaa

SEQ ID NO: 232025 - DNA, 549 bp, Homo sapiens
gcgtatttcttgttctttaaaagctcccaggatcttagtttggacctgctttttcaaccttactttctcctagtctccctttgccaactatattctatcccagtggttctctaagtgttattgaaagaccagctgcatcatcttcacttgaagtctagtgcacatgattgtcaactacacagatattttactagtcactaagaggtcatgatgatgatgatgatgatgatgatgatrataactatatatgaaagtcatcgtttatgagaacttttttgttccttttatctgcaactgacaaagatcctgagagatattaaagacatctattcttatagtttccacttaaagatgaggaatttcagcttcagagattatctgtctcaaggttaagctaataagtagctaggaattaaactcagattttcttcttcaaatttcttaccttcccaatatctacattgaaatcctttggtgctatcaggagagaaaacaaataaaactgatgcccattatgtatgaccttaatataacccaggccctgtgtaa

SEQ ID NO: 232026 - DNA, 560 bp, Homo sapiens
gcccacataattttaattacagatgaagcttaaatggataattcaaaatatgctccaatcatacagagggagagtaaattatcatctattattgactgaaagaactagaaagacaagtaaatggttgctaggccctttgctatcatttagagaaatagaagagcacaaaaatggtaaagmcatgagcctgcagatatgtaagagaaagatttttttgtcgttgttatatttgtttttaacagaaagaagtttggaacaagcaaaagaaaagagtttcactgggaatcttgcctttctagtgtaaaagagggtgaagactttaataaataaatctagcatttgtgaactggaagtgatggctgaaaaaaaataaaggaaggatcacagagccctgtgaaagtttggggaacttgtcctagcaggttgacacaatttgacttgaaaatgatacactgttggtgtcctttgccctgactataggtgacagacgactggaacagaagaggcacactgatcggggaggaaaaaaaaaaagaccaaccttccactctatcatttca

SEQ ID NO: 232027 - DNA, 577 bp, Homo sapiens
aaaaaacaacaaaatctcaccaaatctactgacttcagccaaaagacactttttcagttagccctattatttatgtattttttcctttctcagctctaacatatttttttaaacacatgtcgacttctacagggattataaaatccttggacaactatatgatttgggagcaaagtttccatgtgtaaggattgcgtgatgtataaggaatgtgtcacatcaggttgagttttaaaatgaacgtactccattcttaggttttatctctacagatggataggggcccagaggcccctggaagcattttggtaccattgcattacttacggttaagaggcaggctcgcattggttgtgcctagcttgttggcagccacacargtataattgccgaagtgctcctgtgtcacgttggtaacagtgagaatggatcttgtgctaaaattttgaataataattccttgttggccattgaagagcctagaagacaaaataagctctaggtaaatatgtattgtgaataccagtttcatttttttatcttagctggggttgtcatggcaacccatagacaattc

SEQ ID NO: 232028 - DNA, 554 bp, Homo sapiens
gttgtcatggcaacccatagacaattcaactacgctgacgttagcatataacrtgataatggtgcaatttacatttcacttacattagtagatttgggggaggtgaggttgcatgtcagctgtagattgttcctgtgggattatttgtgctatataacaaactgagcttggatagctacatgtcctatttaggcactgttacatattttagaaaatgaaacataccataccaataatatctcatctattaaagtcaggaaggagtttaagggaaataaatataaagattccacggaaagtacaaactgatggtttctaggtaagctggcgagagtatgtctgggtcatttcagacattattaaataactcccttgaaagttaaccctacaactgtgataggatagttctgagtccagagtcaacaccactttactcttgtacaacccagacagataacttccattaaacctaaaaagagacagtcatatagtattggagatagcatttaaagttgagtcccatcactgtcacattttaggaatgtgccatggaa

SEQ ID NO: 232029 - DNA, 579 bp, Homo sapiens
cagtttcatttttttatcttagctggggttgtcatggcaacccatagacaattcaactacgctgacgttagcatataacgtgataatggtgcaatttacatttcayttacattagtagatttgggggaggtgaggttgcatgtcagctgtagattgttcctgtgggattatttgtgctatataacaaactgagcttggatagctacatgtcctatttaggcactgttacatattttagaaaatgaaacataccataccaataatatctcatctattaaagtcaggaaggagtttaagggaaataaatataaagattccacggaaagtacaaactgatggtttctaggtaagctggcgagagtatgtctgggtcatttcagacattattaaataactcccttgaaagttaaccctacaactgtgataggatagttctgagtccagagtcaacaccactttactcttgtacaacccagacagataacttccattaaacctaaaaagagacagtcatatagtattggagatagcatttaaagttgagtcccatcactgtcacattttaggaatgtgccatgg

SEQ ID NO: 232030 - DNA, 554 bp, Homo sapiens
gttgtcatggcaacccatagacaattcaactacgctgacgttagcatataacgtgataatggtgcaatttacatttcacttacattagtagatttgggggaggtgaggttgcatgtcagctgtagattgttcctgtgggattatttgtgctatataacaaactgagcttggatagctacatgtcctatttaggcactgttacatattttagaaaatgaaacataccataccaataatatctcatctattaaagtcaggaaggagtttaagggaaataaatataaagattccrcggaaagtacaaactgatggtttctaggtaagctggcgagagtatgtctgggtcatttcagacattattaaataactcccttgaaagttaaccctacaactgtgataggatagttctgagtccagagtcaacaccactttactcttgtacaacccagacagataacttccattaaacctaaaaagagacagtcatatagtattggagatagcatttaaagttgagtcccatcactgtcacattttaggaatgtgccatggaa

SEQ ID NO: 232031 - DNA, 533 bp, Homo sapiens
aagccggcatcgggcgtgttcaggcggctgttggtgccatgcgggaatgtgttcgtatttggatatttaaataaaatattgtgctctcctccacatgcttggccatctgtgggcacagctttcccgcactctcggcggctgtgctcgcccagcattgatgtctgggctgtcgctcgttacaacaaacttcatgggacgtcacaccccgcaagaatgggctccccgactcacttcgtagcaacacccaacttgtcttggcttttktgtgtgtgtgtgtgtgtgtgtgtgtgtgtgtgtgtgcatgtgtgcgcgcatgcatgggtgagtgttttaaatcataactcttctggagaaagtgtttttgtgtttacttttgagtaatagtaactttgggagttgaggtttctcactgctccccctttcctgtcccagatgccaacaagaggaacccccagccatcctttggggggtcctgctccgggctgggccctgggtcttgggcccttgtattgaaatgaggcctcacatcacag

SEQ ID NO: 232032 - DNA, 430 bp, Homo sapiens
cctggggctgggcaggtggtgaagaccccatcctggactagcccaggaggcccagggggctcacattgagagggctagggggctctgcctttgagctttgagggctgagctggatgagccccttctctcatggctttcttgaaatgcrtggggttttgtgaggacaggtcagagggtagggcctgcaaggtgaggaggaggaggggaaggctgctcctgacctacagctgtgggcacgcacagagcccaggatgcctgtgcagggaagcagctggtttgtgtgtgtgacatggcagtgcagatgtgtgcctgggcaggggcttgagtctgacccacaggtgagctcacgccattgtgccctgtttgcctgttggacaccagtgggccctcggggttgtgtactcggaaaagaggctgatacatccccgtc

SEQ ID NO: 232033 - DNA, 400 bp, Homo sapiens
ttatgcttacttttttacacgtgaaatttaaggctaagaaaaataactaatgtcactcttattaaacaaacacgtattgtacaactcygggaaatgtagtgaaagagttcagtatatgtcactccgaaatatacctctgtattagcctgttcttgtactactataaaaaaatacatgagactgggtaatttatgaagaaaagaggtttaactggctcacggttctgcagactatacagaaagcatactggctcctgattctgggaagtcctcaggaagtttccaatcatggcaaaaggcaaagggagagccaggcacttcacatggccagagcagcagaaacacggagcgggaaggtgctacacacttttcaacaaccaggtctcttgagaattcactca

SEQ ID NO: 232034 - DNA, 400 bp, Homo sapiens
ttatgcttacttttttacacgtgaaatttaaggctaagaaaaataactaatgtcactcttattaaacaaacacgtattgtacaactctgggaaatgtagtgaaagagttcagtatatgtcactccgaaatatacctctgtattagcctgttcttgtactactataaaaaaatacatgagactgggtaatttatgaagaaaagaggtttaactggctcacggttctgcagactrtacagaaagcatactggctcctgattctgggaagtcctcaggaagtttccaatcatggcaaaaggcaaagggagagccaggcacttcacatggccagagcagcagaaacacggagcgggaaggtgctacacacttttcaacaaccaggtctcttgagaattcactca

SEQ ID NO: 232035 - DNA, 585 bp, Homo sapiens
tctagtagtgtgtggctttaaactagagatcaatgttatcatacattctgggaatagacaaaaaaattgccaggagaatgggcagaacagatgttctgcatgaaacaatgttaattagctataacattccctctgtctctcttatcagcagttggcccccattctataccttacagattccgacccaaatcaggttttgtcaactttgtaaaaaaaaaaagcaaaaagatgagatatttatgayatattttaatttgtgaaaacaaaaatagttcttgttcaatgcttaattttgttagataacattgatttgtagttattgctttaatattttattatgaaaattacttttcaatagtaaaagaatcaagttaaaaccaatgataaaatgcagatataaatgtgtgttttaatcaaaacaaatatcttaggactctgataattaaacacactattttatatacattcattttcacttgtattcatttttttaacatatgaacaaaagtatcttaaaatgttttgtgttagtctgagacaaagtgtaaatgtctatctagatattcacacttttgctgcaattgc

SEQ ID NO: 232036 - DNA, 500 bp, Homo sapiens
atctaaataaccaatggatcaaaaaaaaaaagaaaagaaaattagaaaatactgtgagatgaataaaagtgaacatggaacatacaaaacccataagatacaaatagaacagaaattagagggacatttatagaattaaacactcaacacttatattacaaaagaataaagatctcaaatcagcaaacttaccttttaccttaaacttgagaaagaaggtgaaactaaaaccagagcaagaagaaagaaagagctttaaatatagggtagactcaagtgaaatggaaattagaaaaacaatgsagagagagagagagagaaagaaaaacaatggagaaaataaacaaaaccacaagttctctgaaatgataaacaaaattgataatgctttaatcatactaatataaaggagaaaagactcaaatcactaaagttaggcatgaaagagaggacattgctactattattacagaaataaaaagaattttaagggagtaata

SEQ ID NO: 232037 - DNA, 500 bp, Homo sapiens
atctaaataaccaatggatcaaaaaaaaaaagaaaagaaaattagaaaatactgtgagatgaataaaagtgaacatggaacatacaaaacccataagatacaaatagaacagaaattagagggacatttatagaattaaacactcaacacttatattacaaaagaataaagatctcaaatcagcaaacttaccttttaccttaaacttgagaaagaaggtgaaactaaaaccagagcaagaagaaagaaagagctttaaatatagggtagactcaagtgaaatggaaattagaaaaacaatggagagagagagagagagaaagaaaaacaatggagaaaataaacaaaaccacaagttctctgaaatgataaacaaaattgataatgctttaatcatactaatataaaggagaaaagactcaaatcactaaagttaggcatgaaagagaggacatygctactattattacagaaataaaaagaattttaagggagtaata

SEQ ID NO: 232038 - DNA, 467 bp, Homo sapiens
ctctgagttcacatgagatctggttctttaaaagtgtgtgacacttcctcatcacccccagttctcttgctcctgttttagtcatgtgaagtacttgttccacattcagcttctgccatgtgttaatgcttcctgaggcttccccagaagcagatgttggcactatgcatcctgtgaaccctgcaggacgatgagcccattaaacctctatcatttataarttaccctatctcaggtgtttatctatagcaatgcaagaatagcctaatgcagaaaattggtactgattggtggggcattgctataaagatacctgactatgtggaaacgactttggaactgggtaacacacagagtttgaaagcatttggagggctgaaaagaagataggaagatgagggaaagttcagaacttcttagagactggtcaaatagttgtgacaaaaatgctggtagtgatacagata

SEQ ID NO: 232039 - DNA, 520 bp, Homo sapiens
ctttaaaagtgtgtgacacttcctcatcacccccagttctcttgctcctgttttagtcatgtgaagtacttgttccacattcagcttctgccatgtgttaatgcttcctgaggcttccccagaagcagatgttggcactatgcatcctgtgaaccctgcaggacgatgagcccattaaacctctatcatttataaattaccctatctcaggtgtttatctatagcaaygcaagaatagcctaatgcagaaaattggtactgattggtggggcattgctataaagatacctgactatgtggaaacgactttggaactgggtaacacacagagtttgaaagcatttggagggctgaaaagaagataggaagatgagggaaagttcagaacttcttagagactggtcaaatagttgtgacaaaaatgctggtagtgatacagataatggagtcaaggatgacatggtctcagatgaaaatgaggaacttactgaggactggatcagaggtcacatgttatacc

SEQ ID NO: 232040 - DNA, 520 bp, Homo sapiens
ctttaaaagtgtgtgacacttcctcatcacccccagttctcttgctcctgttttagtcatgtgaagtacttgttccacattcagcttctgccatgtgttaatgcttcctgaggcttccccagaagcagatgttggcactatgcatcctgtgaaccctgcaggacgatgagcccattaaacctctatcatttataaattaccctatctcaggtgtttatctatagcaatgcaagaatagcctaatgcagaaaattggtactgattggtggggcattgctataaagatacctgactatgtggaaacgactttggaactgggtaacacacagagtttgaaagcatttggagggctgaraagaagataggaagatgagggaaagttcagaacttcttagagactggtcaaatagttgtgacaaaaatgctggtagtgatacagataatggagtcaaggatgacatggtctcagatgaaaatgaggaacttactgaggactggatcagaggtcacatgttatacc

SEQ ID NO: 232041 - DNA, 520 bp, Homo sapiens
ctttaaaagtgtgtgacacttcctcatcacccccagttctcttgctcctgttttagtcatgtgaagtacttgttccacattcagcttctgccatgtgttaatgcttcctgaggcttccccagaagcagatgttggcactatgcatcctgtgaaccctgcaggacgatgagcccattaaacctctatcatttataaattaccctatctcaggtgtttatctatagcaatgcaagaatagcctaatgcagaaaattggtactgattggtggggcattgctataaagatacctgactatgtggaaacgactttggaactgggtaacacacagagtttgaaagcatttggagggctgaaaagaagataggaagatgagggaaagttcagaacttcttagagactggtcaratagttgtgacaaaaatgctggtagtgatacagataatggagtcaaggatgacatggtctcagatgaaaatgaggaacttactgaggactggatcagaggtcacatgttatacc

SEQ ID NO: 232042 - DNA, 561 bp, Homo sapiens
gaattcatttttctatagtagcagctgtatatgaggttatartatctatagtgtagcccacaaaagcctatttaacccacagtgcagctgaaatacagtagtaatttatccacataaaatcatgttcataataatgttgctttagggagtcaaatgcagagtttatttctaatggaaacattagaaaacatggctctcttgggactagagcccatgttccttttgtttttcattttagtgtgggtaaaactgctttaagaacgtttgtggtgccacaaaagcatgttttgcttcaagcattcatggactggtctggcaatgcacggctttgctccttctgtgtctgttgtcctgggaagacgagaagaagtaggccaggcatctgaggacttggactgcatcctgttttagcccgatttcctcagtgccattggtcaagtcactaaatgttctgggaccaaatttccatattcgatggaatctatatattttttcacaatgtattcaaagtggttgttagtaaatataaagaaattggttaaatgttattatataatgtaa

SEQ ID NO: 232043 - DNA, 568 bp, Homo sapiens
tatatgaggttataatatctatagtgtagcccacaaaagcctatttaacccacagtgcagctgaaatacagtagtaatttatccacataaaatcatgttcataataatgttgctttagggagtcaaatgcagagtttatttctaatggaaacattagaaaacatggctctcttgggactagagcccatgttccttttgtttttcattttagtgtgggtaaaactgctttaagaacgtttgtggtgccacaaaagcatgttttgcttcaagcattcatggactggtctggcaatgcacggctttgctccttctgtgtctgttgtcctgggaagacgagaagaagtaggccaggcatctgaggacttggactgcatcctgttttagcccgatttcctcagtgccattggtcaagtcactaaatgttctgggaccaaatttccatattcgatggaatctatatattttttcacaatgtattcaaagtggttgttagtaaatwtaaagaaattggttaaatgttattatataatgtaagttttgctgtggtttttttataagaaaagaattc

SEQ ID NO: 232044 - DNA, 481 bp, Homo sapiens
ctcagagccatgctggcttcaggtgtgactcrgcacatttccatctgtggtggctatggggagagactcctgcttgaggaaaggagagggaagagtaaaggggactttttcttgcagcttgggagccagctcagccacaagtgggattctgctgtccctgattccagaccttggctcctgcatggtatttctggacctgccctaggccagaagggagcccactgccctgaagcaagagacgcaggcctgtcagtattcaccacaagtgaactgaagaacccttgggccatgattgaacatcagcactagccaggcagtatttgctgcaggcctgtggcagtgatggccacagagagagtcttctctacttgaggaaaggggaggaaaagttggaaaaatcttgcagcttgggtgccacattagctagagcaccaagtagattcctaggttcccaactccaggacctgactactgcgcacca

SEQ ID NO: 232045 - DNA, 599 bp, Homo sapiens
aacctgctgccttgaagggaaggaaggatacattcctgacaggattcatcacctgctgagtaaagagcccttgggtcatgaataactagcagcgatagccaggcagtattaccatgggccttgggcgagactcagagccatgctggcttcaggtgtgactcagcacatttccatctgtggtggctatggggagagactcctgcttgaggaaaggagagggaagagtaaaggggactttttcttgcagcttgggwgccagctcagccacaagtgggattctgctgtccctgattccagaccttggctcctgcatggtatttctggacctgccctaggccagaagggagcccactgccctgaagcaagagacgcaggcctgtcagtattcaccacaagtgaactgaagaacccttgggccatgattgaacatcagcactagccaggcagtatttgctgcaggcctgtggcagtgatggccacagagagagtcttctctacttgaggaaaggggaggaaaagttggaaaaatcttgcagcttgggtgccacattagctagagcaccaagtagattcctaggttcccaactccaggacctgac

SEQ ID NO: 232046 - DNA, 599 bp, Homo sapiens
aacctgctgccttgaagggaaggaaggatacattcctgacaggattcatcacctgctgagtaaagagcccttgggtcatgaataactagcagcgatagccaggcagtattaccatgggccttgggcgagactcagagccatgctggcttcaggtgtgactcagcacatttccatctgtggtggctatggggagagactcctgcttgaggaaaggagagggaagagtaaaggggactttttcttgcagcttgggagccagctcagccacaagtgggattctgctgtccctgattccagaccttggctcctgcatggtatttctggacctgccctaggccagaagggagcccactgccctgaagcaagagacgcaggcctgtcagtattcaccacaagtgaactgaagaamccttgggccatgattgaacatcagcactagccaggcagtatttgctgcaggcctgtggcagtgatggccacagagagagtcttctctacttgaggaaaggggaggaaaagttggaaaaatcttgcagcttgggtgccacattagctagagcaccaagtagattcctaggttcccaactccaggacctgac

SEQ ID NO: 232047 - DNA, 599 bp, Homo sapiens
aacctgctgccttgaagggaaggaaggatacattcctgacaggattcatcacctgctgagtaaagagcccttgggtcatgaataactagcagcgatagccaggcagtattaccatgggccttgggcgagactcagagccatgctggcttcaggtgtgactcagcacatttccatctgtggtggctatggggagagactcctgcttgaggaaaggagagggaagagtaaaggggactttttcttgcagcttgggagccagctcagccacaagtgggattctgctgtccctgattccagaccttggctcctgcatggtatttctggacctgccctaggccagaagggagcccactgccctgaagcaagagacgcaggcctgtcagtattcaccacaagtgaactgaagaacccttgggccatgaytgaacatcagcactagccaggcagtatttgctgcaggcctgtggcagtgatggccacagagagagtcttctctacttgaggaaaggggaggaaaagttggaaaaatcttgcagcttgggtgccacattagctagagcaccaagtagattcctaggttcccaactccaggacctgac

SEQ ID NO: 232048 - DNA, 599 bp, Homo sapiens
aacctgctgccttgaagggaaggaaggatacattcctgacaggattcatcacctgctgagtaaagagcccttgggtcatgaataactagcagcgatagccaggcagtattaccatgggccttgggcgagactcagagccatgctggcttcaggtgtgactcagcacatttccatctgtggtggctatggggagagactcctgcttgaggaaaggagagggaagagtaaaggggactttttcttgcagcttgggagccagctcagccacaagtgggattctgctgtccctgattccagaccttggctcctgcatggtatttctggacctgccctaggccagaagggagcccactgccctgaagcaagagacgcaggcctgtcagtattcaccacaagtgaactgaagaacccttgggccatgattgaacatcagcactagscaggcagtatttgctgcaggcctgtggcagtgatggccacagagagagtcttctctacttgaggaaaggggaggaaaagttggaaaaatcttgcagcttgggtgccacattagctagagcaccaagtagattcctaggttcccaactccaggacctgac

SEQ ID NO: 232049 - DNA, 580 bp, Homo sapiens
gcctccaaggggtaaatctaagagttaytgaccttaaagagaaggtaggccaggcagggtggctcatgcctgtaatcctagcactttgggaagctgaggtaggtggattacctgagatcaggagttcaagaccagcctgatcaacatgaggaaaccccatctctactaaaaatacaaaaatattagctggccatggtgacaaatgtctgtaatcccagctactcaggaggctgaggcaggagagttgcttgaacctgggaggaggaggtggaagtgagccaaaatcacgccattgcactctagccagggcaacaagagcaaaactccatcaaaaaaaaaaaaaaaaaaaaaaaaagaaaagaaaaaagaaggtagagagagtgattggggtagaaagtttattcaaagggataataacagagaacttctcaaacctggagaaatatatcaatatccaagcacacgaaagttatagaacatcaagtggatttcacccaaagaagaccaccttgagacattcaataatcaaatttccaaaggtcaaggataaagaaatgatcctaaaagcagcaaaataaaa

SEQ ID NO: 232050 - DNA, 580 bp, Homo sapiens
gcctccaaggggtaaatctaagagttattgaccttaaagagaaggtaggccaggcagggtggctcatgcctgtaatcctagcactttgggaagctgaggtaggtggatyacctgagatcaggagttcaagaccagcctgatcaacatgaggaaaccccatctctactaaaaatacaaaaatattagctggccatggtgacaaatgtctgtaatcccagctactcaggaggctgaggcaggagagttgcttgaacctgggaggaggaggtggaagtgagccaaaatcacgccattgcactctagccagggcaacaagagcaaaactccatcaaaaaaaaaaaaaaaaaaaaaaaaagaaaagaaaaaagaaggtagagagagtgattggggtagaaagtttattcaaagggataataacagagaacttctcaaacctggagaaatatatcaatatccaagcacacgaaagttatagaacatcaagtggatttcacccaaagaagaccaccttgagacattcaataatcaaatttccaaaggtcaaggataaagaaatgatcctaaaagcagcaaaataaaa

SEQ ID NO: 232051 - DNA, 580 bp, Homo sapiens
gcctccaaggggtaaatctaagagttattgaccttaaagagaaggtaggccaggcagggtggctcatgcctgtaatcctagcactttgggaagctgaggtaggtggattacctgagatcaggagttcaagaccagcctgatcaacatgaggaaaccccatctctactaaaaatacaaaaatattagctggccatggtgacaaatgtctgtaatcccagctactcaggaggctgaggcaggagagttgcttgaacctgggaggaggaggtkgaagtgagccaaaatcacgccattgcactctagccagggcaacaagagcaaaactccatcaaaaaaaaaaaaaaaaaaaaaaaaagaaaagaaaaaagaaggtagagagagtgattggggtagaaagtttattcaaagggataataacagagaacttctcaaacctggagaaatatatcaatatccaagcacacgaaagttatagaacatcaagtggatttcacccaaagaagaccaccttgagacattcaataatcaaatttccaaaggtcaaggataaagaaatgatcctaaaagcagcaaaataaaa

SEQ ID NO: 232052 - DNA, 558 bp, Homo sapiens
ggcttcctttctttaaaataagactatttttacacttggcaactattatccaatctaccctcaaccccctttgattcagtttcagtaatccgagttactctaacctatcctcaaaggcccaatttcccagcactttaattatctttctagctcccaactgagcacacttcaatktgaccacatccccattttgctcctgagctcagtattgaagatgttattctaataagggcctgaccagcgttgagtataatgagatccttgtttttcaattatagtgtttcttagtataatatgtgcttgtgctgtatatttttcactcacattgtgatgtttctaatttataattgacttgtgatattctatgagctatagttatttttctattgtaattataaataattttatgtatcaataactcagattttataatttctcaggactactacttttatatgcttatatatcttaaatttattttctctctcaaatttataattcacatagtggtaataatgagatgtaaaggatataatcatttcaataataattttaaaa

SEQ ID NO: 232053 - DNA, 566 bp, Homo sapiens
agccaggcgaggtggtgcatgcctgtagtcatagcttctcaggaagctgaggcaggagaattgcttgaacacagaaggtggaagttgcagtgagctgcgatagtgctactgtactccagwctgggtggcagaatgagactccttctcaaaataaatgaatatttggtagaattcagcaatgaagccgtcaggtcctgggcttttctttactgggagactttttattatggctttgatctccttacttgttattggtcagttcaggttttggatttctccctggttcaatcctggtaggttgcaggtatctaggaatttgtccatttcttctacattttccaattttttggcatatagttgttcagagtagctttgaatgatcctttgaatttctgcagtatcagttgtaatgcctcctttttcatttctgtttgtatttatttagatcttctcttttttttttcttagtctggctacaggattgtcagttttgtttaagttttttaaaaattaacttttttggctgggcatggtggcgcacacctgtaattccagcactttggcag

SEQ ID NO: 232054 - DNA, 612 bp, Homo sapiens
tctgttttccattggaaaataaaaactgaattgctttgattttatatgtatttacttatacatgcttacattagtttaaacagagacaaaataacttacagacatatgtacacatgtatgtatacacacacacacacacagaggcacaaacgagatataaaagcacaagccaggcatgatggtgtgcacctgaagcaccagcaactcaggaagctgaggcagaaagatccctgaggtcagtagttccggactacagtgcactataatcatgcctgtgaatatctactgcactccatcctgagcaacataacaagacccagtctctaaaatmcaggctatataaaatttttaaaaacttaaaaataaaaacatgtcgggttagaattggtgtctattgatttttagagcaactattttcaatatgcagaatcattcaccatcaaagtattttccctagtccctaaaaatggtttttagttataaacgtcataaaattgcttataaacagatgttaaattcaccattcccagtcaaacctagatgaatatttggattcagaagaaatggttatatttagtgtctagagtttaataagaattgcataaattgata

SEQ ID NO: 232055 - DNA, 612 bp, Homo sapiens
tctgttttccattggaaaataaaaactgaattgctttgattttatatgtatttacttatacatgcttacattagtttaaacagagacaaaataacttacagacatatgtacacatgtatgtatacacacacacacacacagaggcacaaacgagatataaaagcacaagccaggcatgatggtgtgcacctgaagcaccagcaactcaggaagctgaggcagaaagatccctgaggtcagtagttccggactacagtgcactataatcatgcctgtgaatatctactgcactccatcctgagcaacataacaagacccagtctctaaaatccaggctatataaaatttttaaaaacttaaaaataaaaacatgtcgggttagaattggtgtctattgatttttagagcaactattttcaatatgcagaatcattcaccatcaaagtattttccctagtccctaaaaatggtttttagttataaacgtcataaaattgcttataaacagatgttaaattcaccwttcccagtcaaacctagatgaatatttggattcagaagaaatggttatatttagtgtctagagtttaataagaattgcataaattgata

SEQ ID NO: 232056 - DNA, 532 bp, Homo sapiens
ataaaaggtcatatatctctgtttctccaggattcatccctggaacctggtttagtttatttagtgaagtcatgttgtcctggatggtgttgatgctagatgttctttggtgtctgaacattgatgagttaggtatttattgtagtcttcactgactgggcttatttgtagttttccttcttggaaaagctttccagatatttggaaggacttgggtgttgtcatgtaaactatatcttctttatggggcaccccacgcccatggttcttgaagacttatagagacaccacattgatggtcttgggcaaaatccaggrgagttcttatcaggattaccagggagactcttgctctctttccttactttctcccaaacatacagagactctctctctgttctgagccagctgatgctgggggtggagtgacacaagcacctctatggccaccactactatgactacactgggtcagacccgaagccatcacagtgctgttttgcctaaggcctgctgtaaaaactccctggcg

SEQ ID NO: 232057 - DNA, 532 bp, Homo sapiens
ataaaaggtcatatatctctgtttctccaggattcatccctggaacctggtttagtttatttagtgaagtcatgttgtcctggatggtgttgatgctagatgttctttggtgtctgaacattgatgagttaggtatttattgtagtcttcactgactgggcttatttgtagttttccttcttggaaaagctttccagatatttggaaggacttgggtgttgtcatgtaaactatatcttctttatggggcaccccacgcccatggttcttgaagacttatagagacaccacattgatggtcttgggcaaaatccaggagagttcttatcaggattaccagggagactcttgytctctttccttactttctcccaaacatacagagactctctctctgttctgagccagctgatgctgggggtggagtgacacaagcacctctatggccaccactactatgactacactgggtcagacccgaagccatcacagtgctgttttgcctaaggcctgctgtaaaaactccctggcg

SEQ ID NO: 232058 - DNA, 483 bp, Homo sapiens
atatattgcagatatggttatactaacctttttattaccctctctgattctctccatatattcctatgtatttcagttaaccattgtgtgtcatttccttactctaatgaagctttgttcccatccacctactttgtgctgttatataattacatacacattgttttaacaattgctttttaatcagttgagaagaaaggaaaagaaatatgcaattataatgtctttgtaaatgacttactaattacctttaccactgtttttatttttttcatgtggattcaaattactttcgggtatcacatgttttcttcctgaaaaaaagttcctacaatatgtcttgtaaagcagttttgatagaaacgaaatctctttttccaacaatgcagggatgtctttattttgccttcatttttcttagttakatattttattttcatttattgcagattcatatgaagttataagaaatgatacagagag

SEQ ID NO: 232059 - DNA, 612 bp, Homo sapiens
aattaacaatcacttttttcctaaccattgtacacatagtagtttaaagctaattctgcatttgagttaatttaatttgaattaatttagccatcatcattatcctttttaataattttccacatatttgcttccttattgtgattcatttttattgaagctacaatcacagtaaattcaacaaaagaaatttacatatttgagaagatacatcttttacatttacactggaatggttacttcattaaagaaatcttgggtcaaataattttttctccaagttttgtagaaattgtgttttgctttttagtagctataatggcccagataaaattgaaggaaaaaggattatttgtttactgtcttagtgatgtgcttttatcaatctagagttcacaaactgataattaacatgaaaaatatcataaaaattaatttctgccaaaaatggaataaaaatttcctattctcaaattttaagaaaaggaaagactgatttttttttcataacaacmtagccatcatccagtaaacacttaaattgactttaaactttcccaattaatcagtgacagcttcacgttagtgcctgaagcatttcaaaatcagcca

SEQ ID NO: 232060 - DNA, 565 bp, Homo sapiens
tctggaaacttgacacattgaactacttaattcaatgaaaacaaagtagaatttgtttaatagaaacttggctcattctactgycgtatgcttctagacgaatgaatgatgttcactgaaatctagaagatgactatattttgggccacttttcttttccctaagtaaagtgacctgtatagaataagaaaataaaaattataattaaaatcacaataatgctatgacagaggtcctaatttcggggaaagtttaataattttaggaatataaatttgatgatttcttttccagaaacataccattgaaagacacattaaatctctgaatatatattttcaggatatgtaagtatttcataatagtaaagcttttgttatagacagcgccctgagtaaaatgatacagtctgttaataataatttttcaaagaggattttgtcatatactgagaatgcaaagaacaagttaggattcataattcatttttgcattttttattaaatatatgccgacacattcaagaagtctcatttacttagatattaagaagtattttagagta

SEQ ID NO: 232061 - DNA, 565 bp, Homo sapiens
tctggaaacttgacacattgaactacttaattcaatgaaaacaaagtagaatttgtttaatagaaacttggctcattctactgccgtatgcttctagacgaatgaatgatgttcactgaaatctagaagatgactatattttgggccacttttcttttccctaartaaagtgacctgtatagaataagaaaataaaaattataattaaaatcacaataatgctatgacagaggtcctaatttcggggaaagtttaataattttaggaatataaatttgatgatttcttttccagaaacataccattgaaagacacattaaatctctgaatatatattttcaggatatgtaagtatttcataatagtaaagcttttgttatagacagcgccctgagtaaaatgatacagtctgttaataataatttttcaaagaggattttgtcatatactgagaatgcaaagaacaagttaggattcataattcatttttgcattttttattaaatatatgccgacacattcaagaagtctcatttacttagatattaagaagtattttagagta

SEQ ID NO: 232062 - DNA, 565 bp, Homo sapiens
tctggaaacttgacacattgaactacttaattcaatgaaaacaaagtagaatttgtttaatagaaacttggctcattctactgccgtatgcttctagacgaatgaatgatgttcactgaaatctagaagatgactatattttgggccacttttcttttccctaagtaaagtgacctgtatagaataagaaaataaaaattataattaaaatcacaataatgctatgacagaggtcctaatttsggggaaagtttaataattttaggaatataaatttgatgatttcttttccagaaacataccattgaaagacacattaaatctctgaatatatattttcaggatatgtaagtatttcataatagtaaagcttttgttatagacagcgccctgagtaaaatgatacagtctgttaataataatttttcaaagaggattttgtcatatactgagaatgcaaagaacaagttaggattcataattcatttttgcattttttattaaatatatgccgacacattcaagaagtctcatttacttagatattaagaagtattttagagta

SEQ ID NO: 232063 - DNA, 565 bp, Homo sapiens
tctggaaacttgacacattgaactacttaattcaatgaaaacaaagtagaatttgtttaatagaaacttggctcattctactgccgtatgcttctagacgaatgaatgatgttcactgaaatctagaagatgactatattttgggccacttttcttttccctaagtaaagtgacctgtatagaataagaaaataaaaattataattaaaatcacaataatgctatgacagaggtcctaatttcggggaaagtttaataattttaggaatataaatttgatgatttcttttccagaaacataccattgaaagacacattaaatctctgaatatatattttcaggatatgtaagtatttcataatagtaaagcttttgttatagacagcgccctgagtaaaatgatacagtctgttmataataatttttcaaagaggattttgtcatatactgagaatgcaaagaacaagttaggattcataattcatttttgcattttttattaaatatatgccgacacattcaagaagtctcatttacttagatattaagaagtattttagagta

SEQ ID NO: 232064 - DNA, 550 bp, Homo sapiens
taattcatgttttatagtttttattatttttatcttccacatctttggtcatgtttatttttatgtattttattttatttgtagctattgcaaatgggaatattttcttggtttctttttcagattgctcaccattgtcatgtagaaatactactgaattttctatgttgatactatgtcctacaactttattgaatttatcagtcctaatgtttttggtgaagtctttaggtttttctaaatataagrttatatcatttgcagacaagaataatctgacttgtttctttccaatttggatgcctttatttctttctcatgtctaattgctctggctaggactaccagtacctgttggataacagtggtgaaaatggccatccttgtcttgttccagatcttagaagaaagtcttctagtcttttcctattcagtgtgatgctagctgtgtgtttctcatatatggcttttatcatgttgaggtatgttccttctataccctgtttgttgagagtttttatcatgaaggaaggttgaattttattgacta

SEQ ID NO: 232065 - DNA, 594 bp, Homo sapiens
aagagcacactcctcacaggagagaggaagatagggaatgtaagtattatgaggggtagttaagtgattttcaggagagatatgtgagcccaaacaacaggcaatagccagggacaaagttcctctgagctctggcaggagaaggtggtgggaaggtgaggggtggaacttagccatgaacaaaagttaccttattatgcargtaaagtatcccaggtaacctctagagctgtctcaaagaatagctggaaaggctatcttagcatggtggcaaagtttagtatttcctcttctctggtggttaatcttttctgataatttgataagaattctagggagaaggtcttaaggcaattgcatttttttgaaagaagtttttctcagacagataacttccagagacagacactccctgaacttgggagaaagaaaaaagagaaagctagcaagtccttgattctcaggtagcttctaggccttctaattgcctttaatttaaaagtgcttagcatgccaaagcaccaattttgggttatttttctctgtgccccaataatgttcactttgatgaactgatttttggtgttaaatact

SEQ ID NO: 232066 - DNA, 211 bp, Homo sapiens
aaaaaaatttttttttatagagatggggtctcactatattccccagtgaggaactggtsttcaactcctggcctccagtgatccttcctcccgaagtgttgggattacaggccaccgtgcctggcccatattttcaactagtaccctgtaaagcatcctgtaaagcttctctatttatagaacctatgactgttttatcagacaagaattc

SEQ ID NO: 232067 - DNA, 537 bp, Homo sapiens
agatctcaccttagatgaattctgtagagaggccttayataaagtagtttcccccagttattctccatttgtattcttcctggcacttatctcagtgtttgttttgtttatttatttattttttattatttgcctcccaactggaacataagtctttaagaacagggaccacatctaccttgttcaccactttttctatagagattagtgcacagtaagttgccactcaacgtctgctggatgaatgaatgaatgcactattgacagcttaccttatcctttaccagccggtaacaagctggacattcctggcagccaggccaagaccgattgtagaaatagttttcttcacactggtcacagcgatttcccacaaagccttctctgcattcacagcgaccatcatctttgcactgaagtgaaagagatccctcaggatgacagtcacaggctgcagaataaggagaaaataatacataattagcaaaagaaggaagagtatatctcttaattcagactgataacaataagctgact

SEQ ID NO: 232068 - DNA, 537 bp, Homo sapiens
agatctcaccttagatgaattctgtagagaggccttacataaagtagtttcccccagttattctccatttgtattcttcctggcacttatctcagtgtttgttttgtttatttatttrttttttattatttgcctcccaactggaacataagtctttaagaacagggaccacatctaccttgttcaccactttttctatagagattagtgcacagtaagttgccactcaacgtctgctggatgaatgaatgaatgcactattgacagcttaccttatcctttaccagccggtaacaagctggacattcctggcagccaggccaagaccgattgtagaaatagttttcttcacactggtcacagcgatttcccacaaagccttctctgcattcacagcgaccatcatctttgcactgaagtgaaagagatccctcaggatgacagtcacaggctgcagaataaggagaaaataatacataattagcaaaagaaggaagagtatatctcttaattcagactgataacaataagctgact

SEQ ID NO: 232069 - DNA, 537 bp, Homo sapiens
agatctcaccttagatgaattctgtagagaggccttacataaagtagtttcccccagttattctccatttgtattcttcctggcacttatctcagtgtttgttttgtttatttatttattttttattatttgcctcccaactgraacataagtctttaagaacagggaccacatctaccttgttcaccactttttctatagagattagtgcacagtaagttgccactcaacgtctgctggatgaatgaatgaatgcactattgacagcttaccttatcctttaccagccggtaacaagctggacattcctggcagccaggccaagaccgattgtagaaatagttttcttcacactggtcacagcgatttcccacaaagccttctctgcattcacagcgaccatcatctttgcactgaagtgaaagagatccctcaggatgacagtcacaggctgcagaataaggagaaaataatacataattagcaaaagaaggaagagtatatctcttaattcagactgataacaataagctgact

SEQ ID NO: 232070 - DNA, 537 bp, Homo sapiens
agatctcaccttagatgaattctgtagagaggccttacataaagtagtttcccccagttattctccatttgtattcttcctggcacttatctcagtgtttgttttgtttatttatttattttttattatttgcctcccaactggaacataagtctttaagaacagggaccacatctaycttgttcaccactttttctatagagattagtgcacagtaagttgccactcaacgtctgctggatgaatgaatgaatgcactattgacagcttaccttatcctttaccagccggtaacaagctggacattcctggcagccaggccaagaccgattgtagaaatagttttcttcacactggtcacagcgatttcccacaaagccttctctgcattcacagcgaccatcatctttgcactgaagtgaaagagatccctcaggatgacagtcacaggctgcagaataaggagaaaataatacataattagcaaaagaaggaagagtatatctcttaattcagactgataacaataagctgact

SEQ ID NO: 232071 - DNA, 464 bp, Homo sapiens
tggtgggttgaagatctggcagatggtttgggtagtccggttccatggaattaacaaataacttcaaatcagtgcaacaaaacaacatacagccaagactggaacacagatcaatgtcaggaacagatactcatcactctgtaagagagaaatgcagatcagtcaatggasttacaaaagtaaaggctttcattctgaagtttgtgtgctcagttctttttcagctttgcttaggaaataacaaaagaaaaagcaaccttaggttgacatgggaggagatccacaccgagtccaaactttccctctctgggtagcagtatcatagtttgggggattaaacataggtccaaagtagacccatgttaaggtaaaccagggcttggcaaactttttctgtaaagggccagatagcaaatagtagaggcttttgggacttcatggtctttgttggagctattgaattc

SEQ ID NO: 232072 - DNA, 391 bp, Homo sapiens
agatctcagcagcttggaagaaatcccagaagcggactccatcaatccaagaaagagttgctttgtggaaggtgaaggaagacccacagagtgctcaggatgatgctattgctggagagcgaaagawggaacagccttgtccaggcagaacagtcataagccaggaaatgaaacaaaggaaaacaggtgcctgaatttcctggggaaacatggcttgtttaaggacttggagttatggatggaatttatgggacccacgtgagcagacctgaggaaggctcgatttcttttgtttcttggtccactctgtcactctgctctggtcaagccccatttggtctacagcccatgagaaggaatgaggctggttctgcactctcagcatgcagtc

SEQ ID NO: 232073 - DNA, 574 bp, Homo sapiens
gaagaacttggagaacattagggacaacctgcccccaggctgctacaatacccaggctcttgagcaacagtgaagctgccataaatatttctcaactgaggttcttgggatacagatctcagggctcgggagccatgtcatgtgagtgggtgggatggggacatttgaacatgtttaatgggtatgctcaggtcaactgacctgaccccattcctgatcccatggccaggtggttgtcttattgcaccatactccttgcttcctgatgctgggcaatgaggcagatagcactgggtgtgagaatgatcaaggatctggaccccaaagaatagactggatggaaagacaaactgcacaggcagatgtttgcctcataatagtcrtaagtggagtcctggaatttggacaagtgctgttgggatatagtcaacttattctttgagtaatgtgactaaaggaaaaaactttgactttgcccaggcatgaaattcttcctaatgtcagaacagagtgcaacccagtcacactgtggccagtaaaatactattgcctcatattgtcctctgcaagcttc

SEQ ID NO: 232074 - DNA, 448 bp, Homo sapiens
aaacagacctctttctgaaagactccaaaacttacaagggtctgtagcagggagacagaaataatctctggaygtgattacgtatatacagatgcaaaatgtcaacagtcattaaagaacaatgattgctaaaagagaaagtcttatcacagtactatcaacgatcctaaactgagccacttggtcaattccaagctgcatgataacctgacaacagagtggaacaaaaggaagagaaaacttggtaatttgaaatctgttctcttgttaatgccccacaaactagagctgtgcttagttttaacctgttgttctctgatatttttaaaggaaaggccaatatattgaatcatatacacaaatggagacttctgaaaagacgagatagatgtcttcattagaaatacaggtggtatgtcaacagtagataaaggttccatcaagcttg

SEQ ID NO: 232075 - DNA, 411 bp, Homo sapiens
gcaatcaaaagttatttatcaatgaccattataacctagccagattgtagactattggcctacatcgataaattcaagtcacaaaagactctgaacaaatatttctaatttttcccaagatgttagttctggaaggactgccagaggtcatctggaccaggggcagcaaatgggcacaggcccctgggcaccagacccaccagcagcctcttttatgtgaacagtgcaggatttaaaacatatttttaaaatgtaaacgccttaaggcaggcactccccaacttttctcagttcccacctcttcacattgccttattctgggcttctccacacatccaaacaactgtctggctcargcttgacgcccctgctctggcctcatcccttaccttgctcagggacaatatcgac

SEQ ID NO: 232076 - DNA, 519 bp, Homo sapiens
cattcagaagaattcatgtcctgtaccctgacccccacccatacctaaaaaagatgaccttgagccgggcagggtgttgtgggcctgtagtcccagctactcaagaggctgaggcaggaggttcacttgagcccaggagttcgaggctgtagtgtgcagtgatcacacctgtgatcttcgtgcctcccaggttgatgsctctttggcttctcctaccagaggcctcagcttacctagtcttgtgaggtctgaaattcaggaaagtagatgccctcctcatctgtctggcctctatcctgagttcctggacttgggttttggcagttcctcctcctcttgcctatgcgttgaacacttgctggtagattttatgcccttgtgggttcagctgtcatcacgtgcagctcagctgtgtcttcggccccgaggcggagtacccacaggtgggctcaacagaactctgtcgacacgtggctgagaccattgcttagcttgtcttgcaattgaggctcatcctcc

SEQ ID NO: 232077 - DNA, 588 bp, Homo sapiens
caaaataaacagcaacaacaaattctggggaaaagaatctgatttctagaattaacacattttaatattcaaaatgttcagttttcaataaaaaattatgaggaatgcaaagaagataatatgacccacagacacacagaaaaaagaaatgaataaaacctgtcctcaaagacacctttgttattggtcttactagataaagaatttaaatcaactgttctaaatgtgcacaaaaagctaaatgaaaccagacaactaacagaaascaggtgagcgatgccctgccaaatataaaatattaatatacagaacaaaattacaaaaatgtaattaggaatgtctggagctgacaagtacaaaaactaaatttttttaaaatcagtcaaaggatttaataaaagattggagctcaaagagaacaaagaatcagcaaaattgaagacactgatggagattactcattctgtggagcagagaaaaagaatggtgaaaaatggacagtgcctaagagatctatgagacaacatcaagcataccaacaagttaataacaagagttgctaatgaagaggagaaaagggaaccaaaa

SEQ ID NO: 232078 - DNA, 408 bp, Homo sapiens
tcagtcataaaaagggacaaagtactgatatacaactacaacataaatgggtcttgaaaacattattctaagtgagagatcagacacaaattgtatgattccattcatatgccatatccaaaataggcaaatctataaagacagaaaggagattattggttgttaggggctgggagcacagcggggaaaagggagcaactgcttattaagttacaatactgcttattaagggtgatgtgtttccttttggtgtgatgaaaatattccacaaataaatggtggttatggttgcacaacattgtgaatgtactaaagtcactgaattstatactttaaaatggcttgtgaatttcatgtgatgtgtgttttaccacaattttttttttaggtagaatccctcgaaagtta

SEQ ID NO: 232079 - DNA, 182 bp, Homo sapiens
ccaggcatggagggtgctgtcctccacttggctgctaagctckgccctccgcatgatgccttcacaactccccaagaagcggtgctgtctgctccttcggccttgccctcctctgccgccacatctgaatgggcacaaatctcccaccatcacccagcctgtgggagtctgaacaggacaca

SEQ ID NO: 232080 - DNA, 182 bp, Homo sapiens
ccaggcatggagggtgctgtcctccacttggctgctaagctcgkccctccgcatgatgccttcacaactccccaagaagcggtgctgtctgctccttcggccttgccctcctctgccgccacatctgaatgggcacaaatctcccaccatcacccagcctgtgggagtctgaacaggacaca

SEQ ID NO: 232081 - DNA, 182 bp, Homo sapiens
ccaggcatggagggtgctgtcctccacttggctgctaagctcggccctccgcatgatgccttcacaactccccaagaagcggtgctgtctgctccttcggccttgccctcytctgccgccacatctgaatgggcacaaatctcccaccatcacccagcctgtgggagtctgaacaggacaca

SEQ ID NO: 232082 - DNA, 182 bp, Homo sapiens
ccaggcatggagggtgctgtcctccacttggctgctaagctcggccctccgcatgatgccttcacaactccccaagaagcggtgctgtctgctccttcggccttgccctcctctgccsccacatctgaatgggcacaaatctcccaccatcacccagcctgtgggagtctgaacaggacaca

SEQ ID NO: 232083 - DNA, 447 bp, Homo sapiens
ccattctttgtaattatttttatttctgtaagagtactagtaatacatcgttaatccctacatttagtaatttgaatcttctttttttttttttccattgtcagtctaattagaggtttgtatattttgttgatcttttccaggaatctgctatttttctgttctctagttcactaatttttactctataatctttctgctttccttcctgccttcttcttgctttgagtttgtattgctgctcctktccagtgttttaaggtggaaaattagtttattgatttgagatcttttttaatatggttattacagctacaaatctctctctaagcattgctttatctgtgttccataagtttgagtatgtcttcatttttacctcatagcattttttctaatttgccttcttattgcttctttgactttttttttaactttggaatgtat

SEQ ID NO: 232084 - DNA, 447 bp, Homo sapiens
ccattctttgtaattatttttatttctgtaagagtactagtaatacatcgttaatccctacatttagtaatttgaatcttctttttttttttttccattgtcagtctaattagaggtttgtatattttgttgatcttttccaggaatctgctatttttctgttctctagttcactaatttttactctataatctttctgctttccttcctgccttcttcttgctttgagtttgtattgctgctcctttccagtgttttaaggtggaaaattagtttattgatttgagatcttttttaatatggttattacagctacaaatctctctctaagcattgctttatctgtgttccataartttgagtatgtcttcatttttacctcatagcattttttctaatttgccttcttattgcttctttgactttttttttaactttggaatgtat

SEQ ID NO: 232085 - DNA, 196 bp, Homo sapiens
caagatgatccatgtggttgcaaatggcaaggtttttttcaagacctgaactgtgacacacacacgtgcacacacgcacatacctatacctatacacatacatayatatatatatatatatatataatttccttgttgttgttgttgttgttgttagatacaacaggctggagggcagtggcatgattatagctca

SEQ ID NO: 232086 - DNA, 419 bp, Homo sapiens
ccagtgttcttggtcactccaatatttctatattgtctcatctcaatacaggtatttgcctacatagtcagtctgttggttatgagtgcaactcacactgcaggttcttgttaaaatccaactgagattcagggggtttcgctatgcagatggtgaacaatgggtcaaacatttaaactgtcaataaatgattactcatttytctatggtctttggcaggaagatgtcaaaaactgtctttttcatagtacatttcccagcatcttgcctccagggtatgacagtagatcttcagggatcaagggaatctactgtccacaccaagctgaggaagagaatactctgccactggcctcataactaggcgcaccccggaaagcagtcaactgaaagtactgtggaaattaaattgttaagtt

SEQ ID NO: 232087 - DNA, 576 bp, Homo sapiens
caaatgctatttccatgaatatgtacattttacatatcatcaatccatttatgaaacaacaaagagggtcatagagacatgtaaacaaacaagaagctcagaaccctgctgaggtataatataaaaacacctgattaaataatctggaaggagggtaaatggtatgaagaaatcaaaacaggatgaatagttgagccactcaaagttacagggagcaaactaagtgggaaaataaatcgttaacagttacaaaaactggaaatgtgcttgtatatrtgagacaaattgtccataaaatcaacttgtttatctgacattggctggcaaggatctccctgtactagtaacacagacattcaactagattaggagtcatccagcaacttttcctgaaaatggcaaaacagtaaacatgtttggagctgtggtccacatcatctattccatattctactcgacctctgcagcatgagagcagccatagacaacacataaacaagtaaacagggttacgtttaaacaaaactttaagtataaaagcagtactgatagggtttttgcatatgttactttaat

SEQ ID NO: 232088 - DNA, 570 bp, Homo sapiens
aggaactaaagtgcttgaaggagctgcagatggattagcagctattcacccatacaagtggatcaagacacttggagactttgtgatttcaatgatgattgtgcctttaatctgtattgtttgtctttgtgtagtctgcagatgtggatcccgaatcctgcgagaagtagcccaccatgacgaagctgcctttgcttttatcgctttgcaaaaacagaaaaggggacatgctgggaacaggccctaagcctgtcataaacaggccttaaactgaccatgaacaggatttctgcacgaatgtgacgtgctcctgatggctatgacgcccactgctagaagttgttagtttactggagcagggtagggaacacctggcccaccyggagcggaaaactgctcaaaccacaaacaacagcatgagtggcctgagccttaacaacatgtttttgctgcagataatcggccagagactgtttctctactcctctctaagtatgctttgtttttcgtaaggaatgcttttagctaatctgtaacctatagaaacaatgcttatcactggcttgctgt

SEQ ID NO: 232089 - DNA, 540 bp, Homo sapiens
cctggtatgctttatttattaaatatttggaataacttcagtggagccatctgtcctagagttttctttctaagcaagtttttgaatattccactcagatattgtttgcagttgtgacaaggcacaatgaatctctggtatgaccttgtttccagggcttttactgatggcatgttcatgaaaggaccaacccactggcacttcctaaggtctaatcatttctcctccatattgcaaaatgcaaaacaaaacaaaaatcctacttgttttcttctcaaattagcttttcagcctcctgccctatgcagcatgagatatctggaaatttcttgagaaattatgtgtttgaagcccctaatgtatccatttttttttaattgcagtcttgattgttctcctggtttctggtcccccccatgccttcccctgacccccagggtatggccctctgcctgaaccaagttcagtattcaggttcttccctatagccagaagtggaaagrgtccccagagcaaagagctgcattctgtgcatgtgct

SEQ ID NO: 232090 - DNA, 593 bp, Homo sapiens
tgtgtatgcttcatgaagttctcgtgctgtgtttttcagctccatcaggtgatttatgttcttctctaaactggttattctagttagcaatacgtctaatcttttttcaatgttcttagcttccttgcattgggatagaacatgctcctttagcgtggagtrgttagttattacctaccttctgaagcctacttctgtcaatttgtcaaactcattctccatccagttttcttcccttgctggcaaggagttgtgatcctttggaggagaataggcattctggtttttggaattttccgccttttgcactggtttctccccatcttcatggatttccttacctttggtgtttgatgttggtgaccttcagatggggtctctgagtggatgtcctttttgttgatgttgatgttattcctttctgtttgttagttttccttctaacagtcaggcccctctgctgcaagtctgctggagtttgctggagttccactccagaccctctttgcctgggtatcaccagcagaggctgccaaacagcaaagattgctgcctgttccttcctctggaagctttgtcccagagggtcacct

SEQ ID NO: 232091 - DNA, 552 bp, Homo sapiens
tgggtgagtaccatccaatccaccagggatccagagggaaaaaaacaaacaaaggaagggcaaatgtgttgatctatctgcagaaactggaatacacttttctcatcctgtccttggataactccaagttccccaggcttttgactccaggacttacactagtgcctcctgaggttctcaggccattggcttccctggttctgaggccttcraatttagactgaaccatgctaccaacatcccagggtctccagcttagagaacagcctgtcatgaggctgaggcctccataatcacatgagccaatccccccactaaatctcctctcagatgctagatgacagacagacacatacatacatacatacatatcaatgcatacgtgtgtgtgtgtagagagagagaaggagaaagaaagagggggaaagagatatgtatctatatctcattgattctatttgtctggaaaactctggctaatacaatacctacactaaaaacaatattaaaagagttcttcaggcagaaataatatcatgctagatagtaatg

SEQ ID NO: 232092 - DNA, 550 bp, Homo sapiens
aatataacaaacatacatgtgaacaagaggtagacgttcagagctctgaattttacatttcacttttaggctttgatcccaattttttttttcttttattattattatactttaagttttagggtacatgtgcacaatgtgcaggttagttacattatttttattatgtaaaaaaatcagttatggaaatctttgcaatttaaagcagaaaacttggcctccattttatgtgagattcaacaattctaattaggccaaatttaccttatgaaaccaaggtgtaggaaataattaatcattgtaaaggactttttaaataccaagtgctacagaaatgttaaataataagcttaagtgctacaaaaattaactattaaataaaarattggattttcaaggagaacaaagtactcaaaagcagaaatctatttcccctaatttgtagatagttaaagtcattactgcccttgcagaattttaataaggtttataactatagtagtaacagccattatcacggcaatactgtaatattaaggataccaaggaa

SEQ ID NO: 232093 - DNA, 550 bp, Homo sapiens
aatataacaaacatacatgtgaacaagaggtagacgttcagagctctgaattttacatttcacttttaggctttgatcccaattttttttttcttttattattattatactttaagttttagggtacatgtgcacaatgtgcaggttagttacattatttttattatgtaaaaaaatcagttatggaaatctttgcaatttaaagcagaaaacttggcctccattttatgtgagattcaacaattctaattaggccaaatttaccttatgaaaccaaggtgtaggaaataattaatcattgtaaaggactttttaaataccaagtgctacagaaatgttaaataataagcttaagtgctacaaaaattaactattaaataaaaaattggattttcaaggagaacaaagtactcaaaagcagaaatctatttcccctaatttgtagatagttaaagtcattactgcccttgcagaattttaataaggtttataactatagtagtaacagccattatcacrgcaatactgtaatattaaggataccaaggaa

SEQ ID NO: 232094 - DNA, 575 bp, Homo sapiens
tgtataggtgtcacctcttctgcgaaggaatctccatttcacctagagagagtggactattttctcctagcattttggttgcatttttattataacccctcataaaacttgttttaaatcatttatctatagtcaagtggactgggaataactggtaaccaaatatttgttgaatgaattagagaatgaatgaatgataaattcaagtccacgaaataaaaatgccgtgatgagcatatgtatataaaacaaatctycttgatatataggaggtcgaggaaagaaaggcagatgaatcctagcaaaaggaggaggggtcaccaactgatgctctccagcattcaggtctaatcctgaaacaactgtcctgtctccaaggcaaccaaaactcagaaaagcatttagaaaataagaaagtatagcttccctgccaatacacccctccctggagaatgattatggagaaaatttcaatacccttatcttgcttaccatctcaacttcttatcctgacaatccttttaaaattaggaaaaaactgaccaacggggctaagtcaagaaagtagtgttgta

SEQ ID NO: 232095 - DNA, 501 bp, Homo sapiens
gacgacctgactttagttcagtgagactcatttcagaattctggcctccagaactctaagatacatttatrttgttttaagacactaagtttgggtaatttgtaaaacagcaataggaaataaactcacctcttcacagaccatcagaattggttatgaatggtgaaataataatgaacatcagagttcaggtggtttgcttttctttaggctccaaagtagaactgaacacttcgtgaattaaacagctgcatgactagagtgaatcttcaaagcaagtttcaggtggcctgaagagggctgttattgaagcctcctctttttcacatgccacatactagtttcccaattctataacttgaaatgtaggataatcctgctgatagggaaaaatttatcttggattaagaaagaggaatcttttggaggatactacaaactcattacttgtgtgtttcattaacaatctgcttttggcttcactaggggagataagtgttc

SEQ ID NO: 232096 - DNA, 466 bp, Homo sapiens
taacgtgaagaagaaacagcaatcagatgataccaacgtaggttctgagcaaatcacatgatttactgtgatttatttcttkgactcaattcttcgtctggtagatgaatagaatgcagtaatcataatacgtggcattaggcaaagactctcatggtgccccatgtcaagatggagaaattagatatgaagacagttaaggattcttacttggtaaatgctgatagtaatttaggtcaaagctggctactgtgaatattaactcttggcgtgttaattgctctgctagttaataagtaactgctagccacgtgtagctatataaatttacattttaattaattaaaattaagtttacaattctgttctttagctgcactagccacatttcaaatgctcaatagctgcagtggcttttggctactgtattggacagcccaggtttaggacatttccattagaaagc

SEQ ID NO: 232097 - DNA, 489 bp, Homo sapiens
ttatgaataacgtgaagaagaaacagcaatcagatgataccaacgtaggttctgagcaaatcacatgatttactgtgatttatttctttgactcaattcttcktctggtagatgaatagaatgcagtaatcataatacgtggcattaggcaaagactctcatggtgccccatgtcaagatggagaaattagatatgaagacagttaaggattcttacttggtaaatgctgatagtaatttaggtcaaagctggctactgtgaatattaactcttggcgtgttaattgctctgctagttaataagtaactgctagccacgtgtagctatataaatttacattttaattaattaaaattaagtttacaattctgttctttagctgcactagccacatttcaaatgctcaatagctgcagtggcttttggctactgtattggacagcccaggtttaggacatttccattagaaagctctattggacgtcact

SEQ ID NO: 232098 - DNA, 499 bp, Homo sapiens
taaaaacaacttatgaataacgtgaagaagaaacagcaatcagatgataccaacgtaggttctgagcaaatcacatgatttactgtgatttatttctttgactcaattcttcgtctggtagrtgaatagaatgcagtaatcataatacgtggcattaggcaaagactctcatggtgccccatgtcaagatggagaaattagatatgaagacagttaaggattcttacttggtaaatgctgatagtaatttaggtcaaagctggctactgtgaatattaactcttggcgtgttaattgctctgctagttaataagtaactgctagccacgtgtagctatataaatttacattttaattaattaaaattaagtttacaattctgttctttagctgcactagccacatttcaaatgctcaatagctgcagtggcttttggctactgtattggacagcccaggtttaggacatttccattagaaagctctattggacgtcact

SEQ ID NO: 232099 - DNA, 294 bp, Homo sapiens
gttaaggattcttacttggtaaatgctgatagtaatttaggtcaaagctggctactgtgaatattaamtcttggcgtgttaattgctctgctagttaataagtaactgctagccacgtgtagctatataaatttacattttaattaattaaaattaagtttacaattctgttctttagctgcactagccacatttcaaatgctcaatagctgcagtggcttttggctactgtattggacagcccaggtttaggacatttccattagaaagctctattggacgtcactgccagag

SEQ ID NO: 232100 - DNA, 597 bp, Homo sapiens
caacctctgtcttttaacaagcaacttcatttttaccgttgtttattagtgaattcttttgttccatttctaccatctcatcttgtgctttttatttgacctgatttttctatgcttttttggaatttttttattgctaacaagatccctcccttattccatttttctcctctaattcataagtagttataatattttctttttttttttttcattttartggttaccttttaaactttgccaggcacaaaagtctaaaattaatcgctagtggtacagcccagtggttaggatcatggatccaaaccagattatctggactcaaatcctgtgttggaacaggaattaaaagaaattaaagactgtgtaagcaaaaactcagttgtatgtaagaaaacccaattcccctgaggaagagaaagagctgaagtcctttaaaaattgactgcctgtttttctgtggctagtgagccttatctctcctttccccaggcattgtgaagactgtttctctagctgtgtagctgcgaggtcactaaacagataaactcaagtcataaaacatgctgttccttgaaaagtaagaaataatgtaat

SEQ ID NO: 232101 - DNA, 543 bp, Homo sapiens
aatcgctagtggtacagcccagtggttaggatcatggatccaaaccagattatcyggactcaaatcctgtgttggaacaggaattaaaagaaattaaagactgtgtaagcaaaaactcagttgtatgtaagaaaacccaattcccctgaggaagagaaagagctgaagtcctttaaaaattgactgcctgtttttctgtggctagtgagccttatctctcctttccccaggcattgtgaagactgtttctctagctgtgtagctgcgaggtcactaaacagataaactcaagtcataaaacatgctgttccttgaaaagtaagaaataatgtaatgcatgtcttaatttaaataactgtctttatttctcacttctgtaatacacttccccctgcacaaatctccccccaccccacaaaatgcttaaaaggtagcttgattctttgttcagggctcagtcctttggatgttcattggactcggtctgtgcacctaaataattaaataattcctcctcaacccctcggtctctctggttcctta

SEQ ID NO: 232102 - DNA, 488 bp, Homo sapiens
tgtttctctagctgtgtagctgcgaggtcactaaacagataaactcaagtcataaaacatgctgttccttgaaaagtaagaaataatgtaatgcatgtcttaatttaaataactgtctttatttctcacttctgtaatacacttccccctgcacaaatctccccccaccccacaaaatgcttaaaaggtagcttgattctttgttcagggctcagtcctttggatgttcattggactcggtctgtgcacctaaataattaaataattcctcctcaacccctcggtctctctgrttccttaattatcccgctgcagtgtcacttctgtggattctcattgtcaggtttcttatctgaaaaatggagataatatcactaacctcataaggttattatggccgtcaatttccattaatatacatacagcaatcagaacatggctggcatatcactagcgtgaaatttatgtaaactagtagtagtagtagc

SEQ ID NO: 232103 - DNA, 442 bp, Homo sapiens
gttaccaaattcaacctcaagccgcagggatcaaattcctctgaaagctacaatttgcacaaaagctcactcaataagaaatgtgtttttcagctgttttcccacaacttaacaataaatagaaacagacctgggaagcagcaagaccattaagaataacaagtcaaagatgatgtacaagctacaaaacaattttctcctcacataaataagtgcaatatacaagatttttttaataacatgccagaagacatcagtgctctgggagtcaagatacctggatccctgttctagcaccttcaataattaggagtatgatcttgaacaaaccaraaaacctatctaagcatcattttctccacatgtaaaatgacagaattgggcaaaatgacctaaatttctttctaggagcaagttatatgaatttttaaaaataatatgt

SEQ ID NO: 232104 - DNA, 617 bp, Homo sapiens
attactatgtatcttccttctttgaacctaagtagaataatttgtttatttcagttcttttagataactaactgttacattaccttttcaaatatttaattaaaacctaagcttaaccaaatcaaatgtactctatgcctttgattgcacaaggggccctaaagtactgtacattaaaaataaaattctattgtaataaaaatttaaccaaattatttaaaaatttaatgaaaataatgtcatagacaaaagtaaaaaataatacaatctcatgcaattatcttaatatttgcacattgccttctgcatgcagccatatttttaacatacttgcagtcataatacgcatttctatattataatttttgtattgtgaattgccatctttccccatcttgttgaaaaaaagatttaaatagcttacaaagaaatscacaataaaacaaagtaacattaattaaaaccaataggaaaagaaagaattcaggagaaagaaagggaagggcaggataaaataagaaatatgtgaggtaatataaaaaatatgtcattagctattagacacgggccatagatttatctttgagcaagcgcttaaagagggaaatgggatcaat

SEQ ID NO: 232105 - DNA, 458 bp, Homo sapiens
tggtgaaaacatgaaatggtgtagccactatggaaaacagtatgaaggttctcaaaaaaattaaaaacagaattactatatggtcttgcaatccctttttggtatgtatccaaaataatttaaagtaggaatttgaagagctatttgcatacccatattcatagtggcactatttaaaatagccaagagttgtaagtaacccaaatacccatcaacaaataaatggataaacaaactgtgatatataaaaataatggaatattatccagaattgaaaagagaaggaaactctatcatctgcttcaacatggttgaacatagaggacattatgctaggtgaaataaacctagcacaaaaakccaaatactctatgataccacctatatgtggtacctgaagtagataaactcatagaaatagaaagtggaacggtgttttccaagggttaggggcaagg

SEQ ID NO: 232106 - DNA, 458 bp, Homo sapiens
tggtgaaaacatgaaatggtgtagccactatggaaaacagtatgaaggttctcaaaaaaattaaaaacagaattactatatggtcttgcaatccctttttggtatgtatccaaaataatttaaagtaggaatttgaagagctatttgcatacccatattcatagtggcactatttaaaatagccaagagttgtaagtaacccaaatacccatcaacaaataaatggataaacaaactgtgatatataaaaataatggaatattatccagaattgaaaagagaaggaaactctatcatctgcttcaacatggttgaacatagaggacattatgctaggtgaaataaacctagcacaaaaagccaaatactctatgataccacctatatgtggtacctgaagtagataaactcatagaaatagaaagtggaayggtgttttccaagggttaggggcaagg

SEQ ID NO: 232107 - DNA, 612 bp, Homo sapiens
gtggttatatgcctgctagaaaatgcacacacactgtatactttggatcacttagaattgtcaacatatactcaagaaataggaaaaacatctcattaatatttcacaaaagaggaargcactgttgaatcaggtgttttatttaagatcattaggcatattagagaaaaatcggtcatagaggctagggtataactcagatctcctacactaactggaagccactgggtcacctttgctttcattagtgtctgaatttccattattgctctgtgcttagcattcttctcggaagagacattcctcaggactcactgctttaaaggttcaaccagctgaaaacatttttcaaattgtacagcattaaattcaaaatggatctgaaaatataaagtttgaaagaattcactggcagtattttgatggtgttttatttcgcgttggggctaaagattatattaacaaattatcttgattttaaaatttaattttttaatttataaaatatatatttatggtgtacaatatgatgttttgatatatgtatacattgtgaaatggctaaatctagctaattagcatatatattacctcagccattttttgtggtga

SEQ ID NO: 232108 - DNA, 612 bp, Homo sapiens
gtggttatatgcctgctagaaaatgcacacacactgtatactttggatcacttagaattgtcaacatatactcaagaaataggaaaaacatctcattaatatttcacaaaagaggaaggcactgttgaatcaggtgttttatttaagatcattaggcatattagagaaaaatcggtcatagaggctagggtataactcagatctcctacactaactggaagccactgggtcacctttgctttcattagtgtctgaatttccattattgctctgtgcttagcattcttctcggaagagacattcctcaggactcactgctttaaaggttcaaccagctgaaaacatttttcaaattgtacagcattaaattcaaaatggatctgaaaatataaagtttgaaagaattcactggcagtattttgatggtgttttatttygcgttggggctaaagattatattaacaaattatcttgattttaaaatttaattttttaatttataaaatatatatttatggtgtacaatatgatgttttgatatatgtatacattgtgaaatggctaaatctagctaattagcatatatattacctcagccattttttgtggtga

SEQ ID NO: 232109 - DNA, 612 bp, Homo sapiens
gtggttatatgcctgctagaaaatgcacacacactgtatactttggatcacttagaattgtcaacatatactcaagaaataggaaaaacatctcattaatatttcacaaaagaggaaggcactgttgaatcaggtgttttatttaagatcattaggcatattagagaaaaatcggtcatagaggctagggtataactcagatctcctacactaactggaagccactgggtcacctttgctttcattagtgtctgaatttccattattgctctgtgcttagcattcttctcggaagagacattcctcaggactcactgctttaaaggttcaaccagctgaaaacatttttcaaattgtacagcattaaattcaaaatggatctgaaaatataaagtttgaaagaattcactggcagtattttgatggtgttttatttcgygttggggctaaagattatattaacaaattatcttgattttaaaatttaattttttaatttataaaatatatatttatggtgtacaatatgatgttttgatatatgtatacattgtgaaatggctaaatctagctaattagcatatatattacctcagccattttttgtggtga

SEQ ID NO: 232110 - DNA, 619 bp, Homo sapiens
tgaatcttgttttgtcaccaacattgggtttattttgaagaatgttttatgcattgatgagaagaattgtattctgctgctgttgaataaaatgtctttaagtccatgtggtctaaggttcaatttcaatccaatattttttttgttgattttctgtctagataatccgtctaatgctgagagtggggtgttaagatccccaactatcattgtattggagtctctctctctctctttagatccagtgatatttgatatataaatctgggtactccagtgtgttgggggcatacatatttagaatattatatccttttgctggattgatccctttatcattayataatgatgttctttgtctttttttttaactgtttttgacttaaagtatctttatgtgatgtaagtgtagctacccctgcttgcttttggtttctgtgtggaatatctttttccatccctttattttcagtgtatatgtgtctttacaggtaaagcatatttcttgaaggcagtatatagttgaatcatgttttttatccatccagttagcctacatcttttaagtggcaaatttaatccatgtacattcaaagttattattaatatgtaaagtttt

SEQ ID NO: 232111 - DNA, 535 bp, Homo sapiens
gaatgcgtcagtatatctattgtcaaaatcagctcacagtctcatttcagtaaaacagaaatgtgatccctcacaagatgttgtgttgctgattaactgccttcttctaggagatgagctacagtgtcattttcagtcctagagatcataagaaaaagaagaaaggctcttggggatctgaaatgaattagatttgattttacagttactgtaaaactccagaaaatttacatttgttttacttacaccatatattttttccaaaagttaatctctatggactgcagacaaacatgttaagttaaaataacaaataactcttctagagtagaaaatgggtaaattttagacacagacatgtgcamtaagatgtctgcacaatgattaaagtttagttgtgaatttgcctttgagattcccattggccaaagtgaagagaaaagcatgatcagaatcaagactcaaagtgcctagaaggaagcatttgtcaggtacgctggaaaaaaacaatatttccaagaattgagatggaaga

SEQ ID NO: 232112 - DNA, 414 bp, Homo sapiens
ttaaactatgtgtcggggtccttctaaatgcagggccctgtgagactgcacakatcacacacctgtgaagtcagccctatatatgcatatgtaagtgtgtatgtgtgtgttgtcgaggacatgtgtgcttcttcttggaggaatgcataaagataccattgtcttttattcttccacctcaattttagagactagataaatctgcatatgagggcctggcccctttttagtacttttcagcctcggatagtggtggaaaacatgtgaatcctagttcaaatttcctctcactctttgtagggttgtgagcccattatgtattttttctgtgcctcatcttttcaactcgaaaatggggacataaggtacacttagtcatggagttattaaggagattaaaataaatccgttaat

SEQ ID NO: 232113 - DNA, 414 bp, Homo sapiens
ttaaactatgtgtcggggtccttctaaatgcagggccctgtgagactgcacagatcacacacctgtgaagtcagccctatatatgcatatgtaagtgtgtatgtgtgtgttgtcgaggacatgtgtgcttcttcttggaggaatgcataaagataccattgtcttttattcttccacctcawttttagagactagataaatctgcatatgagggcctggcccctttttagtacttttcagcctcggatagtggtggaaaacatgtgaatcctagttcaaatttcctctcactctttgtagggttgtgagcccattatgtattttttctgtgcctcatcttttcaactcgaaaatggggacataaggtacacttagtcatggagttattaaggagattaaaataaatccgttaat

SEQ ID NO: 232114 - DNA, 414 bp, Homo sapiens
ttaaactatgtgtcggggtccttctaaatgcagggccctgtgagactgcacagatcacacacctgtgaagtcagccctatatatgcatatgtaagtgtgtatgtgtgtgttgtcgaggacatgtgtgcttcttcttggaggaatgcataaagataccattgtcttttattcttccacctcaattttagagactagataaatctgcatatgagggcctggcccctttttagtacttttcagcctcggatagtggtggaaaacaygtgaatcctagttcaaatttcctctcactctttgtagggttgtgagcccattatgtattttttctgtgcctcatcttttcaactcgaaaatggggacataaggtacacttagtcatggagttattaaggagattaaaataaatccgttaat

SEQ ID NO: 232115 - DNA, 414 bp, Homo sapiens
ttaaactatgtgtcggggtccttctaaatgcagggccctgtgagactgcacagatcacacacctgtgaagtcagccctatatatgcatatgtaagtgtgtatgtgtgtgttgtcgaggacatgtgtgcttcttcttggaggaatgcataaagataccattgtcttttattcttccacctcaattttagagactagataaatctgcatatgagggcctggcccctttttagtacttttcagcctcggatagtggtggaaaacatgtgaatcctagttcaaatttcctctcactctttgtmgggttgtgagcccattatgtattttttctgtgcctcatcttttcaactcgaaaatggggacataaggtacacttagtcatggagttattaaggagattaaaataaatccgttaat

SEQ ID NO: 232116 - DNA, 549 bp, Homo sapiens
gtaaacaaagtaatatagttttatctttggtctacatttttgtcaaaattgtattcttgataaatggaacaaattaggttacctgttctatatgagagttaatgttttttaataatatttatagagaagatttttaagattttcccatgtaatcttatggaggctgtggaccaaattttaggcagtaactgaggtgacatcgaacagctttaaggatgtckccaaagcccatctgactggataaaatattcagtgtttccaattagtgttttttcctttatagcctcaggtggttgcttttggggatccttgagacccttgaaaaccttcaacgagggacagtgtgcttaaagttcaagtgcctatagggagctgagaagctgaagtagggaagaaaaagtctggcagatatggacagaaggatgatgaaagaggtaaggctttgaagggaaacatcaaaagattcaagagaattaaaggggaaatcaaagatggcaaggggagaaggaggagcagaagcaatgggaagggagaggtcttagaggagcc

SEQ ID NO: 232117 - DNA, 510 bp, Homo sapiens
ttgtcaaaattgtattcttgataaatggaacaaattaggttacctgttctatatgagagttaatgttttttaataatatttatagagaagatttttaagattttcccatgtaatcttatggaggctgtggaccaaattttaggcagtaactgaggtgacatcgaacagctttaaggatgtctccaaagcccatctgactggataaaatattcagtgtttccaattagygttttttcctttatagcctcaggtggttgcttttggggatccttgagacccttgaaaaccttcaacgagggacagtgtgcttaaagttcaagtgcctatagggagctgagaagctgaagtagggaagaaaaagtctggcagatatggacagaaggatgatgaaagaggtaaggctttgaagggaaacatcaaaagattcaagagaattaaaggggaaatcaaagatggcaaggggagaaggaggagcagaagcaatgggaagggagaggtcttagaggagcc

SEQ ID NO: 232118 - DNA, 490 bp, Homo sapiens
aatgcacaattcattaagttaaaccacattctaggccacagaacactttaccaaatttaaaagaatagaaatcacaaaaggcatgttcttgaattagaatggaattaaactaataatagcagaaagagagctgaaatatcctcaaataccaaaaaatttaaaaacacatttctaaataataaaacatggtgaaagagaaagtctcgagagaaacaaaattttttaactaagccagtaattaataaccttcccaaacagaargtaccaagcccagatgattcactggtgagttctatcaacactggagaaataaatgataccaattttccacaatctgttgcagaaaatagaagcagagtgactatttcttaactcattccatgggccagcattaccctaatacccaaaccagcaaaaccttacaaaaaagtaaactgcaaacaaatatctctcttgaacatggatgaagcaatccttaaaaaatattagc

SEQ ID NO: 232119 - DNA, 417 bp, Homo sapiens
acaaaaggcatgttcttgaattagaatggaattaaactaataatagcagaaagagagctgaaatatcctcaaataccaaaaaatttaaaaacacatttctaaataataaaacatggtgaaagagaaagtctcgagagaaacaaaattttttaactaagccagtaattaataaccttcccaaacagaaggtaccaagcccagatgattcactggtgagttctatcaacaytggagaaataaatgataccaattttccacaatctgttgcagaaaatagaagcagagtgactatttcttaactcattccatgggccagcattaccctaatacccaaaccagcaaaaccttacaaaaaagtaaactgcaaacaaatatctctcttgaacatggatgaagcaatccttaaaaaatattagc

SEQ ID NO: 232120 - DNA, 545 bp, Homo sapiens
ttcacaattcgtctaaatacatcaatggcatattatcaaatttgtgagtgacctaaaatctggttggctaaatgatatggtttggatgtgtgtccccacccaaatttcatgttcagttgtaatcctcagtgttggaggtggggtctactgggtggtgatgggctcatgggagtgagtcctycatgaatggcttagcaccatccctttggtgctgttctcatgatagagttctcatgagatttggttgtttaaaagtgtatggcacctccctgctctctcttcctcctgctgtggccataaaaggtgtgcctgcttcccctttgccttctgccatgattgaaagtttcttcaggtctccctagaagtagctatacttcctgtacagcctgcaaaactgtgagccaattaaacctcttttctttataaattactcagttgcagtgatatggtttgcctctgtgtccccacccaaatctcatatctaattgtaatctccacatgccaggggagggagctggtggaaggtaattggatcatgggggtgg

SEQ ID NO: 232121 - DNA, 550 bp, Homo sapiens
tttaattagctaggcatgatggtgtactcctgtagtcccagctacttgagagactgaggtaggagattgcttgagcctatgagttgcagtgagctatgatcacaccactgcactctagcctgggtgacagaataagaccttgtctctaaaaaataaagaattaatacatacaatgtctggtatatttcctagagtttctgtttcaaattagactctgagcattctagcagacagtacaaacatggaaaacttgttatagtattcagatgtctaaaaagtttaaaataaccatctggccaaagaacagtaatcctgattctggtttttgaggayaatgttcctatttcataacctgtgtgagttattaagtaacagcctcacccagaccctctatgaaattagagtgaactacaatgaggtctaatgataaaaacagtacctgtataggccaaggagtgtctaaacagtttatgctctgtaactaacttaatacttacagctagccttgttttattattatcaccattttatgcataaggaagctgaggga

SEQ ID NO: 232122 - DNA, 458 bp, Homo sapiens
aggaaaggctatagacttggagtcaagagtgtttatggaatatgtatgtgtggagaggacttaggaggggratttctggtgaatgatacagaagtaaagatgaataggtaaagctatacgaaatttcaagtaaccctaaatgccttacccagaacaaacataagattgcatgtattcattccctgatgcatgccatctgaactttccaaggtggtctacattcagccttttatcaggtcttcacaataatcttctgatgtagggcttggcatcctcattttacagaagaggaaactgaagttcagggagaaccaatgatacttccaaagtcatgcaagttaaaactgacttgggctgggattagcactcagacctgtctgactttaaggtgactgctctgtatcactacaaaatggtttaaacctggggtttcccatatgagttccaaaaacgaattc

SEQ ID NO: 232123 - DNA, 568 bp, Homo sapiens
acttaccagctatatggccttgggcaggtaactcagtttccttgagcaccttatcttgatctgtagaagtatggacagtgttgtaatgaggtttaaacaaaataatgtgggcaacaaatgactatactatgtggcatatggtaggtttccaagtatttccttccctcctctcttcctttcttgatttttttccaactctccccttttcttcctcctyctctccttgtatgaggattagaaagtctttgaagaactgaattgagagccttctctccctcttcagtctcccattgaaagttcaagggtgatgatttatctccttgttcagagaatgtaaacaggccacagcccagactgacattaataacttgtataacaaagatattgtgcatttgttatacacgatttatggcctcccactaacttcaggatttgactccctcccacgtgttgagggcttaagctggacgtttaaagatgagtctaaattatctgtgtgctaaaagagcacctggaaacagacaggagtcctcttcctgatgagcctatgtaaaagtttgatataata

SEQ ID NO: 232124 - DNA, 568 bp, Homo sapiens
acttaccagctatatggccttgggcaggtaactcagtttccttgagcaccttatcttgatctgtagaagtatggacagtgttgtaatgaggtttaaacaaaataatgtgggcaacaaatgactatactatgtggcatatggtaggtttccaagtatttccttccctcctctcttcctttcttgatttttttccaactctccccttttcttcctccttctctccttgtatgaggattagaaagtctttgaagaactgaattgagagccttctctccctcttcagtctcccattgaaagttcaagggtgatgatttatctccttgttcagagaatgtaaacaggccacagcccagactgacattaataacttgtataacaaagatattgtgcatttgttatacacgatttatggcctcccactaacttcaggatttgactccctcccacrtgttgagggcttaagctggacgtttaaagatgagtctaaattatctgtgtgctaaaagagcacctggaaacagacaggagtcctcttcctgatgagcctatgtaaaagtttgatataata

SEQ ID NO: 232125 - DNA, 425 bp, Homo sapiens
gacaggtgggaggctgtgggcttccctcctgtctatgtcttcctttcttgggcatcattaacttattacaaaccagtggaaacttgccaatttgctgcacagctgatgacttgctattgtatctcagctttcttctgcggagagctagataacgaatcagatcaattgtttttgagcccagaggcatggacaagagggtgtatgtctgtatgtctgtgtgtatgtgctggaggagtgaataaatggagttgggagtggcaccttcctaacctcatacatgttgaggcaaggtgaatttcttcaggcttctgctaaggagaagacatttcraattaagattttcatcttcctctacaactactaaaccacagttactgcaaaacagaataaaaataacctcaagttttaaattcacaggataatgg

SEQ ID NO: 232126 - DNA, 635 bp, Homo sapiens
gagcttccttctgaggttatcagagtctcctgtgttgcacagagaggggcttggttttgaggttctatcacagcctctctgtctctgtctctgtctctctctctctgtctctttctttttatcacatttctctacctcattgtgcacattagcaatataagagcattcttcaagacccgtccacccgtacatgcaggctccctgtgcaaatggctccctaggatggatctctattatttcaccaaaaaacatcagagaaggaatttgttctgctctgctgaagacatgatttcctgtcctctctactgccttagctcagttttttggctgctgtttgggaaggggatagagaagaaaggagttatctataatatttagctgagccagttttaaccagggccaaaacaaggaaaagaagaagacaattcaggattatctaccatgggatagaaacaatttctgggatgcatatgggaccccatatctatacagcagcctccatacatgcttgggacagtccagcactccacagtttgatctcttctctgttccctccacactcttcttttgctcytcttcctgtatttcagagtggttaagatcatggaagtcagacaagctatgggctctctcca

SEQ ID NO: 232127 - DNA, 259 bp, Homo sapiens
cccaaggaagagttgatattgcggctcaagtccaaaggtagcatattcctctaactcagagaggttagtstttcttccatcaaggtgttcacttgagtggatgaggctcatgcacagtatggagaatgttctgctttactccaaatttattgattcaatgtttatgtcatctaaaaaatatagataaaaaatcttcacagatatgtctagaataatgtttggccaaatacctggatatcatggtttagtaaattggcgc

SEQ ID NO: 232128 - DNA, 425 bp, Homo sapiens
cggtggaacgtcctgggtggttgcgtgggggaagagaacggtggataacgggggtgtgtgtgtgtgtgtktgtgtgtgttttgagtcagagtctcactctttcacccagactggagtgcaatggcgtgatctcagctcactgcaacctccacctcccaggttcaagcgattctctgcctcagctacctgaatatctgggattacaggcctgcatcaaacccagctaatttttgcattttaaatagagatggggtttcatcatgttggccaggcttgtcttgaggatgacagtttaaatatacagtttaagtgtacagtttttgagtatcagtgtagacataatgtgtagtgcctcttctccagggtagaagctaaggcttgcctggtatctggaaacccatacaacacttatgcctttgcaaaat

SEQ ID NO: 232129 - DNA, 591 bp, Homo sapiens
ctgggttgttcaggagccttctttgtctagtctgatgaagccccttcaaagaaacagaaattgttggcacatcccatctcttggcatcagacagcaggtagctcaaactgaagaagaaatttcccagcctctggagacacagatggagggagggatgagtttgaagatttcaaagtcagggctgtctttgggaatttctcagaacaaaggcactgaggctattcagcaatttttcttttcttctttttggttttctcttcttgccttttatgttgcctccttccttctcaagcttttctgttatttttttccttttatcttccaactttttctctctgcccttctgaccttactttctccatgtactgaactttctaccagtttcaactttgaaacttttttggaaatgtggctactaacaattcattggaaggtattggtgcaaacggaatattggacaaggtgttagaaggcttgactctgccatttcctatcttggagyaagacatatattgtgttttggggcttcaacatcccctcaataaaatgggtatatgttgctaagtgatcgacatatccacagtactgtgg

SEQ ID NO: 232130 - DNA, 616 bp, Homo sapiens
tgaatttcccattatgatgaaaagggcagtcagacatgtctcattatacccctcttcttttggagtttaggcacaactgaccagcattaatattaaaatagagatcaaaagactgacaaaatagatgctgtagcaataagacaccgaattccaacctgactctgatgtagtaacacatgacaagtgaaggaaatcaaaatattttaccccaaaatatattttcttgaygtattttgaaatggccttgcaaaaccatcttttgtggggaaaatttgcatctgtagagaatctccttccctttctaggtctttctgcaaatccaggagaaattaaatgagagtctggtacttttaaggtcttaaaaagtacatttaccatattctctctaaggttactgcctggaggcttcatctacataacaagaaccttggcatctacaacccccattatcttaactcaagcatttacttcaagtctttagataatgtttaactcaaccaattgccaatcagaaaatcttttaatccacctatgacctgtaagtacccctgaaccaatgtataccttacatatatcgatttatgtctttgcctgtaacttcagtctctgtaaaatg

SEQ ID NO: 232131 - DNA, 619 bp, Homo sapiens
tgccaacgctgctgcaggaatctggatgagggacaatgagacctcaaccaagctagaggcagtggctcaggaaggggaagatggatttatgagacgctgcaggccaatgggcaggacttggatgacagtgatygtactagctattccttattgagggttgaacgtgggacaggcactgggctaagcatctcttgggtattaattcacaacccacatgtgatgttggtattattagcactatttccagaagggaaaacagagctcttattaattagcttaagagcatttagttagtcaatggtggaattaaatttcaaacacaaagtcccgctttcaaaaaccgctacctaaactaaataaacctatggaatttcttctgtacatccaaagaaatcttcctctgctttatttgaatgccactgtcctttatactgcccataagatgctggggagtggctccttaatagcagcctcataaaaccccagcactaacatgaagtcagaagttcaaacctccactatccttcctctgtctggctaagaatgatgcacttcagcctccaccaggcctctcaggaagaaggcatagctacaaaaataccttggagctgcttttaac

SEQ ID NO: 232132 - DNA, 619 bp, Homo sapiens
tgccaacgctgctgcaggaatctggatgagggacaatgagacctcaaccaagctagaggcagtggctcaggaaggggaagatggatttatgagacgctgcaggccaatgggcaggacttggatgacagtgattgtactagctattccttattgagggttgaacgtgggacaggcactgggctaagcatctcttgggtattaattcacaacccacatgtgatgttggtattattagcactatttccagaagggaaaacagagctcttattaattagcttaagagcatttagttagtcaatggtggaattaaatttcaaacacaaagtcccgctttcaaaaaccgctacctaaactaaataaacctatggaatttcttctgyacatccaaagaaatcttcctctgctttatttgaatgccactgtcctttatactgcccataagatgctggggagtggctccttaatagcagcctcataaaaccccagcactaacatgaagtcagaagttcaaacctccactatccttcctctgtctggctaagaatgatgcacttcagcctccaccaggcctctcaggaagaaggcatagctacaaaaataccttggagctgcttttaac

SEQ ID NO: 232133 - DNA, 619 bp, Homo sapiens
tgccaacgctgctgcaggaatctggatgagggacaatgagacctcaaccaagctagaggcagtggctcaggaaggggaagatggatttatgagacgctgcaggccaatgggcaggacttggatgacagtgattgtactagctattccttattgagggttgaacgtgggacaggcactgggctaagcatctcttgggtattaattcacaacccacatgtgatgttggtattattagcactatttccagaagggaaaacagagctcttattaattagcttaagagcatttagttagtcaatggtggaattaaatttcaaacacaaagtcccgctttcaaaaaccgctacctaaactaaataaacctatggaatttcttctgtacatccaaagaaatcttcctctgctttatttgaatgccactgtcctttatactgcccatragatgctggggagtggctccttaatagcagcctcataaaaccccagcactaacatgaagtcagaagttcaaacctccactatccttcctctgtctggctaagaatgatgcacttcagcctccaccaggcctctcaggaagaaggcatagctacaaaaataccttggagctgcttttaac

SEQ ID NO: 232134 - DNA, 527 bp, Homo sapiens
gcttccacttttttattatatasaatgaataagtattgtattaatagtgccatttccaattatgaccactatcgcaggcctgtcgtctgctaactgtgggttatttttcatggagcatttttctgaacagtttttttaaaatccccccttctttgcaccattgtaattaagataatgcagaataattataaaaacattggaagctcaaatgccagcatagactatccaactagtgctgcatgcttattctaatttctcaagcgaaaaagaaaaagtgttggagtctactgaggaaggcggatgaaggttgatgaagtcagcaagaaattggccagaacagctcagaaaacctggccagagcccatgtgtggggagctgagcttgattagatatttctagaaagcaaccaggaagtgtgctaaagatttttgggtattgaaaaaatatttattgagcatcaattcattattgagttgtgtgccaccatgcacagctaaattttgtgcatctactgtatatcaggtgct

SEQ ID NO: 232135 - DNA, 580 bp, Homo sapiens
gtagtaagtgggagaaatgggattgaaatttggtctgtctacctgcaaagcttgcttcgtacctaatacaaccagggaaagtgtgtgtgtctgtgcctatgtgtgcacacacacatgcatgcatatggatgtagagggctggcaaatgcttgatatgttgaccactaaggattagcagttctcttaattgactccaacacctggacctgttttcttgtaggaactctaatcaggcttagcaagatctttgtgactctcccatctttccacatgtccaggcacagtgaccacacccctataactaccataagggtttccataaaggctttcccttctggtcaagcctccatttccaaactcttctgacctttattcccttcttgtaagtactaaagtaccatgtgttcagagtgaaaactgaggctcagaaacaatgtctataaaccagattcaatagaaatataatgcaaaccacatatgccattttaaatgtttcagtrgccccattaaaagggtaaacataaaagttcaaatgaatttccagaatatgttgcatttcactcagtatattaaaatatta

SEQ ID NO: 232136 - DNA, 580 bp, Homo sapiens
gtagtaagtgggagaaatgggattgaaatttggtctgtctacctgcaaagcttgcttcgtacctaatacaaccagggaaagtgtgtgtgtctgtgcctatgtgtgcacacacacatgcatgcatatggatgtagagggctggcaaatgcttgatatgttgaccactaaggattagcagttctcttaattgactccaacacctggacctgttttcttgtaggaactctaatcaggcttagcaagatctttgtgactctcccatctttccacatgtccaggcacagtgaccacacccctataactaccataagggtttccataaaggctttcccttctggtcaagcctccatttccaaactcttctgacctttattcccttcttgtaagtactaaagtaccatgtgttcagagtgaaaactgaggctcagaaacaatgtctataaaccagattcaatagaaatataatgcaaaccacatatgccattttaaatgtttcagtagccccattaaaagggtaracataaaagttcaaatgaatttccagaatatgttgcatttcactcagtatattaaaatatta

SEQ ID NO: 232137 - DNA, 506 bp, Homo sapiens
actaaatagaccaaaaagttataaaatacatgttagtaccccaaccatgttggatggtctaraaatcataaatgctgatataattccttatcaatatttaattcatacacatatataaaggtgcagatataaaaatattaaaaattgtatgaacggctacatgctcagaggaagagaacacattagattacttttatttatcttgataggtgtttttctcctagaaaagccttccacactacatgactggtagacttgtatatgagactgatgatttgttacggagagctctgggacaatatgactcacctctgtgctcaaaacttttttcagttttctttcttcacctttgtctcccctcctcaattcccacatcctaccacttgggacaactgttttcatcttttcagataattaaacagatattatgatacagatctacttaataaatgagagaaagaatgggtaatgtaagggcaagaaaaaggggtgaagaattgagagaa

SEQ ID NO: 232138 - DNA, 506 bp, Homo sapiens
actaaatagaccaaaaagttataaaatacatgttagtaccccaaccatgttggatggtctagaaatcataaatgctgatataattccttatcaatatttaattcatacacatatataaaggtgcagatataaaaatattaaaaattgtatgaacggctacatgctcagaggaagagaacacattagattacttttatttatcttgataggtgtttttctcctagaaaagccttccacactayatgactggtagacttgtatatgagactgatgatttgttacggagagctctgggacaatatgactcacctctgtgctcaaaacttttttcagttttctttcttcacctttgtctcccctcctcaattcccacatcctaccacttgggacaactgttttcatcttttcagataattaaacagatattatgatacagatctacttaataaatgagagaaagaatgggtaatgtaagggcaagaaaaaggggtgaagaattgagagaa

SEQ ID NO: 232139 - DNA, 506 bp, Homo sapiens
actaaatagaccaaaaagttataaaatacatgttagtaccccaaccatgttggatggtctagaaatcataaatgctgatataattccttatcaatatttaattcatacacatatataaaggtgcagatataaaaatattaaaaattgtatgaacggctacatgctcagaggaagagaacacattagattacttttatttatcttgataggtgtttttctcctagaaaagccttccacactacatgactggtagacttgtatatgagactgatgatttgttacggagagctctgggacaatatgactcacctctgtgctcaaaacttttttcagttttctttcttcacctttgtctcccctcctcaattcccacatcctaccacytgggacaactgttttcatcttttcagataattaaacagatattatgatacagatctacttaataaatgagagaaagaatgggtaatgtaagggcaagaaaaaggggtgaagaattgagagaa

SEQ ID NO: 232140 - DNA, 554 bp, Homo sapiens
tagcccacactttcagaggagtcagcatgtggcaagatttagggcatgctggtgtctcatctacctagggagagagtgagttttctaargaagaatccatatctaattcatctttaaaatggcatctctaagcacagcgtttggcccttagcgtgcaatcagtaaagcattttgaatgaatgaatgaatggagtgacaaatggtgctttaaggcaactatttgcagaatattgccatagatgttatcaaacggaaacaaaagagacaaaccccacagttccctccccacactctccagtggcgcttcaggttggggtgcagtggagcaatcatctctcaatgcagccttgaactcctgggcttaagcaactgtcccacctcagcctccttagtagctgggactacaggtacatgcaacaatgcctggctaacttttaaattttttgtagagatgaggtattcctatgttgcccaggttggtcttgaacacctgaactcaagcaatcctcctgtcttggcctcctaaagtgttgggattgcaggtgtgagccacc

SEQ ID NO: 232141 - DNA, 559 bp, Homo sapiens
tgatgactgtggccacttccctgccctgatcttaattacaggagacccactggctcagcagtctgtaagttgcaggaagagaaattagatgtgatatccaaatcttttttttttttttcttttttgaggcagggtcttattctattgccaggctggagtgcagtggtacagtcatgagtcactgcggcctcaacctcctgggctcaagcaattctccatctcggcctcctgtgtagctgagaccacaggcatggaccaccatgmctggcaaatcaaaaaaaaataaaaattatacagatagagtcttcctatgttgtccaggctggtcttgagctcctgggcttaagggatccttccacctcagcctcccaaagtgcaggggttacagacatgagccactgtacccaaccccaaatcttgactagtagcatatagtcagctagatagacagacggatggaccattgcttgtgaacttctctagggagaccctctgaagaaagtgtctgagggtcaagccatcatcagagcagctgaagacaaggccccacccacaacgg

SEQ ID NO: 232142 - DNA, 559 bp, Homo sapiens
tgatgactgtggccacttccctgccctgatcttaattacaggagacccactggctcagcagtctgtaagttgcaggaagagaaattagatgtgatatccaaatcttttttttttttttcttttttgaggcagggtcttattctattgccaggctggagtgcagtggtacagtcatgagtcactgcggcctcaacctcctgggctcaagcaattctccatctcggcctcctgtgtagctgagaccacaggcatggaccaccatgcctggcaaatcaaaaaaaaataaaaattatacagatagagtcttcctatgttgtccaggctggtctygagctcctgggcttaagggatccttccacctcagcctcccaaagtgcaggggttacagacatgagccactgtacccaaccccaaatcttgactagtagcatatagtcagctagatagacagacggatggaccattgcttgtgaacttctctagggagaccctctgaagaaagtgtctgagggtcaagccatcatcagagcagctgaagacaaggccccacccacaacgg

SEQ ID NO: 232143 - DNA, 364 bp, Homo sapiens
tcagctgagggactcattgaataacatgactgtggcctcgaaggattcacatatcaagctgatcatcacaattacctgcccagagcaatattaaacaccactcagaaattatgcacatggtttcaaccttytttttaaagtccaagttgttctggacctcccttttggagaggtcccggagtggcgccccgccgcgggtcagtgacttcctccagtggggaggcatctgccctttgtcccacccacaaggcagaatgataggcaggggccgggaccaatccccaccctgtgacttcctttgaggcagcttcaggggtggggctgtccagttcccctgaggtcacattaggaatgccagcaagcc

SEQ ID NO: 232144 - DNA, 364 bp, Homo sapiens
tcagctgagggactcattgaataacatgactgtggcctcgaaggattcacatatcaagctgatcatcacaattacctgcccagagcaatattaaacaccactcagaaattatgcacatggtttcaaccttctttttaaagtccaagttgttctggacctcccttttggagaggtcccggagtggcgccccgccgcsggtcagtgacttcctccagtggggaggcatctgccctttgtcccacccacaaggcagaatgataggcaggggccgggaccaatccccaccctgtgacttcctttgaggcagcttcaggggtggggctgtccagttcccctgaggtcacattaggaatgccagcaagcc

SEQ ID NO: 232145 - DNA, 418 bp, Homo sapiens
gggtgaaccttgaagatatgatgttaagtggaatcagccagtctcagagggacaaacactgtctgattccactcatatgaagcccgtatagtaattcatagagacagaaaatagcatggtagtttccagggactggaagataagggaatggggagtgaatgtttacaggggacagggtttcagtttgggaaattgaaaaagctctggagaggaaaggtgatgatagttccacagcaatgtgagtgtatttaatgcaccaaactacacactcagaaatagttagggtgggaacttttatgttatgtgtattttaccacaattaaaattatttttttaaagcagagaaactctggcaaycacaatgagagtgacaccagctcctaagaagggtcgcgaccatgcaacgtgaacagaattc

SEQ ID NO: 232146 - DNA, 649 bp, Homo sapiens
tatcatcagctccatgaggacaggaattgtgatgttcctttcaccactctaactccaaagtctagcacacttgtaaatatttacaggattataggacaaaccctgatctgtgttctgccataattctccccaggagaatcctcttggagtcaccaggggtgaaggagagggggccttsgctgtctttaccctctcgtgctggtcaaagtggcctccagctgagcatcttagcagccctagagccagcacatcctctccatgtgctgcgttggggaaccccttgcagcaagagttgacaagaatggggtgagggtagagagatgagcagagaaaaggaacttagtgttgcagctctgtgcacgtaagggctggtgcagttggcaaaatataaacaagacagaggacaggcttaggaaacgcatggccaagggcatcatacagggaaactgggtgaggctccatgcttccaggcccacagccccgggccttatatcagcagaagccccacccttgttaaacctgaggggccttggaagagcccacagccagtctgtctgggcacttgccgcagaacccacacctgtctgggctcccctgctggggacagtgatgttaaacagtggcctctgatgagcacagtgttcctgtt

SEQ ID NO: 232147 - DNA, 600 bp, Homo sapiens
caatgtgaatgatgtgaatgtacttagtgaccctaagccatatgtaaaatcctgtgcgtattttaccacaattttttaaataaaccttccccaaatctacaaacatgacatctttgagatttgcacaaagcttccatctacagtgaggaagtttcacctcattgyctggaagccccaaccactaaaaattggggtccgaggttctcagtttcttgtcaccccttcactgctcccccacccttactagcctattactgctcccactaacactgccctccaagtactaggcccacagccacagcggcccggcgccgtccccactgccgctctcgagaaccagccatcaacagctccacacaagctctcttttctgttttaccaacagaactgggactggacgggtttaaccccagggctctggcagtttccatttctctgtgttaaaaaagcttttagcctaaacttaagccaagtatgcctccaggaaatacttgcttcttccctgtcccccagggaaccaggcctggggccagacgaaagaagcaaagaaaagggaatttatgcactgaaaaaactggggcaagaaggactgccagctgt

SEQ ID NO: 232148 - DNA, 617 bp, Homo sapiens
gtaactaaacttcttgtcttttaaaaatgatgaatcagcagtatctaatgcatttactttgtggagcgctatagatagttcacaccaaggactatcagtgctctccatactattagaagtagagttttcagtatttttaggtgctaatcagattagaaagccaattccagaaacctcaaaaccaatttaaaaaattcacccttaactagggggatggtgctaagctgttataaactacctgcatgatccaattacctctcaccaggccccaacttcaatatgcgggattacaatttaacatgagatttgggtgggacagagagcgaaaccatataataaggttctccagaaagacaraaaccaatagaacatttacatatatatatacacacacacacacactatatatatatatataaaacatatatataatgtatgtttaaaagtgtcatgtacatatgtgtgtgtgtgtatatatatatatgtataaaatgtgtgtgtatgtttatatatctcacatttattagaattggccttacactattacaaagatgaagtcccatgatagactatatgcaagctgggtaatgagaaaaggcagtagaatgtcttagtcc

SEQ ID NO: 232149 - DNA, 530 bp, Homo sapiens
aaattataatgatcctactttgtctaatgtcacagagtatcaggatgttctatgcctttgctttaaagttttcatatttgtggaacttgaagggttcrtaaatagggactatttgtgaagacctttgattcaggactatttgttacctgtgataaacctaaatatttgtgaatgtctccataatataaccattatttattgaagatacaataaatagtggttccatcatctgtgcatgatagaataaatattccatcatctgtgcatggaacaacttacaaattcctatttgtattcctatggtagggagttttgttttaagtctgggagaaattggataatgtacctctttatttcacaaaatttgggacacgtatatacatttacaattaacttaacaagtgaatgttgagggtgtattttaatttaggcactgtgttgggaattattgacaccaatatcactaggacagagatcttcctatcagagttcaacatctaaaggtagacccagaaaagtaaattattgct

SEQ ID NO: 232150 - DNA, 530 bp, Homo sapiens
aaattataatgatcctactttgtctaatgtcacagagtatcaggatgttctatgcctttgctttaaagttttcatatttgtggaacttgaagggttcgtaaatagggactatttgtgaagacctttgattcaggactatttgttacctgtgataaacctaaatatttgtgaatgtctccataatataaccattatttattgaagatacaataaatagtggttccatcatctgtgcatgatagaataaatattccatcatctgtgcatggaacaacttacaaattcctatttgtattcctatggtagggagttttgttttaagtctgggagaaattggataatgtacctctttatttcacaaaatttgggacacgtatatacatttacaattaacttaacaagtgaatgttgagggtstattttaatttaggcactgtgttgggaattattgacaccaatatcactaggacagagatcttcctatcagagttcaacatctaaaggtagacccagaaaagtaaattattgct

SEQ ID NO: 232151 - DNA, 496 bp, Homo sapiens
cctgttttttatggcattgagatttaaatgagacagtgaaagtgaagagctgcatcattagctctcagattgcagagaatacgtgctaaatataattcctttaaatagtttaggagcaaagaatcacaatacaactcttttgtgtagaacttaaagtaaaaagaaaaaatccagaaagctaaagtttcaagagctaaactaaagtctgttatataaaagtaataaagtaaaaatataacagtactttaaccccagactcaaattttctaagaataagaaaaacaaaacatatcacaagaatttattttggcctcagttaagaatacagagcatcaaaactagtaaaaataaacaaaaaagktcattatataatgataaaaggatcaattcagcatgaggatataacaatgctaaacatttatgtacccaacactagagcacctagagagacaaagcaaatattattagggaaacatagattcaaataaaatcatag

SEQ ID NO: 232152 - DNA, 661 bp, Homo sapiens
tatatagatattttataccatttattcattaataacatttcattcatttcacatatttacacttttacattcagttacaaaaatctcattggattggcaaccctaattcttttggaaaaatatgattgggaasagtaactgtaccagcatttccaaaaaaaattgcattagttaaacattattactgtcagtttgaatttttaaaaattcattgcaaaatcatgacaaaattatttaggactaagtttttataaaattttaaaatttatgctatttatcaatttacatacattttgtacatgctactgtatgaagcatttctcaaacataggagggtgaaatgctacttgtaatggctcattattctccataaaatgaaagtttatcaatataattctcttatggatcattatttgatatcacatttaaagattatttgcctaacctgtggtcataaagattttctcctatgttataggttggataatgtgaagtgactttcagatattaaactagccttgcattcctggaagaaatctcatcactttactcaatttgttaatattttgctgaagatttttatgtcttagcttatgaggaatattagtccatagttcttgtctctctctttctgttattaatgtaatattgcactaaaatg

SEQ ID NO: 232153 - DNA, 661 bp, Homo sapiens
tatatagatattttataccatttattcattaataacatttcattcatttcacatatttacacttttacattcagttacaaaaatctcattggattggcaaccctaattcttttggaaaaatatgattgggaacagtaactgtaccagcatttccaaaaaaaattgcattagttaaacattattactgtcagtttgaatttttaaaaattcattgcaaaatcatgacaaaattatttaggactaagtttttataaaattttaaaatttatgctatttatcaatttacatacattttgtacatgctactgtatgaagcatttctcaaacataggagggtgaaatgctacttgtaatggctcattattctccataaaatgaaagtttatcaatataattctcttatggatcattatttgatatcacatttaaagattatttgcctaacctgtggtcataaagattttctcctatgttataggttggataatgtgaagtgactttcaratattaaactagccttgcattcctggaagaaatctcatcactttactcaatttgttaatattttgctgaagatttttatgtcttagcttatgaggaatattagtccatagttcttgtctctctctttctgttattaatgtaatattgcactaaaatg

SEQ ID NO: 232154 - DNA, 552 bp, Homo sapiens
acatagaacatcctagaatgaaaagataattacatattagctaaataaaatgttaaatgcagtaacgaataatgaattttataaaataccattactattgctttatttttgtttgatcaccaatttactgttaaaattgcccacattaaggaatggttatgtttgctacatattcctgtactattttcaatttagataaatatttctgatcacatcacttaataagatcatcactcaactcttttaatcaaaaaaggcttatgcatctaatattaaatattcaaacacaatttaaagttataaattatttagaaactgcaaaaaaatcacatcaccactttatactgggcataggtgggtttccacaatgatttaacaatggtttgcccagacccatcagtatacatatctgcctacctaagtaagcataatattgtgagtagttttctaaaattctcaatattatctatgaatgttactctctaataaaatctggaattacstttgcaaaactgaagttataagttgctttttgcatatgtaattgtccat

SEQ ID NO: 232155 - DNA, 589 bp, Homo sapiens
gacactacaaatgagagcaacaaaagaaaaaacagataacttggaattcttcagaattaaaaacttttgtgcttcaaagaacaccatcaagaaagagaaaagacaacccatagaattgagaaaatatttacaagttatgtatctgataagggacttgtatctggaatatataaagaacttatacatctcaataataagacaaccaatataaaaaatgtgcaaattatctaaataaatatttctgccaaaaatatatacaaatggccrataagcataacacaagatgctcagcatccttagctaccagggaaatgcaaacaaaaatcacaaggtgatgccacttcacaaccactaggatagctataattaaaaatacagataataacaagttttggagagaatgcagagaaaccagaacacatatacactgctagttggaatgtaaaatggtgcaaccactgtggaaaccagtctagtagttcctcaaaagattaaacagatatactatatagtgcagaaaattctctcctaggtatatacccaagataaacgaaatatacccacttgtatatgaatgttcatagcagcc

SEQ ID NO: 232156 - DNA, 589 bp, Homo sapiens
gacactacaaatgagagcaacaaaagaaaaaacagataacttggaattcttcagaattaaaaacttttgtgcttcaaagaacaccatcaagaaagagaaaagacaacccatagaattgagaaaatatttacaagttatgtatctgataagggacttgtatctggaatatataaagaacttatacatctcaataataagacaaccaatataaaaaatgtgcaaattatctaaataaatatttctgccaaaaatatatacaaatggccaataagcataacacaagatgctcagcatccttagctaccagggaaatgcaaacaaaaatcacaaggtgatgccacttcacaaccactaggatagctataattaaaaatacagataataacaagttttggagagaatgcagagaaaccagaacacatatacactgctagttggaatgtaaaatggtgcaaccactgtggaaaccagtctagtagttcctcaaaagattamacagatatactatatagtgcagaaaattctctcctaggtatatacccaagataaacgaaatatacccacttgtatatgaatgttcatagcagcc

SEQ ID NO: 232157 - DNA, 588 bp, Homo sapiens
  misc_feature (1)...(588): n = A,T,C or G
ccatgccaaaacccaagattttatttcttatcgaaatatataaaaggatctggacagattatatacaaattaataaaatttaagcatattcacaaatgaaaatttttaaaagcttgtcattgtaattgctgatctgaggccaatgttggtttggataagagataatatgaggacagctaacatcttttaataaagaataatgaaatgacacttgcattaactacaacaaaatgttttatacctactgtacttaaataacatgcaatattttgctttgcaaagtatttttatgaaaaatgatgtataactacacgtacctgtcagannnnnnnnnnnnnnnnnnnnnnnnnnnnnnnnnnnnnnnnnnnnnnnnnnnnnnnnnnnnnnnnnnnnnnnnnnnnnnnnnnnnnnnnnnnnnnnnnnnnttctctttaacagcttgaatgtcaggtgaaaatgtyaaacctcaccatcaattgaaaaacacagtgactgtggataatactgtgggcaacgacactatgtttctagttacgtggcaggccagtggtcctcctgagattatattatttgatcctgatggacgaa

SEQ ID NO: 232158 - DNA, 588 bp, Homo sapiens
  misc_feature (1)...(588): n = A,T,C or G
ccatgccaaaacccaagattttatttcttatcgaaatatataaaaggatctggacagattatatacaaattaataaaatttaagcatattcacaaatgaaaatttttaaaagcttgtcattgtaattgctgatctgaggccaatgttggtttggataagagataatatgaggacagctaacatcttttaataaagaataatgaaatgacacttgcattaactacaacaaaatgttttatacctactgtacttaaataacatgcaatattttgctttgcaaagtatttttatgaaaaatgatgtataactacacgtacctgtcagannnnnnnnnnnnnnnnnnnnnnnnnnnnnnnnnnnnnnnnnnnnnnnnnnnnnnnnnnnnnnnnnnnnnnnnnnnnnnnnnnnnnnnnnnnnnnnnnnnnttctctttaacagcttgaatgtcaggtgaaaatgtcaaacctcaccatcaattgaaaaacacagtgactgtggataatactgtgggcaacgacactatgtttctagttacgtggcaggccagtgrtcctcctgagattatattatttgatcctgatggacgaa

SEQ ID NO: 232159 - DNA, 577 bp, Homo sapiens
ctggggctgggccaccttttggtggtcattcattcaaggtttggagcaccatgtccagcctggaactccagccctgcaaagatgggggtgtgacatgcaagcataacccattcttcargagcctgttatatccctcaatcatacccacagcttgtgagttgtatggcacatggagtccccactttatgcccattcgttgtgcccatttttgtacctgttgtccagtgaaatgtgttcccctatcactctcaatggccagagggtaaccacacagggcacataagtgttacagggcctgaatggtgttctgttggttgaccaccctgcaacggtaggggaacaaaaggcctgtggccacgtccacagccattagcacatgtgtataccctagcagcttccgtagtggcctgatgtagtctacttgccacctggtcaagggcacttgccctatcgttactgttgtgtaacactgggcagctgcctctgattagggtatgtctgagcacatgctgggcatttctgacaagcgtcccaaatatcttgcatggtcagggacagatcccaatctatattgacc

SEQ ID NO: 232160 - DNA, 571 bp, Homo sapiens
gtttctaataatgaccggtgcccataagcctttattgccgagagtgtctttacaatatccaaactcagtgcctccttctgcaatgtgagacagtctctgttttgttcaactttggaatcttttcaccatcaggttctcaagcagctatctctgaaaccaactggcttatcctgacatgctcaattctgagtttatgtttcattgtgtttcacctttgcgcttgatctccatgctttgacatggtggtgatttgacaatacaaatggcttcccagaccctatctggaccatccactttgttcctttgctttgaaaatgagtctaaatttgaaggaaattggataaaggaggtaggaaatgtaccatctgggcccttggcaaactgtgttttgtttaaattcttagtcttgacaatttgtctctcttcttttctgatttatttcacagggattacawaaactaacgtggcccatgagctgtgtagcccaaccgtacagtgtactacactttcctcttctaaatgggattgttgaaaccaaagcctgagaggaactaatccaaaattttctttg

SEQ ID NO: 232161 - DNA, 624 bp, Homo sapiens
acttctgtgtttctactgcaagtggattgaacagtccagatatactgatttccagcccatatttmctgcttttaagctcctttggtcttatttccctcttctttctgaaaagttataaaatgaatgaagggcagaatgtttcttgcccaaccatgattcaggaggcagctcagccacagaacaggcaagtgtagcattgcctggaggaaaaggacttgtagaggcaggtcccagatggatccaccccagacttttcaaagaagacacctccttcatcttgtgttctaaaaccttgcaagttcaggaagaaaccatctgcatccatattgaaaacctgacacaatgtatgcagcaggctcagtgtgagtgaactggaggcttctctacaacatgacccaaaggagcattgcaggtcctatttgcaacctgaagtttgtgactctcctggttgccttaagttcagaactcccattcctgggagctggagtacagcttcaagacaatgggtataatggattgctcattgcaattaatcctcaggtacctgagaatcagaacctcatctcaaacattaaggtgagtggaaattatgaaattgatactagcatcccatttgatcagacc

SEQ ID NO: 232162 - DNA, 557 bp, Homo sapiens
aagtcgaggtatgaggccacaagacttaaaaatgggtggagacagtgagatgggaaggatagtaataaggacactgaggatttcctatgcgctagccgctctgtggtttccttttcaaatgttatcgtacttaattctagcaactctaagcgatgagaaatactccagagataaaaaacaaaaagaggtctgaactgctgcagaaggaaaggcaagaggcacgtggagacagcattaaggaacaaggcacacaccaggtttttgtcagacatggaaaaaaccagcttcaagaagaaatcccacaagtctggatctaggcaaattcattgtgaagagcaatagactatgccagggaaagtggttcagcctgtggttagatattgatggctggagtttgggagagaagtcagggtcataggcctagagactggtatttagtgagtgagatctgagggasaaaatagtaagcacagttcgccagtcaaggactatctatcccaatctttattttttgtttttgatttaatgtaacagtagtgcctttcaagtgatgtctt

SEQ ID NO: 232163 - DNA, 634 bp, Homo sapiens
tgcagatttcctaaaactttaaaagttgactctcataaaagtaggcactattatccctatcttacaggtgagaaagctgcttcagaggggccatcatgctctttataacgaagacatattacacagtagtgaagcagccaggattaaaacacagctgcctgattgtggagactaagactttaatcagttaaagcagctggaggctgctagattgctagatgactgagatatggtcttctgtacacaatgacatggaaaatagccatataatggacattcactttcactgcaaattcacagtttacttcctcaaccagggatatttaccagtgagtagaatgtagccagcaggaacttttcattatacataagaattttkgatcattataggtaagaattttggaaaaggatctttgttggaaagagtttcaattagtagcaaaaataagggttagaaattatctgtggatttcatttatctgcattatctcaacttttggccacattctgaatttgttcctcccaacccccaaaaaataggatgtccttgactattccaaaccttttgcctcctccaactctcacccttacctcctgaaaataaaaataattaaaaactgatagaaaaggcatg

SEQ ID NO: 232164 - DNA, 558 bp, Homo sapiens
attataaccatttgttatatcactctcattaacccaatgtaatttcttatgaaagaatacaagaacaccaccataagaacagtttattttgtggtccccagagtccctttgttaaacctcccaggaaagcaaataktcactttcctgaaggtatcatttgggtaattatcttgggggttccaatttttaaatctgtagataaaaactagatgaactctagggtcccccaagttctaaagtatagtgcatcttaattatcttataatttaaaacttgaaacatgggaagagaaggaatcctgcaagagtgtgtcattccaagggcatacttacagaagataaactttgcatgaacattattgatgcagttgcattttgggtgctattgtagataaaggtgcatccttctttaaaaagcttactaataatacagttttcttgggggcaaggacctttttcacacacaaaaatgcctgtgatgtcagatgaacacctaaaaatggaaagagaaactgggaattaggtctattttagaaacacttatgtttcttgttgacta

SEQ ID NO: 232165 - DNA, 593 bp, Homo sapiens
tatggtctctgtgatactatttaactctgcyattgtcttaccaagaaaagccatagatgatacataaacataaacatatgagctcactaaagtacgtttgtgtgcaggatgcaacactacagtgttgggtagaaattgtgatttctatcttcatggcaacaaatggggactagaatgtaaaaatagcaggcaatgaaatagaataaagatacttgaatacaaataatacttcaaaattaaaaagcaacattttagataacctgtttgcagaggacaaacagaaggttaaatgaaagtgtgatggagaatcaccacctttacatctttgcactctttaatagtgccactaatcactggaattcccctaggactatggtattgcctttggtttaatcttttagtagataagggcagttccaaaggcttccactttgtcttcctattataatagccatgagtcaaaaagccaatgtcaagatgctgtaaatctcctttaaggttatgacattcaggtctcttcattagttctggtaaattttttgctgtacaaattaagtagaatcttagcagactatccatttcaattatagggg

SEQ ID NO: 232166 - DNA, 459 bp, Homo sapiens
agtgcctccctagaagaaatgccactggaagtttcttcctagctgtggcctctgttgaccatctgggacctggcttcaggatcatcttaagatctgttttattttcccttgattctrtgtggggatattctttgaagatggtttccaccatgtacttccttgcttggatgtcactaaagtaaaggctcgggtacctgtttagacatgacagaacagcagtcacaggaaaagaccatttttccatttgttctctaggcaaaggccagctggggtaaatcaagactgggctggggagcacctggacctcttttgctctcaagtcttgatttgggaagaaaccaacctgacacttggactcccctcttgaagtgaaacttcattattgcctctcgcctacagttgaagtgaaactgcattgttgcctctcgcctgcagttgaggtgactctcaggtgggctt

SEQ ID NO: 232167 - DNA, 594 bp, Homo sapiens
gtcccaggaagtgggttgtgttttggttgccaaatgcaagagagtatgagttttgagtttttgaaatcagttcaagtcatgggacaggtctacctcattaagtggccattagatttatgatgaaaagatgacgactgtggagtgctgtgtacaggctggccactcactgtagagtgcagagtatagactggccactcactgtagagtcctgaccacaggctggccactcactgtgkagtgctgagcacagtttggccacatactgtagagtgctgagcacaggctggccactcactgcggagtgctgagcacaggctggctactcactgtagagtactgagcacagcctggctgcacactgtaggatgctgagcacagcctggctgcacactgtagggtgctgaatacaggctagccacacgttgtagagccctcagtgcctgctagatgtcattttatttttctttttacctttatcactttgagggctttttcaagtctatggtctttcaggctcaattaattgtaactaagcctctgagacaaagtgcttgttgaatgtcttccactgttccgacacagaaacgcagcata

SEQ ID NO: 232168 - DNA, 592 bp, Homo sapiens
aaacttcctctgtgccaggctccttgtggggactctcttctcatcgcctcctttagtcctcaccactgccctatgaggaagaatgtgctttttaacttcattttacagatgagaaaactgaggcccataaggcgaagttactctctcaagccagtaagcagtaggaattgggatttgcactcagcacccatttgatcccggagtccgctttcttgattgtactctctactgcctcaccttcaatggcttcctctaatggaaaagcctgccctcaccctaatgratactctcagctgggcacagttaagggatgacctctgtgcatctaatgagttcatctcaatccctccccagggtacagatgtgttgtgtaacttgggcatcgggaagtccaggacggagcaaaacagaggagggtgctctcccagacctgtatcatccacctccgttatctcccctcacacagactcaagaattcagatcccacctatgttgccttggtattctaacaaacatctctcatgtttaagctaacatgtcctaagcattatgttaagagggtttcatgcactcaatcatgtagaacttttat

SEQ ID NO: 232169 - DNA, 592 bp, Homo sapiens
aaacttcctctgtgccaggctccttgtggggactctcttctcatcgcctcctttagtcctcaccactgccctatgaggaagaatgtgctttttaacttcattttacagatgagaaaactgaggcccataaggcgaagttactctctcaagccagtaagcagtaggaattgggatttgcactcagcacccatttgatcccggagtccgctttcttgattgtactctctactgcctcaccttcaatggcttcctctaatggaaaagcctgccctcaccctaatgaatactctcagctgggcacagttaagggatgacctctgtgcatctaatgagttcatctcaatccctccccagggtacagatgtgttgtgtaacttgggcatcgggaagtccaggacggagcaaaacagaggagggtgctctcccagacctgtatcatccacctccgttatctcccctcacacagactcaagaattcagatcccacctatgttgccttggtattctaacaaacatctctcatgtttaagctaacatgtcctaagcattatgttaagagggtttcatgcaytcaatcatgtagaacttttat

SEQ ID NO: 232170 - DNA, 572 bp, Homo sapiens
ttcttcaagtgtaggaacactgaccttaccaaaagcccaccagttccatcagtcatggtgggatccaggagacttctccaatagaaatactcccatagctaagttttataaaagacatagttatctgaaattttaaaataactatactcagataatggccaggtgcagtggctcacgcctgtaatctcagcactttgggaggccaaggcggggagaatggcttggcctgggcaacatggcaaaaccctgtctgtacaaaaaatacaaaagaataaaccaggtgtgctaatgcacacttgtcccagcttttcaggaggctgaggtgggaggatcccctgagcccaggaggctctacaaaatacaaaacttagccgggcatggtggcgcacctgtagtcccagctactcaggaggctaacstgggaggatggattgagcccaggagatcgaggctgcagtcagctgtgattgcaccactgcactctagcgtgggtgacagaacaaaaccctgtcccccacctcccccatccccaaacaaaacaaaacaaatttttaattaaaaaattaaaaaac

SEQ ID NO: 232171 - DNA, 592 bp, Homo sapiens
caatttaaaaatggcagcatttaaatgcaaatatacatttgtctaatcccaaagcccatgcatttaattactatgcaatatcaataatcatgtttggtaggaaagaatattaaaggaaaactattaactttgtcagattttattagtatagaattaagggaaaacaaaatgagttttaaatggtgtgaattaatgwaccagtgaagggtagtcaacattacaggagtatgaaaagcgcattatagttgtgatcaataaactagcagagcattatgtttacaggagcagttacattagaaaaagaataattcgaaagttgttttatgaaatttcagcctctcttccagaacagatgtgattgctaaaggaaataatataatctaattatattattaagtaatgaatatagaagagtaatcaataatcactctgaatttacccagtttatctatgaaatagatatgattaagatactcatgacaaatacaaattaatgtttatactcttataagtatcttaaagaaggcaaaaacaaaattcaagttattgaatatgcaattttcacactgaactaactataactgtttagtcc

SEQ ID NO: 232172 - DNA, 592 bp, Homo sapiens
caatttaaaaatggcagcatttaaatgcaaatatacatttgtctaatcccaaagcccatgcatttaattactatgcaatatcaataatcatgtttggtaggaaagaatattaaaggaaaactattaactttgtcagattttattagtatagaattaagggaaaacaaaatgagttttaaatggtgtgaattaatgaaccagtgaagggtagtcaacattacaggagtatgaaaagcgcattatagttgtgatcaataaactagcagagcattatgtttacaggagcagttacattagaaaaagaataattcraaagttgttttatgaaatttcagcctctcttccagaacagatgtgattgctaaaggaaataatataatctaattatattattaagtaatgaatatagaagagtaatcaataatcactctgaatttacccagtttatctatgaaatagatatgattaagatactcatgacaaatacaaattaatgtttatactcttataagtatcttaaagaaggcaaaaacaaaattcaagttattgaatatgcaattttcacactgaactaactataactgtttagtcc

SEQ ID NO: 232173 - DNA, 516 bp, Homo sapiens
ctaaaccactgaattgaggaaaattatcgaactgaatgttctcagcaaatattttcttcaggtttcaacatgctggatctcatttaatacctaaattgtcattgttttctttctattagatgttaaatcatgcagaaattttatttcatctttttgacrcattttcctgctcctgcaagcatagaagattgttttctttgccaaaacttgcctaacacatgaaaaaatttttcaaagtagctagaggcattaaggcttattttgttgttgtggattttttttagtaatctgataaggaatgtagatatgattaaataaaaattagtgtattttgagcatacgaaattatatctcatttttaaaaataacagggagacttagctaggactcactgagcagatggaagcattgatgatcaaaaaatgtaatttatgtacataaaactgcataatatcccagaataatatcaaatatacataaagttatttgatgcttttattgaaatgtattaaaaac

SEQ ID NO: 232174 - DNA, 591 bp, Homo sapiens
tcccttgtttagctttaatgatacttctttttagtccagtacatgatagagtttagtatgacatctatgtttgttcaaaatagaagttacattcttccaattttgcctgaaaagttttgtaagtagattgagcttactaataatttgtcaatatattgttaataattctgctacaacaagaaatgtaggaatatctatttcttttttctataattgcagaatgaccttctgtatatccatttttatttcatatattttaaaattgtattattagttaatatcagttatcaatttataccttctaaagtttggtcatttgaaaattttgaattattttactttcttgcttttgatgtacatgtgctcttacaatttattttgattagtatgtatttcccttctctttagctttagttggttggtttcctttgttgayatttcagatttttgtcaaaaaaatgctgactttcattttcaggaatatgttgcgttatattagattaatttgaagtacatgtattttaacgtgtgtagtgttaaggaaattgtgaaaggacagagaaaaatagcaactctgtattatgtaaggca

SEQ ID NO: 232175 - DNA, 591 bp, Homo sapiens
tcccttgtttagctttaatgatacttctttttagtccagtacatgatagagtttagtatgacatctatgtttgttcaaaatagaagttacattcttccaattttgcctgaaaagttttgtaagtagattgagcttactaataatttgtcaatatattgttaataattctgctacaacaagaaatgtaggaatatctatttcttttttctataattgcagaatgaccttctgtatatccatttttatttcatatattttaaaattgtattattagttaatatcagttatcaatttataccttctaaagtttggtcatttgaaaattttgaattattttactttcttgcttttgatgtacatgtgctcttacaatttattttgattagtatgtatttcccttctctttagctttagttggttggtttcctttgttgacatttcagatttttgtcaaaaaaatgctgactttcattttcaggaatatgttgcgttatattagattaatttgaagtacatgtattttaacgtgtgyagtgttaaggaaattgtgaaaggacagagaaaaatagcaactctgtattatgtaaggca

SEQ ID NO: 232176 - DNA, 415 bp, Homo sapiens
tttattttctagaacatgttgactttttccatttctctgctcaaaaactaaaatagatccccattacttgtatgaaatggcatcttgtctcctaatattaaaggttttgaacaatgtgacctcaatccctttccttattgtagcaaccataacctctatccccatccagtataaaaggaatataattggatattcccatctctaatcctttagttattctctcactttttccagaaatcctttaactatatatatgcytatagaaatctgaggcagtttttatctttaactaaaacccctcctccttgtgaaatataattaggtttttcctaaagaaataaatataaaattcatctgtctaagagaccatgtttcataatagttttatgtaaatgtcttgctaccctactagatt

SEQ ID NO: 232177 - DNA, 604 bp, Homo sapiens
actatttctttaagttttctgcttctttctctattcttcttgaacacctgtaatttgaatatttgctcttttgatgctgttctataaatctcataygctttcttcaacctttatattctttttttttttaatctggctgtatgttttcaaataacctgtcatagagtttacagataccctcttcttttttattaattctgctgttgatgatatttattatatttttattttactcattgtatatttcagcccataatttatttttgacttaaaaaataatgtcaatctctctgtgagacttccaatttgagtcactgattatattcctgatatcattgaattttttctcagatttttttcttattttgctgagctttctagaaacaattattttgaattatcaggcagtttctctatttccatttctttgtgtgattagtgtattcttttgataatattacctccttggctttttatgtttattgttgctttgcactgatgttcgtgcattttgtggagcagtcactttttgcagactttaccagcaagtttcactttagaaagaccttctcctatgagaaagtgagatgtgtgctttctgagt

SEQ ID NO: 232178 - DNA, 604 bp, Homo sapiens
actatttctttaagttttctgcttctttctctattcttcttgaacacctgtaatttgaatatttgctcttttgatgctgttctataaatctcatacgctttcttcaacctttatattctttttttttttaatctggctgtatgttttcaaataacctgtcatagagtttacagataccctcttctttttkattaattctgctgttgatgatatttattatatttttattttactcattgtatatttcagcccataatttatttttgacttaaaaaataatgtcaatctctctgtgagacttccaatttgagtcactgattatattcctgatatcattgaattttttctcagatttttttcttattttgctgagctttctagaaacaattattttgaattatcaggcagtttctctatttccatttctttgtgtgattagtgtattcttttgataatattacctccttggctttttatgtttattgttgctttgcactgatgttcgtgcattttgtggagcagtcactttttgcagactttaccagcaagtttcactttagaaagaccttctcctatgagaaagtgagatgtgtgctttctgagt

SEQ ID NO: 232179 - DNA, 604 bp, Homo sapiens
actatttctttaagttttctgcttctttctctattcttcttgaacacctgtaatttgaatatttgctcttttgatgctgttctataaatctcatacgctttcttcaacctttatattctttttttttttaatctggctgtatgttttcaaataacctgtcatagagtttacagataccctcttcttttttattaattctgctgttgatgayatttattatatttttattttactcattgtatatttcagcccataatttatttttgacttaaaaaataatgtcaatctctctgtgagacttccaatttgagtcactgattatattcctgatatcattgaattttttctcagatttttttcttattttgctgagctttctagaaacaattattttgaattatcaggcagtttctctatttccatttctttgtgtgattagtgtattcttttgataatattacctccttggctttttatgtttattgttgctttgcactgatgttcgtgcattttgtggagcagtcactttttgcagactttaccagcaagtttcactttagaaagaccttctcctatgagaaagtgagatgtgtgctttctgagt

SEQ ID NO: 232180 - DNA, 542 bp, Homo sapiens
gggaaaggtggtagctcctttcccaaagtaaatctgaccaattcttggggatggttgacgtgcagctgcattgtcctccctgtagatttacaccaggaatggctgttcgtyacttcagtggaagagacgcccatgtcctttgcagtgcaggccagtggacaccacactggttctcatcatgtgtttgatacctattacctacattttttttttctcggttcctaggcatctctttgtgtctcatgtatgctgatctctctggcgattctttctatttgtatattctctattttcctgctccgctgtgttattccaaatgctttaaggagttcttgagccctctaagggctattctggttagtgaatgctgcctgtatttgttttttgtttgattgttttttgggggaattgctatttgtttcctccaaaaatcatgttgaaatatgactgccattgtggtggtgttgggaagtggcacctaatgtaatatgtttgagttatgggggtagatccctcattaatagattaatgccagtcatggg

SEQ ID NO: 232181 - DNA, 469 bp, Homo sapiens
tgtaaaatacaaacatttaaaatgatggttcaaagaaatgaaattgagtattttctcctgaaaatgtggcttcaacttaatacagaatattttaatgatgccttttaaaatcaaatgtattttatattataagcaacgagctaaaaaaggatttctacttaccaatgtaatttggaagcaggatggacacaaagacataacttgaaagctaaaaaatgaaagtacagagacataattagataaaagactttcagaatgtatgaaacatacagatggaagtgayagacgcaggaaatctattacactgccttctctatcagctattcaatatcagtttagtctgagaaaggccaatatttgtatgatactttaaaaatataaagcgtatacaaatacgagaaaattattatccttctctcttaaatcctcagtcttccctttaatgagacttggatgtaacagctcaaag

SEQ ID NO: 232182 - DNA, 602 bp, Homo sapiens
tattctgcaatcatctttctgatcatttaccactttaataaaaaacttaatgttgtaaatttgggtaactttatttttaagcatcagtcagttcatgtgtaagctatttagaaatagaataagctgtagagtactgaaacttcagttagcaagtttggaaaaagtaaaagttcttttttctacttctcagcatacatggagaatcttaactaataaatgtcaaatgaaaggcaaagattaatgggtcagtgaaattaatttttacatttaacttggcacawatgcaaatagattcattaatatttgaagggattattagcaatcacataatggtttctttatattctaattattcccaattgtgtaattactttcaattcattcttttattattttactttgaatacagtgttactgtgaaaatatgtattacaaatgtttacttctaatgcaatttttgttattttaactaactaatgatattgtgaataatgtggataaaatttacaggaattttgtgaaacagacctagaactgagcatttgttattgaaaatatttcttagtactaagatccccaaatcatatattatattgtaaagg

SEQ ID NO: 232183 - DNA, 602 bp, Homo sapiens
tattctgcaatcatctttctgatcatttaccactttaataaaaaacttaatgttgtaaatttgggtaactttatttttaagcatcagtcagttcatgtgtaagctatttagaaatagaataagctgtagagtactgaaacttcagttagcaagtttggaaaaagtaaaagttcttttttctacttctcagcatacatggagaatcttaactaataaatgtcaaatgaaaggcaaagattaatgggtcagtgaaattaatttttacatttaacttggcacatatgcaaatagattcattaatatttgaagggattattagcaatcacataatggtttctttatattctaattattcccaattgtgtaattactttcaattcattcttttattattttactttgaatacartgttactgtgaaaatatgtattacaaatgtttacttctaatgcaatttttgttattttaactaactaatgatattgtgaataatgtggataaaatttacaggaattttgtgaaacagacctagaactgagcatttgttattgaaaatatttcttagtactaagatccccaaatcatatattatattgtaaagg

SEQ ID NO: 232184 - DNA, 596 bp, Homo sapiens
cttgttggtaaaagctctcaaaaatttgttcccaccatagcctcctttccgaggcttccttctccaactttctgggactccatcattatgtcctttctctcagatttcttctctgtgatatcttaaataactgtwccttttttaaaataaagtaaagcaacttttttaaaaaaaagtcatctctgttttttcgaaacttgtaatgagagctagaataaattaggtgtacataccagagactttaaaaatgaacaattggaaagttccacatatttgttcactgttcaacataccaattagaattaattagtgtatgtaataaatcatactctttcctttgggtagccaagatatttatataatgctagaccaatgggtctgaaataggagacttcaaggtagtcaaagtatctgataattgattgaattctttagtaactactaaagactcatatagttttgttttaatgtgcaaatacatcttctctaaaaggagaacactaaatgtattttaaaagaccagctatgttatgaaagctaatttccgcttaagctttcataaatatgaatacaattacatataaacaggaagttct

SEQ ID NO: 232185 - DNA, 596 bp, Homo sapiens
cttgttggtaaaagctctcaaaaatttgttcccaccatagcctcctttccgaggcttccttctccaactttctgggactccatcattatgtcctttctctcagatttcttctctgtgatatcttaaataactgttccttttttaaaataaagtaaarcaacttttttaaaaaaaagtcatctctgttttttcgaaacttgtaatgagagctagaataaattaggtgtacataccagagactttaaaaatgaacaattggaaagttccacatatttgttcactgttcaacataccaattagaattaattagtgtatgtaataaatcatactctttcctttgggtagccaagatatttatataatgctagaccaatgggtctgaaataggagacttcaaggtagtcaaagtatctgataattgattgaattctttagtaactactaaagactcatatagttttgttttaatgtgcaaatacatcttctctaaaaggagaacactaaatgtattttaaaagaccagctatgttatgaaagctaatttccgcttaagctttcataaatatgaatacaattacatataaacaggaagttct

SEQ ID NO: 232186 - DNA, 596 bp, Homo sapiens
cttgttggtaaaagctctcaaaaatttgttcccaccatagcctcctttccgaggcttccttctccaactttctgggactccatcattatgtcctttctctcagatttcttctctgtgatatcttaaataactgttccttttttaaaataaagtaaagcaacttttttaaaaaaaagtcatctctgttttttcgaaacttgyaatgagagctagaataaattaggtgtacataccagagactttaaaaatgaacaattggaaagttccacatatttgttcactgttcaacataccaattagaattaattagtgtatgtaataaatcatactctttcctttgggtagccaagatatttatataatgctagaccaatgggtctgaaataggagacttcaaggtagtcaaagtatctgataattgattgaattctttagtaactactaaagactcatatagttttgttttaatgtgcaaatacatcttctctaaaaggagaacactaaatgtattttaaaagaccagctatgttatgaaagctaatttccgcttaagctttcataaatatgaatacaattacatataaacaggaagttct

SEQ ID NO: 232187 - DNA, 596 bp, Homo sapiens
cttgttggtaaaagctctcaaaaatttgttcccaccatagcctcctttccgaggcttccttctccaactttctgggactccatcattatgtcctttctctcagatttcttctctgtgatatcttaaataactgttccttttttaaaataaagtaaagcaacttttttaaaaaaaagtcatctctgttttttcgaaacttgtaatgagagctagaataaattaggtgtacataccagagactttaaaaatgaacaattggaaagttccacatatttgttcactgttcaacataccaattagaattaattagtgtatgtaataaatcatactctttcctttgggtagccaagatatttatataatgctagaccaatgggtctgaaataggagacttcaaggtagtcaaagtatctgataattgattgaattctttagtaactactaaagactcatatagttttgttttaatgtgcaaatacatcttctctaaaaggagaacactaaatgtattttaaaagaccagctatgttatgaaagctaatttccgcktaagctttcataaatatgaatacaattacatataaacaggaagttct

SEQ ID NO: 232188 - DNA, 431 bp, Homo sapiens
gcaaaggaaacaagttcatctatgttttcctattgaccatacatctttttccccatgtttcagattctaaagcaaattgtgcaaattttcattttttaaataaattgtttwaaaaaagttttaaaaaagattcgttagatttctaatcactatcctctaaaccacttatccaagtgaaaataaatctagcataatttagtggcttgttttacatcgatttatgtatacttggggaaggaatttatttggagaaatattaaacagaagacaccagttggcagccaggtgttacgtactagactagtatttaggattcacttcttgaaaaactgaattcttcatgtaaaaagatattggccaaaatgggtttgagggcaattaaaatgctgtgtaacaatgcctctgacagcatatacatgcattattaattt

SEQ ID NO: 232189 - DNA, 431 bp, Homo sapiens
gcaaaggaaacaagttcatctatgttttcctattgaccatacatctttttccccatgtttcagattctaaagcaaattgtgcaaattttcattttttaaataaattgtttaaaaaaagttttaaaaaagattcgttagatttctaatcactatcctctaaaccacttatccaagtgaaaataaatctagcataatttagtggcttgttttacatmgatttatgtatacttggggaaggaatttatttggagaaatattaaacagaagacaccagttggcagccaggtgttacgtactagactagtatttaggattcacttcttgaaaaactgaattcttcatgtaaaaagatattggccaaaatgggtttgagggcaattaaaatgctgtgtaacaatgcctctgacagcatatacatgcattattaattt

SEQ ID NO: 232190 - DNA, 594 bp, Homo sapiens
tcagaggtttttatagtgacgtgaagctatgaaaccattgttgttgggctacgagacagtagccagtacagtaaagctcagaggtggtcacatttagaatacagtttattaaatcagagaaatatgctgccatttttagattaagtactttaataacaaaatataaatctaaaaaatgcataaagagaaaacctgcaataatataatgtgttattaaaatgccagaatatcttaagatcaagatctgtcattgatttcaaaaacaatattttgatacttatagaataaacttttcctccaaattatcctttgtgagaaatgtcatggtcacactgtagamatgatgtgagctgggaaatattagtgtgccatcttcggaaaatacagtgtgccacatagaacaaagccacactataacaggcaatatttcctgagaaacacctcttggaaactagtgaaaattaaaacttggccataagttgacagatggcaattggttgaatttgaatttagtgaacaaaatagattcttagcaatcaatcataaaatcaagtttgtgaatagaacattattaagtagaattgatatatttag

SEQ ID NO: 232191 - DNA, 594 bp, Homo sapiens
tcagaggtttttatagtgacgtgaagctatgaaaccattgttgttgggctacgagacagtagccagtacagtaaagctcagaggtggtcacatttagaatacagtttattaaatcagagaaatatgctgccatttttagattaagtactttaataacaaaatataaatctaaaaaatgcataaagagaaaacctgcaataatataatgtgttattaaaatgccagaatatcttaagatcaagatctgtcattgatttcaaaaacaatattttgatacttatagaataaacttttcctccaaattatcctttgtgagaaatgtcatggtcacactgtagacatgatgtgagctgggaaatattagtgtgccatcttcggaaaatacagtgtgccacatagaacaaagccacactataacaggcaatatttcctgagaaacacctcttggaaactagtgaaaattaaaacttggccataagttgacagatggcaattggttgaatttgaatttagtgaacaaaatagattcttagcaatcartcataaaatcaagtttgtgaatagaacattattaagtagaattgatatatttag

SEQ ID NO: 232192 - DNA, 554 bp, Homo sapiens
ggggtttggtgtagagattatttcatcacgcgggtaatgagcacagtacccgataggtagtttttcaacactcaccttcctcccatcctccaccctcaagtagtcccaggtgtctattttgcccttctttgtgtccatgtgtatacaacgtttagctcccacttgtaagtgagaaattgcagtatttggctttctgtttctgtgttactctgcttaggatgatggcttccagctccaaccatgttgctgcaaagaatattattttattcattttttatggtttcatagyatcccattgtgcatttgaaccccattttgtttattcagtccaccactgatgggcatctaggttgattccatgtttttgctattgtgaatagtgctgtgataaacacacaagtgcagatatctgtccaacaaaatgatttatttttctttgggtatataccctgtaatggcattactggatcacatggtagttctattttcagttctttgagaaatctctatcctgttttccatagagattatactaatttgcactcccaacagca

SEQ ID NO: 232193 - DNA, 509 bp, Homo sapiens
agatagcaagatccttcagtctctggtgaataaaggataaatcaatgtgtttcagattagccatcccatttaggagtaacttggttccagtagtcattcttgatatttgtttcttaatgtatgttttataaattccaggagcaccaatgaaagatgcatatacacattcattcttgcagaatgtcttaaaacactcaaagacattttgaaatcttctcatggcctcctggttgtccatgggctctagaataagaacctctgcctaaaaagattcttgaaatctaccttgctgatgtacatctcgcaatgctgaaattagtgtcttttttatcagtagaaatcttcctaagatattgctcacatacataatgacaatgcaaatagacaatacagacagtacttcattcatgaatatcaaaaktgtttgtaaaacttaattaaaattagcacaaaagagatcaaattacaaaaagagtgcaatatttttaaaagtagaaatctaatgttat

SEQ ID NO: 232194 - DNA, 537 bp, Homo sapiens
actgcggtatatccagacaatgaaatattattcaacagtaacaagaaataaactttcatgccatgaaatgacatgtagaaacattaaatgcatattactaagtgaaagaagccaaactgagcagggtacttactgtatgatttaaactatataatgttctagaaaagatgaagctaggaagacagtaaaaagatcagtgttggccagcggttaggaggaagggagggatgaataagagaagcacagaggatttatggagcagttaaaatactctctctgatattataatagtggatacatgtcattatatattttttttaatctatagaatattcaacaagaagagtgaaccttgatttaaactaaggatttgtgatgataatgatatgtcaatgtaggttaatcaatgtaacaaatgtagcactttggtgtggggatgttgataattggggagatcatgcatgtwtggggcaggagtaattggtaaatttctgtaccatcttttcaattttcctctgaacttgaaactgttctaaa

SEQ ID NO: 232195 - DNA, 505 bp, Homo sapiens
tccgtgactggcgccaaagttttgggtccacggataaaacatgtctcctttgtctctactggaaaatgaaaggaattgaaattaagagaagggagagattgaagtgtggccccaagactgaaaggagaaagaggttgagggatagtgagagaggttggagaagagattaaaaagaggccgcttaccggatttgaaattggtgagatgtttcttgggctggtcggtctgaggacctgaggtcgtaggtggatctttctcatggagcaaagaacaggagtacaggggattgatctcccaagggaggtcccccagtccgagtcacggcaccaaatttcatgtgcgtccrtgtgaagagaccaccaaacaggctttgtgtgagcaacatggctgtttatttcacctgggtgcaggccggctgagtccaaaaagagagtcaacgaagggagataagggtggggctgttttataggatttgggtaggtaaaggaaaattacagtcaaaggg

SEQ ID NO: 232196 - DNA, 578 bp, Homo sapiens
gcatacatagaatatatataatacacacatatgcacatatacatatatatgatataaagcaattatgcttcatgctagtctcctgcaagctgtttcatatttttttcttttcaaacaagttaggtttaaaaacattttatttccctgaaaacttgttttcatagaattatacagagctatgttctttcatgcagaaacaaaaagccacatgtgactatttgaactaatagttaaattaaaactaagtataattaaaatgtatgttcttaagtcatactagccacatttcaagtgctcagtcgtcacatgtgaatgtgactactcatattagacattacatataataaatattttcatcttagaaatttctattggccagcatgtctatgtagattaagagcaacacaatagactktttgaatcatattatcataatttctgagtgacttagagatgcttttaaacttttctaggcttcaacttctctgtgtgtaaaataaagatgatagcaatatcggtatcataggacttacagcagaataatttactacatgtagaatcctttgcagagtgatgag

SEQ ID NO: 232197 - DNA, 466 bp, Homo sapiens
acagtatagcgatcccagtaggttataacactattgagaagattataactcatgcaatttgggtcaccttttgtgaggcctgaactttgaagatactatttgtcttagaaaaatgtaggctgatgtaaatttaagaaacacaaggattcttcacagagatatctgtaaataattattttggcttcatttaaattgctaatatattttattttagggttactttaatatgaaaagcctaagatggttacaccaagggctgtaagttttaggtggagtggcataactgtttggggtgatgatataggaataatatttttagtgatgaaaaatctgacgaagacactaccgattgataggcactygattgagttaattaggaagggattgttttcattaataatagagttgtgaagagaggttgtcctatcagtgcgaggaaaatgatacggtgctacagacagctgtc

SEQ ID NO: 232198 - DNA, 466 bp, Homo sapiens
acagtatagcgatcccagtaggttataacactattgagaagattataactcatgcaatttgggtcaccttttgtgaggcctgaactttgaagatactatttgtcttagaaaaatgtaggctgatgtaaatttaagaaacacaaggattcttcacagagatatctgtaaataattattttggcttcatttaaattgctaatatattttattttagggttactttaatatgaaaagcctaagatggttacaccaagggctgtaagttttaggtggagtggcataactgtttggggtgatgatataggaataatatttttagtgatgaaaaatctgacgaagacactaccgattgataggcactcgattgagttaattaggaagggattgttttcattaataatagagttgtgaagmgaggttgtcctatcagtgcgaggaaaatgatacggtgctacagacagctgtc

SEQ ID NO: 232199 - DNA, 605 bp, Homo sapiens
ttgtgtgaatggcttgcaatcgtagttgttccttggcttcaactggtatcattctaatctctgcctttattgtcacatggacttctttctyctctttctccttcctctatatctctatgtttctgtctctctctgtagtcaccctctctttataaggactttaggtgctgaatttagggtccactctaattcaatattatatcatcttaactttattacatctggcaaagactctattttcaaagagagtcatattcacaaactcccactgagcaagattttttggaggaccctattcaacccagtagatcacatcatatcgtatcatattatatcttataattttgtatcatatgatatgaaagagatttttaagcaattcttgctttattaaagtgatgagcaggtaaacggtaaggaacaggtgtagggttacctatatgtcactacttcaacctcagcattagtggcattttggattggatgatccttcattgtgcagaggtattttgtgctttggaggatgtttggccacatcccttgcctctatacactataatccagtacccactggtgagttatgacaatcgaaaatatctccggat

SEQ ID NO: 232200 - DNA, 563 bp, Homo sapiens
  misc_feature (1)...(563): n = A,T,C or G
actcataatcttttgtaatactgnttgccccatattctttgagatccagggaagaatgtgctctttcaggatctattttgtggttgaaagggaaaattggatggagttctatgtatccaagcttttatggtgcagttttaaacagggttgggattggttagtatgtgatgttcttctgtggtgctgtttggccccagtactctctggagtctggggaggttttagcctttaaaaattatactgccatggaaactactttacctgaaattttgattcacagccttcagtagattacctattgtgggaaacaacgtttaaccatttgaacatgtttatagactggtgagtttgtattgctgtctcatgactgcagtttcaaggtaaaagctatcraatctttgcgtatatacatgtttggatgtgtttatgtgtatgtacatttattatgtcatatgttatgtctaccaaattgacttataaatgaaagagcacttatatattaagtaaatatatccaagcattttttaactcacgtgacttaagtaaatcattaataaacaggc

SEQ ID NO: 232201 - DNA, 578 bp, Homo sapiens
ttctcactttttatttttttctaattttattgccaaccatttcatacaactgccgcatctttcatttaggtatagtactgttttcatcttatttgaaacagtaacatctttctataaccaaatgacatgaggcaaatatttaacatgttatgatgcttactatggtctgaatgtttgtatctctacgaaatttacatgttgaaatccaggatttcaacaaatgaatgggtttcattcacatgaattaaaaaattcatatattattaggaggtgaggycttttgggatatgattagttcatgagactaatatcaccacgaatggtgttagtatccttataaaatatgccaaagggagctcatctgccccttttgccataagaagacacattaagaaggtaccatctatgaactagaaagtggcccctcaccagactcccaatctgtaagtgatcttggactccccagcccccagaactgtgatcaataaatatctattgtttataaactacccagtccagtttatggaattgttatagcagaccaaacaagccaaggtaatgcttcatggtccatttgt

SEQ ID NO: 232202 - DNA, 581 bp, Homo sapiens
gctctcaacccctcatgggaacgggaacacgcaggtgagtgagtgcagcagccaggatgaactccaagtggccctgcagcagcatctagrgggatacccatgaccccaaacacccagcatgtattagctttgccatccacagatggtttcagtgtttaacagctcagtggagggtcagggtgacagccttttgcaccctccatcttggtatctgagttcttgtcctggcatccaggacacatgaatggactgaagggtggcgaatgtgtaggattttattgagcagtggaaatggctctcagtgggatggggagctggaaagggaatggagtgcaaaggtggtctttcctggagttcggcagtctgcagtcaaactcttctccaaagtctcactgtcaagccattcctctgaagtcaagatggttctctccaatgtctggctgctttttctccactctccctctcttctcctccacttttccactctgttgtgctggtgcccctctgccagtggagcctagggtttttatgggtacagaatggggggtgggatgggccaaaaagcaacattcaagtaggaa

SEQ ID NO: 232203 - DNA, 572 bp, Homo sapiens
ctgatgctcaacaaccaaagtaacttttaactatttacaaagagaaataacatttcctccaaataccttcatactactaaaatttyagagatgaggcaaaatgatgtacagattttaataacacacaaaagagttacgtgtactaattttgggataaaattgtcagtgaaaatgttttgaatactataagaatattgtcgaagattagccatgagtttatagagctatatttaatgcaaagtttgtttttaacttttaagttcaggggtatatgtgcaggcttgttacatagatagacttgtgtaatgtctatctgtataggggtttcctatacagattatttaatcacccaggtagtaagctcagtaccaattggttactttttctgatcttctccctcctcccaccccccaccctgcaataggccctagtgtgtgttgttcccctctatgtatccatgtgttctcatcatttagctcccacttacaagtgagaacatgcagtatttggttttatctttctgccttagtttgctaaggctaatggcctccagctccatccatgcacctgca

SEQ ID NO: 232204 - DNA, 572 bp, Homo sapiens
ctgatgctcaacaaccaaagtaacttttaactatttacaaagagaaataacatttcctccaaataccttcatactactaaaattttagagatgaggcaaaatgatgtacagattttaatarcacacaaaagagttacgtgtactaattttgggataaaattgtcagtgaaaatgttttgaatactataagaatattgtcgaagattagccatgagtttatagagctatatttaatgcaaagtttgtttttaacttttaagttcaggggtatatgtgcaggcttgttacatagatagacttgtgtaatgtctatctgtataggggtttcctatacagattatttaatcacccaggtagtaagctcagtaccaattggttactttttctgatcttctccctcctcccaccccccaccctgcaataggccctagtgtgtgttgttcccctctatgtatccatgtgttctcatcatttagctcccacttacaagtgagaacatgcagtatttggttttatctttctgccttagtttgctaaggctaatggcctccagctccatccatgcacctgca

SEQ ID NO: 232205 - DNA, 422 bp, Homo sapiens
tattgacttttagactgaatgaaatatattgtgaagatttgtattatattgttcacatgatacatgaaacctgttttgtattatctcagttaaaatcaaacatatgtgtaatataacttgytgaaaatgcaaatgtaattgtccaagacaatgtcatctaaagaacatatctattcattgtattttgaaaatacaatgaataaatctgtcaattatatagtgcctcaaaccataaatgttatttaaatatggattaagaaactaagaggatttccagattaagatccaagagctatttatgtgttgtgaagacatgaggagttacttactttaagtttgtttcaagtttgtcagccagggtccacatgcagagtagaaagcaccctagattttaaatggaattaaatttaattagtatttta

SEQ ID NO: 232206 - DNA, 582 bp, Homo sapiens
cataattttcttttttaaagaattgattctcttttctcccctcaccatccatctctgatttctggggaaaggtgatacacaagacctacttcaggcgaaatacttttggataaagctgatcagggttcactcagaaatatctgagttgtaaatttcttgtgttatcttttgtatactggaagggaaaaaagagaacattgatgggaataaaactaaaatacaggcttgttatctaygtcaaagaaaatggtctaattataacatgaaagaaaaattgatagaaacattcaaaaggggaaggttaattaaccaatcaatattaaaatgacatccaacttaaaaagaaaaatctactgtcagttaattgtctttttctttcatttgaaagcattatttaaaatggtctgattccatataaaattctttgctactgtttagaacctgggaatctcacacatggtatttgtttctataaataacttattataacaaacatttctagtttgtatttacattaaacaaatgtattcgagtagaagctaagtcaacagtttacccaagtttcataatggagaataccta

SEQ ID NO: 232207 - DNA, 560 bp, Homo sapiens
acttccatttctttagcatacagatggcctatgtctataaagaagaccatataaaatgaaaaaataaggttaacttgagatagaatttttctcagcatcaagattcataaaagagtggtatgatatcttcagactatgcaaagattccagaattacccgacctaggatttttttttttttggtcaggaggtgaggsaaaatgtaacaataaagcacaaatcctaaaatataaaattcatatctcaagtttcaaaataggaagacctatttgatggtgaaaacttggaacaaatataagaaaagtcaaaataaataatgcacacttgctgtttcggtggtgacaaaagatcaagcgctgagtgctgtacccacttgcaataggataggcagctggtaagaggcctcctaatggtccctgcctcctggtacttaacacccttgaatatttccttccctttgaatgtgggctacatttagatgtttccttttcatgaaaagagtatgacagaagacaatttcaagtatagactgcaaaaagaccatgtctttattcttgtgtc

SEQ ID NO: 232208 - DNA, 574 bp, Homo sapiens
ttactctctttgtgaataacatcttagctgacataattgttcactttgttcactgaaataatacatttttctctaatatgggacatgttctacatacttttaaatayataaaatgagaaaatatgttataattccaatattccttaagaatttctgaaaaaaatgagaaaaaaattcgtaaagtattgatttttcactgtaggatgaaaaaatgaaaatataacagggaaaatgaaaactaaaacacataaatttgttataactataaggaatttcatatgcaatatttcggtgatgtataaaacacaattatgtaatatccattctaaactcccaagtagaaaacctacatttaagagcaagtgtgcatttttaaaatgtaaactatagatacagcaaatatattttgaaagacagaacatctgattgtactataaaataaatatctgacatattaatttttagaatatatttttaatctatgtaaaatgttatcttcagtcatgacacaccaatttatcatgcattgccatgccattactagatattcttggacctcaaaagtgagccaaac

SEQ ID NO: 232209 - DNA, 574 bp, Homo sapiens
ttactctctttgtgaataacatcttagctgacataattgttcactttgttcactgaaataatacatttttctctaatatgggacatgttctacatacttttaaatatataaaatgagaaaatatgttataattccaatattccttaagaatttctgaaaaaaatgagaaaaaaattcgtaaagtattgatttttcactgtaggatgaaaaaatgaaaatataacagggaaaatgaaaactaaaacacataaatttgttataactataaggaatttcatatgcaatatttcggtgatgtataaaacacaattatgtaatatccattctaaactcccaagtagaaaacctacatttaagagcaagtgtgcatttttaaaatgtaaactatagatacagcaaatatattttgaaagacagaacatctgattgtactataaaataaatatctgacatattaatttttagaatatatttttaatctatgtaaawtgttatcttcagtcatgacacaccaatttatcatgcattgccatgccattactagatattcttggacctcaaaagtgagccaaac

SEQ ID NO: 232210 - DNA, 557 bp, Homo sapiens
acattcttctggattacttgaaagactcaatggcccaagtaatcccttgtggattacttgaaagactcaactatgggcacaatctrtgtggctcctgcatcaatatatcgtggaaagttctagataatacctttttcaagtctgtctgccatttttaccgcccagacgaaaacttcaggcaaaatctctagcttggtaatttgactgaaattgataagatactacagatgagaaaaaacaacaagaaaacacaggatagaataccaggtataataaatataatcaatttctggcttttctctgtgaaaagaacctagaggttctgtaaatacagtgcaatttctcctcaaaacaatggaagcattacatttgccccattaagaatgctgcctccaccacaggaaaattcttaaatgtagcattgaatttgaagaatagtgtggaaggaattgaaacagtgataaatttgtaagccaacaaatcaatggagctgaaaaaaaatgtaggagagaagaaatacattctgaatctgagcaacttaaattgtttttactgag

SEQ ID NO: 232211 - DNA, 557 bp, Homo sapiens
acattcttctggattacttgaaagactcaatggcccaagtaatcccttgtggattacttgaaagactcaactatgggcacaatctgtgtggctcctgcatcaatatatcgtggaaagttctagataatacctttttcargtctgtctgccatttttaccgcccagacgaaaacttcaggcaaaatctctagcttggtaatttgactgaaattgataagatactacagatgagaaaaaacaacaagaaaacacaggatagaataccaggtataataaatataatcaatttctggcttttctctgtgaaaagaacctagaggttctgtaaatacagtgcaatttctcctcaaaacaatggaagcattacatttgccccattaagaatgctgcctccaccacaggaaaattcttaaatgtagcattgaatttgaagaatagtgtggaaggaattgaaacagtgataaatttgtaagccaacaaatcaatggagctgaaaaaaaatgtaggagagaagaaatacattctgaatctgagcaacttaaattgtttttactgag

SEQ ID NO: 232212 - DNA, 577 bp, Homo sapiens
aaagccatagtgagatatcactacacatttagaatgaggaaaatcaaataggattaacatcaaatgttcataagcatatgaagtaactagctggcccactctgacattgctagccggaatgtaaaacagaccagtcacctggaaaaggttgttgcaatttcttacataactaaacatttgtttataatatattctgggaattgtactttggrcattcaattcagaaaaatgaacacttatattcattaagcttgaaagtaaatatttataagcacctttgttcataatagccaaaaactggaaataatcccaatatccttcaatacatgaatagttgaacaaactgtggtatatctatgctataaaataatactcagtgataaaaagcaacaaaaaggatatagcaatttagatgttaaataattattctgactaaaaatgctaatctcaaaaggttgcatactgtacaattgcatctatattacattcatggaataataaaaatacagagattcagagcaggttagttattgccagggattaggaagcagaggttagaagcggctaagcttacaaa

SEQ ID NO: 232213 - DNA, 648 bp, Homo sapiens
atttatttgctgcatttttgttctccaaaaaatactattgttctatttagtgctaatttcccttttttctctaaaatattttagggattgatgtgtatttaaaaccttgtcatgattatgaggggtgaatgacttatagttttatcttggcttgaaaatcaattttatcttcytgttgactgcattttatgttttctttactctcatcctaaaaaaaagttctgaaatgaagccaagttatgatgagatgtcctctgaagtaatcaaatattacactgagagtcatccatcacagaaggcccacaagtttttgttacctatatccttggaaaatgtgaattaagtaattacaaataaacagtggacaatatcatttatgctgtttcattgtgttaacttaaatggctggttggcagcgctaaagctgggccagagacaggggaatgccatatatttgtatgagtgattcataatttgaggtcaatatcgtgcttcaaatacaaatgacatatctaatgtggaatgtaagagcaaaaccatatgtccaaattatgtatatttccgttttattttgggcgaggtcagtttgattaatatacatagctgagctttaaatacagaatggaatcaagaaattaggtttggtaa

SEQ ID NO: 232214 - DNA, 648 bp, Homo sapiens
atttatttgctgcatttttgttctccaaaaaatactattgttctatttagtgctaatttcccttttttctctaaaatattttagggattgatgtgtatttaaaaccttgtcatgattatgaggggtgaatgacttatagttttatcttggcttgaaaatcaattttatcttcctgttgactgcattttatgttttctttactctcatcctaaaaaaaagttctgaaatgaagccaagttatgatgagatgtcctctgaagtaatcaaatattacactgagagtcatccatcacagaaggcccacaagtttttgttacctatatccttggaaaatgtgaattaagtaattacaaataaacagtggacaatatcatttatgctgtttcattgtgttaacttaaatggctggttggcagckctaaagctgggccagagacaggggaatgccatatatttgtatgagtgattcataatttgaggtcaatatcgtgcttcaaatacaaatgacatatctaatgtggaatgtaagagcaaaaccatatgtccaaattatgtatatttccgttttattttgggcgaggtcagtttgattaatatacatagctgagctttaaatacagaatggaatcaagaaattaggtttggtaa

SEQ ID NO: 232215 - DNA, 524 bp, Homo sapiens
agagaaaaatatcttagctaattctttgttttaaagatattctataatttatatttcattactcttttattgtaaattggaaggtaaaatatatgtttctgtgtgatgtgggcatgtgtgtgtagaagtccactgtgccttgtcaataaaacatcacgtagtaattttaaatagggttttctttctgatgagctctaaaatcatcaccattatatgcaaaatatgaaagtagtaaataatataaaataaaccattatgtggctgggcacagtggctcacgcctgttatcccagcacttcgggataccaaggcgggcgaatcacttgaggtcaggagttcgagaccagcctgaccaacatggtgaaacccatctctacccaaaatacaaaaattagccaggtgccatcatgggtacctgtaactgctcgagaggctgaagcatgaaaatcacttgaaccctggacayggaggtagccataagccgagatcgtgccaatgcactccagcctgggcaacagaatgag

SEQ ID NO: 232216 - DNA, 457 bp, Homo sapiens
tgacagtctttctgtcctactaccactcatattaataatcttctatcaaatgtttggtgtcccatctgtccagatagaagccacattgtaaagaagaatcatgggccatggcttcattttgcctagattcaaatyccctacatttcttattgtattgaaaaccttactaaggtatatagaaaggaggtaagcacctatgagacatatctgtctctttgtgtattttatctaaatgtctttaatgctattattttaaaatgagtttttaatttaaagtaaatatttcaacaatttcttcatgttataacatatgtatctatgtaatccttgtgcacatctccttcagcacatacatgaccatttctcaagagtacatactggtggaaccataagcaaataattagggaaataaaaaggaggaaatgaatctggagagaatttggaaggcaatgaattc

SEQ ID NO: 232217 - DNA, 457 bp, Homo sapiens
tgacagtctttctgtcctactaccactcatattaataatcttctatcaaatgtttggtgtcccatctgtccagatagaagccacattgtaaagaagaatcatgggccatggcttcattttgcctagattcaaattccctacatttcttattgtattgaaaaccttactaaggtatatagaaaggaggtaagcacctatgagacatatctgtctctttgtgtattttatctaaatgtctttaatgctattattttaaaatgagtttttaatttaaagtaaatatttcaacaatttcttcatgttataacatatgtatctatgtaatmcttgtgcacatctccttcagcacatacatgaccatttctcaagagtacatactggtggaaccataagcaaataattagggaaataaaaaggaggaaatgaatctggagagaatttggaaggcaatgaattc

SEQ ID NO: 232218 - DNA, 457 bp, Homo sapiens
tgacagtctttctgtcctactaccactcatattaataatcttctatcaaatgtttggtgtcccatctgtccagatagaagccacattgtaaagaagaatcatgggccatggcttcattttgcctagattcaaattccctacatttcttattgtattgaaaaccttactaaggtatatagaaaggaggtaagcacctatgagacatatctgtctctttgtgtattttatctaaatgtctttaatgctattattttaaaatgagtttttaatttaaagtaaatatttcaacaatttcttcatgttataacatatgtatctatgtaatccttgtgcacatctccttcagcacatacatgaccatttctcaagagtacatactggtggaaccataarcaaataattagggaaataaaaaggaggaaatgaatctggagagaatttggaaggcaatgaattc

SEQ ID NO: 232219 - DNA, 578 bp, Homo sapiens
gcagagacagaaatcaaagtaaattcaattatatattttcgtgatgtaaaagaaagaaacaacatcgtgctggttatcttttgtttttctcttcagagctattccttatccttgttcatccctctccttgtccccaggatgctggctggattgttgctctctgtcttccaggtaatagctgccaataggcatccccagagggagatcagtaggagggaatagagtgaggtcaaggtaaatgttagccatcatttttttcatgtcctggacgtgtccctggaccaaaataaacagctcctggctggctgcctccccatgcagctctttttctggattcctctctcttcttcarcccttggccccttttggcctgcaccataaagacacctatttttaccaaccagaaggcattgcactatttattgtggtttcactacactttgcttgttcctgtgtatctatttcactcattaaactctttgcaaagtatccctttttacattgctgcagttttttgctatagggcagagtgaaacacatatattatttataatatcttttgaaataaaagtatcaca

SEQ ID NO: 232220 - DNA, 594 bp, Homo sapiens
aaccaatcctcctgtttgtgtttattctaatttttttcaggccatgtgttttatgtatctttgccataaaaagctttataattaawaactttacaattaaaaaatgatataaaatggaataaaacaactttttaatttcttggaacatagataaaatgttagagaaaagaaggcaattagaaaagtcattaagaacaaattatattcattaaatcccctggcattattccaaatggaaattcttttgataagagaaatcaatgtgattattatccaagaatgaagaatattgggatttatccaagggtagtattaagtatcacaatgagtttgtgtataaagagctttaagatgaagaaatattttttatgcccactggctgcatccatttagatatccaaatttaccaatgtcttttgttctgtaaattaactaagatcctaccaggcaccatcgtcatgggctgatgcataagagtctatgggacagggagcttggaaaggctctcagttttcagtagaaactctgacaggatcatgacagaagcagttaaatgcatgaaagtagaaaatgacccatactcacctcagagct

SEQ ID NO: 232221 - DNA, 587 bp, Homo sapiens
tatgaaggtcttctaaacaatatatttaggggcaattttacatatctggaagcaaagtaagaatgagaaagtatacaaattctctcgctatagaatctaaaaatgtgatggtcgtgatattctgacttaatattgtacatgcataaaattattgattatattaaataaatacattggataaagggatctaataaatttttaaaattaccttttctttattgtgactctactgatcttgtagttgtattagtggaatagctcartacttttgtgaacatgtattttatattctactcccaattatttattgacatcctagaaaattatacaccttttaaaataacaaatcagaaattataacagaattgggtggaaatgaaagaaataggccatctaatgcatatgtgtggcttatcacattatttgcctttattacatgaatattcatcctggaggatgatattttaaaatctagtagaggataatgattacttaaaaaatacttaaggatactctgaggtttagtagttaaagcttttcctgttggaagaactacgtgttactcttaaccacattattggctggtg

SEQ ID NO: 232222 - DNA, 589 bp, Homo sapiens
taactctaaaccagtagcgttgctgtcagaggaggatgaattgacttggaacagaaaacaaaaatccacacccagcagcattgttagtataagcagcaaaattcayaggaagcacatagggtttctggttgaggtgagtggtagagagtccagaaattttaaaaagatatcatatagttaatcagaaatctacagagggaatagataagctctccatatatacctgaatgaccgggaaactacaggcatgtgctggtaacacccagaagagctccaatacaaagtaaaacctgaggcagatatttaaattgcttaaacatcaaatgaatgtctcaacccacacattaatctacacccgtgaggtagaagttttataagcttgaagatattgctctgtctaatcactggttaactactaggctatgcagacacaggagcaacccctaggaatttagaattaaaaatgaaaatgagacaaaaattactgagtggagacatcagtggttgtatttctcaggacaaataatttgcagattaaatacagccaacttttaaaatttcagaaaaaagggagaatctggagattata

SEQ ID NO: 232223 - DNA, 607 bp, Homo sapiens
agtgggccaaagttcagcctgattaatgcctaattatagctatrtttctgtccagaacccagagtggatttcttgtcaactctgtgaggacattttcaatcacatgagattttaaaagcagagaacctttcccagttgagggcagagaatttaaagacagtggcatgagaagaactggaaccaccattgctggctttgaaggtggagatagcggccccagccaaggaatgtggaaggtctctagaatctggaaaagtgaaacagaatttttcctagaaccttcagaaaggaacataggtccactgacacttcaattttattccagtgagacccaggtctaacttgtgaactacaagttgaaaggtgataaatgtgtattgtttaagccaccaagtttgtgaaagccaccaagtttgttccatcggcaatagaatatcatattaatacagtaggattttaaattctggtagcacaacattaaaattaaactatctataatttatattatgagacaacgtaggaaaaagcagagaaatgttgaacaatcaaatgaattgtcaagatgtgtcaaatgtgtatgtcacatgtgatacaatttggatatttg

SEQ ID NO: 232224 - DNA, 495 bp, Homo sapiens
tatatatgcaggatgtgcacgtttgttacataggtaaatgtgcgccatggtggtttgctgcacagatcagcccatcacctmggtattcagcccagcatctattagctattattcctgatgctctctctctccccctgctttattacccccaatagccccagtgtgtgatgttccccaccatatgtcctcattgttcagctcctacttgtgagaatatgcagtgtttggttttctgttcctgcattagtttggtgagaacaatagcttccagctccatccatgtccctgcaaaggacatgatctcatttatttttatggctgtatggtattccattgtgtatatgtaccacattttctttatccagtccatcattgatgggcatttggcttgattccatgtctttgctattgttaatagtgctgcaattaacatatacgtgcatatatatacatatattatatatataaaatataataatttatattcctttgggt

SEQ ID NO: 232225 - DNA, 495 bp, Homo sapiens
tatatatgcaggatgtgcacgtttgttacataggtaaatgtgcgccatggtggtttgctgcacagatcagcccatcacctaggtattcagcccagcatctattagctattattcctgatgctctctctctccccctgctttattacccccaayagccccagtgtgtgatgttccccaccatatgtcctcattgttcagctcctacttgtgagaatatgcagtgtttggttttctgttcctgcattagtttggtgagaacaatagcttccagctccatccatgtccctgcaaaggacatgatctcatttatttttatggctgtatggtattccattgtgtatatgtaccacattttctttatccagtccatcattgatgggcatttggcttgattccatgtctttgctattgttaatagtgctgcaattaacatatacgtgcatatatatacatatattatatatataaaatataataatttatattcctttgggt

SEQ ID NO: 232226 - DNA, 504 bp, Homo sapiens
atattatctagggagaaagtatcattctttctggaatacctgccactccaggtcttgctctccagagcaaatcccctggtcatcttttgagaggcctttggatttcagaagagatatgagaggcacagttcattcatttgacctgtaacccatctagctgctctgacttaatctcttttctcatcttggcttacctgtgacttrcacatggaacataggcttctgcttttcttgtctttttaatccaactcccatcaacgatgccagagtaatcatctacaaagcaagcaatcataccacacatctatctaaatttactcattggcttatttgtcttccctgattgcaaattctgaaaaaacacagttcatttctcattacacttccatcctaaggcttgtacataatacacactcaatacctgtttgttaatcacatggctggattgatctgacaacatcttgatccttcacttttgactcagtgttatcccaggttttcatt

SEQ ID NO: 232227 - DNA, 448 bp, Homo sapiens
attaaagttgtcgctcatagcattatgtaccacaaggagccattgtgcttgatatggttttttgcattatggatgcaccatgcacatcacttgaaaataaaaccccaaaccactgatcargagattctcaatgctacctgttttgaatgaggttcaaagatccagtattcagtgcaggctgccgtgcttttataaccatttcattcatagacccatttattctagaggaatctgtagcagataatgatgctgagttaactctctggttatgagatagtcatatgaggtcctgtggccacacacaccaaggcagataattaccctacatttgtaaaatatagtttgtttatgtatgtcagtaagtgcttttatctgagcaactaaggagcaccaagagcttgtataaccaaaactttccaccataaactaaattattttgaattcagct

SEQ ID NO: 232228 - DNA, 645 bp, Homo sapiens
tccagtgattaaacttccatttttccatctatttctctacactctataatttactgagagcccagagataccattcatgttattcaggtagtctcccattytccatttcagggccacttttcccctagggctgcctgtacctatacgttatactaatcaaaatttagaaagtagtttgtaatcattcagaaggttgatgaattacagtgtcagactggggcaactattaatataattcaaatgatgttcaattttataaactggtaggcatggtggcactttaaagattttccttattcaagctatgtattaaacattaaaaaatgattaacaacagggattttcattgttgcttacattgcactaaactcttaaggtactgaggagcattgaatttagtttatttgtggggagaaagttttatttatttacagaattttgaaatttagttaaaaaaataagctaattacttttggaaaaatttaaatctttaactctgtcaaatgtgtattgatttgatccaaaccaattcaggatgatatccatcagtattatctttttatagttgctttattaaaagtgattattattaataatatgaatagaagtcaattatcatagaagaaatggaaatatgtagactgc

SEQ ID NO: 232229 - DNA, 463 bp, Homo sapiens
agggcaacctatagttataaactagacaaggtgcacattccctagccttcaagttacaatgtgaaagatttaagaactgaaacgaagtggaggctagagtttggggaagtaaaccagttataatgtaagaggtaataaagcctgaatgttggtggcatttatgaaaataagcgaaatggttgggttccacagatttaagaagttcaaaaattgatttacggacaataaagagacaaaaggaaatatatttgccatattttagtcccaaatgactaaggagaaactggaacactaaaaagagcaattagtagtctaggaaaattacaagctgggattggataagaatatttttatttttgccgatactttatcttgtatggatttaatatatttttaaaaagccaaaatttctttaaattgaatggraatatggaaagcaatgaaactggaaaaaagccccttc

SEQ ID NO: 232230 - DNA, 534 bp, Homo sapiens
gagaattcatagtaacttaatgaagcaggagtaataacaaaaaaattgaattaagtatatttaaagctcaaatttatcttcctgaatactactcctatgagtacataaatcttgagtaagtctagctttcaaaaataatagttggaaatatatatgaagaaagaaatattatttatatttggagagcaagcactctaatctagaaaaatagatcattttttaaaataaaatgttctattaatgagttgtgacaagagaattaaccaaaagtagatctgttcaaactcaaaaatgatattcatcctaagtgagaagcagtacatagcatggaagggccccctaggttgaccagcaaagtgaaaayacaacattttttttttccaaaaacaatcatggtaatttcacagtcacaaagtggatgagggataaaagcagagacttaagctctgcatgctagctacatggggaagagtaggttaccttgtctgccataatcacaggttttactctgttgctacctgatatattcaagca

SEQ ID NO: 232231 - DNA, 588 bp, Homo sapiens
ggacctgagcgtaagattggaatcatatgaccatttattaattgaataactcaagggaaatttttaaaataaaactaaaacaatccttgaagattgatgataggaggagtgatggtcaaaactcatagtcttgactctttttttatgagaccatctttctcttgacacgctctcactaattttctttattattattattattattattattattattattattattattttctttttgagacagagtctcgccaggctggagtgcaatgaggtgatctcggttcactgcaacctctaccttccaggttcaagacattctcctgtctcagcttcccaaatagctggggttacaggcaagggccaccacacctggctaatttttttttgtatctttagtggagacaggttttcgccatgttagccaggctaatctcaaacttctgacctcargcggtccacccgcctcggcctcccaaatgctgggattacagccaccgcacccaacctcactaattttatagcagctccagaatgaacccagtgaattggggccccctaattccttggaacacaactgaaatatagcta

SEQ ID NO: 232232 - DNA, 588 bp, Homo sapiens
ggacctgagcgtaagattggaatcatatgaccatttattaattgaataactcaagggaaatttttaaaataaaactaaaacaatccttgaagattgatgataggaggagtgatggtcaaaactcatagtcttgactctttttttatgagaccatctttctcttgacacgctctcactaattttctttattattattattattattattattattattattattattattttctttttgagacagagtctcgccaggctggagtgcaatgaggtgatctcggttcactgcaacctctaccttccaggttcaagacattctcctgtctcagcttcccaaatagctggggttacaggcaagggccaccacacctggctaatttttttttgtatctttagtggagacaggttttcgccatgttagccaggctaatctcaaacttctgacctcaggckgtccacccgcctcggcctcccaaatgctgggattacagccaccgcacccaacctcactaattttatagcagctccagaatgaacccagtgaattggggccccctaattccttggaacacaactgaaatatagcta

SEQ ID NO: 232233 - DNA, 582 bp, Homo sapiens
aagacacaatattgattcatagtgcctgtattttcaastgctattgtagggttaattactttaacaataaaaagaagagaacacagtataaataatacattttcactcatgtaatataaaatatactaatacagctatctgacaacatgctcatattatagtatatactatctatgtattatacctatatgcatatattgttacaataatacatatactatttaatatagtaacatacaatagtatagataatatagtatagattacaatataatagattacaacaatctataatagaatataatatagctgctatattgtacaatataatataatggataatacaatacaataaataaatattacaataatatctatatgccatgagttgaattgtgtgtccccaaatttctatatttaagacctaaaccctagtacctcaaaatgtgaccttatatggcaatagggtcattgcgatgtaattacttaagatgaggtcttactggagtatgcttcctaatctagtatgactggtacaactataaaaaagggatatctggatctggatatgcacacaaggat

SEQ ID NO: 232234 - DNA, 582 bp, Homo sapiens
aagacacaatattgattcatagtgcctgtattttcaagtgctattgtagggttaattactttaacaataaaaagaagagaacacagtataaataatacattttcactcatgtaatataaaatatactaatacagctatctgacaacatgctcatattatagtatatactatctatgtattatacctatatgcatatattgttacaataatacatatactatttaatatagtaacatacaatagtatagataatatagtatagattacaatataatagattacaacaatctataatagaatataatatagctgctatattgtacaatataatataatggataatacaatacaataaataaatattacaataatatctatatgccatgagttgaattgtgtgtccccaaatttctatatttaagacctaaaccctagtacctcaaaatgtgaccttatatggcaatagggtcattgcgatgtaattacttaagatgaggtcttactggagtatgcttcytaatctagtatgactggtacaactataaaaaagggatatctggatctggatatgcacacaaggat

SEQ ID NO: 232235 - DNA, 617 bp, Homo sapiens
atatgattacatacatatagtgtgtgtgtatgcttgtgcatatgtatagatttttgtgacttcccttaattatagcagttggattaattgaatgttcctgttactaattatcatatatggtatctaatttatttacattagagttaaagataatttttggagaagctactgtccaaacttttaataagtttttagctaatgattactaaccaagttcagtactttcgttatcttggtgaaaaaatgttttaaaatgtagcctgaatcatagcaaagtggtcaggagcaaggtctccagagtcaaattatgtgagttatctccaaaatggtcataataatagtgtctctttcacacaattattgtgaggactaaatgaaatcatagttcttaaagattatccatcatctgatggcctraagaaaatgtaaactaatatcatgacatgaggaagaaatttgagtcattaattataatttatctcagtatgaaagcagaagttgattctaccagcttgtacttcttcatctcattttccaacaaagcagaggagaccatatatattcaatcaagtcttgttatatggaactacaatccaccccgccccctaccacctctc

SEQ ID NO: 232236 - DNA, 358 bp, Homo sapiens
atgtgagaagactcactctacctgatattaaggtggtatactacccttaaaggactgagaagatagcatacatatatatattatatatatatatataaaatatatataatatatatattaaatgacaaatttggcttataaagcagtaaagaatgaactcttctttattgttgtatccgtctgacmttaagtttctttgtaataatatcctctcattgatgtcacatagtcaggcattcagcctcagctagtgcttaatatattacaaggagctgctttttgacttgatttctgatgcaggtggtgtggctttacattacttggaaattttttagaactacaaattcttgaagttcaa

SEQ ID NO: 232237 - DNA, 358 bp, Homo sapiens
atgtgagaagactcactctacctgatattaaggtggtatactacccttaaaggactgagaagatagcatacatatatatattatatatatatatataaaatatatataatatatatattaaatgacaaatttggcttataaagcagtaaagaatgaactcttctttattgttgtatccgtctgacattaagtttctttgtaataatatcctctcaytgatgtcacatagtcaggcattcagcctcagctagtgcttaatatattacaaggagctgctttttgacttgatttctgatgcaggtggtgtggctttacattacttggaaattttttagaactacaaattcttgaagttcaa

SEQ ID NO: 232238 - DNA, 668 bp, Homo sapiens
tgtgcccggccaattcatttaattctcaaaaaaaaaaaatcttaagtatttgttacattttttaaatgataaaagtgaggctgagtttaagtaacttatctgttaagatgatcacacagctactagtaataaagtacgattcaaaggcaggctatctggcccctttgtgtagacttggtcataatgctgtgactttgtattagccrggagtcctgaattatcaaaagatttacaataaatgacactatcttgttgaacaatgaagacttttttttcctaaattttcgacaaccctcgaaatcatggcagcatactgaggtgagcgttttcattgggacatgaacctgtcattcctgccactatcaggaaaaagaaatgttacccaattttaatctttgaacagtatcaatgccaaaaaattgtgaaaaagataatcagaaaatagatgacaagtggctactgagcttaccatttaaagtttctgtcagaccttcaaattttctctatggagcccttctccacgaactcagggtagtcagtgcttgtaatttacagcagtcattaaaatgatgacattacatgtaattcacttatttccaaagagtaactgaggacctaaaaaatgtaggtgatattaggcatatccatgacatacagcactatgcaat

SEQ ID NO: 232239 - DNA, 448 bp, Homo sapiens
aattttccaatcatgttccttccaagtcccttaccatccagccaaaccactggccacggcccaggaattggtacataattayacatctggccatttctccttctaacaaaatgaacaacctattccttgtcccaagttttgcctactggtaattctgcccactggaagttctttactgctgtccttcagggctgtcctagaaagggctgcagtactgcaactgttcacttccaggcggtgtctgcatatcatggacctgagtcttcccttcctctatcaacatagatgcaggcagggaaagagaaggcgatgtagtaggaatggctatcatgggcattcaggcgaatgcttcatgtaagttacttggtgtttttgtttgtttgttttttggtttttgttgtggttgcttttgtttttgtttttgagacagagtcttattctgttggcc

SEQ ID NO: 232240 - DNA, 471 bp, Homo sapiens
aattttccaatcatgttccttccaagtcccttaccatccagccaaaccactggccacggcccaggaattggtacataattatacatctggccatttctccttctaacaaaatgaacaacctattccttgtcccaagttytgcctactggtaattctgcccactggaagttctttactgctgtccttcagggctgtcctagaaagggctgcagtactgcaactgttcacttccaggcggtgtctgcatatcatggacctgagtcttcccttcctctatcaacatagatgcaggcagggaaagagaaggcgatgtagtaggaatggctatcatgggcattcaggcgaatgcttcatgtaagttacttggtgtttttgtttgtttgttttttggtttttgttgtggttgcttttgtttttgtttttgagacagagtcttattctgttggccaggcccaggctggcatgcagtgg

SEQ ID NO: 232241 - DNA, 532 bp, Homo sapiens
atattatgatacaggcatgtaaaaaactattaaggaactataaaaaggacatttagaaactgtttttaaagagatatgggaataatgagagtttttaatgaaaaataatgtattgacagaataaacttcacaaagtaaaacacgtctagcaaaaaatagaaaaataatcataatagctaattttaaaaacatttttatgtgacaatgtgctaaatgcttaatgcaatatctgttttattaatcaaaatagcagataaaatagatgatatctttattcccgtttctcagatgagaaaattaagacttggcaagattaagtgaaggaagaagactgaaatggaacccatgctggtctgacctcaaaccctagcttctttctctctagaattaaaaatatgaaaagcaattgccactgggtagaagtataaatgactttttttctcttttatgctttttttgtgtttttcaaattcaaaaaacaaggaagaaggaatttcttgagaaaaaaawactgaaagaaaaattcattaca

SEQ ID NO: 232242 - DNA, 461 bp, Homo sapiens
tgatatttttacctacagaacatatctcatatctacttcctctggagttttctgtaagttatggattaataaactttccctaagaatgcagctttattaatcttgcaaaatactcagaaaagaaaatattttattattcccatctaaagtgaattatgataaagtcccatgtgtgctcacaagacataaagttgctttctgyagcaaattgtgtttgtggtggtgactgttttccccgcgccagtaggatttggagtaaacaaaatgtcaaactgtctcctaacctgtgaagacaatagagaccaccaaggtcacagcaaaacgtgacctagtttttgaagggagaaagagagagttagcacaggatggcgttagttcaagcccctcctcttaaagctgaaaaagaaaaaataaaaacggaagcaaagagagagttctgccatcattcaactactgaattc

SEQ ID NO: 232243 - DNA, 618 bp, Homo sapiens
aagtcttattatttaggacatacatttcataaggctatagctgccataaatagtgattcttctgatagatcttggtgaaataattttaaaatattctgtaaagaattcatcattcgtggcccagcgcggtggctcatgcctgtaatcccagcactttgggaggcggaagcgggtggatcacgaggtcaggagatcgagaccatcatggctaacacagtgaaaccccatctctactaaaaatacaaaaagaaattagccgggcatggtggcaggtgcctgtactcccaaatactcgagaggctgaggcaggagaatggcttgaactcgggaggtagagcttgcagtgagctgagatcgcgccactgcactccagcccrggcgacacagcaagactctgtctcaaaaaaaaaaaaaaaaaaaaaaaaattcatcattctagatgccattaagaacatttgtgattcatgaaaggaagtctaaatatcaacattaataggagtttggaagaagttgattcatggctgacttggagggattcaagacttcagtggaagaaggaactgcagatgtgatacaaataacaagaggactagaattagaagtggagcctgaaaatga

SEQ ID NO: 232244 - DNA, 571 bp, Homo sapiens
aagcattcaaaaacacccatgattttcctcctctcctgactatttgccatttagaataagaaatacaggtagcatatgatgaaaattaatatatagctagaaaatataattttaaagataacatttacaatggcaattacaaaaatataaaccacctaaaactcaatctaaaaagagtgcatgccctttgaagaaaattataaactgtattgaaagacattaaataagaactaaataaatggaaagagttactayatttacagatagaaagactcaggctcaatgtcctaatgatggcattatcttttaatcagtctataagtttgataaaactcaaatcaaatctcaacagtattcttgtgaaaccttgaaagatgattataaaatgtatacggaagaaaacagcccaagaaaagccaagacactcttgagacacttttgcagaaggacacttttagggatgtgtcctggccaataccaagattcattaaaaagctataataaagtttggttagggcaaaagagtggctaaaacatatgcttagaaattgactctaagttccaggaaaat

SEQ ID NO: 232245 - DNA, 613 bp, Homo sapiens
aacactcccaatcctctgaagcagaaagctgtccatcctaggcaataaatataagcaccagaaaaacatcattcttcttggatacactttcaggctagggaattgttcccctactaatttcccacttggggtttcttccttcaaccatttgttcctagagtgctttactataagtcaggcactgtactagatgggtgggagggagggagggaaataaagttatcagggagcttaaagcctataggggagattctataaccccaaacacagcattcgacagtcattactccacactatttagtattgwacacataggtaatacatctctatacactcaatgtttttacttaaccccatttgcctactaaagtcattctgttgccttgagcctacaccaacacaaaggtgagaatggaggtgccaataaatgaaacctgttatctacagataagaaatcaaacctcaattctagtggtagaaagaactaaggagacgggctagcccagtatcttcattttacagaacaaggggcccatgacagaaacaggttacatgaattgcctggggttcccccaattggtacactgctgaaacagattttgaacccagatct

SEQ ID NO: 232246 - DNA, 628 bp, Homo sapiens
aggctatctttttttcagattctcttcagaaaagaacattgtctacaaattgaagtgtcatctccaaggcttttcctgattcttaaggtaggtattatataagagggtggcaacaaatgttatcctttcagtgtcacgtcacaaaatgcctcctttttccttcaaagcagtaaagtaagatttgtcatgatcatggttaatttattaaagataattttcagctcatatgatggatcctagagatrggtgggaagggggtacgtgtatcttcactgcaggtactaaagatttttaaaagctgttttaaaaccttcagctgaaataaatgttaaaatacaatgacttttggattttaatgggccttcaaatcagggtaactttaaacaatgacattcaatgtaaatgtccttcaattgtgccattttcccattccagcacacagctcaatgtcattaaaactactcaaatttaattaattatcgttatcatttgtaatttttgaagctcagtagacctgaaataaaattacgtttggatgacaaaacatattatgcaataaagtcatctggagggtagaataccaaactgggagcctactgcttcttttttcttctgcttgccatgacaa

SEQ ID NO: 232247 - DNA, 472 bp, Homo sapiens
gatttggcttttactctatctctggcttctaatcggtcctcctttcattctcccaccctacttttctctcctagtaaatttttcctttctgttagaggcagtaaagtcctcactctccttgtcagtccacatggaagctttgcctacttggctccccttggggtgcggtgaggtgagaggargagtctagtcctgtgctaatcgcagattgttggggacatgtgtttcaatttcctttgtctcagttttcccacctgtaattttggagcatgataatgggccatccagtgctagtgtctgcaaaacttgcttcgagatcactggacaaaaggtgctggttagatatatttactggcatgccctgggaggatgtctttagatcactacagtattccaaaactcacgttggggtcacgtcagaatgatcagaattccctctagcatttgctctttataatgcactcatgagcct

SEQ ID NO: 232248 - DNA, 560 bp, Homo sapiens
tagaacaccacacaataatagtgaccgactttaacatcccactgacagtattagaaagattattgagacagaaaattaacaaagrtgttcaggacctgaacttagctctggatcaaatggacatgatatatatttacagaactctccacatgaaaacagcagaatatacattcttctcatcactacatgacactttctctgaaattggtcacttagccagaagtaaaacactcttcagcaaatgcaaaagaactgaaatcataataaacagtggctcagatcacagcacaatcaaattaaaactcacgatgaaataatttactgaaaaccataaaattaaatggaaattgaatcacctgctcctgaataacttttgggtaaataatgaaattaaggcagatatcaaggagttctttgaaaccaatgagaacaaagacaaaacataccagaatctctgggacacagctaaggcagtattaagatgaaaatttatggcattaaatgcccacattaaaatgccagaaatgtctcaagttacaacttcacaacaaaaataacta

SEQ ID NO: 232249 - DNA, 549 bp, Homo sapiens
gaaataatttactgaaaaccataaaattaaatggaaattgaatcacctgctcctgaataacttttgggtaaataatgaaattaaggcagatatcaaggagttctttgaaaccaatgagaacaaagacaaaacataccagaatctctgggacacagctaaggcagtattaagatgaaaatttatggcattaaatgcccacattaaaatgccagaaatgtctcaagttacaacttcacaacaaaaataactacaggaacaagagcaaagaagttctagagctagcagaagacaagaaataaccaaaatcagacctgaamtgatggagatagggacaagagaaaccattcaacagatcaacaaattcaggagctgtttctttttctttgaaaaaaccaataatataaatacaccagtagtagactaataaggaagaaaatatcaaaaattaaaatgaacacaatcagaaataataagggttaccactgaccccacagaaataaaaataaccatcagaaaatatcataaacacctctatgcctataagataac

SEQ ID NO: 232250 - DNA, 538 bp, Homo sapiens
acataaggaacttagggacgtcgattattaagaggctacctgcaagtggaacttctgggttttcattgtctagacagaaaaatttaactsataagccccagtatattaaggtacatccccaacggctgtgggggatcaactttccatccaaagcagagatgtaaaacatgaatgacttcaaatgcggctcaagtgctctgcaccttgaaagtcatccccacaaagctggagcaccacctgttcctgagggatgaggtcaccaactgcttttttgagacactcgtcagtcaggactcagttgagatgaggctggtgatttcaactgtaaaatatctaaaccatcgtctttaggtagattcttatgcctgggaattgtggttttctcctctgctgttagcagatcctgagtaacccaagaaatacccgctctcacccgtcaagttctatatcacaagaaaggcgctgcagacggtgacattttcacgaaggagccacagcccgcatcaccccctgaaagctctgaagttgcgcacgggtg

SEQ ID NO: 232251 - DNA, 538 bp, Homo sapiens
acataaggaacttagggacgtcgattattaagaggctacctgcaagtggaacttctgggttttcattgtctagacagaaaaatttaactcataagcmccagtatattaaggtacatccccaacggctgtgggggatcaactttccatccaaagcagagatgtaaaacatgaatgacttcaaatgcggctcaagtgctctgcaccttgaaagtcatccccacaaagctggagcaccacctgttcctgagggatgaggtcaccaactgcttttttgagacactcgtcagtcaggactcagttgagatgaggctggtgatttcaactgtaaaatatctaaaccatcgtctttaggtagattcttatgcctgggaattgtggttttctcctctgctgttagcagatcctgagtaacccaagaaatacccgctctcacccgtcaagttctatatcacaagaaaggcgctgcagacggtgacattttcacgaaggagccacagcccgcatcaccccctgaaagctctgaagttgcgcacgggtg

SEQ ID NO: 232252 - DNA, 538 bp, Homo sapiens
acataaggaacttagggacgtcgattattaagaggctacctgcaagtggaacttctgggttttcattgtctagacagaaaaatttaactcataagccmcagtatattaaggtacatccccaacggctgtgggggatcaactttccatccaaagcagagatgtaaaacatgaatgacttcaaatgcggctcaagtgctctgcaccttgaaagtcatccccacaaagctggagcaccacctgttcctgagggatgaggtcaccaactgcttttttgagacactcgtcagtcaggactcagttgagatgaggctggtgatttcaactgtaaaatatctaaaccatcgtctttaggtagattcttatgcctgggaattgtggttttctcctctgctgttagcagatcctgagtaacccaagaaatacccgctctcacccgtcaagttctatatcacaagaaaggcgctgcagacggtgacattttcacgaaggagccacagcccgcatcaccccctgaaagctctgaagttgcgcacgggtg

SEQ ID NO: 232253 - DNA, 583 bp, Homo sapiens
caacgttgcagtgagtgagctgtgaacaggcgaccagagtttttttgttctctacagcttacattttcartaacggttgccgctagttgtcgcccaaagacaactaaaacacgtgtcatcctggaatacgtgggatccctgatggaggggtgggtgaggaagtaggaggggacgaaggcacacggagtcgcccattttctcatgattcccgttggactacttttctgggtgcagagcatcctcccagaaagtccccaaaaccattcaaccagagctcctgaaaaaaacagtcacactctctgcccatcggatcatccggaatttccatttatccattgagaagaatgctccattggagtttggcgcaggttacggttacaggcaggggctgcctcagacagaagtctagtctacagagtttcacagtagaccctaggttcaatctctcccaaactcagagtagcaatatctgtcacagtagaatgaagtgcatgaaatgcgtgctccgaagaaagcgtgtttcacacagatgatttgcacacttattcttgtccctaggccagttgtttcttccaaaataccc

SEQ ID NO: 232254 - DNA, 583 bp, Homo sapiens
caacgttgcagtgagtgagctgtgaacaggcgaccagagtttttttgttctctacagcttacattttcagtaacggttgccgctagttgtcgcccaaagacaactaaaacacgtgtcatcctggaatacgtgggatccctgatggaggggtgggtgaggaagtaggaggggacgraggcacacggagtcgcccattttctcatgattcccgttggactacttttctgggtgcagagcatcctcccagaaagtccccaaaaccattcaaccagagctcctgaaaaaaacagtcacactctctgcccatcggatcatccggaatttccatttatccattgagaagaatgctccattggagtttggcgcaggttacggttacaggcaggggctgcctcagacagaagtctagtctacagagtttcacagtagaccctaggttcaatctctcccaaactcagagtagcaatatctgtcacagtagaatgaagtgcatgaaatgcgtgctccgaagaaagcgtgtttcacacagatgatttgcacacttattcttgtccctaggccagttgtttcttccaaaataccc

SEQ ID NO: 232255 - DNA, 583 bp, Homo sapiens
caacgttgcagtgagtgagctgtgaacaggcgaccagagtttttttgttctctacagcttacattttcagtaacggttgccgctagttgtcgcccaaagacaactaaaacacgtgtcatcctggaatacgtgggatccctgatggaggggtgggtgaggaagtaggaggggacgaaggcacacggagtcgcccattttctcatgattcccgttggactacttttctgggtgcagagcatcctcccagaaagtccccaaaaccattcaaccagagctcctgaaaaaaacagtcrcactctctgcccatcggatcatccggaatttccatttatccattgagaagaatgctccattggagtttggcgcaggttacggttacaggcaggggctgcctcagacagaagtctagtctacagagtttcacagtagaccctaggttcaatctctcccaaactcagagtagcaatatctgtcacagtagaatgaagtgcatgaaatgcgtgctccgaagaaagcgtgtttcacacagatgatttgcacacttattcttgtccctaggccagttgtttcttccaaaataccc

SEQ ID NO: 232256 - DNA, 517 bp, Homo sapiens
tcggcgatccccgcggctccccccaccaccgccgccgccgcagtcgcggccggtcccccggaaccgtctcctcccccgcacgcgccgcaggccgacccccggaaccctccgggaagcccaccgggccccacgcggggcgccaccgacccggtccccaaggcgcgcgccgggggacgcggacgccgggccgatcagtggccggcggcggcgccccacgaggcggtgccgggttcggtcccaggcggggccaccaacggacgtgaagccggtgagccgctcggggggaagaagaggatcggcgggcggcgggcggggaagagggcacagacgggcgagggccggggaccgcgagggcaagggcacccrggagcccgcagaggcggcggctcggggagaaacctcaggcacggccgggccaccaggaaaacacggccgcgggatcccaccgccacagacacgagggcggtcccgcggcgccccgcctgggacgccggacggccctcggcccccaccgaga

SEQ ID NO: 232257 - DNA, 570 bp, Homo sapiens
gccgggttcggtcccaggcggggccaccaacggacgtgaagccggtgagccgctcggggggaagaagaggatcggcgggcggcgggcggggaagagggcacagacgggcgagggccggggaccgcgagggcaagggcacccgggagcccgcagaggcggcggctcggggagaaacctcaggcacggccgggccaccaggaaaacacggccgcgggatcccaccgccacagacacgagggcggtcccgcggcgccccgcctgggacgccggacggccctcggcccccaccgagaaccgcctcgcgagccccggggccccgccaccgggggccccggagcgaccgcagccacgaacccgacacgccascaccaccgtcgctcgtgattctcgtccatcctccgacccggtcccgctccgggagaccggcgcgcccccaccgtgggacgctttcccagggccaggcgggcccgaccccgtgccacgcaaacgcggtcgtcggcaccggtcacgactcggcacgggagcgggcggagagccgactcgcggcggagggggtcacgcgccggacag

SEQ ID NO: 232258 - DNA, 471 bp, Homo sapiens
cacttgtaattgtggcacagtctccccacgtgccagttgtacgactatttgtgcctgaagtttgatttctctctgacaagacagagcccgggagcctccaacagcctgcccagcgttgctgtaacgcttgctttcggggagctgggcgcgcccagacctttgcagggcccctccctcagccccgacccttctcctcgcccctcccctgccacgcccctttcgacatgctggaaagtcatctacctttaataacagtcatctttgcaaaaaaaaaaaaaaaaaaaactctgagaataacctatctcccattctatttagtatttatttccatagtatccataaatagtagcaattagatatcayagcaagtcaagcaaaagccctgccttgcctgtttcataaaccacgatatggccttgctgtggttttatttgtattttgttttgtatttattgaccttttggatataaa

SEQ ID NO: 232259 - DNA, 633 bp, Homo sapiens
ctcgttcatttacacacataaatacgacgcttttcatacgtaaaataaacgtctttatcgacgatcccttctttatagagcgatgtgtatttatttgtataacacagacacctacatctatcatacagaagtctatttccatacaaccgatacgtatttaccatacgcaagagtattcaacgcagagatacacgttgtcgttgtttgcatataagcgtacagaaacgtttacattaatacatataagtaaacgcgtggaaacgaaagaaataaaaaagcgaaatgagtcaacaggccgggcacggtggctcacgcccgtcatcccagcacttcgagaggccgaggtgggcgcatcacaggaggtcgggagttggagaccagcctgagcaacatggagagacacggcgtgcctactaaaaacacaaacatcagccaagccaggcgtgggggtgcctccctgtmatccccgctaatcgggaggctgaggcaggagaagcgctcgaacccgggaggcggaaggtgcggtgagccaagatcgcgccattgcactctagccgtggaaacaagagtgaaactctgtctcaaaaggacgaaacagaaagaaagaaagaaagaaagaaagaaagaaagaaa

SEQ ID NO: 232260 - DNA, 633 bp, Homo sapiens
ctcgttcatttacacacataaatacgacgcttttcatacgtaaaataaacgtctttatcgacgatcccttctttatagagcgatgtgtatttatttgtataacacagacacctacatctatcatacagaagtctatttccatacaaccgatacgtatttaccatacgcaagagtattcaacgcagagatacacgttgtcgttgtttgcatataagcgtacagaaacgtttacattaatacatataagtaaacgcgtggaaacgaaagaaataaaaaagcgaaatgagtcaacaggccgggcacggtggctcacgcccgtcatcccagcacttcgagaggccgaggtgggcgcatcacaggaggtcgggagttggagaccagcctgagcaacatggagagacacggcgtgcctactaaaaacacaaacatcagccaagccaggcgtgggggtgcctccctgtcatccccgctaatcgggaggctgaggcaggagaagcgctcgaacccgggaggcggaaggtgcggtgagccaagaycgcgccattgcactctagccgtggaaacaagagtgaaactctgtctcaaaaggacgaaacagaaagaaagaaagaaagaaagaaagaaagaaagaaa

SEQ ID NO: 232261 - DNA, 588 bp, Homo sapiens
gcaagaaagcaagaaaacaaggaagcaagaaagaaagaaacaaaagaaagaaagaaaacaagaaagcaagaaagcacgaaagcaatcaagcaagaaagcaagcaggaaagaaacaaaagaaagaaagaaatcgagaaaacaagaaagcacgaaagcaagcaagcaagaaagcaagcaagaaagaaacaaaagaaagaaagaaagaaagaaaacaggaaagcaagaaagcacgaaagcaagcaagcaagaaagcaagcaggaaagaaacaaaagaaagaaagaaatcgagaaaacaagaaagcacgaaagcaagcaagcaggaaagcaagcaagaaagaaagaaaagaaagaaagaaagaaagaaaacaggaaagcaagaaagcacgaaagcaagcaagcaagcaagcaagcaagcaagcaagaaacaaaacaaaaaagaaagaaagaaagaaagaaaacaggaaagcaagaaagcacgaaagcaagcaagcaagcaagaaagcaagcawgaaagaaacgaaagaaagaaagaaagcaatgaaaacgggaaagcaagaaagcacgaaagcaagcaagcgagcgagagag

SEQ ID NO: 232262 - DNA, 481 bp, Homo sapiens
gcaccgcctcgaagaaattcacgactcttgactagtgacagctccacaaccgaggagaataggagaaaattaaaaatgaagtttccacctaaaatcccaaacagaagaaccaaaagtaaaactaataaaggagcaataactccaccgaacataagtgatagcctggaagtgacaaaattggactcttccgtcatttcagaagggaaaatagccgcaatcgcgcctcagattcaggcttttaatctacaaaaagcagcagcggaaggcttgmtgagccttcttcgtgaaagggggaaaggttatttagctttgtgttcttaccacggcaaagaagctatcagcatcttgagccatctagcttctcaccactgcaataccggttgggtactgtgccaaatcggaagggcctattgtaaactttcagagtccacgcaagctgaaagacaattctcagaggttaggaggattgagaattacagag

SEQ ID NO: 232263 - DNA, 593 bp, Homo sapiens
cctagacattgtaaggcatggtaagtgctaatgaagcgtaaagacaaagccctatggatggtgccggtactcgctaatttttctggttagatagctctttattgtcacgratttggtgaaaaatacttagggatggtacctactgctgaataacttctaactaagatgtttccttacgaaacgtatgtcttgaacaaactctgaagtgaactcatgatcgtagaataccagatccttatactcaacagtttcagtcttctagcaaacttttgcagacgctgtagttgtctttggtttgtgtgtgtgtttctttagttgtgttccttgatttgttactttttcttcgagcaccgaagtggtgatggggacaagaagtgcttgggagactggaaaggaatagcatagttcacttattggataatagaaaaatacatggaaacaattcactagctgctgctttttgacagtgttccagtttacggagttactatgaagaacttcacgtaccctttaatttagcagtctctctgttttactcttttgtactcgtgtataagtaggcacataggaaattactacctaggtcatattgt

SEQ ID NO: 232264 - DNA, 540 bp, Homo sapiens
  misc_feature (1)...(540): n = A,T,C or G
agagatcaggtcatggtgtttatagagaaaggtaggtaacagtgaaaargggattggttgcattaaatttacgacgtgatgcctcaagtgccagagtagtgagctttctgccccactcgcagggctggtcaatggtgtggctggaaccctacttgagctgcctgactgccagagcccatgcttagtacaaacttcaatgagccatgaaagcaattccaacaacaggcacttaatggctctgagattttatcacagcctgttcttcatggctagcaacttcagagaagagtgacagctgtgaggttccagaagccacacctnaggtnccccagttnctccncagcagctggagtncaggtgcaacaggacctgatgncggncagggaaccatggncacacgctgtgtgaggctggcggcaagacagtctcccctcctaccctctgctcatctgctaggtctttgccttttattctgattgtgctgctccaggcttggaacaaagcccgaaattcctcttgagtctgaagatgatgatggtt

SEQ ID NO: 232265 - DNA, 595 bp, Homo sapiens
  misc_feature (1)...(595): n = A,T,C or G
agtggaaagagacaatatagcaaaaaaatcatgaggaagaataatatatactatataacatatgtttatccattttaagaaaaatgctagcagagatcaggtcatggtgtttatagagaaaggtaggtaacagtgaaaaagggattggttgcattaaatttacgacgtgatgcctcaagtgycagagtagtgagctttctgccccactcgcagggctggtcaatggtgtggctggaaccctacttgagctgcctgactgccagagcccatgcttagtacaaacttcaatgagccatgaaagcaattccaacaacaggcacttaatggctctgagattttatcacagcctgttcttcatggctagcaacttcagagaagagtgacagctgtgaggttccagaagccacacctnaggtnccccagttnctccncagcagctggagtncaggtgcaacaggacctgatgncggncagggaaccatggncacacgctgtgtgaggctggcggcaagacagtctcccctcctaccctctgctcatctgctaggtctttgccttttattctgattgtgctgctccaggcttggaacaaagc

SEQ ID NO: 232266 - DNA, 540 bp, Homo sapiens
  misc_feature (1)...(540): n = A,T,C or G
agagatcaggtcatggtgtttatagagaaaggtaggtaacagtgaaaaagggattggttgcattaaatttacgacgtgatgcctcaagtgccagagtagtgagctttctgccccactcgcagggctggtcaatggtgtggctggaaccctactygagctgcctgactgccagagcccatgcttagtacaaacttcaatgagccatgaaagcaattccaacaacaggcacttaatggctctgagattttatcacagcctgttcttcatggctagcaacttcagagaagagtgacagctgtgaggttccagaagccacacctnaggtnccccagttnctccncagcagctggagtncaggtgcaacaggacctgatgncggncagggaaccatggncacacgctgtgtgaggctggcggcaagacagtctcccctcctaccctctgctcatctgctaggtctttgccttttattctgattgtgctgctccaggcttggaacaaagcccgaaattcctcttgagtctgaagatgatgatggtt

SEQ ID NO: 232267 - DNA, 595 bp, Homo sapiens
  misc_feature (1)...(595): n = A,T,C or G
agtggaaagagacaatatagcaaaaaaatcatgaggaagaataatatatactatataacatatgtttatccattttaagaaaaatgctagcagagatcaggtcatggtgtttatagagaaaggtaggtaacagtgaaaaagggattggttgcattaaatttacgacgtgatgcctcaagtgccagagtagtgagctttctgccccactcgcagggctggtcaatggtgtggctggaaccctacttgagctgcctgactgccagagcccatgcttagtacaaacttcaatgagccatgaaagcaattccaacaacaggcacttaatggctctgagattttatcacagyctgttcttcatggctagcaacttcagagaagagtgacagctgtgaggttccagaagccacacctnaggtnccccagttnctccncagcagctggagtncaggtgcaacaggacctgatgncggncagggaaccatggncacacgctgtgtgaggctggcggcaagacagtctcccctcctaccctctgctcatctgctaggtctttgccttttattctgattgtgctgctccaggcttggaacaaagc

SEQ ID NO: 232268 - DNA, 540 bp, Homo sapiens
  misc_feature (1)...(540): n = A,T,C or G
agagatcaggtcatggtgtttatagagaaaggtaggtaacagtgaaaaagggattggttgcattaaatttacgacgtgatgcctcaagtgccagagtagtgagctttctgccccactcgcagggctggtcaatggtgtggctggaaccctacttgagctgcctgactgccagagcccatgcttagtacaaacttcaatgagccatgaaagcaattccaacaacaggcacttaatggctctgagattttatcacagcctgttcttcatggctagcaacttcagagaagagtgacagctgtgaggttccagaagccacacctnaggtnccccagttnctccncagcagctggagtncaggtgcaacaggacctgatgncggncagggaaccatggncacacgctgtgtgaggctggcggcaagacagtctcccctcctaccctctgctcatctgctaggtctttgccttttattctgattgtgctgctccaggcttggmacaaagcccgaaattcctcttgagtctgaagatgatgatggtt

SEQ ID NO: 232269 - DNA, 540 bp, Homo sapiens
  misc_feature (1)...(540): n = A,T,C or G
agagatcaggtcatggtgtttatagagaaaggtaggtaacagtgaaaaagggattggttgcattaaatttacgacgtgatgcctcaagtgccagagtagtgagctttctgccccactcgcagggctggtcaatggtgtggctggaaccctacttgagctgcctgactgccagagcccatgcttagtacaaacttcaatgagccatgaaagcaattccaacaacaggcacttaatggctctgagattttatcacagcctgttcttcatggctagcaacttcagagaagagtgacagctgtgaggttccagaagccacacctnaggtnccccagttnctccncagcagctggagtncaggtgcaacaggacctgatgncggncagggaaccatggncacacgctgtgtgaggctggcggcaagacagtctcccctcctaccctctgctcatctgctaggtctttgccttttattctgattgtgctgctccaggcttggaacmaagcccgaaattcctcttgagtctgaagatgatgatggtt

SEQ ID NO: 232270 - DNA, 595 bp, Homo sapiens
ttctctacctccacattaaatttgatatcagaggcctaaaacctttttcaccataaacacccatgtcctccacatgcccaagtctctgaaggatggagatttcctcatccaagctccacattccaagcctctggtgtttcatggtcttgccatgaaaagtcttgtyccctccccaagaggaaatgagtctattcttaacctagaggtgtgaatgatgccaatgcgccaaaccaggcacaacggagaagctgacgaagtccctgacagcagccttccagggtcaaactctcttctttttatcatttttctcaagttttaccaggacttcctcaccactctgtagttcctggaccagctgtctagtagttgagcatatgtcttctccaaggcacagtggtgactctgccagctactaactgtgtcttagcataccagtgcatctttatcagcctcaatttgcatctttatagagaattgtaaaatgaacctctgttctgtacgagagacatgcaaggggagaagaaaacacacccaaaaaaacctttaagggtaaacaagctttatctgacgtaaatggcagtgcagctataataag

SEQ ID NO: 232271 - DNA, 595 bp, Homo sapiens
ttctctacctccacattaaatttgatatcagaggcctaaaacctttttcaccataaacacccatgtcctccacatgcccaagtctctgaaggatggagatttcctcatccaagctccacattccaagcctctggtgtttcatggtcttgccatgaaaagtcttgtcccctccccargaggaaatgagtctattcttaacctagaggtgtgaatgatgccaatgcgccaaaccaggcacaacggagaagctgacgaagtccctgacagcagccttccagggtcaaactctcttctttttatcatttttctcaagttttaccaggacttcctcaccactctgtagttcctggaccagctgtctagtagttgagcatatgtcttctccaaggcacagtggtgactctgccagctactaactgtgtcttagcataccagtgcatctttatcagcctcaatttgcatctttatagagaattgtaaaatgaacctctgttctgtacgagagacatgcaaggggagaagaaaacacacccaaaaaaacctttaagggtaaacaagctttatctgacgtaaatggcagtgcagctataataag

SEQ ID NO: 232272 - DNA, 595 bp, Homo sapiens
ttctctacctccacattaaatttgatatcagaggcctaaaacctttttcaccataaacacccatgtcctccacatgcccaagtctctgaaggatggagatttcctcatccaagctccacattccaagcctctggtgtttcatggtcttgccatgaaaagtcttgtcccctccccaagaggaaatgagtctattcttaacctagaggtgtgaatgatgccaatgcgccaaaccaggcacaacggagaagctgasgaagtccctgacagcagccttccagggtcaaactctcttctttttatcatttttctcaagttttaccaggacttcctcaccactctgtagttcctggaccagctgtctagtagttgagcatatgtcttctccaaggcacagtggtgactctgccagctactaactgtgtcttagcataccagtgcatctttatcagcctcaatttgcatctttatagagaattgtaaaatgaacctctgttctgtacgagagacatgcaaggggagaagaaaacacacccaaaaaaacctttaagggtaaacaagctttatctgacgtaaatggcagtgcagctataataag

SEQ ID NO: 232273 - DNA, 595 bp, Homo sapiens
ttctctacctccacattaaatttgatatcagaggcctaaaacctttttcaccataaacacccatgtcctccacatgcccaagtctctgaaggatggagatttcctcatccaagctccacattccaagcctctggtgtttcatggtcttgccatgaaaagtcttgtcccctccccaagaggaaatgagtctattcttaacctagaggtgtgaatgatgccaatgcgccaaaccaggcacaacggagaagctgacgaagtccctgacagcagscttccagggtcaaactctcttctttttatcatttttctcaagttttaccaggacttcctcaccactctgtagttcctggaccagctgtctagtagttgagcatatgtcttctccaaggcacagtggtgactctgccagctactaactgtgtcttagcataccagtgcatctttatcagcctcaatttgcatctttatagagaattgtaaaatgaacctctgttctgtacgagagacatgcaaggggagaagaaaacacacccaaaaaaacctttaagggtaaacaagctttatctgacgtaaatggcagtgcagctataataag

SEQ ID NO: 232274 - DNA, 543 bp, Homo sapiens
acttgtgacgggggtgttcagtgtgcagatgatttcatcacccgggtagtcagtgctgtgtccgacagtattcgtgttttgttttcttcctgaagctgtctctccttccacccctcctccctcaagcagrcttccgcgtccccggtccccctcgttctgcccatgcaagaactgtcatctgtaagttcccacttctagatgagaacacgcggtatttagccgatccttgctgtcatcttcggtggtggcggtggtggtgaaagaggcatgacactaaatcgacccttaggacgctcccctccgtccccaccccgcaccccctccccacacacaccctcattcccgcaccccctcctcaaacgcaagaaaggaagaaatgaaagtaagaggtgagcctgcaaggcggtggaggcgggggatctcagagggcgagcaagcgatggcggtcgggggatgtgtcggctgaggtatcaaaaataggggacccagttttcagccccaacacaccccctaatcctcagccgcagccagcctctgggtggg

SEQ ID NO: 232275 - DNA, 550 bp, Homo sapiens
caagattgtgacataggtaaacttgtgacgggggtgttcagtgtgcagatgatttcatcacccgggtagtcagtgctgtgtccgacagtattcgtgttttgttttcttcctgaagctgtctctccttccacccctcctccctcaagcagacttccgcgtccccggtccccctcgttctgcccatgcaagaactgtcatctgtaagttcccacttctagatgagaacacgcggtatttagccgatccttgctgtcatcttcggtggtggyggtggtggtgaaagaggcatgacactaaatcgacccttaggacgctcccctccgtccccaccccgcaccccctccccacacacaccctcattcccgcaccccctcctcaaacgcaagaaaggaagaaatgaaagtaagaggtgagcctgcaaggcggtggaggcgggggatctcagagggcgagcaagcgatggcggtcgggggatgtgtcggctgaggtatcaaaaataggggacccagttttcagccccaacacaccccctaatcctcagccgcagcca

SEQ ID NO: 232276 - DNA, 572 bp, Homo sapiens
ctacaggcgtcagccactgcgcccggccgagagagattggtattatgtaatggtgagatggattaactttccaggaatctataacaataatttakaaatcatatatatataatttgaaaaatctgcaaaaatataccactgagattttgacaaaaattacattaaatttttgtattactataaatagcactgacatctttctttctttttttttttttagagacagagtttctttctctctggctggagggcagtggcatgatctctcgataggctcacttcaacctcctcctcccaggttcaactgattctcgtctttcaaatatgtaaaacaaatattgacagaagtcaagcaagaaatacatagcaacacaacaatggtggacttcaagactccactttcagtaatgactagaatagtcagaagtaatatcagtaagaaagccaaacctgaacattatagacccaaccagcatttacagaactctccaatttaaaggagcaaaatctgcaatattctaaatcacacatggtacattctgttaggatacatgtcttattaaatttaagaa

SEQ ID NO: 232277 - DNA, 572 bp, Homo sapiens
ctacaggcgtcagccactgcgcccggccgagagagattggtattatgtaatggtgagatggattaactttccaggaatctataacaataatttataaatcatatatatataatttgaaaaatctgcaaaaatataccaytgagattttgacaaaaattacattaaatttttgtattactataaatagcactgacatctttctttctttttttttttttagagacagagtttctttctctctggctggagggcagtggcatgatctctcgataggctcacttcaacctcctcctcccaggttcaactgattctcgtctttcaaatatgtaaaacaaatattgacagaagtcaagcaagaaatacatagcaacacaacaatggtggacttcaagactccactttcagtaatgactagaatagtcagaagtaatatcagtaagaaagccaaacctgaacattatagacccaaccagcatttacagaactctccaatttaaaggagcaaaatctgcaatattctaaatcacacatggtacattctgttaggatacatgtcttattaaatttaagaa

SEQ ID NO: 232278 - DNA, 572 bp, Homo sapiens
ctacaggcgtcagccactgcgcccggccgagagagattggtattatgtaatggtgagatggattaactttccaggaatctataacaataatttataaatcatatatatataatttgaaaaatctgcaaaaatataccactgagattttgacaaaaattacattaaatttttgtattactataaatagcactgacatctttctttctttttttttttttagagacagagtttctttctctcwggctggagggcagtggcatgatctctcgataggctcacttcaacctcctcctcccaggttcaactgattctcgtctttcaaatatgtaaaacaaatattgacagaagtcaagcaagaaatacatagcaacacaacaatggtggacttcaagactccactttcagtaatgactagaatagtcagaagtaatatcagtaagaaagccaaacctgaacattatagacccaaccagcatttacagaactctccaatttaaaggagcaaaatctgcaatattctaaatcacacatggtacattctgttaggatacatgtcttattaaatttaagaa

SEQ ID NO: 232279 - DNA, 530 bp, Homo sapiens
tatggcaaatctcagccaccggtaaaaaggacaaccrccctgctctgaccacactggaggctggtcagtctaagcatggctgaagcttaaggattcttcaaactctgctctagtcacatcccggaagctgactagtgtacacacagccgaagctaagaggaccatgtccagataagtaaatgtgaatacaatttataaccatagttacaattctgtcaatactgattgttccattgttatgttattactgcaaatgctgcaaatgtctatgcccagaggaaagtttttgtgcccatgtgtagtgtaagcatgtttctattacatacaacaatgttgttaccatttatgcttatactgaaaggggataaatctcttgaaggatgtccacgctgtgtacacattacctggataaaaaataccacagttaaaactctactgtaccatacctactatgaatgtacaggaagcaaattaggaatatgcacatacaaccagaccacctattcagtctgtgactgaggaaataatca

SEQ ID NO: 232280 - DNA, 530 bp, Homo sapiens
tatggcaaatctcagccaccggtaaaaaggacaaccgccctgctctgaccacactggaggctggtcagtctaagcatggctgaagcttaaggattcttcaaactctgctctagtcacatcccggaagctgactagtgtacacacagccgaagctaagaggaccatgtccagataagtaaatgtgaatacaatttataaccatagttacaattctgtcaatactgattgttccrttgttatgttattactgcaaatgctgcaaatgtctatgcccagaggaaagtttttgtgcccatgtgtagtgtaagcatgtttctattacatacaacaatgttgttaccatttatgcttatactgaaaggggataaatctcttgaaggatgtccacgctgtgtacacattacctggataaaaaataccacagttaaaactctactgtaccatacctactatgaatgtacaggaagcaaattaggaatatgcacatacaaccagaccacctattcagtctgtgactgaggaaataatca

SEQ ID NO: 232281 - DNA, 530 bp, Homo sapiens
tatggcaaatctcagccaccggtaaaaaggacaaccgccctgctctgaccacactggaggctggtcagtctaagcatggctgaagcttaaggattcttcaaactctgctctagtcacatcccggaagctgactagtgtacacacagccgaagctaagaggaccatgtccagataagtaaatgtgaatacaatttataaccatagttacaattctgtcaatactgattgttccattgttatgttattactgcaaatgctgcaaatgtctatgcccagaggaaagtttttgtgcccatgtgtagtgtaagcatgtttctattacatacaacaatgttgttaccatttatgcttatactgaaaggggataaatctcttgaaggatgtccaygctgtgtacacattacctggataaaaaataccacagttaaaactctactgtaccatacctactatgaatgtacaggaagcaaattaggaatatgcacatacaaccagaccacctattcagtctgtgactgaggaaataatca

SEQ ID NO: 232282 - DNA, 572 bp, Homo sapiens
ctacaggcgtcagccactgcgcccggccgagagagattggtattatgtaatggtgagatggattaactttccaggaatctataacaataatttataaatcatatatatataatttgaaaaatctgcaaaaatataccactgagattttgacaaaaattacattaaatttttgtattactataaatagcactgacatctttctttctttttttttttttagagacagagtttctttctctctggctggagggcagtggcatgatctctcgataggctcacttcaacctcctcctcccaggttcaactgattctcgtctttcaaatatgtaaaacaaatattgacagaagtcaagcaagaaatacatagcaacacaacaatggtggacttcaagactccactttcagtaatgactagaatagtcagaagtaatatcagtaagaaagccaaacctgaacattatagacccaaccagcatttacagaactctccaatttaaaggagcaaaatctrcaatattctaaatcacacatggtacattctgttaggatacatgtcttattaaatttaagaa

SEQ ID NO: 232283 - DNA, 555 bp, Homo sapiens
gttccactactaattgtcaaaaatactataaggactcaaatgcatccaacccctcaataccaagtcattctgtaagcattttgatcagccagtgcccgaggttcccccatcaaccaaaaacttatttgctcaactagstgaagacacagatggcagcttaaaaatttcttcatgctatgtatgtagagaaactaatatggagaatgagtggcaatgggaggcaaaggaattaatgccacaagataacttcactctgcttaaccctgccagtgaaccaacagcctcagccagtgtttgattgttagaaatctccataactggaaagtactgtatcactcgatggggaaaggctttcacagaggcagtaggaaaaacaacctgcctagggcaacagtattattacgagactaaaaacaaaactctatgaagaaatgcccagaatgactcctacttaccagatccaaacactttctctggattccttactctaagctgcacttggcatcaggtagatgattcaaatgcttgaaaggcaccctctggcctatattggat

SEQ ID NO: 232284 - DNA, 555 bp, Homo sapiens
gttccactactaattgtcaaaaatactataaggactcaaatgcatccaacccctcaataccaagtcattctgtaagcattttgatcagccagtgcccgaggttcccccatcaaccaaaaacttatttgctcaactaggtgaaracacagatggcagcttaaaaatttcttcatgctatgtatgtagagaaactaatatggagaatgagtggcaatgggaggcaaaggaattaatgccacaagataacttcactctgcttaaccctgccagtgaaccaacagcctcagccagtgtttgattgttagaaatctccataactggaaagtactgtatcactcgatggggaaaggctttcacagaggcagtaggaaaaacaacctgcctagggcaacagtattattacgagactaaaaacaaaactctatgaagaaatgcccagaatgactcctacttaccagatccaaacactttctctggattccttactctaagctgcacttggcatcaggtagatgattcaaatgcttgaaaggcaccctctggcctatattggat

SEQ ID NO: 232285 - DNA, 555 bp, Homo sapiens
gttccactactaattgtcaaaaatactataaggactcaaatgcatccaacccctcaataccaagtcattctgtaagcattttgatcagccagtgcccgaggttcccccatcaaccaaaaacttatttgctcaactaggtgaagacacagatggcagcttaaaaatttcttcatgctatgtatgtagagaaactaatatggagaatgagtggcaatgggaggcaaaggaattaatgccacaagataacttcactytgcttaaccctgccagtgaaccaacagcctcagccagtgtttgattgttagaaatctccataactggaaagtactgtatcactcgatggggaaaggctttcacagaggcagtaggaaaaacaacctgcctagggcaacagtattattacgagactaaaaacaaaactctatgaagaaatgcccagaatgactcctacttaccagatccaaacactttctctggattccttactctaagctgcacttggcatcaggtagatgattcaaatgcttgaaaggcaccctctggcctatattggat

SEQ ID NO: 232286 - DNA, 555 bp, Homo sapiens
gttccactactaattgtcaaaaatactataaggactcaaatgcatccaacccctcaataccaagtcattctgtaagcattttgatcagccagtgcccgaggttcccccatcaaccaaaaacttatttgctcaactaggtgaagacacagatggcagcttaaaaatttcttcatgctatgtatgtagagaaactaatatggagaatgagtggcaatgggaggcaaaggaattaatgccacaagataacttcactctgcttaaccctgccagtgaaccaacagcctcagccagtgtttgattgttaraaatctccataactggaaagtactgtatcactcgatggggaaaggctttcacagaggcagtaggaaaaacaacctgcctagggcaacagtattattacgagactaaaaacaaaactctatgaagaaatgcccagaatgactcctacttaccagatccaaacactttctctggattccttactctaagctgcacttggcatcaggtagatgattcaaatgcttgaaaggcaccctctggcctatattggat

SEQ ID NO: 232287 - DNA, 651 bp, Homo sapiens
tcatatttttgatatctttggcaaccttttttattgccttttacaggtcttctagtaagtatgtcattgagcttttgatttgcatttctctaaactaataatgtcacatattttaaatttaatgacaaattttgcttcttatctgtagaaatttttaattcaaattccttgcacatttttcaagtagtcaattgtctatttattattgatttataagactttgtgtatttgagcaagatggctgaatagacaaaccaaggtggaacagctgacascaagggaccaggatgactggcacactcttaaccgagggcaggtactgatagtgatggaggaaagacacaacatctgaacttaagattcagaagctgggaaccctgcacagggctaaagcacagtggaactgatttctggcccccagtgactctgagaaaaacaggtgagtttaagtggcaaggagctacctgctttcctgactggcctctggaatcccactggcagagaccctctgaccatcatggaaaatgagttgaaaggaagagctgcttagagaagtgacaggggcagcacaccagccagtgcacagccaagagggtttattgtgggaacatgtgtagtgaagcatgtccagggatgcccacaccaataagc

SEQ ID NO: 232288 - DNA, 651 bp, Homo sapiens
tcatatttttgatatctttggcaaccttttttattgccttttacaggtcttctagtaagtatgtcattgagcttttgatttgcatttctctaaactaataatgtcacatattttaaatttaatgacaaattttgcttcttatctgtagaaatttttaattcaaattccttgcacatttttcaagtagtcaattgtctatttattattgatttataagactttgtgtatttgagcaagatggctgaatagacaaaccaaggtggaacagctgacaccaagggaccaggatgactggcacactcttaacsgagggcaggtactgatagtgatggaggaaagacacaacatctgaacttaagattcagaagctgggaaccctgcacagggctaaagcacagtggaactgatttctggcccccagtgactctgagaaaaacaggtgagtttaagtggcaaggagctacctgctttcctgactggcctctggaatcccactggcagagaccctctgaccatcatggaaaatgagttgaaaggaagagctgcttagagaagtgacaggggcagcacaccagccagtgcacagccaagagggtttattgtgggaacatgtgtagtgaagcatgtccagggatgcccacaccaataagc

SEQ ID NO: 232289 - DNA, 651 bp, Homo sapiens
tcatatttttgatatctttggcaaccttttttattgccttttacaggtcttctagtaagtatgtcattgagcttttgatttgcatttctctaaactaataatgtcacatattttaaatttaatgacaaattttgcttcttatctgtagaaatttttaattcaaattccttgcacatttttcaagtagtcaattgtctatttattattgatttataagactttgtgtatttgagcaagatggctgaatagacaaaccaaggtggaacagctgacaccaagggaccaggatgactggcacactcttaaccgagggcaggtactgatagtgatggaggaaagacacaamatctgaacttaagattcagaagctgggaaccctgcacagggctaaagcacagtggaactgatttctggcccccagtgactctgagaaaaacaggtgagtttaagtggcaaggagctacctgctttcctgactggcctctggaatcccactggcagagaccctctgaccatcatggaaaatgagttgaaaggaagagctgcttagagaagtgacaggggcagcacaccagccagtgcacagccaagagggtttattgtgggaacatgtgtagtgaagcatgtccagggatgcccacaccaataagc

SEQ ID NO: 232290 - DNA, 651 bp, Homo sapiens
tcatatttttgatatctttggcaaccttttttattgccttttacaggtcttctagtaagtatgtcattgagcttttgatttgcatttctctaaactaataatgtcacatattttaaatttaatgacaaattttgcttcttatctgtagaaatttttaattcaaattccttgcacatttttcaagtagtcaattgtctatttattattgatttataagactttgtgtatttgagcaagatggctgaatagacaaaccaaggtggaacagctgacaccaagggaccaggatgactggcacactcttaaccgagggcaggtactgatagtgatggaggaaagacacaacatctgaacttaagattsagaagctgggaaccctgcacagggctaaagcacagtggaactgatttctggcccccagtgactctgagaaaaacaggtgagtttaagtggcaaggagctacctgctttcctgactggcctctggaatcccactggcagagaccctctgaccatcatggaaaatgagttgaaaggaagagctgcttagagaagtgacaggggcagcacaccagccagtgcacagccaagagggtttattgtgggaacatgtgtagtgaagcatgtccagggatgcccacaccaataagc

SEQ ID NO: 232291 - DNA, 534 bp, Homo sapiens
acaccaataagcttaacttgctcccataagagacgttagccctaggggaaattttggacaaaaagtctgcagggtggtggcccatcagatggggctgttttgacctgagyttgcgttggtgtgctggcctctcctgcgaccccaattcggccctgcatgcttgcagtgcagccttgagtaccctgggggcctgcatcatagatcctgaactggcagatcatgtctgactagtagacagctccagtggggtgaccccatccaggcatcagcctgcctgctgcctctcctcactgcagcttccccccaaggcccattgccaccccacacatcactatgctggtgtgtgtgtgtgtgtgtgtgtgtgtgcatggaaggatcttgctttccctgtcctgtcagtgcacatgtgcatatgcattctgccctggcactgctgttggtaggagtgtactccaggccccctctcctgctataccaccactgcagacagaatcttgggggaaacagaggccatctgccccacaacaccagcac

SEQ ID NO: 232292 - DNA, 534 bp, Homo sapiens
acaccaataagcttaacttgctcccataagagacgttagccctaggggaaattttggacaaaaagtctgcagggtggtggcccatcagatggggctgttttgacctgagcttgygttggtgtgctggcctctcctgcgaccccaattcggccctgcatgcttgcagtgcagccttgagtaccctgggggcctgcatcatagatcctgaactggcagatcatgtctgactagtagacagctccagtggggtgaccccatccaggcatcagcctgcctgctgcctctcctcactgcagcttccccccaaggcccattgccaccccacacatcactatgctggtgtgtgtgtgtgtgtgtgtgtgtgtgcatggaaggatcttgctttccctgtcctgtcagtgcacatgtgcatatgcattctgccctggcactgctgttggtaggagtgtactccaggccccctctcctgctataccaccactgcagacagaatcttgggggaaacagaggccatctgccccacaacaccagcac

SEQ ID NO: 232293 - DNA, 477 bp, Homo sapiens
aagagaccaaaggtatgacccactggtgttcatgaaacaggtggggagaatggaagccatttgaaaaacatattttaggatatcattcatgagaacttccccaacctggggaatgctggctagagaggccagcattcaaatttaggaaatgcagaaaactccagtaagatacttcataatataataatcacmaaaacacatagttatcagattgttcaagcatgaaataaaagaaaaaatgtcaaatgcagctagagaggaaagggaggtcaaccacaaaggaaagattatcagtgtaaaagtacgccttttagcagaaatcctacaagccagaagagaccaataccaatatttaacctccttgaagaaaataaattccaatcaacaatctcgtatttggccaaactaagcttcataagtaaaggagaaataaagttctttttaaacaggcaaatgctgaggaaattcattactaca

SEQ ID NO: 232294 - DNA, 477 bp, Homo sapiens
aagagaccaaaggtatgacccactggtgttcatgaaacaggtggggagaatggaagccatttgaaaaacatattttaggatatcattcatgagaacttccccaacctggggaatgctggctagagaggccagcattcaaatttaggaaatgcagaaaactccagtaagatacttcataatataataatcaccaaaacacatagttatcagattgttcaagcatgaaataaaagaaaaaatgwcaaatgcagctagagaggaaagggaggtcaaccacaaaggaaagattatcagtgtaaaagtacgccttttagcagaaatcctacaagccagaagagaccaataccaatatttaacctccttgaagaaaataaattccaatcaacaatctcgtatttggccaaactaagcttcataagtaaaggagaaataaagttctttttaaacaggcaaatgctgaggaaattcattactaca

SEQ ID NO: 232295 - DNA, 477 bp, Homo sapiens
aagagaccaaaggtatgacccactggtgttcatgaaacaggtggggagaatggaagccatttgaaaaacatattttaggatatcattcatgagaacttccccaacctggggaatgctggctagagaggccagcattcaaatttaggaaatgcagaaaactccagtaagatacttcataatataataatcaccaaaacacatagttatcagattgttcaagcatgaaataaaagaaaaaatgtcaaatgcagctagagaggaaagggaggtcaaccacaaaggaaagattatcagtgtaaaagtacrccttttagcagaaatcctacaagccagaagagaccaataccaatatttaacctccttgaagaaaataaattccaatcaacaatctcgtatttggccaaactaagcttcataagtaaaggagaaataaagttctttttaaacaggcaaatgctgaggaaattcattactaca

SEQ ID NO: 232296 - DNA, 477 bp, Homo sapiens
aagagaccaaaggtatgacccactggtgttcatgaaacaggtggggagaatggaagccatttgaaaaacatattttaggatatcattcatgagaacttccccaacctggggaatgctggctagagaggccagcattcaaatttaggaaatgcagaaaactccagtaagatacttcataatataataatcaccaaaacacatagttatcagattgttcaagcatgaaataaaagaaaaaatgtcaaatgcagctagagaggaaagggaggtcaaccacaaaggaaagattatcagtgtaaaagtacgccttttagcagaaatcctacaagccagaagagaccaataccaatatttaacctccttgaagaaaayaaattccaatcaacaatctcgtatttggccaaactaagcttcataagtaaaggagaaataaagttctttttaaacaggcaaatgctgaggaaattcattactaca

SEQ ID NO: 232297 - DNA, 403 bp, Homo sapiens
gttaaattcaacaagaatatatgtattcatatttaaatatatacattttaaatatatacacacccaacacaggaacacccaaattcataaagcaagttcttagaggtctttaaaaagacttagattcctacacaattatagtgaaaaacttcaacaacccattgacaatattagattattaaggcagaaaattaacaagatattcaagatctgaatgcagcactggatcaaatggatgtaacagacacyttcagaactctccaccaaaaacaacaacatatacgttctcattgccacatggcacatactctaaaatcaaccacttaatcgacataaaactgttctcagaaattataaaagaattcaaattatgacaaccactctccgagaccagagtacagta

SEQ ID NO: 232298 - DNA, 405 bp, Homo sapiens
agatctgaatgcagcactggatcaaatggatgtaacagacactttcagaactctccaccaaaaacaacaacatatacgttctcattgccacatggcacatactctaaaatcaaccacttaatcgacataaaactgttctcagaaattataaaagaattcaaattatgacaaccactctcygagaccagagtacagtaaaattggaggtaaaagttgagaaaaccaatactcaataccatatgattacataaaaattaaataactcactcctgaatgacttttgtgtgaataatgaaattaaggcatcaatcaaaaagttatttgaaagtaatgagaacaaagacacaacctaccagaatccctgagatgcaactaaatcagtgttgagaaaaaaactgatgttgc

SEQ ID NO: 232299 - DNA, 408 bp, Homo sapiens
tcaagatctgaatgcagcactggatcaaatggatgtaacagacactttcagaactctccaccaaaaacaacaacatatacgttctcattgccacatggcacatactctaaaatcaaccacttaatcgacataaaactgttctcagaaattataaaagaattcaaattatgacaaccactctccragaccagagtacagtaaaattggaggtaaaagttgagaaaaccaatactcaataccatatgattacataaaaattaaataactcactcctgaatgacttttgtgtgaataatgaaattaaggcatcaatcaaaaagttatttgaaagtaatgagaacaaagacacaacctaccagaatccctgagatgcaactaaatcagtgttgagaaaaaaactgatgttgc

SEQ ID NO: 232300 - DNA, 405 bp, Homo sapiens
agatctgaatgcagcactggatcaaatggatgtaacagacactttcagaactctccaccaaaaacaacaacatatacgttctcattgccacatggcacatactctaaaatcaaccacttaatcgacataaaactgttctcagaaattataaaagaattcaaattatgacaaccactctccgagaccagagtayagtaaaattggaggtaaaagttgagaaaaccaatactcaataccatatgattacataaaaattaaataactcactcctgaatgacttttgtgtgaataatgaaattaaggcatcaatcaaaaagttatttgaaagtaatgagaacaaagacacaacctaccagaatccctgagatgcaactaaatcagtgttgagaaaaaaactgatgttgc

SEQ ID NO: 232301 - DNA, 384 bp, Homo sapiens
ggatgtaacagacactttcagaactctccaccaaaaacaacaacatatacgttctcattgccacatggcacatactctaaaatcaaccacttaatcgacataaaactgttctcagaaattataaaagaattcaaattatgacaaccactctccgagaccagagtacagtaaaattggaggtaaaagttgagaaaaccaatactcaataccatatgattacataaaaattaaataactcactcctgaatgacttttgtgtgaataatgaaattaagrcatcaatcaaaaagttatttgaaagtaatgagaacaaagacacaacctaccagaatccctgagatgcaactaaatcagtgttgagaaaaaaactgatgttgctgaaca

SEQ ID NO: 232302 - DNA, 405 bp, Homo sapiens
agatctgaatgcagcactggatcaaatggatgtaacagacactttcagaactctccaccaaaaacaacaacatatacgttctcattgccacatggcacatactctaaaatcaaccacttaatcgacataaaactgttctcagaaattataaaagaattcaaattatgacaaccactctccgagaccagagtacagtaaaattggaggtaaaagttgagaaaaccaatactcaataccatatgattacataaaaattaaataactcactcctgaatgacttttgtgtgaataatgaaattaaggcatcaatcaaaaagttatttgaaastaatgagaacaaagacacaacctaccagaatccctgagatgcaactaaatcagtgttgagaaaaaaactgatgttgc

SEQ ID NO: 232303 - DNA, 308 bp, Homo sapiens
catactctaaaatcaaccacttaatcgacataaaactgttctcagaaattataaaagaattcaaattatgacaaccactctccgagaccagagtacagtaaaattggaggtaaaagttgagaaaaccaatactcaataccatatgattacataaaaattaaataactcactcctgaatgacttttgtgtgaataatgaaattaaggcatcaatcaaaaagttatttgaaagtaatragaacaaagacacaacctaccagaatccctgagatgcaactaaatcagtgttgagaaaaaaactgatgttgc

SEQ ID NO: 232304 - DNA, 564 bp, Homo sapiens
agaaaagaatcaacaaagtcagaaaacaacccacagaatgaaagaaaatattttcaaactacctatctgaaaatggatttgtaaccaaaacatagaaggcgctcaaataactctatagaaaataaaatctaataatcctattttaaaaaataggcaaaatatgtaaacagacattactccaataaagacacgcaaatggcaaataggtatatgaaaagatgatcaacatcatgaatcatcagagaaatgcaaatcaaaattacaatgagctattacctcaccccagttaaagtgggttttagctaaaaggcaataacaaatgctgacaagcatgcsgagaaaagggaaccctcatatgctgttggtgggaatgtaagttggtggaaccactatggagaacagcttgaaggttcatcagaaaactaaaaatagagcttctgtacaatccagcaatttcactgttaggtatatatccaaaagagagaaaaatctgtgtattgaagtgatagctgtactcctgtgtttactgcaacactattcacaatagccaagatttggaagtaa

SEQ ID NO: 232305 - DNA, 473 bp, Homo sapiens
gcaataacaaatgctgacaagcatgccgagaaaagggaaccctcatatgctgttggtgggaatgtaagttggtggaaccactatggagaacagcttgaaggttcatcagaaaactaaaaatagagcttctgtacaatccagcaatttcactgttaggtatatatccaaaagagagaaaaatctgtgtatygaagtgatagctgtactcctgtgtttactgcaacactattcacaatagccaagatttggaagtaacataggtgtttatcgacagatgaataaacaaaaaagtggtacatatacacaatgtagtactattcagacataaaaatgaatgagattctgtcatttgtaaaaacatgggttaaactgaaggtcattttattaagtgaaataagccaggtatagaaagacaaacttcacacgttctcacttatttgttaaagctaaaaattaaaaccaaagaattaatg

SEQ ID NO: 232306 - DNA, 473 bp, Homo sapiens
gcaataacaaatgctgacaagcatgccgagaaaagggaaccctcatatgctgttggtgggaatgtaagttggtggaaccactatggagaacagcttgaaggttcatcagaaaactaaaaatagagcttctgtacaatccagcaatttcactgttaggtatatatccaaaagagagaaaaatctgtgtattraagtgatagctgtactcctgtgtttactgcaacactattcacaatagccaagatttggaagtaacataggtgtttatcgacagatgaataaacaaaaaagtggtacatatacacaatgtagtactattcagacataaaaatgaatgagattctgtcatttgtaaaaacatgggttaaactgaaggtcattttattaagtgaaataagccaggtatagaaagacaaacttcacacgttctcacttatttgttaaagctaaaaattaaaaccaaagaattaatg

SEQ ID NO: 232307 - DNA, 473 bp, Homo sapiens
gcaataacaaatgctgacaagcatgccgagaaaagggaaccctcatatgctgttggtgggaatgtaagttggtggaaccactatggagaacagcttgaaggttcatcagaaaactaaaaatagagcttctgtacaatccagcaatttcactgttaggtatatatccaaaagagagaaaaatctgtgtattgaagtgatagctgtactcctgtgtttaytgcaacactattcacaatagccaagatttggaagtaacataggtgtttatcgacagatgaataaacaaaaaagtggtacatatacacaatgtagtactattcagacataaaaatgaatgagattctgtcatttgtaaaaacatgggttaaactgaaggtcattttattaagtgaaataagccaggtatagaaagacaaacttcacacgttctcacttatttgttaaagctaaaaattaaaaccaaagaattaatg

SEQ ID NO: 232308 - DNA, 473 bp, Homo sapiens
gcaataacaaatgctgacaagcatgccgagaaaagggaaccctcatatgctgttggtgggaatgtaagttggtggaaccactatggagaacagcttgaaggttcatcagaaaactaaaaatagagcttctgtacaatccagcaatttcactgttaggtatatatccaaaagagagaaaaatctgtgtattgaagtgatagctgtactcctgtgtttactgcaacactattcacaatagccaagatttggaagtaacataggtgtttatcgacagatgaataaacaaaaaagtggtacatatacacaatgtagtactattcagacataaaaatgaatgagattctgtcatttgtaamaacatgggttaaactgaaggtcattttattaagtgaaataagccaggtatagaaagacaaacttcacacgttctcacttatttgttaaagctaaaaattaaaaccaaagaattaatg

SEQ ID NO: 232309 - DNA, 449 bp, Homo sapiens
gcatcataaaaaaaatcaataaaattgaaagattgaaataataaaatgaatgttttctaatcacaaaagagaaaattagagaccaaaaaagcaagaaatttgggaaatgcaaacatgtgtgcattaaatgacacaatcttaaataattaatgaataaaaaatgtacaaatagtgtcagagaatattttaacataaatagacatttagacaaaacataataaaatttrtgagacttagtgaaagttgagctctgagggaaacagcagaattactttataaaaaacaaagaaatcttaaattaatagcttaacgcttatggaagcatttaaataaaaatgaactacccagttcacctggagcaaacactatcagtggggtaaaaaggtagtcacgctgacaatcgtaggaggaaatacttggaaacaagacactgagaattaggatagtga

SEQ ID NO: 232310 - DNA, 451 bp, Homo sapiens
gcatcataaaaaaaatcaataaaattgaaagattgaaataataaaatgaatgttttctaatcacaaaagagaaaattagagaccaaaaaagcaagaaatttgggaaatgcaaacatgtgtgcattaaatgacacaatcttaaataattaatgaataaaaaatgtacaaatagtgtcagagaatattttaacataaatagacatttagacaaaacataataaaatttatgagacttagtgaaakttgagctctgagggaaacagcagaattactttataaaaaacaaagaaatcttaaattaatagcttaacgcttatggaagcatttaaataaaaatgaactacccagttcacctggagcaaacactatcagtggggtaaaaaggtagtcacgctgacaatcgtaggaggaaatacttggaaacaagacactgagaattaggatagtgata

SEQ ID NO: 232311 - DNA, 451 bp, Homo sapiens
gcatcataaaaaaaatcaataaaattgaaagattgaaataataaaatgaatgttttctaatcacaaaagagaaaattagagaccaaaaaagcaagaaatttgggaaatgcaaacatgtgtgcattaaatgacacaatcttaaataattaatgaataaaaaatgtacaaatagtgtcagagaatattttaacataaatagacatttagacaaaacataataaaatttatgagacttagtgaaagttgagctctgagggaawcagcagaattactttataaaaaacaaagaaatcttaaattaatagcttaacgcttatggaagcatttaaataaaaatgaactacccagttcacctggagcaaacactatcagtggggtaaaaaggtagtcacgctgacaatcgtaggaggaaatacttggaaacaagacactgagaattaggatagtgata

SEQ ID NO: 232312 - DNA, 445 bp, Homo sapiens
ctgcatcataaaaaaaatcaataaaattgaaagattgaaataataaaatgaatgttttctaatcacaaaagagaaaattagagaccaaaaaagcaagaaatttgggaaatgcaaacatgtgtgcattaaatgacacaatcttaaataattaatgaataaaaaatgtacaaatagtgtcagagaatattttaacataaatagacatttagacaaaacataataaaatttatgagacttagtgaaagttgagctctgagggaaacagcagaattactttataaaaaacaaagaaatcttaaattaatagcttaaygcttatggaagcatttaaataaaaatgaactacccagttcacctggagcaaacactatcagtggggtaaaaaggtagtcacgctgacaatcgtaggaggaaatacttggaaacaagacactgagaattagga

SEQ ID NO: 232313 - DNA, 444 bp, Homo sapiens
gctgcatcataaaaaaaatcaataaaattgaaagattgaaataataaaatgaatgttttctaatcacaaaagagaaaattagagaccaaaaaagcaagaaatttgggaaatgcaaacatgtgtgcattaaatgacacaatcttaaataattaatgaataaaaaatgtacaaatagtgtcagagaatattttaacataaatagacatttagacaaaacataataaaatttatgagacttagtgaaagttgagctctgagggaaacagcagaattactttataaaaaacaaagaaatcttaaattaatagcttaacrcttatggaagcatttaaataaaaatgaactacccagttcacctggagcaaacactatcagtggggtaaaaaggtagtcacgctgacaatcgtaggaggaaatacttggaaacaagacactgagaattag

SEQ ID NO: 232314 - DNA, 445 bp, Homo sapiens
ctgcatcataaaaaaaatcaataaaattgaaagattgaaataataaaatgaatgttttctaatcacaaaagagaaaattagagaccaaaaaagcaagaaatttgggaaatgcaaacatgtgtgcattaaatgacacaatcttaaataattaatgaataaaaaatgtacaaatagtgtcagagaatattttaacataaatagacatttagacaaaacataataaaatttatgagacttagtgaaagttgagctctgagggaaacagcagaattactttataaaaaacaaagaaatcttaaattaatagcttaacgyttatggaagcatttaaataaaaatgaactacccagttcacctggagcaaacactatcagtggggtaaaaaggtagtcacgctgacaatcgtaggaggaaatacttggaaacaagacactgagaattagga

SEQ ID NO: 232315 - DNA, 419 bp, Homo sapiens
ttatttcataagtagagggagtttcagtgttttggcaagttgtgtttttgttttttttttcttttctgttattctgcaagctcaagattttctgttagatactggctttcttttaactctgcagaagtgttgcaaaatgattggggctataggaatctattttccaaatctgagkttccacactgacattcctgggcaagatgtgatttctcctaactgcaacctccaggcagcctggtttgtatgatttctgagtagcagcccagtcaaaaaaggggttatggaactccaatttagttctgattatggtgtatataaacattcttgtctctattacaactggatctactacataaaatgtctacagcaaaataggaggggatcagataaaggtacaattataagtattggaatggatc

SEQ ID NO: 232316 - DNA, 255 bp, Homo sapiens
ctgattatggtgtatataaacattcttgtctctattacaactggmtctactacataaaatgtctacagcaaaataggaggggatcagataaaggtacaattataagtattggaatggatcacattaattctgaggatatagaaggggagcaacaacctgaaaccaggggagtgaacgacttagatctcaggagctatgggaaatggataggcatgaataacctcttttccttctgaattgcccctggcacactcc

SEQ ID NO: 232317 - DNA, 255 bp, Homo sapiens
ctgattatggtgtatataaacattcttgtctctattacaactggatctactacataaaatgtctacagcaaaataggaggggatcagataaaggtacaattataartattggaatggatcacattaattctgaggatatagaaggggagcaacaacctgaaaccaggggagtgaacgacttagatctcaggagctatgggaaatggataggcatgaataacctcttttccttctgaattgcccctggcacactcc

SEQ ID NO: 232318 - DNA, 255 bp, Homo sapiens
ctgattatggtgtatataaacattcttgtctctattacaactggatctactacataaaatgtctacagcaaaataggaggggatcagataaaggtacaattataagtattggaatggatcacattaattctgaggatatagaaggggagcaacaacctgaaaccaggrgagtgaacgacttagatctcaggagctatgggaaatggataggcatgaataacctcttttccttctgaattgcccctggcacactcc

SEQ ID NO: 232319 - DNA, 270 bp, Homo sapiens
tattttctctgtgagcagaggctcctccttctgtttttctaccatctagagatgaatctatatttgtcaatattgacataaattggagacataaatcatgtaagaaccctagacaagccttcaarataatctgagtcttgctcgtttctcttctcaattatgttgtcagagagagctacctgagatgaagtctctcaggaatagttagaacattgcacttctagagaagatggtgagacagggcaagactcacagtgagaataaaagctt

SEQ ID NO: 232320 - DNA, 270 bp, Homo sapiens
tattttctctgtgagcagaggctcctccttctgtttttctaccatctagagatgaatctatatttgtcaatattgacataaattggagacataaatcatgtaagaaccctagacaagccttcaaaataatctgagtcttgctcstttctcttctcaattatgttgtcagagagagctacctgagatgaagtctctcaggaatagttagaacattgcacttctagagaagatggtgagacagggcaagactcacagtgagaataaaagctt

SEQ ID NO: 232321 - DNA, 270 bp, Homo sapiens
tattttctctgtgagcagaggctcctccttctgtttttctaccatctagagatgaatctatatttgtcaatattgacataaattggagacataaatcatgtaagaaccctagacaagccttcaaaataatctgagtcttgctcgtttctcttctcaattatgttgtcagagagagctacctgagatgaagtctctcaggaatagttagaacattgcacttctagagaagatggtgagacagrgcaagactcacagtgagaataaaagctt

SEQ ID NO: 232322 - DNA, 518 bp, Homo sapiens
gttatatattttacatcatagaagaaatttgagaacacatagaatacaatccgctattcataattttttttgagcattttcaggctatgtttttgacatagactaagttgaattactgtgccagagacaatctcgtstctaaaagcaagtgacataaaaatagatctgcaaagatacattttctcccgctttaatttaagtaaacagctgagtacatcttcaagttgtactttgagttcagtaagataaatctgttttttaagactccaaatctagcactaacaatgggtcaaatccctgcaacagacatgaaaatcacaaacagctaatgcgttcctcatcctgaaattctcgctgccagcacagcagtctgaagttgacctgggccaattgaggtcagttggagggagtggagtccaccattactgaggctttagtagacagttttcccctgacggtgccaaggaggctggaaggtccgggttgggtgcagcaaagtggctgtggcagactgcttc

SEQ ID NO: 232323 - DNA, 518 bp, Homo sapiens
gttatatattttacatcatagaagaaatttgagaacacatagaatacaatccgctattcataattttttttgagcattttcaggctatgtttttgacatagactaagttgaattactgtgccagagacaatctcgtgtctaaaagcaartgacataaaaatagatctgcaaagatacattttctcccgctttaatttaagtaaacagctgagtacatcttcaagttgtactttgagttcagtaagataaatctgttttttaagactccaaatctagcactaacaatgggtcaaatccctgcaacagacatgaaaatcacaaacagctaatgcgttcctcatcctgaaattctcgctgccagcacagcagtctgaagttgacctgggccaattgaggtcagttggagggagtggagtccaccattactgaggctttagtagacagttttcccctgacggtgccaaggaggctggaaggtccgggttgggtgcagcaaagtggctgtggcagactgcttc

SEQ ID NO: 232324 - DNA, 518 bp, Homo sapiens
gttatatattttacatcatagaagaaatttgagaacacatagaatacaatccgctattcataattttttttgagcattttcaggctatgtttttgacatagactaagttgaattactgtgccagagacaatctcgtgtctaaaagcaagtgacataaaaatagatctgcaaagatacattttctcccgctttaatttaagtaaacagctgagtacatcttcaagttgtactttgagttcagtaagataaatctgttttttaagactccaaatctagcactaacaatgggtcaaatccctgcaacagacatgaaaatcacaaacagctaatgygttcctcatcctgaaattctcgctgccagcacagcagtctgaagttgacctgggccaattgaggtcagttggagggagtggagtccaccattactgaggctttagtagacagttttcccctgacggtgccaaggaggctggaaggtccgggttgggtgcagcaaagtggctgtggcagactgcttc

SEQ ID NO: 232325 - DNA, 518 bp, Homo sapiens
gttatatattttacatcatagaagaaatttgagaacacatagaatacaatccgctattcataattttttttgagcattttcaggctatgtttttgacatagactaagttgaattactgtgccagagacaatctcgtgtctaaaagcaagtgacataaaaatagatctgcaaagatacattttctcccgctttaatttaagtaaacagctgagtacatcttcaagttgtactttgagttcagtaagataaatctgttttttaagactccaaatctagcactaacaatgggtcaaatccctgcaacagacatgaaaatcacaaacagctaatgcgttcctcatcctgaaattctcgctgccagcacagcagtctgaagttgacctgggccaattgaggtcagttggagggagtggagtccaccattactgaggctttagtagacagttttcccctgacrgtgccaaggaggctggaaggtccgggttgggtgcagcaaagtggctgtggcagactgcttc

SEQ ID NO: 232326 - DNA, 544 bp, Homo sapiens
ggaaaccagagatcaggttggagtcttgctattcacatctgagtatacagactcactccccaactctcttatttttattctgccagctctgacctgaatatgaacataacaaacacacaagagttccaacacctgacaatcggcttctgcccaagaagtgtgccctctcttttgtccatcctgcaactcatggtacaaagaagtggygtggggctgcccagatgagatgatgagagaggcctggcctcgatggacatgtcctgggctgctctgtgttatctgtaggtgcacttggccaatggccaggggtatcaggaatgagggctgagttgatatctgtgttatcagagaaggcttttacattgaggctttgtaaggctagaactcagaaatatcaaggcacaatgaaaggacatctcactctcttgagcatctctcaccaacagaggtggatacagagctgtctcaagaatgtgggttcctggtttcttaactgctgtggggttctgtcaccaggaaagtgtgttaaactcttcaaggttcc

SEQ ID NO: 232327 - DNA, 544 bp, Homo sapiens
ggaaaccagagatcaggttggagtcttgctattcacatctgagtatacagactcactccccaactctcttatttttattctgccagctctgacctgaatatgaacataacaaacacacaagagttccaacacctgacaatcggcttctgcccaagaagtgtgccctctcttttgtccatcctgcaactcatggtacaaagaagtggtgtggggctgcccagatgagatgatgagagaggcctggcctcgatggacatgtcctgggctgctctgtgttatctgtaggtgcacttggccaatggccaggggtatcaggaatgagggctgagttgayatctgtgttatcagagaaggcttttacattgaggctttgtaaggctagaactcagaaatatcaaggcacaatgaaaggacatctcactctcttgagcatctctcaccaacagaggtggatacagagctgtctcaagaatgtgggttcctggtttcttaactgctgtggggttctgtcaccaggaaagtgtgttaaactcttcaaggttcc

SEQ ID NO: 232328 - DNA, 544 bp, Homo sapiens
ggaaaccagagatcaggttggagtcttgctattcacatctgagtatacagactcactccccaactctcttatttttattctgccagctctgacctgaatatgaacataacaaacacacaagagttccaacacctgacaatcggcttctgcccaagaagtgtgccctctcttttgtccatcctgcaactcatggtacaaagaagtggtgtggggctgcccagatgagatgatgagagaggcctggcctcgatggacatgtcctgggctgctctgtgttatctgtaggtgcacttggccaatggccaggggtatcaggaatgagggctgagttgatatctgtgttatcagagaaggcttttacattgaggctttgtaaggctasaactcagaaatatcaaggcacaatgaaaggacatctcactctcttgagcatctctcaccaacagaggtggatacagagctgtctcaagaatgtgggttcctggtttcttaactgctgtggggttctgtcaccaggaaagtgtgttaaactcttcaaggttcc

SEQ ID NO: 232329 - DNA, 524 bp, Homo sapiens
gaaagtcatgagacatgcacagtcatctcctcttgyttcctcacaggtcacatgaatattcagggagtgttaatatgaaacatgcaacggaaatttgggctctaacatcagcaaactcattctccatggacttcagttggccatattgcttccaacatatttcagccaattttttaaaatcttataagcagaggagatttaagtgtttcaacaagctgtttcttatctttcattctgaatatccaatttttaagtcttttttttttaacagtttgaaggcacaaattcagcttctgtcaaatggaatacagaatagtgtatgacttttgtattagttcaggctgctataccaaagaaccatgaactagacagcttatagacaacaggatttaatttctcacactcctagaggttggaaatttgagatcagggtatcagcatggttgagctctggtgatgactcttctgaatttcagactgcacacatcaaattttattctcatttggtagaaggagacagacat

SEQ ID NO: 232330 - DNA, 524 bp, Homo sapiens
gaaagtcatgagacatgcacagtcatctcctcttgtttcctcacaggtcacatgaatattcagggagwgttaatatgaaacatgcaacggaaatttgggctctaacatcagcaaactcattctccatggacttcagttggccatattgcttccaacatatttcagccaattttttaaaatcttataagcagaggagatttaagtgtttcaacaagctgtttcttatctttcattctgaatatccaatttttaagtcttttttttttaacagtttgaaggcacaaattcagcttctgtcaaatggaatacagaatagtgtatgacttttgtattagttcaggctgctataccaaagaaccatgaactagacagcttatagacaacaggatttaatttctcacactcctagaggttggaaatttgagatcagggtatcagcatggttgagctctggtgatgactcttctgaatttcagactgcacacatcaaattttattctcatttggtagaaggagacagacat

SEQ ID NO: 232331 - DNA, 590 bp, Homo sapiens
ggaaatttgagatcagggtatcagcatggttgagctctggtgatgactcttctgaatttcagactgcacacatcaaattttattctcatttggtagaaggagayagacatccctctggggtttcctgtgtaaagccagtaatctcaatcatgatggcctcaacctcaggagttaattacaacctatctccttatagcattacactgggggttacaattttaatacaaattattgtaactctcaagtttttttaaagctgtcattattcctcctactgggtttttcctatttgcttcctcagtctttccatttctttatgtctctttgtgtgaaactgtttgcctaattctgtctctcaattgtattcctcaaacagaggaagcaagctccaatgctatgagatgctctatgtacagacgcacataacaaagaacggagggagtgctcaggcagtagacagaagtaaagtcatgctctcagtctaccctgaaccctgccaattttcacaagcatgagcttaaaggttgatgcttttccggtccacattcagttgagaccacagccccaatctcataagagacctgaaggca

SEQ ID NO: 232332 - DNA, 590 bp, Homo sapiens
ggaaatttgagatcagggtatcagcatggttgagctctggtgatgactcttctgaatttcagactgcacacatcaaattttattctcatttggtagaaggagacagacatccctctggggtttcctgtrtaaagccagtaatctcaatcatgatggcctcaacctcaggagttaattacaacctatctccttatagcattacactgggggttacaattttaatacaaattattgtaactctcaagtttttttaaagctgtcattattcctcctactgggtttttcctatttgcttcctcagtctttccatttctttatgtctctttgtgtgaaactgtttgcctaattctgtctctcaattgtattcctcaaacagaggaagcaagctccaatgctatgagatgctctatgtacagacgcacataacaaagaacggagggagtgctcaggcagtagacagaagtaaagtcatgctctcagtctaccctgaaccctgccaattttcacaagcatgagcttaaaggttgatgcttttccggtccacattcagttgagaccacagccccaatctcataagagacctgaaggca

SEQ ID NO: 232333 - DNA, 590 bp, Homo sapiens
ggaaatttgagatcagggtatcagcatggttgagctctggtgatgactcttctgaatttcagactgcacacatcaaattttattctcatttggtagaaggagacagacatccctctggggtttcctgtgtaaagccagtaatctcaatcatgatggcctcaacctcaggagttaattacaacctatctccttatagcattacactgggggttacaattttaatacaaattattgtaactctcaagttyttttaaagctgtcattattcctcctactgggtttttcctatttgcttcctcagtctttccatttctttatgtctctttgtgtgaaactgtttgcctaattctgtctctcaattgtattcctcaaacagaggaagcaagctccaatgctatgagatgctctatgtacagacgcacataacaaagaacggagggagtgctcaggcagtagacagaagtaaagtcatgctctcagtctaccctgaaccctgccaattttcacaagcatgagcttaaaggttgatgcttttccggtccacattcagttgagaccacagccccaatctcataagagacctgaaggca

SEQ ID NO: 232334 - DNA, 472 bp, Homo sapiens
aagactcttcaccaagggtggcttctcactgacacattcttgtgcagagatgcctccctgttatcattctcatcatggattaaagatcacctcagtgaggactttgggtccccccattcaatgactttgcagctcttcttctcaacattctactttatataatagtccttgctcttttcttttatatatacttgctttagtgcttttgtcgagctgacttcasactgttctgtccttggaggggtatgcaggcatgatgtaatcattttctgtgccacatgttggacccaccagggtagctggcaaagggtgagtgcaagggaaaaaagattggctaagtgggcaatgtggaaattgttgataataacatgaggtgtgtgactcttacttgctccagctgctccagcaaagctcaataggcaccagaaacacagcaggctgtaaccacctccaggccatcactaacactgca

SEQ ID NO: 232335 - DNA, 527 bp, Homo sapiens
catgcctctgcttatctcttcctcaggctgtctgtaccaaattggtccctttctaatctctgccaaactcacacctgtaagactcttcaccaagggtggcttctcactgacacattcttgtgcagagatgcctccctgttatcattctcatcatggattaaagatcacctcagtgaggactttgggtccccccattcaatgactttgcagctcttcttctcaacattctactttatataatagtccttgctcttttcttttatatatacttgctttagtgcttttgtcgagctgacttcagactgttctgtccttggaggggtatgcaggcatgatgtaatcattttctgtgccacatgttggacccaccagggtagctggcaaagggtgagtgcaagggaaaaaagattggctaagtgggcaatgtggaaattgttgataataacatgaggtgtgtgactcttacttgctccagctgctccagcaaagctcaatagrcaccagaaacacagcaggctgtaaccacc

SEQ ID NO: 232336 - DNA, 528 bp, Homo sapiens
tggaatcctccattgccctctctttgcctccaccatttggagtgtgccatttactcatgaggcaccctccccttatccagggaaattatttaatacgactttcaaatgaggagctcaaaaacccaacaggaactggcattttcccatgacttcagactcagggtccagtgttctgacacgtttagctctatcccatctttatctacccaaaatgcctctggagtggccatgcctctctctgatttgaagggcctccagggagtagaagcatttctgcagagtttcagagcaaagagtcttagttcaccaatgaagaatcaaggctggcagacacttatgagtatrtgaaacaatcaaggttacccacttcgagcacccctatttatgaggaagaaaacagtcttctctgtagccattgtctacattaggctgaggtggagcatagctcattttacttccagctctccacagaagtggatacagaaccccagtcctgtcctcttgaaaccgacctggagaggaccccat

SEQ ID NO: 232337 - DNA, 580 bp, Homo sapiens
tcgctatgctttgtgaaaataccttcaaattattaattctgcaagttcgaatgatctatcttcactctttccttgggttaatattaaaatgaacatatgctctgagaaaaatggacctgggtgtcttatccggcagccagaaactatgactgcttttctcttcttcctcatacattatgctgctgactctttaggatttcataattcaaggagaaatgttagagtctgtatctcatttaagcttacacaagtgaaataaaaagaaccacaaccacaactccgattttgtagtagaatgagattttcatataatattcgactctagcatttactatttaygaaaaataaatatttcccctcctctctggataaacacattctggggaagagctctcagggagatggagaagagctgtctcttcttcttctgattttcagttgttccagcaaatgtctcacaatattctttacattgaagctgcaggaaatgaaccaaaacaccaagtgccttagttgggccctgctgctgaggaagaggctgtgtttgagctggtctcagtttgccctgtcactgacatag

SEQ ID NO: 232338 - DNA, 561 bp, Homo sapiens
ggaacctgcttactgatctcttgcttactagctgtactcattcaagtggtaaaagttttcatggcaactctagttcaccagaacgcttcagcacgagtgtactacatgaatcactatcaatctgtgatagaggaagacataggtagtgaggaagaaggtgagaactcccactaataaaatgagtgagagtctcaaagggggaaaataagggaggagaccaaccctcatattgtcttatacccaatttctgcctccaaagaaagaagaagtaaaaactagaaggcagaaatgaaatccacaagcagacagcccagcgccacaccctgggcctggtagttaaaggtcaacccctgacctaatcggttatttgcataaaaaatgcactgtgaagatccctgtcctgttcagtacctttctaattaccagtgtatgcagccccyagtcacatacccactgcttgctcaatagatcgtgaccctctcatgcggacccccttagagttgtgagcccttaaaagggacaggaattgctcactcggagggttcagctcttgggaaagaa

SEQ ID NO: 232339 - DNA, 561 bp, Homo sapiens
ggaacctgcttactgatctcttgcttactagctgtactcattcaagtggtaaaagttttcatggcaactctagttcaccagaacgcttcagcacgagtgtactacatgaatcactatcaatctgtgatagaggaagacataggtagtgaggaagaaggtgagaactcccactaataaaatgagtgagagtctcaaagggggaaaataagggaggagaccaaccctcatattgtcttatacccaatttctgcctccaaagaaagaagaagtaaaaactagaaggcagaaatgaaatccacaagcagacagcccagcgccacaccctgggcctggtagttaaaggtcaacccctgacctaatcggttatttgcataaaaaatgcactgtgaagatccctgtcctgttcagtacctttctaattaccagtgtatgcagcccccagtcacatacccactgcttgctcaatagatcrtgaccctctcatgcggacccccttagagttgtgagcccttaaaagggacaggaattgctcactcggagggttcagctcttgggaaagaa

SEQ ID NO: 232340 - DNA, 561 bp, Homo sapiens
ggaacctgcttactgatctcttgcttactagctgtactcattcaagtggtaaaagttttcatggcaactctagttcaccagaacgcttcagcacgagtgtactacatgaatcactatcaatctgtgatagaggaagacataggtagtgaggaagaaggtgagaactcccactaataaaatgagtgagagtctcaaagggggaaaataagggaggagaccaaccctcatattgtcttatacccaatttctgcctccaaagaaagaagaagtaaaaactagaaggcagaaatgaaatccacaagcagacagcccagcgccacaccctgggcctggtagttaaaggtcaacccctgacctaatcggttatttgcataaaaaatgcactgtgaagatccctgtcctgttcagtacctttctaattaccagtgtatgcagcccccagtcacatacccactgcttgctcaatagatcgtgaccctctcatgckgacccccttagagttgtgagcccttaaaagggacaggaattgctcactcggagggttcagctcttgggaaagaa

SEQ ID NO: 232341 - DNA, 613 bp, Homo sapiens
agtgaaagtaaaatcagctgccccagcagctgaagacaaatgaaaaaatctcagaaaaggcagaaaaaccggttttgtcacaaccacagaaaagaatagagaccgctcctccttacattccaatctaccccctttaccaaggtaactgtccctaaggagttaagttcaaatggatacatgctgccagtctcacccgagaaggtgaaatgagagcgaaaatcaggcaggccgtctcaggtctggtcgygcataagatatgctcatgcctcttaagaggacaggaggacccccactaagacccagatgatgcagtccagattcagcacctgcaaaggtgccgagaagcccatctgcaaaggctaaaggatggtaaaagaaaaaggcaatcaatattttaaaaaatctcagacatgcttcagggtgcagataaaagcacagcaagttctatgaaagactttgtgaggcatttttattgtacactccgtttaaccctgaggctactcaaaaatcagtgcagggtgaatccagcacttgtaaggcagacccaaggagatatcaggcataaattgcagaagttacaagctccgtaggcgtgaatgctactcagcttatt

SEQ ID NO: 232342 - DNA, 613 bp, Homo sapiens
agtgaaagtaaaatcagctgccccagcagctgaagacaaatgaaaaaatctcagaaaaggcagaaaaaccggttttgtcacaaccacagaaaagaatagagaccgctcctccttacattccaatctaccccctttaccaaggtaactgtccctaaggagttaagttcaaatggatacatgctgccagtctcacccgagaaggtgaaatgagagcgaaaatcaggcaggccgtctcaggtctggtcgcgcataagatatgctcatgcctcttaagaggacaggaggacccccactaagacccagatgatgcagtccagattcagcacctrcaaaggtgccgagaagcccatctgcaaaggctaaaggatggtaaaagaaaaaggcaatcaatattttaaaaaatctcagacatgcttcagggtgcagataaaagcacagcaagttctatgaaagactttgtgaggcatttttattgtacactccgtttaaccctgaggctactcaaaaatcagtgcagggtgaatccagcacttgtaaggcagacccaaggagatatcaggcataaattgcagaagttacaagctccgtaggcgtgaatgctactcagcttatt

SEQ ID NO: 232343 - DNA, 613 bp, Homo sapiens
agtgaaagtaaaatcagctgccccagcagctgaagacaaatgaaaaaatctcagaaaaggcagaaaaaccggttttgtcacaaccacagaaaagaatagagaccgctcctccttacattccaatctaccccctttaccaaggtaactgtccctaaggagttaagttcaaatggatacatgctgccagtctcacccgagaaggtgaaatgagagcgaaaatcaggcaggccgtctcaggtctggtcgcgcataagatatgctcatgcctcttaagaggacaggaggacccccactaagacccagatgatgcagtccagattcagcacctgcaaaggtgccgagaagcccatctgcaaaggcyaaaggatggtaaaagaaaaaggcaatcaatattttaaaaaatctcagacatgcttcagggtgcagataaaagcacagcaagttctatgaaagactttgtgaggcatttttattgtacactccgtttaaccctgaggctactcaaaaatcagtgcagggtgaatccagcacttgtaaggcagacccaaggagatatcaggcataaattgcagaagttacaagctccgtaggcgtgaatgctactcagcttatt

SEQ ID NO: 232344 - DNA, 613 bp, Homo sapiens
agtgaaagtaaaatcagctgccccagcagctgaagacaaatgaaaaaatctcagaaaaggcagaaaaaccggttttgtcacaaccacagaaaagaatagagaccgctcctccttacattccaatctaccccctttaccaaggtaactgtccctaaggagttaagttcaaatggatacatgctgccagtctcacccgagaaggtgaaatgagagcgaaaatcaggcaggccgtctcaggtctggtcgcgcataagatatgctcatgcctcttaagaggacaggaggacccccactaagacccagatgatgcagtccagattcagcacctgcaaaggtgccgagaagcccatctgcaaaggctaaaggatggtaaaagaaaaaggcaatcaatattttaaaaaatctcagacawgcttcagggtgcagataaaagcacagcaagttctatgaaagactttgtgaggcatttttattgtacactccgtttaaccctgaggctactcaaaaatcagtgcagggtgaatccagcacttgtaaggcagacccaaggagatatcaggcataaattgcagaagttacaagctccgtaggcgtgaatgctactcagcttatt

SEQ ID NO: 232345 - DNA, 443 bp, Homo sapiens
gtatgaaacagaagttcaacatcactgaccattagagaaatgtaaatccaaaccacaatgagayatcattttataccaggtataatggttaccatgaaaaaatcaaaaaatcacagatgctgacaaagttgtggagaaaaagcaacatttttaccctgttggtcgagttcaaacgttgtggaagacagtgtggtgattcttcaaagacctaaagaaaagaataccatttgacctagcaatctcattactgggtatatacccaaacaaatataagtcattctattataaagatacctgcacgctcaagttcatcacagccctattcacaatagcaaagacatcaaatcagcctacatgttcatcaataatagactggttgaagaaaacgtagttcatatacaacatggagtactatgcagccataaaaaagcacaagattatgt

SEQ ID NO: 232346 - DNA, 443 bp, Homo sapiens
gtatgaaacagaagttcaacatcactgaccattagagaaatgtaaatccaaaccacaatgagacatcattttataccaggtataatggttaccatgaaaaaatcaaaaaatcacagatgctgacaaagttgtggagaaaaagcaacatttttaccctgttggtcgagttcaaacgttgtggaagacagtgtggtgattcttcaaagacctaaagaaaagaataccatttgacctagcaatctcattactgggtatatacccaaacaaatataagtcattctattataaagatacctgcacgcwcaagttcatcacagccctattcacaatagcaaagacatcaaatcagcctacatgttcatcaataatagactggttgaagaaaacgtagttcatatacaacatggagtactatgcagccataaaaaagcacaagattatgt

SEQ ID NO: 232347 - DNA, 493 bp, Homo sapiens
aataatagactggttgaagaaaacgtagttcatatacaacatggagtactatgcagccataaaaaagcacaagattatgtcctttgtagggacatggatggagctggaggccattatccttaaaaaactaacagaaacagaaaaccaaataccacattttctcacttataagtggagggtagatgatgagaacacacagaaacatggaggggagcaacacgcaccagggcctatcaggaggtagggggtgagaggagggagagaatcagaaaaaataactaatagttagtagacttaatacctgggtgataaaacaatctgcacaaccaaacttcgggacgtatgtttccatatttaaagaacctgcacatcctgcccatatacccctgaacttaaaacaaagttcaaaaaagaaaaacattttagcaaaatgacagactatttttgactaccttcgtgtacrgttcagagtcagactgcccagctctaacat

SEQ ID NO: 232348 - DNA, 492 bp, Homo sapiens
tcactgcaccatttgcctcctgggttcaagtgattctcctgcctcagcctcgtgggtagctgggattataggcacccgccaccgagaccagctaatttttgtattttttagcagagatggggttccaccatgtcagctaggctggcctcaaattcctgacctcatgatccacccacctcggcctcacaaagtgctgagattacaggcatgagtcactgctcccggcgaccagccaagacttttactttataaagatatttatgatgttttcttttctttttacagtacgcattgcatttataattggagatacaaaaaaaggtgactrttactgtttgacagcaaggcagtagtattatcttcatcaatatttgcaacttaattcgcaggaacctgtaagagaaagcccagacaaaactttaaggcaaagaagttacacttgtaaaaaatgagaggactatttttttataataacaaatattccaggtgagg

SEQ ID NO: 232349 - DNA, 604 bp, Homo sapiens
ccccggcctatatgagttttcaaatagttttttctagctccgtaaaaaatttcattggcagtttgatggaaatagtattaaatctgtaaatttctttgtgaagtatagccattttagtgatattgsatcttcctatccgtgagcatgggatggttttccatttgtttgtatcttctctgatttctttgagcagtgttttgtaaatctcattgtagagctctttcacctccctggtgagctgcatttccagatattttattattttagtggcaattgtgaatgggatggcctttctgattttgctgtcagtgtggctatcgttggtgtagaaaaatgttagtgatctttgcacattgatttagtatcttgaaactttgctgaagctgtttgttaactaaagaagctttgtagatgaaactacagggttttctagatagagaattatgttatctgcaaacagaaatagtttggctttctctcttcctatttggatgttcttcggatttctttctctagcctgattgctctggtcagtactgtcaatactaagttgaatagaaatggcaagagagggcattcttgccttctactggttttaaaaaat

SEQ ID NO: 232350 - DNA, 615 bp, Homo sapiens
  misc_feature (1)...(615): n = A,T,C or G
aagttgaatagaaatggcaagagagggcattcttgccttctactggttttaaaaaataatgttcccggcttttgcccattcaacacatgttggctgtgggtttcttatagacggctnttattattttggtgcgtctactgagaaanatcatcttttattagtgtttagttccgtttatgaaatgaagtgcatttatgagtttgcacatgatggaccacccttgcgtctaaggaggaagcttacttgatcatgacgaattacctgtctgatgtgctgctggatttccctcccaaatatttgttgagaacttttgtattgatgttcgtcaagaatattggcctgaagttttctttcccttcattctttttttttttttttttttgacggtgtctccctctgttgcccaggctggagtggattgcactggcgcgatctctgcttaatgcaatctctgcctcttgagttcacgccattctcctgcttcagcctcycaagtagctgggactacaggtgtctgctaccaagcccggctaattttttgtgtttttgttgtgtctctgcctgttttggtgtcaagatcatgctgtcctcatagaatgagttggggagaagacc

SEQ ID NO: 232351 - DNA, 334 bp, Homo sapiens
  misc_feature (1)...(334): n = A,T,C or G
gagcccagcgccgaatccccgccccgcggcggggcgcgggacatgtggcgtacggaagacccgctccccggcgccgctcgtggggggcccaagtccttctgatcgaggcccagcccgtggacggtgtgaggccggtagcggcccccggcgcgccgggcccgggtcttcccggagtcgggttgcttgggaatgcagnccaaagcgggtggtaaactccatctaaggctaaataccggcacgagaccgatagtcaacaagtwccgtaagggaaagttgaaaagaactttgaagagagagttcaagagggcgtgaaaccgttaagaggtaaacgggt

SEQ ID NO: 232352 - DNA, 394 bp, Homo sapiens
attataattcttaagggtcctagaatttttggaatggtaagtcagcattagctttaattgaaagtcaccaggtgcattagggacaacaagagagtcaacctgtcccttgaagctttgaaatattatctctagctatcaaggtcctagatggtatcttcttccaatacaatgctgttttatctacattgaaaaatttgttgtttagtgtagccaccttcatcarttatcttaagtagatcttctggacactattctgcaacttctatattagcactagctgcctcaccttgcactttaatgttatggtacaagttctttccctaaaccttatggaccaacttctgctagcttcacatttttctctcgcagcttccacacctctctcagtcttcat

SEQ ID NO: 232353 - DNA, 537 bp, Homo sapiens
gaaactatggtctgatgtacaaacaaaataatgtctggatcatattaatttctttttaaatggtggtgctgattatcaacaaatccctttattattcaagttacttcaacrcagaaaacatttattgagctttaaggatatatgctagatactatataaaataaaaatataattaatcttaggtgtataataagtgaatataggtgtacttaggaaggtgggaagagatgcatattttgttgcagttattttaacatacttcaatccctttgatttcaaaaatactttagattatatcttatcatcactatctctttttttatggatgaaaatattgaagcctagactagttaagaaactggtttaaggtcacacaagattttaaccaaagttcagttttgagatatgtattttctcaacaatatccaatctgacagccaacctgtgggcacttttttcaagtattctacaccatttacttctcatggctcccactaaactaacccaatccaagacaccattgtttctagcctgggt

SEQ ID NO: 232354 - DNA, 537 bp, Homo sapiens
gaaactatggtctgatgtacaaacaaaataatgtctggatcatattaatttctttttaaatggtggtgctgattatcaacaaatccctttattattcaagttacttcaacgcagaaaacatttattgagctttaaggatatatgctagatactatataaaataaaaatataattaatcttaggtgtataataagtgaatataggtgtacttaggaaggtgggaagagatgcatattttgttgcagttattttaacatacttcaatccctttgatttcaaaaatactttagattatatcttatcatcactatctctttttttatggatgaaaatattgaagcctagactagttaagaaactggtttaaggtcacacaagattttaaccaaagttcagttttgagatatgtattttctcaacaatatccaatctgacagccaamctgtgggcacttttttcaagtattctacaccatttacttctcatggctcccactaaactaacccaatccaagacaccattgtttctagcctgggt

SEQ ID NO: 232355 - DNA, 388 bp, Homo sapiens
tattattaaaattttcttaggagtataaagaattaacaagacaataaagaaataccacaagaaaaggaaactctgagaaataagtgagttttgaatctacttttgccttgagggcatattcaggttttagaaaattgaaactccactggtaagggtaatcaaattcaaagcaaagggcaactgaaagcagtgaattttaaaaaggaaagaaaggaaaaagaaagaaggaagagagaaagaaagaaaaaaggaagaaaaaaagaagagacaaacaaaaagaaaaaactcttttgcaataayattctgggacctcagcgaataacaccctcaggacaagacagaattagagcctccttctctcagagaattttgcgtggagaatctcaga

SEQ ID NO: 232356 - DNA, 607 bp, Homo sapiens
ggaataaatatcatatcatatagtaatgtcattctaggtaggtaaagatgagagtaaagaagtaaagatttgagtttattttgctaaacttttctgccacttcacttagtgccaagttttttggcagggagagagcaggtttttaaaatttaagtctgttttttcctcacgttctacaattctattgcagttttggtgagccagttctctgaactgaccctggatgggtatccttgaaaaattaaaagtatcaaaaggaggaatttagaacttccaaaacacttaaaaagaaatggtgagctgttaattagtgttgaatctcctgtctgcatttgtcacagcmctttataccagtttctatttcttgagtttttatacacacatttttatttctgttcttctctactccctcttcactgataccctgctatgtggattataagcataagtcccaattagtttatttccactttcctggtgttgacatttctcactctgttccatgttaaacttctcaccgcctgcatcttctacagcaagatttctttctcccctacatacatccaccagtcatctgttctgatttaagatgagccaaaaagaattc

SEQ ID NO: 232357 - DNA, 624 bp, Homo sapiens
atattaataggaagctttctactagaatgatcaattgctgtcaaggacattgaatgatttcctggcaagtatgttatggaggaggatttctccacatctctttgaaacacacagcttccttaaaaaatatatctaaaagtcttattaataacatattacttatattagttaattatgtatgataaatataaaacaatgtgatttaatacattgatataactgaacaaagcaaaaatatttacaaattatatataaacaggaatacaaaaccaacaaaactcaaattagcctggaatccagcactttggggggccaaggcagtatcacttaagcccaggagtttgagaccagcctgagcaacatagtggcaccttgtctctacaaaataaaaataagaaaattagctgaggattgtggcatatacctatagtcctcgctactcaggaggctgaggcgggaggatcacttgagcccagctcacttgagatttcagtgagctatgatcttgctactgcacttgyctgggtgacagaatgagactctgcctctaaaaataaattttaaaaaaagaatacttaaattaaccacaattaacttaagttaatgaataattgtgttttgctg

SEQ ID NO: 232358 - DNA, 410 bp, Homo sapiens
gaattctccagtaccagatccaaaagtcccaattgccacagtgcagagcaaagagagctaagtgacatctgtacacacagtgggttgcattacaagaaagtaaaccaggataggtaaccagartcttctagaatgagcagtaaacatgtttgcactgtgttccagaaggaggcaccatctctgtcttcaaagaccatttgctataaaacattgttgaaacaattgtcccaaaggcagccaatacctctgttcacaaaatgtgcagaacatgagatctgcattatgagttgttctcattcacacatatttttattaggcaaatgtccatgtcatatcaaataatataaattaaatgcaataggtccccccaaagtaacactggaatatgaatttgactttcaaatatatag

SEQ ID NO: 232359 - DNA, 404 bp, Homo sapiens
attgccacagtgcagagcaaagagagctaagtgacatctgtacacacagtgggttgcattacaagaaagtaaaccaggataggtaaccagagtcttctagaatgagcagtaaacaygtttgcactgtgttccagaaggaggcaccatctctgtcttcaaagaccatttgctataaaacattgttgaaacaattgtcccaaaggcagccaatacctctgttcacaaaatgtgcagaacatgagatctgcattatgagttgttctcattcacacatatttttattaggcaaatgtccatgtcatatcaaataatataaattaaatgcaataggtccccccaaagtaacactggaatatgaatttgactttcaaatatatagtcttaattcatgtgatgcagaattc

SEQ ID NO: 232360 - DNA, 621 bp, Homo sapiens
tgccccttgactagagcaggagcctgggtcctgtggggggcatcccttcacacatctctctcttggatcaggggcgaaggcagacttgccagaagcacaggcagagagtttgagatgcgatgatgaaaaggagtgacagctctcttctgagtccttcagtgtcctctgtaatgtgtgaggcaaagttgttcactgagtgtgaggcaggaagaggggatgtgggtggtatgaagagagaagtgatatcaggggaasccacccccagtatttcaacgtaggttctattttccataagtgttggccagctgagaaataaagagagacagtataaagagaggaatttttacagctgggtggctgggggtgacatcacatattggtaggaccatgatgcccacctgagcctcaaaccagcaagctttttattaagggtttcaaaaggggagggggtgtaataatagacaaagatcacatgcttcaaagggcaaaaagcagaacaaagatcacatgctttctgaaggtactttacaaagggcaaaaacagaactaccgataagggtcgaacaaagatcacaaggcaaagggcaaaagcagaactactgataagggtctaccttcagt

SEQ ID NO: 232361 - DNA, 471 bp, Homo sapiens
agaactctatatagaaaatgcatagaaagggaagttcaaggaagtggaattaaaaatagcatatttaaggaagtgatttcattgactctactgcatagaaaagtcactagaagggtctatggccatactacctgaatgtgcccagtcttgcctgatcttggaaaagtcacaaaaaggaaattcacccatgggatcatcgaggctccagatctttggaaaaattaaaagtccatggaataatccagggagcaacatgactgggtgagttcatagaggaaagaagacaattttgtgggtaagagtggagaggagaaacagcattagartaacatccactttagaaagcagtgagtgttgggaataatttccttcttacaaaacagtctgtccatcttttggaggggagctaaccgagggaatgcctgaagagcagggtttaattggtagaagacaaataacttttacagaatt

SEQ ID NO: 232362 - DNA, 605 bp, Homo sapiens
aatttgaatttagggctgattcgattcagaaaccaagtaagcattgtctccaaacatgaagccatgtttctttgtaaccaaggctgcctgtttagctggaatttctgtctaagatcacccctgggtaactaacaattgaaacctacaacgtttttgaagatcaactttcctcactcaatgtattgaaattttcaaatgttctctttgacaagagaaaaatagcttcagatttcatatttgtactaatgtgtttctaattaattgattttaatttgattctctgtgttttcttctttgtaagctaattctgctgttttcatacatgttttagataatggccttacttttgtttgcctrcctacaacagaaatatcagaaagaagaaaatcatcattagcattaaatcatggtcaagccagagagttcatgtaatatgggggttttatggttcactgaatacaatctcatctcaaattcattttccagttggtcttgaattttcgaaaagtctagaagtgcagctgcgttgtaggtcatcattctatgcagtagtcataatcaagctagacactagggggctgtgtggagtgaggtggtggtaagct

SEQ ID NO: 232363 - DNA, 605 bp, Homo sapiens
aatttgaatttagggctgattcgattcagaaaccaagtaagcattgtctccaaacatgaagccatgtttctttgtaaccaaggctgcctgtttagctggaatttctgtctaagatcacccctgggtaactaacaattgaaacctacaacgtttttgaagatcaactttcctcactcaatgtattgaaattttcaaatgttctctttgacaagagaaaaatagcttcagatttcatatttgtactaatgtgtttctaattaattgattttaatttgattctctgtgttttcttctttgtaagctaattctgctgttttcatacatgttttagataatggccttacttttgtttgcctgcctacaacagaaatatcagaaagaagaaaatcatcattagcattaartcatggtcaagccagagagttcatgtaatatgggggttttatggttcactgaatacaatctcatctcaaattcattttccagttggtcttgaattttcgaaaagtctagaagtgcagctgcgttgtaggtcatcattctatgcagtagtcataatcaagctagacactagggggctgtgtggagtgaggtggtggtaagct

SEQ ID NO: 232364 - DNA, 597 bp, Homo sapiens
agtcaagtcaaataaaatacacaaggctaggcatggtggttcatgcctgtaatctcagcactttgggaggctgaggcgggcaaattgcttgarcccaggagtccaagaccagcctgggcaacatggcaaaaccccatctctacaaaaactacaaaaattagttgggcatggtagtgcctgtagtttcagccacttgggaggctgaggtgggaggatcccttgaacctgggaggcagaggttgcagtgagccgagatcacaccactgtactccagccttagcgagagagtgagaccctgtctcaaaaaaaaaaaagaaagaaaataaaatacgtatgtttcaattgcagattaaaatgcctttttaagtagactgttatacagttatatattaatcacagacacgttttaatttcgagttacggtttacaagtaattgtggttagaaacaggtgcccccaattaaaatatttaaaacaggtttgacttaaaaggctggtaaaatagaacagaaaattctattttccttggaatctgtctatgtgtgggcacaggccaagaacattataacctgtaagtgaacaagattgacagcatgg

SEQ ID NO: 232365 - DNA, 603 bp, Homo sapiens
gtcaatgcaaaggtcctggagtgagaaaaaacagcttcatgttataggaatctcacagtcagtgtagctggaacagggcaagtgaaggcatggcaggaggtggtcagggccttacaggccacggtgttgggattggattttcttctggaagggacaggaaactacaggtggtttggagtagaagcacatggagatcataaccccaagcactatgggaagtagggtaggcagcagtaggagctcctgggtgggaaggccaaacaggaagatggcagtgccctccgtgagatgcggaccctgtctaggtagaacagggctgtggggatggggcagttctggggtaggaaccaacattttggtattagacatgccacttctgcagatgttcctttagagaggagcagagaagtgggatggtggttgcaggagggatgcggagtcaagatgaccctgagaagacctgcamgggggccatccaggaaggagtagggtcaggaacaaggtcctgaggcaggaaacaagcttcatattcctatttttaaagaccaagctttcactgcaagctgatgtgctgttggaaagatgcagtggcaagggaaaacc

SEQ ID NO: 232366 - DNA, 478 bp, Homo sapiens
caggaaacaagcttcatattcctatttttaaagaccaagctttcactgcaagctgatgtgctgttggaaagatgcagtggcaagggaaaacctgctgatgctggtgatagaagtgattgttgcaggagcagtcagaggtctacactcgaaccttaaggagcaggactctactttatgccactttatttctccagcatgaacagagtgctgaggaagcaagagccagcacatgagacccagcctaagggwccctggagagcttcctgggagaggtaaaatcatgctgagaagggcaggcccagcagcagcttgccagtgtcaggagggaaaagatgctccaggcaaagacagctcatgttcaaaggccaatgcacatgagaaagagctgggcatggttggccacaggtgcacaaggatgctgggagctgaggtggaggggaggggaggaccaagtgaggcttgcaggctgtaccagcag

SEQ ID NO: 232367 - DNA, 489 bp, Homo sapiens
cagtaatggtttaacatacacaagtcaataaatgtgatacaccacataaacagaattaaaagcaaaaattacatgatcattccaatagatgcagaaaaagcatttgacaaaatccagcatgacttcatgattaaaactctcagcaaaatcagcatagaagtgacatacctgccgagaccagctcggtcagggagaccctaacccagcggcactagaggaattaaagacacacacacagaaatatagaggtgtgaagtgggaaatcaggggtctcacatccttcagagctgagagccccgacagagatttacccacatatttattaacagcaaaccagtcattagcattgtttccatagatattaaattaactaaaagtatcccttatgggaaatgaaggsatgggccgaattaaaggaataggttgggctagttaactgcagcaggagcatgtccttaaggcacagatttctcatgctattgtttgtgg

SEQ ID NO: 232368 - DNA, 556 bp, Homo sapiens
agatctcatgagacttattcaccacagcaagaacagtatgggggaaaccaccaccatgattcaattatcatccaccaggtccctcccataacatgtgggcattatgggagctacaattcaagatgagatttgggtggtgacatagccaaaccatatcaagcagtcactttgagtttttagaaaacctatgaaaatgcttccccattttacagatggagcaagtaaggtccatagtgaagaaaggattccaggtaaggtggtgtaggcaactatgagatgagagcataatgtgggkaagtggtaggagatggatagatgtggagtgaaggctcactttggagaaatggttggtctcctgggtagggaggttgcatcatagaaatagaatttggaggcagcacttcctcatcatcatgtggtgttagaggaagagaacctgaccaaatggccagctatgccagcctggagttttcctgcatgaccttctctttgtagggcacagagttagtattaaaaatcatctgagaacaagactttgtcacacagcatttaggaa

SEQ ID NO: 232369 - DNA, 532 bp, Homo sapiens
gtatgggggaaaccaccaccatgattcaattatcatccaccaggtccctcccataacatgtgggcattatgggagctacaattcaagatgagatttgggtggtgacatagccaaaccatatcaagcagtcactttgagtttttagaaaacctatgaaaatgcttccccattttacagatggagcaagtaaggtccatagtgaagaaaggattccaggtaaggtggtgtaggcaactatgagatgagagcataatgtggggaagtggtaggagatggatagatgtggagtgaaggctcactttggagaaatggttggtctcctgggtagggaggttgcatcayagaaatagaatttggaggcagcacttcctcatcatcatgtggtgttagaggaagagaacctgaccaaatggccagctatgccagcctggagttttcctgcatgaccttctctttgtagggcacagagttagtattaaaaatcatctgagaacaagactttgtcacacagcatttaggaatagctcacacg

SEQ ID NO: 232370 - DNA, 653 bp, Homo sapiens
  misc_feature (1)...(653): n = A,T,C or G
ttccttccttccctcctttcttctttttgcctccatccctcctttctcctttcctcttctcctcaaacactgtccccgcccttaaccagtaaagggcccagaaaggtctggtggtagactgagctccaccttaaggtgtctgcttctggggaagaggagcctgcacagaacccctcccgctcgcagggtataaaagtccaggaggggaaaccagctgagtgctcagagccagtggagaaaggacccaatatccaactgggaaaccaaaccgagtcagctcagaagcacagtggcatttatcctgggcctaaaggagacataaggagaggtagtatgttgagaaatggaagcagaagaggctaaatgcccattaccctgcattggatatagagatgggataaagccatggggtttggggtctagaagggaccttatggaacactctgtccacccatccttccccccaaccttcagagtggacttctttaaaagtaaataaaggtaagtaccaaattccagtcctcacactgtccccttccctcagcccntacaggcctgtgtgacctggttycgggccctttctccaacctcacctcaatccatgttcccttgtccacatcaccgcagccacactggccttcttccttttctca

SEQ ID NO: 232371 - DNA, 334 bp, Homo sapiens
tgcacaatcacgacttttcttgaacccctcagagtactgaggtcacaggtcaaccaactaacccaaaatccagggagacacagcttcatgccaaaagaagcaggatttgagtatttgtttacctaggcagacaccattaggtgccatataaactggtaagaagattcagctaaaatttttaaatgaactaattgtcaacataaaawatataaagaagtaaatctctaaataggaaggttttatttgggaataataaacaagaagtgggattgcaattcaggacatacacacagaccagggtggcctctggaatgtctggagaacaaaggaaaag

SEQ ID NO: 232372 - DNA, 611 bp, Homo sapiens
ttctttctctcctcctctcccatctctcccagctagggctttgcatgcacagacctcctgccttcattttattcccgctcccttcccttcacttgcataatctcgattgactttttcaaaaataaaccttgaattttagaataggtttggattcatagaaaattgtgaagatagtagtacaagaggtccacacatacccgacactcagtttytcctagtgttcatatgttacatgggtaggggtcatctgtcacaaccaagaagccactattgattattattagctaaaatccatactttatggatgcttcctcaggtcttaccacatatcctttttctgtactggaatcccatcctggacaccgcataacatttagtcgttgtgtatccttcagctcctctatggctgtgacaagttctcagactttgtcaggatgaccttgtttaaatgactttgacagtttggggagttttggggaagacttttcagctattttgtagaaggtccatcaggtggactttgcctggtattttccccatgattagattggagttgcaggatttgagggaaaaaccactgaggtaaaggcacatgccactgacataactta

SEQ ID NO: 232373 - DNA, 611 bp, Homo sapiens
ttctttctctcctcctctcccatctctcccagctagggctttgcatgcacagacctcctgccttcattttattcccgctcccttcccttcacttgcataatctcgattgactttttcaaaaataaaccttgaattttagaataggtttggattcatagaaaattgtgaagatagtagtacaagaggtccacacatacccgacactcagtttttcctagtgttcatatgttacatgggtaggggtcatctgtcacaaccaagaagccactattgattattattagctaaaatccatactttatggatgcttcctcaggtcttaccacatatcctttttctgtactggaatcccatcctggacaccgcataacatttagtcgttgtgtatccttcagctcctctatggctgtgacaagttctcagactttgtcaggatgaccttgtttaaatgactttgacagtttggggagttttggggaagacttttcagctattttgtagaaggtccatcaggtggactttgcctggtattttccccatgattagattggagttgcaggatttgarggaaaaaccactgaggtaaaggcacatgccactgacataactta

SEQ ID NO: 232374 - DNA, 301 bp, Homo sapiens
gtctcctagcataccgaaaacttccccaaggctgttttaaatgttgatttgaatctaaacacctaattactggtccctgactggagatacggctccagaggccccgcagtgctggccgctgccaagagctgcctggcagtgatggattgtgcagcttgctagccccgccagctgggggcycaagacttcctacagaagtgcccagtggggaggcatgctcgaggggcctgactcctcgttcctgcctgtgttttgtatttgggtccacttttgtttatttttgagtcaataccagagacag

SEQ ID NO: 232375 - DNA, 414 bp, Homo sapiens
ggggatgtgatcagtcttcatcagccttgggatgccaaggctccctcagggggtaggtcgggccctctggatcactgagagcctgactcatggagtagcacccagaccttgggcaatgtcgtggagagctgagggggctgggatttgcagcctgagcagagagttagggcagaaagtgtctagagcctcaaggcagcttgggtaatgacttcagcactggggctrggagaggctgggcctctacgacaagccaccaacagtgaccttccctgtgatgccagatcatgtggaatctacagtttgcagtgtggacccaaactcttctgaggctcagcttctctgactgcatcttttttttttttttttttttttttttgagacggagtctcactctgttgcccaggatggaatgca

SEQ ID NO: 232376 - DNA, 497 bp, Homo sapiens
agccccaggggcactgggtgaatcagcaggccacaatgccagggcaaaagccttgaaaattcaactgcctttggaagcacagcccacaaaatcggccagttcctggggctaaaactaaacaaattattattattttgaccgggtgccaaaataatagatttttaatacaattgaaagtctccctgcatctgccatcaacccacttctatgtaactgagtcctgcactgtcccgtgaatgagttctggggccataagggctgtatttttgttgtatttttaaattttcaattattttccagattgaaaagtgatacatgtacatcatagaaaatctggaaaaaaagagcaatacaaaagaaactgtgttgcctgtaatttcaccactcacaaagaatatatgcatatatgtatgtatgtatgagtgtgtgtatctatattatccatatatccttccsgtctctatatctgtatagcggaaagtttttctcttatagaa

SEQ ID NO: 232377 - DNA, 372 bp, Homo sapiens
gaattcagcgtgggaagggctctgagtgrgttaatcacagggcatcacaggagtgtgtgcaggggtctcaatcttgaccagggaagttgaggtgagtggcctaggctgaggcagcaggaggatacggagggaaataagcatgggagagagtttagagggcagagttgcttggaccgtggactgtgtggatgtggggtgcaatgctgtgggaggacaatgtgcagggagaccctgctggggccaccttgtagaggggccccctgtcctttttataagagacaagaggcaggttgtttggaggagcagggcggggaagagaatgagttcagcttcagaacacattggttttgttgccaaaggaatatttaagtg

SEQ ID NO: 232378 - DNA, 625 bp, Homo sapiens
gagattcctcaggccaaagacccacagtactgtttcaaggagtgtgtagatatgagggtgccagagtgtgagagtgaaaggcctgggcttgagttctggttcaaccacttactaggtaggcctctgtccttggacaagacaacttgctgcttgactttttaatctgtaaagaagacaagaataatcactaccttttaggattgttgtgaggattaagtgataaaatgcatgcacattctaccttaactcagcacaacgccttcaggtgaggattcatggcatggcccaggagaggagggctgcagacyggttgcctcctcctgacacctgctgtccatggagcagtctgggtcaagtctcagctcccactcagtttccaagctcagttcaggaagttccagggattcagtgggcacctcctatcttcttctacccaatctgagaaagtggcaaaaattgggagtctctgtgccgaaggtgagaaacttgcctccaacagaagacagatggcccatgatgcaagatgatgtctttcctgtgtttcttgtgtccctagtacacagacaccatgacctacagaagaagaggccagagcagggtgttgcagagacatcagctctccatc

SEQ ID NO: 232379 - DNA, 625 bp, Homo sapiens
gagattcctcaggccaaagacccacagtactgtttcaaggagtgtgtagatatgagggtgccagagtgtgagagtgaaaggcctgggcttgagttctggttcaaccacttactaggtaggcctctgtccttggacaagacaacttgctgcttgactttttaatctgtaaagaagacaagaataatcactaccttttaggattgttgtgaggattaagtgataaaatgcatgcacattctaccttaactcagcacaacgccttcaggtgaggattcatggcatggcccaggagaggagggctgcagactggttgcctcctcctgacacctgctgtccatggagcagtctgggtcaagtctcagctcccactcagtttccmagctcagttcaggaagttccagggattcagtgggcacctcctatcttcttctacccaatctgagaaagtggcaaaaattgggagtctctgtgccgaaggtgagaaacttgcctccaacagaagacagatggcccatgatgcaagatgatgtctttcctgtgtttcttgtgtccctagtacacagacaccatgacctacagaagaagaggccagagcagggtgttgcagagacatcagctctccatc

SEQ ID NO: 232380 - DNA, 604 bp, Homo sapiens
gatgctttacttatggggacaatgacctaaagaaatgagcaatttacaaatggataactcattttaagaagcggtgagataatgtggaaaatgaagcctgtaacagcaaaccatgaacaccaatttgtaaggaaaaagtcattttgctcatgccctaattgaagacaaccaatgattaacagcacaaacagtagccaatgctatagacctttctattggttcagcttatatacaattctgactggaaaattaaagttcagataactttccccttgtgggtgccaaaattgtttcacccatatcagctgcagacaagggcaaaacttttcagtggaaattttaaacccgtgaaatatggctttttcagtacaatcctgaagacaaagcacaatcaaagcaatgcctrtccagaggcggaagtgacccagttaaagcaaaagtggactagtcaagaacaaaggtcatggcaacagtgtggggagatgctcaaggcattttgcttgttgactttcaggagggccaaagaacgataacatctgatgattaagagtgtgttttgaaaatgttagccaaagctgcagtagaaaaatgcccaagaaagctt

SEQ ID NO: 232381 - DNA, 466 bp, Homo sapiens
tttattggaatacatggagagccctcttgcctggcacaggataaatgttagctattattaaaatgatgcatgcacagaacttaaatttagacctgtccggggcagtctccagttacagacagagagccttcagttctcatgttcctaaaatgagtgcaaccgccttcacatcacagatgggcacagagctggtgatcacaatcagttaggaaattctggagacgtgtctcatggggactgtgccccagccactatatcagcacagagaagttggagactcccatccctagcaagccccaggctagtgaggggtttcaatgatgcaaaatgtaggacaggagtaagacaggttggggcagacatcagcaggctccaygtcctggggcaagtccggcagcctggggcagatttgcaacctgaagctccacccacagacctatgatgctgtgtgacccacccaggctgt

SEQ ID NO: 232382 - DNA, 591 bp, Homo sapiens
gcagccgtcgggcgtccccaggcctttgctgggctgggccggggagcctggccgctcaccggccgcagcgctggggctccggcgccctctggtggcggcgcctccctccccgctcccagagctctggccagctccattcctgcgcagctgatgaaacccgggagggcgaaggggtccgcgggaaatctacacccgggtggaggggcgccctggagctcggagatccgaccctgcgggagccgcgcgcagcctcgcttgcccttaaatctggccaaagcaaacgccatcgcctctcgcttcttcttcttctttttttctttgccacaaaatcaggtgggcagctggacctaggatctgtcccagaagcctgaaaggcccgcgtgggctgagtcgagggcgaaccagggattcaggcctggccgctgcccctcccgcaggcgccctgaggccccagaacagaagctastgtggcacccatggggccatcccttccgctagtcgttcgttaaatacttactgagcacccactatgtgctagacctgggctacatgtttgaagtagtttagaaaaggcactaaacgtttagaagc

SEQ ID NO: 232383 - DNA, 558 bp, Homo sapiens
  misc_feature (1)...(558): n = A,T,C or G
aacacatgaatattgggggatatattcagaccatatcaggatgtgattaggtcatgaatacagagcccttgtgaatgggattagggtccttacaagaagaggccagagaactcccttgttctttccaccatatgaggcacagggaraggagagacatctgtgaaccaggaagcagacttcactggacaccaaatcttccagcactttgattttggacttcccagcctctagaactatgagaaataaatttcttttgttcataagccacctagtctatggtattctcttatagaagcccaaatagactaagacactcagcttcttaaatctgtgggattttgtcttccaccaatgttaggaagttttttttcttatttcttgannnnnnnnnnnnnnnnnnnnnnnnnnnnnnnnnnnnnnnnnnnnnnnnnnnnnnnnnnnnnnnnnnnnnnnnnnnnnnnnnnnnnnnnnnnnnnnnnnnncctcagtctctgattttgtcttaatgttattttattttttttattatcagaccaggtaagttttattgatctgttg

SEQ ID NO: 232384 - DNA, 558 bp, Homo sapiens
  misc_feature (1)...(558): n = A,T,C or G
aacacatgaatattgggggatatattcagaccatatcaggatgtgattaggtcatgaatacagagcccttgtgaatgggattagggtccttacaagaagaggccagagaactcccttgttctttccaccatatgaggcacagggagaggagagacatctgtgaaccaggaagcagacttcactggacaccaaatcttccagcactttgattttggacttcccagcctctagaactatgagaaataaatttcttttgttcataagccacctagtctatggtattctcttatagaagcccaaatagactaagacactcagcttcttaaatctgtgggattttgtcttccaccaatgttaggaagttttytttcttatttcttgannnnnnnnnnnnnnnnnnnnnnnnnnnnnnnnnnnnnnnnnnnnnnnnnnnnnnnnnnnnnnnnnnnnnnnnnnnnnnnnnnnnnnnnnnnnnnnnnnnncctcagtctctgattttgtcttaatgttattttattttttttattatcagaccaggtaagttttattgatctgttg

SEQ ID NO: 232385 - DNA, 464 bp, Homo sapiens
ttgacccagcaatctcattactggatatataccaaagaaatataaatcattctaatataaagacacatgcacatgtatgttcactgcagcaccattcacaatagcaaagacatggaatcaatccaaatgctcacaatgatagactggataaagaaaatgtggggagtcactggcaagatggctgaataggaagagttctggtctgcagctcccagtgaaattgacacagaaagcaggtgatttctgcatctccaactgaggtatgcagttcatctaattgggactggttggagagtgggtacagcccayggagtgtgagccaaagcaggatggggtgtcgcctcacccgggaagcacaaggggttggaggatttccctcccctagccaagggaagccgtgagagaatgtaccaggaagaatggtgcactatggcccagatactgcgcttttcccacagtcctca

SEQ ID NO: 232386 - DNA, 387 bp, Homo sapiens
gtaccaggaagaatggtgcactatggcccagatactgcgcttttcccacagtcctcacaaccagcagaccaggaaattcccygtggtgcctatgccaccagggccctgggttttgagcacaaactgggcagccatttgggcagacactgagcaagctgcaagagtttctttttttttttattcgtaccccagtggcacctggaacaccagtgagacagaaccgttcactcccctggaaagggggctgaagccaaggagccaagtggtctggctcactgggtcccaaccccatggagcccagaaagctaagatccaatgaaattctcattgccagcacagcagtctgacattgatctgggatgcttgaacttggtgggggaagggcca

SEQ ID NO: 232387 - DNA, 589 bp, Homo sapiens
ggcaaaggtttgctctcttacttcagtctgcccagcacaccccagccagggtgatctgctgaagagcaactcagattattgcactctctcgctcaaaactgctgggtccccacctctcctgccccccatacctaggagcagayggtctcaaactaaaggctgtatcagaatcccctagagcacttgttaaaacataggtctagggtggggctaagaatgtgcatttcttgcaagttcccaggtgatgctgatgctgccggtccagggaccacttggagaagcatagctttaaatgaaagcaaaaggcctcgacctggcatttaagcacttttataccaggtgccagtccacatctccttcattttcttcttttgtgaatcactgtatgcacactgggctgttattagggttaccaggtatgttcctgcctccacatgtgcagtgtctctgcctaaaatacctgctccccgtccaccctgccacattttcctgtccccctccagcttctctgcgcatccttatcttacccactctgccaagtccacctgccatgggaagccttttctgacctctgttagtggtacaagcc

SEQ ID NO: 232388 - DNA, 590 bp, Homo sapiens
aatgattagtttgttaatttgaaccagccttccattgctggatttaatgccacttagttgcaatgagttatccttttcagatattgcttaacaaactttctaatattttgttaaagatttttgcagccttgttcttaagacatattggtctgtagttttgtaacatttttctatggttttagtattagggtaatgctggcctcaaaagagttgattaggaaatgctccctctgcttctaaaaaaattgtgaagaattgatattatttcttctttagttatttggtagaatttatgagtgcaaccactggtgtttgttatctgggcctggttctttctttccttcttttttttttctcttagaakatttttaatcattaatttatttattaaattagagccatttgggttatctatttctctttgaatgagttctggaagtttgtgtctttcaggaaattgtccatttcattgtagttattaaatttgtggataaagtgtcatttatggtattctgttattatctatttaagatcagtagtgataacctccctttaatttcttatactgggcaatttgatattctctattt

SEQ ID NO: 232389 - DNA, 592 bp, Homo sapiens
cctattatgtactagttcctgggataagctctaggatagtagtttctaacagaagcagtactcaactcccactcccatccccagttgtgttttgcaatttatttgatttttctttttgctgtctatcatgatatttggtggccaggagccaaacattctagatatcttacaatttgtaggatagtccttcacaatgaagaactattccaagttccacaggattttgaaatattttgcaagacatttaagtgccatatttcactcaatgtaagataccattgattttaagatgtactataattgtatatataactgagaaggaggaacactgcaaattatactctgacacaattccttcagtatagttctgcacaacacacacatcagtctcaacagctcttgctcttctgaaatttcttttaactactctgagcaacctacaaatactcctccttttygttactcagatggatctacaaattcttctgccttctgttgcagtgaatggcatacaatagttaatctttgcatatatttcattatgaaaatgtaagacatttattcatggtgtcttctttttttaattaaaaaa

SEQ ID NO: 232390 - DNA, 586 bp, Homo sapiens
tgatagttattcttccaatgacaaatactttgtaatttcaaaatgatgtccactttcctgcttccacgcttgtgaataattatttgtattgatgctgcttcataatataatctctttaaatgacattttatatagcaattaaactcaacacatgtaatacctgcaaagcagataacccaattgaagtgatgaggatatgaacaactgatcaagtttcctcatcttggctgcaacctgattgaaagagactgtaagaagccattgactgtaagatgaattttctaatttcaaaaagattaaaatgtgtctagagacaayagatgaaagatttgtttttgtagttatttgagtccagagtccaactccatttaactcaaatatgctgatttttttcaagaatgcaaatatactacgtaaattgcgataagattaccctttgctttgttcagtctctttaggtttgagtcttttaggtcacatacctataactgcattaggagctactatattcgacgtgattcttcatatagttgcaaacatctgactaatttaagacttgtcttcatcaatgatttagtctcattta

SEQ ID NO: 232391 - DNA, 586 bp, Homo sapiens
tgatagttattcttccaatgacaaatactttgtaatttcaaaatgatgtccactttcctgcttccacgcttgtgaataattatttgtattgatgctgcttcataatataatctctttaaatgacattttatatagcaattaaactcaacacatgtaatacctgcaaagcagataacccaattgaagtgatgaggatatgaacaactgatcaagtttcctcatcttggctgcaacctgattgaaagagactgtaagaagccattgactgtaagatgaattttctaatttcaaaaagattaaaatgtgtctagagacaatagatgaaagatttgtttttgtagttatttgagtccagagtccaactccatttaactcaaatatgctgatttttttcaagaatgcaaatatactacgtaaattgcgataagattaccctttgctttgttcagtctctttaggtttgagtcttttaggtcacatacctataactgcattaggagctactatattcracgtgattcttcatatagttgcaaacatctgactaatttaagacttgtcttcatcaatgatttagtctcattta

SEQ ID NO: 232392 - DNA, 548 bp, Homo sapiens
atattcgacgtgattcttcatatagttgcaaacatctgactaatttaagacttgtcttcatcaatgatttagtctcatttattatacataattttcttattgctcttatactatactgagggcattttgttgatttgagaacagaatgctgatttataatatttatagaaatatataaaacatatttcaaaagactatagctacattgtatattgtgattgatagtatttaaatactgctaaagtgatattgtttatacaacacttgaaattcactcaccttcttcatacagatgtaggtttgaaatgcatgcattttttaagggtatataaactttcaatcttcttatctttttcatactgctagaatttttatacattcttaatcacattaatggtattgtttttctaaaaargtgagccttttttactaaaagaattatccccagtggaagctgtttttaatgatgcatagtaactgataggatactaatgtggttttgacctagttcttttttctttttgaagcacaaataaaaatctcaccaa

SEQ ID NO: 232393 - DNA, 549 bp, Homo sapiens
taaagaagattgacaggacagaagttgtgctacaaataggattcactgggacccacgtggaacttgaagctatgggaatgaattcgttctacatctaagaggagtatgtagagtgaggagagagagggaaaaaaatagaaacaccaatatttaaggaaaagggaggcctccaaagaaattaagaataacaaaccagagatttgggagaagggcaagtggggaacattgggaagtaacaatttgcaggagtgtttcggcatgcccaaactggaactggatgtagacaggtcccttggctktagcaactaagtgggtgatcaccatgttggtggtccgaggagctcaggagtcagagggcagaaagcagaggtgctgccaagcatgatgaaagcaaactgagccactgggagcagactcttctttctagaagcttgtctgggaatgagaaaactggaagagatttgacagtgtttgcacatgtaaataaataagacttcagagaggaaggaaaaaaacataaaataaatagcacacatgagaaagcaggga

SEQ ID NO: 232394 - DNA, 567 bp, Homo sapiens
gattttggaggtgaactaatggagagccagtaaaggctgctgagcaagatgaagccataatcagatgctaattaagaaatattgatctggtggaggaaaggtgtaggatagatgaaaggatgaggccatggagatacaaaaacatgttttaacaggagataatttaaagcatctagatgagaggtaatgaagcttgaaccatggcartgaaaaggagaaaacagtcttaagagacattcaacaagtgaaacaagacctgcgaccagcaggaagtgggtatgtgggaaaggggaaatggtaacactaggctttctgcagagagtggtggcaccatgtatttgtattaatagcatcactgatatcatagactctggaatcagatccatacgtattgtaataactcgagccaattattgtccctcttttaacctcaaattcctcatcagtacaatgagaataatttaaagtgccagtttattagattattgtagaaaatgaaggcaagcgcatttcatattcctaggcccacgcagagtgctggaggttcttaatgaaaaaggtaaagaa

SEQ ID NO: 232395 - DNA, 592 bp, Homo sapiens
acctgtccagggcctgagggatgtcagtaccatgaagggaaggacataagcctggctggcattgccagtttctgattgtaaaccactagggtattgagggcattgagcaaatataggcagtcaccaggtagtggccgccgtgggcactgagtgagacccagtactgggctggcttcaggtatgacccagcacagtctctgtggtggtgaccacagaggtgcttgtgtcaccgtatccccagccccaggcagctcagcatagaaagagagacagactgtttgttttggagaaagtaagggaagagaagagtctcttcctggtaatccagagwactcttctagatcctatccaagaccaccaaggcaataagtctatgagtcttcaagaagcacagcattactgcacttgtggtacccccaatgcagacatagtttagatcacaatacccaagtccttctgaatacctggaaagcctttccaagaacaggtacaaacaagcctggacagtgaagactataataaatacctaactttttaaggcgcagacactggtgaacatcaacaagcatcaagaccatccaggaaaacacaa

SEQ ID NO: 232396 - DNA, 595 bp, Homo sapiens
taagtgaggaatctgagagtcagagagattaactaaatttggaaatcatgcatctagacaaagctgggaattaaatttgaactccactccaggtaaaaccgcagttattttcactatactacacttgaatcagggttcctgtggcaataaacaaattaacacatgcaaagtacatagcacagtagtagatgccgaataaatgttgaaataaatgttgaaaagggtaagatgttacttacacctttcacctcttactttggtgccaggaatcccaccattggagatctcttgctcttctcctgaatgccttttttcttagaagtcactaatttattgttggttgagggagatggaaaacaaggcaaacatcctaatagagtaatggctaatttatggtattgacaatcaaytggatttatatggacattgttatatggacaatatccagtttaaaataacatggacatccattaaatgatgacattttatgttttctttgaaagcagcttagtatttttttcatacatttggcatatttgcagtattatcgcaatactttcaaaactaaaaaaaagtagtgattgagaaaacacta

SEQ ID NO: 232397 - DNA, 595 bp, Homo sapiens
taagtgaggaatctgagagtcagagagattaactaaatttggaaatcatgcatctagacaaagctgggaattaaatttgaactccactccaggtaaaaccgcagttattttcactatactacacttgaatcagggttcctgtggcaataaacaaattaacacatgcaaagtacatagcacagtagtagatgccgaataaatgttgaaataaatgttgaaaagggtaagatgttacttacacctttcacctcttactttggtgccaggaatcccaccattggagatctcttgctcttctcctgaatgccttttttcttagaagtcactaatttattgttggttgagggagatggaaaacaaggcaaacatcctaatagagtaatggctaatttatggtattgacaatcaactggatttatatggacattgttatatggacaatatccagtttaaaataacatggacatccattaaatgatgacattttatgttttctttgaaagcagcttagtatttttttcatacattyggcatatttgcagtattatcgcaatactttcaaaactaaaaaaaagtagtgattgagaaaacacta

SEQ ID NO: 232398 - DNA, 550 bp, Homo sapiens
tgtgagaatataaatgaattaatatatataaaagtttagaacactgtccggcatagagagagccctaagcaaggattaactgtaattaatataatgaaaatgacattaatgttatggactatatttgtattgtgctttgtagttataaagcacttccacttctttttggtgaatctgtagttaaggtgaagtggagtaagactgaagaatctctatttttcttaaygaggtaagcgagaaataggagtaatcatactatatgagattatcccaggtagaaagggtgatgtatgtaactcaagagtagaagagggaaattccataaaggagatactgaggtggttgctgggttggaattgagaacccaggtagaagagtagtagaatacaagcagtgttcagggctgtggacagcaaggggaatggaaatggatagaaatccaaagaaatgtttataaggagtttacaaataaaaatcaggagtcttaatatggttcagcagacagctaaggtcttaaaggagtattttgcaaattgaaaacacttagttt

SEQ ID NO: 232399 - DNA, 586 bp, Homo sapiens
gggtgtatctgtatctcagcactaccattttcctatccactgcatctgctttggaacctcgcatgtcctatatgatctgagtaaacccaggtgtctatcttgtaacaacagacccttgtggtttccagtgagaggaacctgatactttccagtgtttactccgagcacataaagtcctcatcttttaggatgcctgttttcttcatgtgtgttcacagaagtgccaatccacacatggaaattaccacagagaagaggggctcctaccacaggagacaaaaagaaccatccacattctgtaattggggttctgattaaggcacggcacccgtttccacctccactcatctcyatcttattccttcagggcagtttgggcttgcggagactcccctagtcttctgcaacatgttcagtctgacaggctgtcaccataagtaggtaattcaacactgtcttcaccttgagataatcaagaactctgggggtagcttttaagtacaaactttaaaatgtatattaagttccaaaaacatatgtttcttcctttcagtcaccctgccccaccccaaaaaagcattacaaa

SEQ ID NO: 232400 - DNA, 626 bp, Homo sapiens
tagtaggttgttgttaataaaatgaatggattacaactgctggttttgyttctttccttttggatgtaattatttcagcagtgtgcttatcctattctggaaagaagatcagtttgtgttaatgcatgtctcatgaataaaaatgggaaagtaaattaatcatgtctttaaaaaatacagattgttcagtggactatatcttttaaaatatgagtccatgttgaaggaggggctaatcaaagggagcctcattgactaaaaggttgcaaattgctgaagtctaatgtgttccctgcattttcctcattttcttgtatgtggctaaatgtctctatgaaataaaatagcactaatatatccaaaaagcaaacccagcagtggaatgggaagaacagtgcctggctggtgcagaatgcatggttgagatgcaatcttctatgtgcaaacttaacgtgccagttgttttatttagggagagaaaggaggggggatgcattagagagaaagtccacagcataattaggaaacaatcaacacgtttttcttgctgtcctaattttttcttcactttaaaatgctccattgagtttaattaaacttgccctgggcttataagcccagcaaac

SEQ ID NO: 232401 - DNA, 626 bp, Homo sapiens
tagtaggttgttgttaataaaatgaatggattacaactgctggttttgcttctttccttttggatgtaattatttcagcagtgtgcttatcctattctggaaagaagatcagtttgtgttaatgcatgtctcatgaataaaaatgggaaagtaaattaatcatgtctttaaaaaatacagattgttcagtggactatatcttttaaaatatgagtccatgttgaaggaggggctaatcaaagggagcctcattgactaaaaggttgcaaattgctgaagtctaatgtgttccctgcattttcctcattttcttgtatgtggctaaatgtctctatgaaataaaatagcaytaatatatccaaaaagcaaacccagcagtggaatgggaagaacagtgcctggctggtgcagaatgcatggttgagatgcaatcttctatgtgcaaacttaacgtgccagttgttttatttagggagagaaaggaggggggatgcattagagagaaagtccacagcataattaggaaacaatcaacacgtttttcttgctgtcctaattttttcttcactttaaaatgctccattgagtttaattaaacttgccctgggcttataagcccagcaaac

SEQ ID NO: 232402 - DNA, 589 bp, Homo sapiens
tccttccttccttcttaaaggccatatattcaaatgttttcagcaaaaaacaaaacaaaaacccaagaaatgcttatttttctattgaattggctcttsagattttccttttagacgtcatttcaattgaaactcagagtcatttctatatgaaaggaaatagaaagcccactcacactggaattcctttgagggtttcacaactttggccgtagtattcttgattgagttgagcctccagattaaaggaagtctctgcctttccagtcagtttctttccatttcagaggcctaaggtaatacctggtaggttattccacaatgccagtgttaacattgaagggcatttagtgtgtcgagtgttttaccttttgtgatattttggttttcctttttttttttttttaatcttccactggcatttctaaatgcttaatcaccaatttgggtaatatttaagaagctggaggccaaccatggatgggcaaacactgtttgttccaaatttaatagtccagtgtctatgtttaaagttttttgaacttgtaaaatcttaattcagtgcaatagtttcaggaggaagcgccta

SEQ ID NO: 232403 - DNA, 589 bp, Homo sapiens
tccttccttccttcttaaaggccatatattcaaatgttttcagcaaaaaacaaaacaaaaacccaagaaatgcttatttttctattgaattggctcttgagattttccttttagacgtcatttcaattgaaactcagagtcatttctatatgaaaggaaatagaaagcccactcacactggaattcctttgagggtttcacaactttggccgtagtattcttgattgagttgagcctccagattaaaggaagtctctgcctttccagtcagtttctttccatttcagaggcctaaggtaatacctggtaggttattccacaatgccagtgttaacattgaagggcatttagtgtgtcgagygttttaccttttgtgatattttggttttcctttttttttttttttaatcttccactggcatttctaaatgcttaatcaccaatttgggtaatatttaagaagctggaggccaaccatggatgggcaaacactgtttgttccaaatttaatagtccagtgtctatgtttaaagttttttgaacttgtaaaatcttaattcagtgcaatagtttcaggaggaagcgccta

SEQ ID NO: 232404 - DNA, 572 bp, Homo sapiens
ataaatagttaaaaacatcactctcactttgataccaagcactctattcagcagatgtggacttatcactcaaataatagagrctgctttgactctaggtccatagaaacagaggacaagtaatcaaagggagatatccacttggcatgctctttaacaagatgacagtgtctcttaatagacagtcattaagacaggagactggtgtcagggctaagtacagtttgtgaaatagacagtaactgagactagagagactgacaaatttttgtccaatttttcaggaaagtgtgcaagggattgtgattcaaaatatgaagtttatttttatcagccacactgagtcaagtcaaaaagatgcttaagaacttgaagaactgccttctggaataggatttttgaggatgctgagcagatggcatgagattggccccaaagatactgcctgaatttcccagcattcgtacaaggcccgctattggtaacccaagggaactttcatgcatgtgggaactggctttttataggtctaattagaaagcacaggcaattcccacctacaacattaaaaa

SEQ ID NO: 232405 - DNA, 612 bp, Homo sapiens
cacaggctgcaaaaggtaaggtgtctgaagccacaaagaattcagtgaagaccagtattggctaaatgtttgcaacagaaggagaaacagtggtatgaactgagactggagagatgggtagagatttcaccgtatgggaccattttggtgaagacaaagattttggtctatctcaaatgcaatgagaaatcatgaaaggttttaaggaggaaagggacatagatttactttttaaaattggcactataagaataaattaaaggcagttggaagcagatacagtgtttcaattaaaaagacattttaattggccggtgacattttattgtaattcctatcttacaaaatgagaagaatatacaattcagagaggctacatcactagcctaagttcatatagtttgtgccaaagccaggatttgaatccagttctgtctgacactgaaggtagtgttactttccactgcaccaatcttctacttttgagaatgacttatgtttctctactcataaaatttaacataaggctagagcttaggagacctwcttaagaacacccacctggtaattagcacaccacaaattttagcacatgtctttgaggccagatct

SEQ ID NO: 232406 - DNA, 402 bp, Homo sapiens
tgaaaatgagaactcccaactctgagttacccgtccattactcagcctgctaggccacgctgcctctccccagcaactctccctatctattatatacatatatacaatttagactgagcatgctgggtggcttaactaatgattgcagaccactttggaaatagaaaataccctgtgtgcacagaactagtaatgattagataayagactgtcctaaattttacatttaattcaaacaaaccttttcttgatgaaagttttgctattaaacaaaagactttttttatactagaggttttcacggtattttcatttgagttgaatttctgttcttcagacccatatttctgccaatttctatctcttgtgctttctctggcacaactgaaagaacaaagttaa

SEQ ID NO: 232407 - DNA, 601 bp, Homo sapiens
cccaggcagcacaaaaggtagtgatataacaagtcttttgaatcttgttttatgttgcccaagtttaggttggactccctgaaatctgtggttcggttttatattaaattttgtattagtttaaatgaaagggcttgaacaatatccagtgaagctggtgataataattgagataataatattcttattccttcactttacagctgtgtgactttgaacgagggacttaacccctgtagctctgtttcttcttctgtgagtttggaaaaatcataccaacattgcaaggttgctgttgagagttacatgtcagtattcttgtatgtgatggtacaatatgcttggcacaytgtgtgcatacaatgcttgaagactttatatttccatgattatcagattagtattagcttctggaggaagccaaacctgtaacacaagggagggacccactgataataggagacaaatggattgaagcttttaaacatagccaagtctctccttatggctgcttcccaaaagcaacagcttccatttaaatctttgaaaatacaacaagatgaagtgcttttcagatgacagggtccactccaagacacaa

SEQ ID NO: 232408 - DNA, 405 bp, Homo sapiens
agaaaatggaggaacagagaggttaaatagcttgcctaaagtcatggaactagtaagtggtagattcaaacccaagcagtctatctcaaatccttacaaatatacattgctgcatttccagtgaaatgacatatatagattcttatcccccataacagacatttaatgaatcaaccaagatgcaaaaaatttaatgtaggaattatcctaccaaaggtttttcttrtttatttttttaagtaaggtgtgttcctcatgtctaaggtaaatataggtatatggttgcctttctttactgacaagaaagcctggttcttggtactcatcatgatgtaaagagggtatactccttgtaactgtgctgcagtagctccagtgtagttcatcctttgagttctaatgcta

SEQ ID NO: 232409 - DNA, 358 bp, Homo sapiens
tactataatgtactttggaggaggattttttaggttgaatttatttggggacctttgatcttcctggatctggatgtccacattccacctccctgccccgcccccacccccccacccccacaagacttgaaaagttttcarctatcattttattaaataggtattctatacttcctctcttgtttttcccttctggaactcccataatatgaatatttgttaccttaataatgtctcataagtcttgtaggctttctttactcttttccatttttatttattttttcttttgtatcagtaattacaaacaatctatcagcaattccaatgattctttgttctgtttgataaagtctgc

SEQ ID NO: 232410 - DNA, 430 bp, Homo sapiens
gcagcttcgggggcacgtcctcctatatcctgtagaggacactgaccccgcacaccaccctccaggccagaaatccgttccctctgcggacctgagaggcgagcgcgctcgcgcccctgacttgcaaagttggggtctttactggcctccgggcttctgctcctggcggtgtctccaggctggtgatgggcaagccaggtgtgccagctccaggatgcacatgagcagcatttgtagccatcrctgaatcacctcctgactagcggggcaagcctcaaatgaaccgcaggatttcgggtagattggattgtggggttgctgtttgcactccaaagagttgctgtgatttccctgcgtctggctggctggctggcttcttagatcatctcatgtggcgtcctttcagcggagagttaaccaagacgtttgg

SEQ ID NO: 232411 - DNA, 618 bp, Homo sapiens
gagatggggattcaacatgtttcccaggttggtctcgaactcctgggctcaagtaatctgcccgcttcagcctcccagagtgctggaattacaggtgtgagccaccccacctggctatgattcactttttactacatggatgtgtctgcttgatccagcaccatttattgaaaagaccatccttttccttccgcaccatgtggaactttttttcataaatcgaatgactgtatggtcatctgatttatgaaattagtgtgggtctgtttctgtttctggaccaacttgggtaacatagtgagatcccatctctacaacaaataaaaataataaataaatgaataaaatttaaaaaataagtgcgtagagcagatggagtcataggtgataattkataaatgattgccagtttcttggctacatatgggtgttggtaattcagatgtgttgggtgttcaggcaaaacgtattaagtgaattatatggtgttcagaatgattgctagatgttcattgtgacttgaattagatgttatttgagcctcacagagctacagttttgactcttttatttatttgtctttttaaaatttttacaatcttcctgtcaaggcagtaa

SEQ ID NO: 232412 - DNA, 513 bp, Homo sapiens
tgaattcagcaaactttcagcaaacaatccattgtgatggcaatgagctatctgagaagtaaactgacacaatgatttcatttataatagcacctgtaaggataatatgcctgggaataaatttgttcaagaaggtgcagtacttgtacacagacaactacagaacattgctcgaggagactaaggaagacctaaatcaatggaaagacatcttgtgtccatgggttggaagttgtaacatggttaagataaaaatacaactcaaagcaatccacagactcaatacaatcctatcaaaaagtggctttttttacaggaatgcctgagaagaacttcatgttcctaaaaaacagcaagtgtccccccaaaacaaaagcaatcttgaaatgcaagaaggaacgttctctattccaaaggtctttaactgctctcagtaatacrtggtaatcttcaatatataggctttcacacctttttttttttcttcttttgtttctagacacgatctcactc

SEQ ID NO: 232413 - DNA, 603 bp, Homo sapiens
tgaattcaggctctgccatgtgctagtttgagtgatctagaacaagctggtttaccacctctctttaagttttggtttccccagtcagtaaaatagaaagtggtgaaacctaacttgtgggtataaggaggataagaaatactgtatttgaatgcctagtacagtgtcagggttgaataaagtacgacttcaccttattccctagtaattattgtcctcatgaccaaacctgcctcctctcaaaggcagtggccacaacagcacatccarcttttatttaggaagacatctttgtcttttttcagagcatgaggagcacagcagccgcaaggaaatggtcctggtggaggggctgtgctctgagcaggggcgccggggctgaacgctggctagttcctctgagaggaagcccttggagaatgaactagggaggcaggaagagttctgggtatatggaaagtcagaaaacatctgggtcctatgaaaggacatcaaagatctgaaggcccagctgcagaatgccaacaaggtcattcaaaacttcaagagccgggtccagtccctctcagttacaagtgattattcatctagtctggaaagacc

SEQ ID NO: 232414 - DNA, 483 bp, Homo sapiens
attctgtgtccctgttattgtgtgtcaacatgtgttagcctgttatttatatttttaatgagagaaaacgaactctggaatttgcgaactgttttttcggttttgctttatacctcttggacactccttccgaaggattgggtctcaagggcagtggggtgtgactacggtagacagggctgattaattttcatccaaaactctttggcggattcccctgctctccgmttctccggtctaacagtagtttaaaacagaagatcagcaacatttggagagtttttttctttgcattttaatgataaacttgatttattccattccaaaagttttcttattctgaggttgtctttctatattttgagtataaaacaatggccatactatgttggaaccaccaaggttcttctcttcacttgttcatttgtaatgtctctttataatctgagaatttcctgagcaaactgggaactgttatacata

SEQ ID NO: 232415 - DNA, 486 bp, Homo sapiens
aaaatctgtgctgaggaatgagcgacagttcaaggaggagaagcttgcagagcagctcaagcaagctgaggagctcaggtgaggggaccccatgggggcaggcagggggrcaggtgtgtaaatctctgaagtacagcagctcagtggggagacttaagaactaagctgggccaggggaagggcaggaattgccatggcaggctcgctacacacaaatatttatcaaacagagaagaaggataataaaaatttatgggttgcagttgtttctcagagccttgttttctctttttcaaacaagtaattgttgatgtgaaatttacataacacaaaattaaccaaaggagtgtgaaccacacagcagcattcagtatactcaaaatggtgtgccatcaccaccccacttacccttagtgagaatcaccttctgactgactgtgtcttctcattctttcactcaatcaatgttgccttctcgaccctgtc

SEQ ID NO: 232416 - DNA, 583 bp, Homo sapiens
aactttggtgttgaccaagatttttgattcatatctctgctttggcaattcaacatgtatggcaaaaatttgtagcagtgtctagattatctttcaaacccaggacatatttatgaaaatagaagggaaagaaacatttcatgagaatttggggtcaagatggctcccaacaaatccttgakaagaagggccaagagccttgtagaagattcttgggacaagtcttaccaactggcattggtggaaatagccctagggaaattagctaagtggattagagagagaactctaagctactactggcatcactgatgaaaatgaaatctctaaagggttaactagaaatgtggaacagaaagaaattaaaccattttttccctagttacccgaaaagcattttcatgttactatggctacctggttagatattatattcatctacaaagtaatttgcttattatcattgatcaccaaaaaagactacagtgggagtcaagggccatggccagatgtcagggacatccacagggtaggctgtctattaaataaagagctaggctacttcatggagaagttctgcaga

SEQ ID NO: 232417 - DNA, 493 bp, Homo sapiens
atatttatgaaaatagaagggaaagaaacatttcatgagaatttggggtcaagatggctcccaacaaatccttgagaagaagkgccaagagccttgtagaagattcttgggacaagtcttaccaactggcattggtggaaatagccctagggaaattagctaagtggattagagagagaactctaagctactactggcatcactgatgaaaatgaaatctctaaagggttaactagaaatgtggaacagaaagaaattaaaccattttttccctagttacccgaaaagcattttcatgttactatggctacctggttagatattatattcatctacaaagtaatttgcttattatcattgatcaccaaaaaagactacagtgggagtcaagggccatggccagatgtcagggacatccacagggtaggctgtctattaaataaagagctaggctacttcatggagaagttctgcagaagactaatgaaacttg

SEQ ID NO: 232418 - DNA, 486 bp, Homo sapiens
taattttatgttaattaggtagcaaagggctatctaagcaaagggctgcggcacctccacgttggggagctcttgctcctcactcaggattcctcacttacctggtgtgaccacagacccctgacgcaggccccaggccagagcccagtgtcaattcagattagtaaaaccttatttttttcatcatattttcaagtaaaaatacatataaactgtttgaacaagattttcttgcaatgcagtggattatcttactgtctaacttgctcattttacaaatgaagaaataggccacgagaagcctattaccttagtttcacacaacactgagccatgttgcaccatgtgacaccacactagcactctccattgtacactcaaggtggggaagggragagagctttaaaaaaatcccagtcttggattcgctgttagagacctgtgttgtcacagtgtgcatatcttatttcattgtctccagaattc

SEQ ID NO: 232419 - DNA, 463 bp, Homo sapiens
tgaggaactaaagccaatttgggtgctcagcaccaagagagggcataggttggttggcaagttgggtacatgccaaagagtaacacacagtagaagcatgagaacagatgtatgcatggcaattctgatgggtctcaaaaagtgctcaatgaaaaactagaaaaaaaatatgtagatttagatacatcacaaccatttacataaatggtctttacgttttttcatacactctccccttataaaacctttctgcacttggtttctagaacacaatagttacctggctttcctctcacattcctggctactccttcctagttttctttgcttttccccttcacctccccaattctttaargttgttctaccccagtctcatggtttaaatcccacatatgctgacaagcaccacagtacatgaccaggcaggacttcacctctaaagctagcctcatatgttcaa

SEQ ID NO: 232420 - DNA, 475 bp, Homo sapiens
gaattccctattttgcttctttcttgtgtaccaggatggtaactggagatattaagctgaaatttagccctctacctgtcagcatttctcagtactcattattcttgctttgttctggcagcaaacatggtttagtgaatggactgctctcaagataaaagagaacagagtcaaatttgggatatgttaatcttcaaaacatgattttttattccaagaaccagatgtttgagggtgccaagaaatttgtttggttaatttcttttctcttcttttcttttcgagacrggttcttactctgttgtccaggctagagtacagtggcacgatcatggctcactacagccttaacctcccaagttcaggtgatcctcttgcctcagcctcccgagtagctgggactacaggtgagtgccgccacactcggataatttcttgtattttttgtagagatgggatttcaccacatttctca

SEQ ID NO: 232421 - DNA, 475 bp, Homo sapiens
gaattccctattttgcttctttcttgtgtaccaggatggtaactggagatattaagctgaaatttagccctctacctgtcagcatttctcagtactcattattcttgctttgttctggcagcaaacatggtttagtgaatggactgctctcaagataaaagagaacagagtcaaatttgggatatgttaatcttcaaaacatgattttttattccaagaaccagatgtttgagggtgccaagaaatttgtttggttaatttcttttctcttcttttcttttcgagacaggttcttactctgttgtccaggctagagtacagtggcacgatcatggctcrctacagccttaacctcccaagttcaggtgatcctcttgcctcagcctcccgagtagctgggactacaggtgagtgccgccacactcggataatttcttgtattttttgtagagatgggatttcaccacatttctca

SEQ ID NO: 232422 - DNA, 585 bp, Homo sapiens
tttttttgagagagtcttgctctgtcgcccaggctggagtgcagtggcatgatctctgctcactgcaaacctctgcctcctgggttcaagtgattcttctgcctcagcctcccaaatagctgggactacaggcacgtgccaccatgcctggctaatttttgtatttttagtagagatggggtttcaccatattggccaggctgctctcacactcctgacytcatgatctgcctgtctcggcctcccaaagtgctaggattacaggcgtgagccaccgcgcctggcccatgtacacatttgtgtctgtgtgtgtgtgaacatgtttcacacctaatggtggaattattgaatcgtattgtaattctatgtttaattttttgaggaattgtcagttttccacaatggctgcatcatttcacatatttatcaacagtgtgtgagggtttaaatgtcttcaaatccttgccaaaagtttttactgtctgccttttcgattatagctgtctttgtagacgtgattttgatttgcatttccataatgaatagtgatgttgagccaattttcatatgtttgtggatatttgt

SEQ ID NO: 232423 - DNA, 538 bp, Homo sapiens
ttggacattttatttaaatggaattacataacatgtggtcctttgtgaccggcttctttcacttagcataatattttcaaggtttattcaatcttgcatgtgcaaagggggcactttacataaggataaacctgggatggggggtacttactgattgatttggaaacttccctccaaaattgtaaagggtttcaaatagaggaaaaacctattcaggctaaaatcctgttttcagcagtttgtaatgtggggttttattgcaaagaatggcaagatttttaggcttattttctgaaaattctccctgtgtttggggaacagtcacagaatgtggaggaatgggcttctaggctctgtggctggagattcgcgtccaggagaactcaggtccsagggtaggcagagaaaaacagtgtaagagtgccaacagaatgctttgaaatggaaaattttaaatgttccctccaaaaggagtcccagataaccacacaaaagaggactttgctgggcaggtccattgcaattgttcaataacaag

SEQ ID NO: 232424 - DNA, 583 bp, Homo sapiens
agctctgagtgggccagggtacagtcagtggagggccagagaggcaccttctcaagtgcaggattcagggcaggggtcctcttgcccagatcgatggctatgattgcttagtgcaatggcgcctgcgtcatgttttctcagctcacctttcattcagtctcagacaccgtgagaagttccatggaagcacaggcttctcttrtgctgccagcaaactcaaggtacactttctgccctagggaatctccattattgtacgattttgcctgagcacaaatacagcccagaaacacttgcaggttaacagcctcaggggaagacctcaaccagtgtgggacaggtggacaaatgctccaggctcatgtttcaggtgggcatttctggataactttccggagcctctcggaaggtcctgcagaaaaaactgcatggcaggagcctcaatagcatgccattattttggcttttctttcttgcctggctcactcttcccacttctgactcttgcttcttggaatcactttccaaataaaccacccacaccgaagtccttactccagctctgcttctagggatacaggca

SEQ ID NO: 232425 - DNA, 555 bp, Homo sapiens
gatctttcaaattctggacctgggatgtgaaatggccatggccttagttattttaactggctaactcgtagaatcccttttctgtgttccacaaatgtgccacattttgtgctattcatattcctgtatctagtatatcctctttcattaatctattttagtgcagtaatagttatattttcagatctaagaactaattgcttgactttgttaatggataaaacaaactgtaatatattttaaagaggtttattctgaaccaatatgagtgactgaggcctggagaaaacacgcaaccaagaaggcttgagtaagtggttccgaggtggccgggttggtttggttttatacatttcagggaggcaggagttacaggcaaagacatcaacacatggaaggtatacactggttcggttcaaaaagggggattatcttcaggagaggtcttataggttgtaggtggacttgggsattctctggtttgtgattggttaaaggagtaaggccctgtctacagcttagagttgacagaaaggaaggtaagaatgctctgtc

SEQ ID NO: 232426 - DNA, 471 bp, Homo sapiens
ggaattcagcccaggaaagcaaggatggtccaacattagaaacccaatgtattatatgacattaataggataaaggtgtgtgggggcgaggagaaattcaggatcatctcaactgcagaaaatgcattcaacaaaatctgccacactttcatgataaaaatcctcaagccgggcatggtggctcacatctgtaatcccagcactttgggagcctgaggtgggtggatcatgaggtcaggagtttgagaccaggctggtcaacatggtgaaacctcgtctgtactaaaaaaaaaaaaaaaaaaaaaaaatgagctgggcttggtggcaggtgcctgtagtcccagctactcaggaggctgaggcaraagaatcacttgaacccgagatgcggaggttgcagtaagccaagatcgagccactgtactccaacctgggcgacaaagctagacttcgtctcaaaagaaaaaaaaa

SEQ ID NO: 232427 - DNA, 461 bp, Homo sapiens
gatggtccaacattagaaacccaatgtattatatgacattaataggataaaggtgtgtgggggcgaggagaaattcaggatcatctcaactgcagaaaatgcattcaacaaaatctgccacactttcatgataaaaatcctcaagccgggcatggtggctcacatctgtaatcccagcactttgggagcctgaggtgggtggatcatgaggtcaggagtttgagaccaggctggtcaacatggtgaaacctcgtctgtactaaaaaaaaaaaaaaaaaaaaaaaatgagctgggcttggtggcaggtgcctgtagtcccagctactcaggaggctgaggcagaagaatcacttgaacccgagatgcggaggttgcagtaagccaaratcgagccactgtactccaacctgggcgacaaagctagacttcgtctcaaaagaaaaaaaaaatcctcgtataaa

SEQ ID NO: 232428 - DNA, 454 bp, Homo sapiens
catatagaaaaactaactcaaaatgtatcaaagacctaaatgcaagagctaaatctacaaaactcttagaagaaaacctatggttaaatcttcctgatcttgaatctgagattaggttctcagatacagattaggtacatacatgttcttagacatgaccccaaaagcatsaacaacaaattaagaaatatataaattgggctccatcaaaatttaaaacttttgtacaccaaatgatattattaggaaagtttaaaaatagcctacagaatgggagaaaaaaattgcaaatctctaaatgatgtgtctatataaagaactttaactactcaacaatagaaagacaaacaactcaattaaaatgaaatggtcaaagagtttatataggtatttctccaaagaagatctacaaatggccaacaagcacatgaaaagatgttcaatattattagtt

SEQ ID NO: 232429 - DNA, 454 bp, Homo sapiens
catatagaaaaactaactcaaaatgtatcaaagacctaaatgcaagagctaaatctacaaaactcttagaagaaaacctatggttaaatcttcctgatcttgaatctgagattaggttctcagatacagattaggtacatacatgttcttagacatgaccccaaaagcatcaacaacaaattaagaaatatataaattgggctccatcaaaatttaaaacttttgtacaccaaatgatattattaggaaagtttaaaaatagcctacagaatgggagaaaaaaattgcaaatctctaaatgatgtgtctatataaagaactttaactactcaacaatagaaagacaaacaactcaattaaaatsaaatggtcaaagagtttatataggtatttctccaaagaagatctacaaatggccaacaagcacatgaaaagatgttcaatattattagtt

SEQ ID NO: 232430 - DNA, 434 bp, Homo sapiens
gaattccatctcagctctgcttccaggaaacctgacccaagacagaggttgttgcaagggcagaggccacaggcatccacgccagcctctgtgtgttcagtctgtgagcggcccarcgctccccatgcactcctccttaaagcctactcaaccctggggtctgcaggcaagttcctcgcgggtgccttcccttgtcctggctgctgctctgcttcctttgcaagctccttctcgcacccttgcgctggctccctccagagggctccatcccctgcccactgtgccttcgtgggtggtgcccagatctctgtctcctctgccctggacccctctgcccctgactggcagatctatagagttcaatgcccctggagggctccacgtccatcccacagggacccggactctcatcttcctcctgagtgtgctctccc

SEQ ID NO: 232431 - DNA, 426 bp, Homo sapiens
cctgacccaagacagaggttgttgcaagggcagaggccacaggcatccacgccagcctctgtgtgttcagtctgtgagcggcccaacgctccccatgcactcctccttaaagcctactcaaccctggggtctgcaggcaagttcctygcgggtgccttcccttgtcctggctgctgctctgcttcctttgcaagctccttctcgcacccttgcgctggctccctccagagggctccatcccctgcccactgtgccttcgtgggtggtgcccagatctctgtctcctctgccctggacccctctgcccctgactggcagatctatagagttcaatgcccctggagggctccacgtccatcccacagggacccggactctcatcttcctcctgagtgtgctctccccggagacctggcattggaattc

SEQ ID NO: 232432 - DNA, 434 bp, Homo sapiens
gaattccatctcagctctgcttccaggaaacctgacccaagacagaggttgttgcaagggcagaggccacaggcatccacgccagcctctgtgtgttcagtctgtgagcggcccaacgctccccatgcactcctccttaaagcctactcaaccctggggtctgcaggcaagttcctcgcgggtgccttcccttgtcctggctgcygctctgcttcctttgcaagctccttctcgcacccttgcgctggctccctccagagggctccatcccctgcccactgtgccttcgtgggtggtgcccagatctctgtctcctctgccctggacccctctgcccctgactggcagatctatagagttcaatgcccctggagggctccacgtccatcccacagggacccggactctcatcttcctcctgagtgtgctctccc

SEQ ID NO: 232433 - DNA, 392 bp, Homo sapiens
acctgacccaagacagaggttgttgcaagggcagaggccacaggcatccacgccagcctctgtgtgttcagtctgtgagcggcccaacgctccccatgcactcctccttaaagcctactcaaccctggggtctgcaggcaagttcctcgcgggtgccttcccttgtcctggctgctgctctgcttcctttgcaagctccttctcgcacccttgcgctggctccctccagagggctccatcccctgcccactgtgccttcgtgggtggtgcccagatctctgtctcctctgccctggacccctctgcccctgactggcagatctatagagttcaatgcycctggagggctccacgtccatcccacagggacccggactctcatcttcctcctg

SEQ ID NO: 232434 - DNA, 519 bp, Homo sapiens
ggactttcatatgaatggcatcatataataagagacctactgtgactagcttctttcattgagcatagtgttttcaaggttcatccatgttgtggcatttatcagtacttcattccttttcaaggctgactaatattccattgtatggatatatcacactttgtttatccgttcatctattggtgaacatttgggttttttccaccttttggatattatgattctctctttcctcttattgtctagacatcttggatagtatccagtgaggcctgtgggcaagaatgggtgtttcttatatttgggaacacctaatatccatgaaagcagggtcttggcacatgtctgctttcrtattaagtacatgtactagctggaattttcctccctctgttgttactgagttggggctgctccctcctttatcaattctccctttttatcatgattgctgtgttggaaacttgctgactcttcagactaggggattcagatccttctcttggggcttcagagaca

SEQ ID NO: 232435 - DNA, 466 bp, Homo sapiens
tacccagagggaggagccaacagggcaggccatgttctcaccaagccatctgcagaggggtcaggtccaccctgagtcctcccttctcagtaacaagctgctgctgtgttttccattgtcccacagctgatttgtcagtcrgtgcaatcacagcgaggacaaacactaatgcccctcctgagacctctcttccagctgatggtgtggaccttgactccacagcaggtgtctgcaggccctccagctggccctcggtagcctggagtggctcgtcctggacagactcaccgctatgacgcagggggaactgccaggagtccctgagcgaggtgatctgagaaatgccatggcagtgttctaagccagcagcctggcttacccacaacctctccgctgtgtgaccttgagcaagtgccttaacctctctgagcctcagcttgcccctctgttaaagaatgatcatata

SEQ ID NO: 232436 - DNA, 471 bp, Homo sapiens
cccaccagcaccatgacagtttacagatgccatggcaatgtctggaggttaccttataaggtctcaaaagggaggrgaggagacctcagttcctcttcatccctttactttcctgataaacttgctctcactttactctgtgaactcgctccaaattctttctcgcatgagatcaaagagacctctcttggggtctggatcagagctcccccttttccagtaacaccagcactttgtgggaaagacagaggcgggaggattgagtgaggccaggagtttaagatcagcctggccaacataaggagacctaagtgcctaacttaaaaaaaaaaaaaaaggccaggcatggtggcttacgcctatagtcccaatactttgggagaccgaggtgggcagatcacttgagcccagcagttcgagaccagcctggacaacattgtgaaaccttgtctctacaaaaaaaaaaaaaaa

SEQ ID NO: 232437 - DNA, 471 bp, Homo sapiens
cccaccagcaccatgacagtttacagatgccatggcaatgtctggaggttaccttataaggtctcaaaagggaggggaggagacctcagttcctcttcatccctttactttcctgataaacttgytctcactttactctgtgaactcgctccaaattctttctcgcatgagatcaaagagacctctcttggggtctggatcagagctcccccttttccagtaacaccagcactttgtgggaaagacagaggcgggaggattgagtgaggccaggagtttaagatcagcctggccaacataaggagacctaagtgcctaacttaaaaaaaaaaaaaaaggccaggcatggtggcttacgcctatagtcccaatactttgggagaccgaggtgggcagatcacttgagcccagcagttcgagaccagcctggacaacattgtgaaaccttgtctctacaaaaaaaaaaaaaaa

SEQ ID NO: 232438 - DNA, 471 bp, Homo sapiens
cccaccagcaccatgacagtttacagatgccatggcaatgtctggaggttaccttataaggtctcaaaagggaggggaggagacctcagttcctcttcatccctttactttcctgataaacttgctctcactttactctgtgaaytcgctccaaattctttctcgcatgagatcaaagagacctctcttggggtctggatcagagctcccccttttccagtaacaccagcactttgtgggaaagacagaggcgggaggattgagtgaggccaggagtttaagatcagcctggccaacataaggagacctaagtgcctaacttaaaaaaaaaaaaaaaggccaggcatggtggcttacgcctatagtcccaatactttgggagaccgaggtgggcagatcacttgagcccagcagttcgagaccagcctggacaacattgtgaaaccttgtctctacaaaaaaaaaaaaaaa

SEQ ID NO: 232439 - DNA, 628 bp, Homo sapiens
gcagtggcatgaacacagctcattgcagcctctacatctccaggctcaggtgatcctcctacctcagcctcccaagtagcagggactacaggcatgagccaccacacctggctaatttttgtattttttgtagagacggggttttgatatgttgctcaggcttgtctcaaactcttggactcaagtgatctgcccaccttggcctcccaaattgctgggatgactggcatgcaccactgtcctggcctgttttcattttattaattggctgattcattcagaaacataattatcaagtmaaatctcactctttccttagcatttcccttccgtttagctgagaaaatctattcctattttaaaacatatacgattattcgagtgtggtggcacatgcctgtaatcccagctactcaggaggctgaggcaggagtatcacttcaaccctggagtgatatagtgattatatataatatataactatatagtgattatagtttataattttaactatatcatgtctcctgcctcataagtaccactggacaagttcccttttatgaactcagctgctgtcagaggtaaatgtattttgaagtggagaacaaagataagtgcaaaattggca

SEQ ID NO: 232440 - DNA, 401 bp, Homo sapiens
tatccttgtaatcaaacagtaaatgtgtttccctgaggtttgtgagccattttattctagcaaattaatcaaacccaaagagggggtygtaggaaccccaaattaaatctgtcagtcagaagttccagaggctgggacttgtggctggtgtctgaaaggggggcagttttgggggctgagccctcaatctgtggggtgacactatctcatggtagatagtgtcagaatcgaattggtggatacccagctggtgtctgctgcagaactgattccttgcttgctgatagggagaaatctcctcatattttgaggccacagaagtcttctgggtagattgttgtggttttggtgtgaagcagagggagaacacaggttgagttttttccaaatggattcacatt

SEQ ID NO: 232441 - DNA, 533 bp, Homo sapiens
gggagggaataacctgtgtttattgaacacctaatattccacttacccaaatgtcatttattctatattctagttttttgttgagacagggtctttcttgctctgttacccatcctagagtgcagtggggttgtcacagctcacagatgtataccaccatgcctggcttmttattttattttattttattttattattttattttattttattttattttattttatattttattttattttatattttattttattttattttatattttaattttattttattttattttattttatttttgcagagatgatgtctccctatatttcccaggcttgacttgaacttctgggctcaagcgatcctcctgccttggcatcccaaagtgctgggattataggcataagccactgtgctcaggcaatattaaagtcttgataatagaagtgtctcagtgtactggaatgctttgtctaaattttgaaaaaatattaaaaaacacgttggttttatttggccaatactgatttctt

SEQ ID NO: 232442 - DNA, 533 bp, Homo sapiens
gggagggaataacctgtgtttattgaacacctaatattccacttacccaaatgtcatttattctatattctagttttttgttgagacagggtctttcttgctctgttacccatcctagagtgcagtggggttgtcacagctcacagatgtataccaccatgcctggcttattattttattttattttattttattattttattttattttattttattttattttatattttattttattttatattwtattttattttattttatattttaattttattttattttattttattttatttttgcagagatgatgtctccctatatttcccaggcttgacttgaacttctgggctcaagcgatcctcctgccttggcatcccaaagtgctgggattataggcataagccactgtgctcaggcaatattaaagtcttgataatagaagtgtctcagtgtactggaatgctttgtctaaattttgaaaaaatattaaaaaacacgttggttttatttggccaatactgatttctt

SEQ ID NO: 232443 - DNA, 533 bp, Homo sapiens
gggagggaataacctgtgtttattgaacacctaatattccacttacccaaatgtcatttattctatattctagttttttgttgagacagggtctttcttgctctgttacccatcctagagtgcagtggggttgtcacagctcacagatgtataccaccatgcctggcttattattttattttattttattttattattttattttattttattttattttattttatattttattttattttatattttattttattttattttatattttaatttwattttattttattttattttatttttgcagagatgatgtctccctatatttcccaggcttgacttgaacttctgggctcaagcgatcctcctgccttggcatcccaaagtgctgggattataggcataagccactgtgctcaggcaatattaaagtcttgataatagaagtgtctcagtgtactggaatgctttgtctaaattttgaaaaaatattaaaaaacacgttggttttatttggccaatactgatttctt

SEQ ID NO: 232444 - DNA, 563 bp, Homo sapiens
tgataagtgcttagttaagatgaaaaaggcattaaatttgtgagtggaaatcaaacagaaatgtgttctgattgaaagcaattgggtcaatgctacccaagtttcaggcatccactgcgggtcttaaacacatctcctgcagataagggagggctattatataacgtttctttcttttttctttaattataaagcattctccttttttaatataaaaattggccacatatatcactttaggtataaagatattaggatacctttatagtagataaartgctgacacattctttgtaagagttaaagtatctttcattatatgagcatttaagatattaaagtacttttgccaccaaaaatagtgcttctgtaaatattcttttacttataactttgttagtttttacttctgctgaaacaaattgcatgaggaaacaagtgtatgtgtgtaaagtgtaatatatgtatatatatttaatatgggtatatacaacttaatatatacacatacatacaataacatatacatttttttgttttgttttttgagatagagttttgct

SEQ ID NO: 232445 - DNA, 442 bp, Homo sapiens
agaattctcacttcctctgacatttttgttctattcaagtcctcagtggattggatggggcccactcacattgaggagggcaatctgccttactcagtacgccaattaaaaagttaatgagatatatacctcttttgaaaacaccctcacagacatgcccagaaatgtttaacccactatctgggcatcctgtggcccagtcaagytgacacatgacagtaaccgtcacactcatcctcctcccttcgaactgctttctcactgcccctcagtgactggagccattagcacctctctgcttcacctctcatctcatctctcaaagccacgtttaaaatgttactgtatacattacatgtctttgtgaaaatcagtatgctgagctatggagaaaaaaagtatttcagagaagtgtgaaacaaactgaaatttaaaatttaaa

SEQ ID NO: 232446 - DNA, 442 bp, Homo sapiens
agaattctcacttcctctgacatttttgttctattcaagtcctcagtggattggatggggcccactcacattgaggagggcaatctgccttactcagtacgccaattaaaaagttaatgagatatatacctcttttgaaaacaccctcacagacatgcccagaaatgtttaacccactatctgggcatcctgtggcccagtcaagctgacacatgacagtaaccgtcacactcatcctcctcccttcgawctgctttctcactgcccctcagtgactggagccattagcacctctctgcttcacctctcatctcatctctcaaagccacgtttaaaatgttactgtatacattacatgtctttgtgaaaatcagtatgctgagctatggagaaaaaaagtatttcagagaagtgtgaaacaaactgaaatttaaaatttaaa

SEQ ID NO: 232447 - DNA, 447 bp, Homo sapiens
ttgttctattcaagtcctcagtggattggatggggcccactcacattgaggagggcaatctgccttactcagtacgccaattaaaaagttaatgagatatatacctcttttgaaaacaccctcacagacatgcccagaaatgtttaacccactatctgggcatcctgtggcccagtcaagctgacacatgacagtaaccgtcacactcatcctcctcccttcgaactgctttctcactgcccctcagtgactggagccrttagcacctctctgcttcacctctcatctcatctctcaaagccacgtttaaaatgttactgtatacattacatgtctttgtgaaaatcagtatgctgagctatggagaaaaaaagtatttcagagaagtgtgaaacaaactgaaatttaaaatttaaaacattacatgaattgtggattatcagaatt

SEQ ID NO: 232448 - DNA, 454 bp, Homo sapiens
gaattctcacttcctctgacatttttgttctattcaagtcctcagtggattggatggggcccactcacattgaggagggcaatctgccttactcagtacgccaattaaaaagttaatgagatatatacctcttttgaaaacaccctcacagacatgcccagaaatgtttaacccactatctgggcatcctgtggcccagtcaagctgacacatgacagtaaccgtcacactcatcctcctcccttcgaactgctttctcactgcccctcagtgactggagccattarcacctctctgcttcacctctcatctcatctctcaaagccacgtttaaaatgttactgtatacattacatgtctttgtgaaaatcagtatgctgagctatggagaaaaaaagtatttcagagaagtgtgaaacaaactgaaatttaaaatttaaaacattacatgaat

SEQ ID NO: 232449 - DNA, 442 bp, Homo sapiens
agaattctcacttcctctgacatttttgttctattcaagtcctcagtggattggatggggcccactcacattgaggagggcaatctgccttactcagtacgccaattaaaaagttaatgagatatatacctcttttgaaaacaccctcacagacatgcccagaaatgtttaacccactatctgggcatcctgtggcccagtcaagctgacacatgacagtaaccgtcacactcatcctcctcccttcgaactgctttctcactgcccctcagtgactggagccattagcacctctctgcttcasctctcatctcatctctcaaagccacgtttaaaatgttactgtatacattacatgtctttgtgaaaatcagtatgctgagctatggagaaaaaaagtatttcagagaagtgtgaaacaaactgaaatttaaaatttaaa

SEQ ID NO: 232450 - DNA, 444 bp, Homo sapiens
gaattcgcaatgtgatcccatgatttcayacccgaatccctcagagcccacaagaatagggaatcccatgactatgttgtgtcatatggcacagttgactgtagagtagggacactatctggtgggcttaatgtcatcacacagtttcgaagcagagtgttttttttgactggtagaagaagtcagagagattcagagtatgagaatgacgcagtgtgtactgctgttcagaaacggagggagccaagagagcaggaatgagggtggcctgaagggtgcaagacaggtcctggctggcagccaacaaggaaaccaggaccccagtcctccaatgccaggaatttaatcctgccaatagcaggagtaagcttggaagaggagcctggggtctagggaagaaaacattaacttacatctttatttcagccttgtgagactgagcag

SEQ ID NO: 232451 - DNA, 445 bp, Homo sapiens
atacccgaatccctcagagcccacragaatagggaatcccatgactatgttgtgtcatatggcacagttgactgtagagtagggacactatctggtgggcttaatgtcatcacacagtttcgaagcagagtgttttttttgactggtagaagaagtcagagagattcagagtatgagaatgacgcagtgtgtactgctgttcagaaacggagggagccaagagagcaggaatgagggtggcctgaagggtgcaagacaggtcctggctggcagccaacaaggaaaccaggaccccagtcctccaatgccaggaatttaatcctgccaatagcaggagtaagcttggaagaggagcctggggtctagggaagaaaacattaacttacatctttatttcagccttgtgagactgagcaggcggtccagccgctgcatcctggaattc

SEQ ID NO: 232452 - DNA, 444 bp, Homo sapiens
gaattcgcaatgtgatcccatgatttcatacccgaatccctcagagcccacaagaatagggaatcccatgactatgttgtgtcatatggcacagttgactgtagagtagggacactatctggtgggcttaatgtcatcacacagtttygaagcagagtgttttttttgactggtagaagaagtcagagagattcagagtatgagaatgacgcagtgtgtactgctgttcagaaacggagggagccaagagagcaggaatgagggtggcctgaagggtgcaagacaggtcctggctggcagccaacaaggaaaccaggaccccagtcctccaatgccaggaatttaatcctgccaatagcaggagtaagcttggaagaggagcctggggtctagggaagaaaacattaacttacatctttatttcagccttgtgagactgagcag

SEQ ID NO: 232453 - DNA, 446 bp, Homo sapiens
catacccgaatccctcagagcccacaagaatagggaatcccatgactatgttgtgtcatatggcacagttgactgtagagtagggacactatctggtgggcttaatgtcatcacacagtttcgaagcagagtgttttttttgactggtagaagaagtcagagagattcagagtatgagaatgaygcagtgtgtactgctgttcagaaacggagggagccaagagagcaggaatgagggtggcctgaagggtgcaagacaggtcctggctggcagccaacaaggaaaccaggaccccagtcctccaatgccaggaatttaatcctgccaatagcaggagtaagcttggaagaggagcctggggtctagggaagaaaacattaacttacatctttatttcagccttgtgagactgagcaggcggtccagccgctgcatcctggaattc

SEQ ID NO: 232454 - DNA, 444 bp, Homo sapiens
gaattcgcaatgtgatcccatgatttcatacccgaatccctcagagcccacaagaatagggaatcccatgactatgttgtgtcatatggcacagttgactgtagagtagggacactatctggtgggcttaatgtcatcacacagtttcgaagcagagtgttttttttgactggtagaagaagtcagagagattcagagtatgagaatgacgcagtgtgtactgctgttcagaaacggagggagccaagagagcaggaatgagggtggcctgaagggtgcaagacaggtcctggctggcagccaacaaggaaaccaggaccccagtcctccaatgccaggaatttaatcctgccaatagcakgagtaagcttggaagaggagcctggggtctagggaagaaaacattaacttacatctttatttcagccttgtgagactgagcag

SEQ ID NO: 232455 - DNA, 595 bp, Homo sapiens
agatgagatgatgattccctgtgtttcaggctgctctttgatccgcctaggctcactttatgttgcctattagatctagcttgagggctttctggtttcatgccttaaagtaataattccctcatactgtcagccttccttacaaaataaatatgggaagaatgagtacagttccccctgggttactaccttgtttaccttatcttgtttaccttgttgatcacaatcttcaggcacctgttccatttccttctcttctttttccctctgcttttccctgtcctagaaattagcaaggattttctaaacacagataatcagtcacttagatgtgattttattcctacaaaatgattgattgatgtcaattgagttgccttaaaacaaaaaaaacccaattccccaggggagtgataggtccaagcaagaaatccagcaaatcacctagcaaaccrttgtccaaaattgccaacaggtgaactgttctgtatcttgatctggtggcagtaacatgggtgtagaaatatataaaattaattgagctgtatgcctagattgtgcattttactacatgcaagcatgtaaatcacacccc

SEQ ID NO: 232456 - DNA, 549 bp, Homo sapiens
gttatttgttacaaaactatacttttaaattagctttttttttcttttcatactaagttagattgcaattggttatggaagaactcaaagtagggagaaagccttcagcagcttatattacatctcaatgtaactgtatttagatataagccctttaaacyggcatttaaagtttaatgacgtcataagggtggaggcctatagcatccaataagattggtgttcttacaacaggtgagagagacagacactgggagtgctcatgcgcagaggaaaggccgtaggaggatgctataaaaaggctgttgtctgcaagccaaggggtgaggcctcgggagaaaccaagcctgttgacaccacgatcttggacttccaccccttcagaaccgtgagaaaataagtttctgttgtttaaggctcctagtctgtggtgttttgttatggcagtcctagatgagtaatatagcccataatatcaagttgtccatacctggtaatgctacatttgatcagtactttcaagtagaaacagcctgagacttccattcc

SEQ ID NO: 232457 - DNA, 551 bp, Homo sapiens
gttcttttaattcacactgaaagctaccaaaagtgtagaacacttactaagctcgtttttgaacacctacttccaggttttaatttttggaagagagggacaggtttttgtattattaccagaggcttctgtttctgcatttcgttttcttacagatttattttttagaatgatttgtggttcatagcaaaactgaatggaaagttagagatattccataaacctccttttctgcacaggcatagcctcccccatgagagtggtacgtgtgtcataatttatgaaccagcactgacgcatcactrtcacccagagtctgtagtttacattacggttcactcttggtgttgtacattctatgggttttgacatatgtgtaatgacttgtatccatcattttagtatcctacaggtattttcactaccctaaaaatcctgctttccacctattcatcccgctctctcggcttaagcccttggcaaccactgattcttttactggatttctagttttgactttcccagaatgtcatatagttgcaattttacag

SEQ ID NO: 232458 - DNA, 433 bp, Homo sapiens
cgtttcctagtttgatcatagtttttccttacataaaaactatttctgtaagatacttacatttgtttaaacaggttaagggttcattgggaatctaatgctacttttttttttttttttttttaccttttctgtaagtctctgtgtaatccaaataaaaaggtgacaaataaaaacttacgttcttcttcacttatatttcttttctatattttcttcagcttaagagtaattttctacagttactttaacagaggagacaataaaaatcaaattmaagtaaagagttaagtgtacacatgaattgttaagacgcctttagaaattgaattaacttagtagctcttttatatatgttgtatttttggttgtccatctctttggaaataatatttaataaatgatttaaaaatgtattcatttttaaaagtgc

SEQ ID NO: 232459 - DNA, 524 bp, Homo sapiens
ataaggtgcccataacccagaggtttctttgtttgggaaaataaaaccaaggaactttatagaccttcaaaggagacttctatatcttgccaagtaaaatgttagatggaaattacctatsacaccacatatgtggaaattacctgtcacaacgcatatgtgggaactgctgtcctcactctactatttgcaataggattatacacagtagcaccttctaactgaaatattaaacagaaagtttctatcactgtcatattttgcttaattattatccttatagcagggataatagttactaacaaaaaggaagcttgaaagttttactatcactgagtctgctaagactttttattgggtctagtgatgcacttttaaatgaaacatgctgcttttggattaacacctctggtatagtaaaggaaaatctacaggtacttaaagatcaaatcaaaattattggcaggctcagggaaaatgccagcttcagccccaggtggctacaatccctctttaatgaattc

SEQ ID NO: 232460 - DNA, 524 bp, Homo sapiens
ataaggtgcccataacccagaggtttctttgtttgggaaaataaaaccaaggaactttatagaccttcaaaggagacttctatatcttgccaagtaaaatgttagatggaaattacctatcacaccacatatgtggaaattacctgtcacaacgcatatgtgggaactgctgtcctcactctactatttgcaataggattatacacagtagcaccttctaactgaaatattraacagaaagtttctatcactgtcatattttgcttaattattatccttatagcagggataatagttactaacaaaaaggaagcttgaaagttttactatcactgagtctgctaagactttttattgggtctagtgatgcacttttaaatgaaacatgctgcttttggattaacacctctggtatagtaaaggaaaatctacaggtacttaaagatcaaatcaaaattattggcaggctcagggaaaatgccagcttcagccccaggtggctacaatccctctttaatgaattc

SEQ ID NO: 232461 - DNA, 372 bp, Homo sapiens
ataataattttatatattttatattttccttaagaataaaatatatatattcacacaaaatcatttgctgaagaaaaaccattatatttgattcatgaggaaagtttttcaatcatgtttaagtagttttaattttaatattttaaaagacataatatatgtcatttttaataaactaggtaaacttaactttttgtggctagctatgttaattcacwttttgggataacagaactgaatgaaccaaatgacacagaagtgcctgtctctgatatgaatagaaagcacaaagagttttacaaactttcataactccttcaacacaagagaagataaagatatgaataaaacgtactgcaaacattaagtcct

SEQ ID NO: 232462 - DNA, 610 bp, Homo sapiens
gaaaatcacatttgacaaccatcatattaataatcattaatttacctgagaaatatcaatggatgctaaaactaatgtggaaagagggatgaaaatttgagatttacatggtttcgaaatatcttgtcataaaggactcattaattgtagtgggaatgggatggggaaacatcgctttatgatggcaaaatctgtctgatatcatcttgagtagcccaatttaacactgcaagtaacgaatccagtagacattgggtgtcacttgatagaatgccatgagatagcagtattatttytgtgataatttagctaaacaatgcatcacctgaatctactcacgcagaaatatcctataaacacacatgaaaaaatattctacaaaattattggtttgtaataaaaatttcttagtcatgtaagccaataaaggctgataaattatttcagattgaaggaaactagaaagacataagagaaagtctaaataagtgagtgcaatatatgatcctagtttggatttttttgctgttaaaaaaaagaatacactatgaaatcaattagaggttctctatatgttggatgtatagcattctttgtattatttttgcaa

SEQ ID NO: 232463 - DNA, 569 bp, Homo sapiens
tgttagctgccagtattctctgttagatagaaaactgaggacttgggttctgcaggccaaccataggcaactcatgacatagtccactatagtgcacctttatttcatacaactttagaagtctcagcagttactgtatcacaatctaattctccctctgctgaattctgttttcttgagtttcccagagtcactgatgccaagagcattttccagtacatttcatgcatgcaaatctgagtttatttctgtgaaaaccaacttatgatatttgccctcagtgacccartgaatacatactttcaaaaacttgcaatttttgtgctctaggtttagaaattttagttcctagaaggaaaattattctaacaagtggctttttaagagattcactaatcctcagattaagactgctccctgcccattcattttaagctacttgtcccaaaagaccagcagtcagtagagaagtcactatccagtcagggagaattctgattattaggatatggtagactttctgtgacccaatgggataaaggaatatgtatagcatccaaaagatccat

SEQ ID NO: 232464 - DNA, 579 bp, Homo sapiens
ggagtgttggggatagactttagccatagacttttgtaaaggccctttcctgagaaagttcctctctattcctattttgctttgtgttttagtcattgacttgttctgtgctcttccagcayctattaaaatgaccatatatttttcatctttacaaaatgagttggaaagtgtttcttcctctttggtgtcaaaatttttttagaattggtgttcttgagttctgtttaaagtaaagcttttgaaaatgaattcaatcttttaatcgatacaggactaattttttattttgcatattggattagttcagataagttgtatttttcatgagattggtttaataaaagtttttgagtttattgccataatgcttatacatatacatagttatacatatatatatacacatacatatgtttatataggtaattaccttaacatatatagaatttgtaagtatagacttttttttgccttttttttttaaatcactcagctcagggcttctcaactttgttgatcagtgcaaagacctaacatttggctgttagttgtcccaatggttggcctcttttctat

SEQ ID NO: 232465 - DNA, 561 bp, Homo sapiens
taataaatacagttcaaattcaacatggatggataatccaagctatgcggcagtaagcagctctaaatatttagagccagataggtagagaaataaaggaaaggtcaagggacatttcagatgtaatgaaggtcccaaatcagtaggcttgagttaatcaaaagagagatggttctgcctgggactggcttcatcaggtgaaagtgcttaaaagagggcctgggctccaggtgagctcagaaaaatcttgctgatttatgatataagcagttatattggaaaagcccaagaggccaggaactgtgagaagcctctgggaactgccaacggcctctagracctgcaggcagttccttgccaacatctaacaaatgctggggcccttgtcatacacctacaagaaatgaagtctgccaatcacttaaaaagcttgaaagagggttcatcctgcctccagatgagaatgcagtccagccaatgccttgattatagccttctgagaccttcagcaaaggatcgtggtagacagtgcctggatctgacccacagacaatgtgagat

SEQ ID NO: 232466 - DNA, 561 bp, Homo sapiens
taataaatacagttcaaattcaacatggatggataatccaagctatgcggcagtaagcagctctaaatatttagagccagataggtagagaaataaaggaaaggtcaagggacatttcagatgtaatgaaggtcccaaatcagtaggcttgagttaatcaaaagagagatggttctgcctgggactggcttcatcaggtgaaagtgcttaaaagagggcctgggctccaggtgagctcagaaaaatcttgctgatttatgatataagcagttatattggaaaagcccaagaggccaggaactgtgagaagcctctgggaactgccaacggcctctaggacctgcaggcagttccttgccaacatctaacaaatgctggggcccttgtcatacacctacaagaaatgaagtctgccaatcacttaaaaagcttgaaagaggrttcatcctgcctccagatgagaatgcagtccagccaatgccttgattatagccttctgagaccttcagcaaaggatcgtggtagacagtgcctggatctgacccacagacaatgtgagat

SEQ ID NO: 232467 - DNA, 579 bp, Homo sapiens
ggagtgttggggatagactttagccatagacttttgtaaaggccctttcctgagaaagttcctctctattcctattttgctttgtgttttagtcattgacttgttctgtgctcttccagcacctattaaaatgaccatatatttttcatctttacaaaatgagttggaaagtgtttcttcctctttggtgtcaaaatttttttagaattggtgttcttgagttctgtttaaagtaaagcttttgaaaatgaattcaatcttttaatcgatacaggactaattttttatttkgcatattggattagttcagataagttgtatttttcatgagattggtttaataaaagtttttgagtttattgccataatgcttatacatatacatagttatacatatatatatacacatacatatgtttatataggtaattaccttaacatatatagaatttgtaagtatagacttttttttgccttttttttttaaatcactcagctcagggcttctcaactttgttgatcagtgcaaagacctaacatttggctgttagttgtcccaatggttggcctcttttctat

SEQ ID NO: 232468 - DNA, 646 bp, Homo sapiens
gttttcagacttctcctgtgatataccacctgtggttgcccaagggtacgtttatttttcctggcatttaaatgatattttccctggcattaaaattatatgttctaagttattgtcctcaacactttttcattatatctttgctatattcctgcatttagaattgctcctgaaaaaaaatgtgacattgatataatttttgtttctttgaaagtttttgcatttttgttgagctgatctttatcaatgttcttaaactgcatttaactgggataagggattttgtctagggagactctgtggttgtatgaagttgttttgtctgtcactccatggaacatttcaaaataaaatattttatatattaaaatagaacattctctattattaatccaaaatataactactatatttacatattttttcatctgagcctccaatagaaaaagatgtaatcaggcttatagttttcggtgtgacatgtaaggatgtgaagtkcttactcctgtccacacaacaacaaaaaaaatagcagaacaaactgaacgtcaataagtctttttagatccattaaataattaatgtcaaaggaaaacctgctgcctagaaaactgaagagacaggcaggaaaacttaaactatgacg

SEQ ID NO: 232469 - DNA, 612 bp, Homo sapiens
ttctgttcttgtttagagggcctgttctcaagggaagctattttaccagaccccaacagactatggctccaatacagtataggagacccaagggaagagaaatatctaaaattagtccctctagactttccatgtgtgaaaagagaaaacacccagcctcagaccccttaaaccttctggtttgcttaagggagtaaataccaaccaaccaamcaaacaaaaatactgggaaacatttgtgatggccacacacagcccaaaacacaggcttagtaaagggggtgagaactaactaaaggactatgtaacatgtcctctcttcttctagactttaccgccacatttgtagggctcctatgtaataacaggagaataaaattaaaggaacaatatgtttcacaccttaagaaatctctagggaaaactgaagccaacaggacagccaaacaaatgaataaccttaaagaaaaatttagcctctgtcactataattacactaaacagtaaacacagtctaacttttagccagataaatataaaatcttccaaaaaaagcctatttgtcttagttactgtttcctatctatgtccacttttcaacacaaaattata

SEQ ID NO: 232470 - DNA, 498 bp, Homo sapiens
tgttctgtatttctgacaaaatgagtgacttgctgcgccttctctgaatatactgttcttaccaactggactactccagcattcatcttctccatagctataaaaatgctacccatcaatcaagagttaacccaaatgtcatattttttggaagctttcacagaaacacctattacactaattatatcatcttaaatctatattaattgtattttattttaattgcttggataattaacaaaataaatgattgcattgcatatttaaaatgtatgagtgatacaaaagaaagatcagaggaagaggaattaagacattgggcctggtagggaaggctgtaatatcgaacagtattgtcaagattgagagagtgaaatttgaacaaaaacttaaaagtgtgcagcaattagctatgcagatctgtgggaaaagagtattcagggcaaaaagaagagatagagcaaatgygctaaagtgggcttgtgcctagtgtattcc

SEQ ID NO: 232471 - DNA, 488 bp, Homo sapiens
ttacagttgacaaaatccaggactactcaaatttcatcagtttttccatgatttttgtggtttagttaccaatccagggtactacgttgcgtttgttatatttttatttttagttatactaaaatgtggggtacatgtgatatcttgatgcatgtgtacaatgtttaatgaccaagtcacaataattgggatatccatcacttggagtatttatcatttctttgtgttaggaacattacagttctgctctttaagttgttttgaaatatacaataaattattgttaactatagttgtcycactgtgctgctgaacagtaggtcttattccttctatctagctctatatctgtacccaccaaccatttctcctttttgcctccctccccgttatccttcccagattctgttaaccatcattctgttctatatttccgtgagatcaatatttttttagctcccacatatgagtgaaaacatgcaatattt

SEQ ID NO: 232472 - DNA, 478 bp, Homo sapiens
ccgtccagtgatagagctgctgggattccaaagaaagaagcactaaacaccagggtgttcatagakcatttgttagagggacttctgcacagtgggtcaccctcgtctccttgcccagtgtctccttgtggatctcaaggatgtgcttccacatagcagcatcttcttcagatggacaaggagacactgggtgttctacccgaagctttaacttaaaataaaaataaaaacaaaaataaacccctagagaatatgatctctcagtagagttgtttcttgggatacacaggcaattcgtttcagtaccccctacatgcaccaacacctgctcgtactccagccccgacattgtctctgctgggcctgcatataggaaaagtctgccgttcatatacacaagtcttgcatcccacaaatgctatagttttgacccccgtttggttgaaaaaagtgtgcatataagagaccccaggaattc

SEQ ID NO: 232473 - DNA, 469 bp, Homo sapiens
gaattccatcaaaggagtgcaccaaaccgtccagtgatagagctgctgggattccaaagaaagaagcactaaacaccagggtgttcatagagcatttrttagagggacttctgcacagtgggtcaccctcgtctccttgcccagtgtctccttgtggatctcaaggatgtgcttccacatagcagcatcttcttcagatggacaaggagacactgggtgttctacccgaagctttaacttaaaataaaaataaaaacaaaaataaacccctagagaatatgatctctcagtagagttgtttcttgggatacacaggcaattcgtttcagtaccccctacatgcaccaacacctgctcgtactccagccccgacattgtctctgctgggcctgcatataggaaaagtctgccgttcatatacacaagtcttgcatcccacaaatgctatagttttgacccccgtttggtt

SEQ ID NO: 232474 - DNA, 478 bp, Homo sapiens
ccgtccagtgatagagctgctgggattccaaagaaagaagcactaaacaccagggtgttcatagagcatttgttagagggacttctgcacagtgggtcaccctcgtctccttgcccagtgtctccttgtggatctcaaggatgtgcttccacatagcagcatcttcttcagatggacaaggagacactgggtgttctacccgaagctttaacttaaaataaaaataaaaacaaaaataaacccctagagaatatgatctctcagtagagttgtttcttgggatacacaggcaattcgtttcagtaccccctacatgcaccaacacctgctcgtactccagccccgacattgtctctgctgggcctgcatataggaaaagtctgccgttcatatacacaagtcttgcatcccacaaatgctayagttttgacccccgtttggttgaaaaaagtgtgcatataagagaccccaggaattc

SEQ ID NO: 232475 - DNA, 480 bp, Homo sapiens
catgtaatgggattgctaagtgaaatggtagttctatttttagttctttgagatagctccatattattttccatagaagataaactcatttacattcctaccaaccatgtatcttgctaacatctgttggttctgacktcttaaaagtagccattttgattggtgtaagttgatactcagtgtggttttaagttgaatttctctgatgattaatgatgttgagcattttttaatgtgtttgttggccacttatatttcttgttttgagaaatgtctgttgatggtctttactcagttttccataaagttgtctgtgttttttgttttttttttatgttgaattctttgacttccttgcagattctggacattagtcttttgttggaggcataatttgcaaatattttcttccattgtgtaggttgtctgttcattctgttgattgtttcttttgctgtgcagtagcttttaattttaatc

SEQ ID NO: 232476 - DNA, 480 bp, Homo sapiens
catgtaatgggattgctaagtgaaatggtagttctatttttagttctttgagatagctccatattattttccatagaagataaactcatttacattcctaccaaccatgtatcttgctaacatctgttggttctgacgtcttaaaagtagccattttgaytggtgtaagttgatactcagtgtggttttaagttgaatttctctgatgattaatgatgttgagcattttttaatgtgtttgttggccacttatatttcttgttttgagaaatgtctgttgatggtctttactcagttttccataaagttgtctgtgttttttgttttttttttatgttgaattctttgacttccttgcagattctggacattagtcttttgttggaggcataatttgcaaatattttcttccattgtgtaggttgtctgttcattctgttgattgtttcttttgctgtgcagtagcttttaattttaatc

SEQ ID NO: 232477 - DNA, 591 bp, Homo sapiens
aagcttccccaggactggtgagaagactggccatggtaggttccccacaagggtgtgtttatgggtgagctgaaggagagagkgaaaccccacgaggagtctctgagaggaaggaagaaccctccgttgccttcacctggaagggaccaactcaggaaggcaccacgtccatttgcagctacgtcccggccctcaatgagacgaggacatgtcaggcagacagtgaaaggagatcaggagagatgccatgcgtgtctgaaatatcagcagaaagcctggtgcctgtctcaaaggatggttcaatatatgcaagtcaataaaggtgactcacgacataaactaagaacaaaaagcatgtgataatctcaagcgatgcagataaagcattcgagaaaggccaagtcctgggaaaacatgagccagcggggtccgggacagctcaccacccatggagatgctggtgggaaaatcctgtaagtgggagtaaggaaggagaccactactactcctgctgccctcctccccccaccttgcctagttcacaaaacaggaagagagaaaaagccaaaagttggaaaaatacaaaagtaa

SEQ ID NO: 232478 - DNA, 591 bp, Homo sapiens
aagcttccccaggactggtgagaagactggccatggtaggttccccacaagggtgtgtttatgggtgagctgaaggagagagggaaaccccaygaggagtctctgagaggaaggaagaaccctccgttgccttcacctggaagggaccaactcaggaaggcaccacgtccatttgcagctacgtcccggccctcaatgagacgaggacatgtcaggcagacagtgaaaggagatcaggagagatgccatgcgtgtctgaaatatcagcagaaagcctggtgcctgtctcaaaggatggttcaatatatgcaagtcaataaaggtgactcacgacataaactaagaacaaaaagcatgtgataatctcaagcgatgcagataaagcattcgagaaaggccaagtcctgggaaaacatgagccagcggggtccgggacagctcaccacccatggagatgctggtgggaaaatcctgtaagtgggagtaaggaaggagaccactactactcctgctgccctcctccccccaccttgcctagttcacaaaacaggaagagagaaaaagccaaaagttggaaaaatacaaaagtaa

SEQ ID NO: 232479 - DNA, 591 bp, Homo sapiens
aagcttccccaggactggtgagaagactggccatggtaggttccccacaagggtgtgtttatgggtgagctgaaggagagagggaaaccccacgaggagtctctgagaggaaggaagaaccctccgttgccttcacctggaagggaccaactcaggaaggcaccacgtccatttgcagctacgtcccggccctcaatgagacgaggacatgtcaggcagacagtgaaaggagatcaggagagatgccatgcgtgtctgaaatatcagcagaaagcctggtgcctgtctcaaaggatggttcaatatatgcaagtcaataaaggtgactcacgacataaactaagaacaaaaagcatgtgatmatctcaagcgatgcagataaagcattcgagaaaggccaagtcctgggaaaacatgagccagcggggtccgggacagctcaccacccatggagatgctggtgggaaaatcctgtaagtgggagtaaggaaggagaccactactactcctgctgccctcctccccccaccttgcctagttcacaaaacaggaagagagaaaaagccaaaagttggaaaaatacaaaagtaa

SEQ ID NO: 232480 - DNA, 591 bp, Homo sapiens
aagcttccccaggactggtgagaagactggccatggtaggttccccacaagggtgtgtttatgggtgagctgaaggagagagggaaaccccacgaggagtctctgagaggaaggaagaaccctccgttgccttcacctggaagggaccaactcaggaaggcaccacgtccatttgcagctacgtcccggccctcaatgagacgaggacatgtcaggcagacagtgaaaggagatcaggagagatgccatgcgtgtctgaaatatcagcagaaagcctggtgcctgtctcaaaggatggttcaatatatgcaagtcaataaaggtgactcacgacataaactaagaacaaaaagcatgtgataatctcaascgatgcagataaagcattcgagaaaggccaagtcctgggaaaacatgagccagcggggtccgggacagctcaccacccatggagatgctggtgggaaaatcctgtaagtgggagtaaggaaggagaccactactactcctgctgccctcctccccccaccttgcctagttcacaaaacaggaagagagaaaaagccaaaagttggaaaaatacaaaagtaa

SEQ ID NO: 232481 - DNA, 433 bp, Homo sapiens
acactttttccaaacaaacggggatcaaaactatagcatttgtgagaaacaagacttgcgtatatgaacggcagacttttcctatatgcagacccagcagagacaacgtcagggctggagtacgagcaagtgttggtacatgtagggggtactgaaacgaattgcctgtgtatcccaagaaacaactgtactgagagatcatattttctaggggtttatttttggttttgtttttattttaggttaaagctttggatagaatacccagtgtctccttgtscatctgaagaacatgctgctatgtggaagcacatccttgagatccacaaggagacactgggcaagaagacaaggatgccccactgtgcagaggtccccctaataaatgctctatgaacaccctggtgtttagtgcttctttccttggaattcc

SEQ ID NO: 232482 - DNA, 573 bp, Homo sapiens
actgtggagtgtgactgctactttgataagtaatagtttcttcctcgatacttcatgacttgaggagatcacagaagcctactttagactctgttgcattcactatacatccccatcccactgctatgcaccttcacccaggagatgctattctggccatcagccttacagaaaaagrctaaggtgatagcaggtgtcattttaaaactgcatcttatggctgggtgtggtggctcatgcctgtaatgccagcactttgggagaccgaggtgggtggatcaccagaggtcaggagttcgagactagcctggccaacatggcgagaccctgtttctaccaaaaatacaaaaattagccggggttggtggtgggtgcctataatctcagctaccaaggagtctcaggcaggagaattgcttgaacctgcgaggctgaggttgcagtgaaccaagatcatgccactgcactccagcctaggcaacagagtaagactctgtctcaaaacaaacaaaaaaagagtattttatttctaccacaaagagattttagatcactttaaaaaccccacaaaac

SEQ ID NO: 232483 - DNA, 415 bp, Homo sapiens
gagagagtcagagtaagtaaatatgaaaacacatttgagtgtagtaagatgtgtacctaagcctacaggtcatttgcttattttattctaaggcatattaataagatcatttaaatttcaaacagtcaaaacagaattacaattctcrttgtttatttactctaggaaatgatcttttgtcaaaaaaagaagcaaaaaataaagaaccaaaaaaaagaaaaaaaggacaggtttttaagtaaaatgctacccaaagtaaataaaaataaatatcttagtctgggtgacagagtgagaccctgcctcaaaaacaaacaaataaacaaaacccaccaaatacctgtttatatatacaaaatatttaatttgttaagtgggaaaaagtgagaatcagaccctgggttacaatttattg

SEQ ID NO: 232484 - DNA, 567 bp, Homo sapiens
gaaacaataagaaataatattaacttgaacacttactgacatcacatagtaagagaaatccacacttsactggagagtatcaggaaattaataaaatagtcaaactaaccaagaacaaaagagaagacacaaattgccaatattatatgtagtaagagaagtgtcaccgctccagaagccacagataattaaaggaaaataagcaatattattaacaacttaatgccaataaattctatagcatttataaagtgggaaaaattccttgaaacacacagtctattaaagttcacctaaaaagaaaaagaaagcaagaaaagttctatatctattcaagaaattgaattttagttaaaaaacctcccacaaagaaaactccaggccccatatggcttcactgattaattctatcacatatttcagtaaaaagaaatagcaattgtctaatacttctcaaaactcaataagagccaatatcagcagttcatttttttaaatgggcaaagtatttgaacagagccctcattaacagaatataagtggatgacaatctgataaaaagatatt

SEQ ID NO: 232485 - DNA, 609 bp, Homo sapiens
ccatttctttagtccaacaaattgatcttggttttctcttgccatatcttgttgcagtgtccttctgagattctacttactacctcttgtttgataactgattctccaaagttgctatttcccagaaaggggagtggctctatattaatctctccagtgtcattaataccaagcttaatatacaagacaacttttgctaacatttaattataacatcaagaactataatgcaggaagagaaatcttaaaaatgggtaccaggtaatatagtctaagagtcaagcagtgtttttactccagaatcaattgtttttcttgaaccattctgcctggggtcaaattctgyccttattcttggagtcaaattcccactgtctctcttgtgggagtggagagaaaggaaatgaacaaacattatagtaatttcctcatgctctgagtcctaatgacattataatcactccatatgagtgtcttcctttagagttcattactgattcaagattgctctgtatctgcttgagttaatgttgatctcagatcaacccaacaagaataaaggggaacagtattttccaggcacaaattcaatgtccaacctaaaattta

SEQ ID NO: 232486 - DNA, 609 bp, Homo sapiens
agaaatattttcattcttaaaagaaaaaaaaagatatgctgaatttacatgcaaaaagcaaagtgtatgcataactcaatatataagttaaccacttggttggctgtccactgatgcatcccagagtctgctggagtcaataatatgaaaggacttggaaggaattaaccagaaaaatatttttcttctgaagaaaaaagcagggagagtgagcacttgcrggaacaaacaaatgtgacttagcatgtgctaagaaatattttgaaagcacacagaaaattgcatctgtctctttccttcaaatttgtgcaatttagagctaactgataaaattcttgctgtcaaccctgtgttatctatatgtccgtcattctttcaccttaatttttctgcctggtattctcttttcttttcctaatgtttctttctgtctgtatttttaggtgtagtcactgtcacaagattttcaaagtcaacatttcagtaatagttccaattctgttacaagctgatcctaaatgtatcattctgttaattggtgtaatagattaaaatctacttggaaaacatttaaatggtggagagaaaggaaaatttattcaaaatgag

SEQ ID NO: 232487 - DNA, 488 bp, Homo sapiens
cttttcatatttgcaaaattttatgctaatctcccattatgcctatataattatatgatttctcttagttacatttgttttataataattaataaaacaattcatttgttcagtaatgagtgaaagaggaagagagaaacaaagtaaaaggagaagagacagaaaggaagagaaaaattcacatttaataaacatttatttggaccttactacgtatcaagcaatgtattagacactaggggtttaaagacaaaatgtgttactgcaaagggatttttacaggctaaataattaactatttgagatggatttggtagttgcattcatatacctaaaaatacctcttgataacttttctctactttttaacttaataagtctatttcttctcaaccatcactaccagagtgcaakaaagacaaaataaatatacctgattatcatttaacacagcagtcacacatttgaatcaattaaagtaatacctc

SEQ ID NO: 232488 - DNA, 421 bp, Homo sapiens
tcaatgaaaaccaaactaatcatgaaattcgaggtgaaaaaaactgattcaaacagaagaatcacaaggttcataaaaaacagtgtttgaatttaagaatttaaatgggattgtaatattatttgaaaaatcactgtaattcaatatatttgcaaatatgtgaaccttaagtaggtggcattgaatgagtccaaaaataattgtgttgtacaagtgctgttaggaacacrgtcataaggtataaagaaaaaatgagaataaaaatggaaggctttttatttaaaaataatagattttttactataaagcttcaagaacaaagtaataggttaagataacaaaaatacggaaagaactcatttcaatatggtgcactgtttaagaattctaagaaataaaaaatgcatatgtagaggtagaa

SEQ ID NO: 232489 - DNA, 396 bp, Homo sapiens
aattattagcatttatgaaaaagatcactgcaagagaaattggcccagggtttttcatatctgttccaacagattattagatgctaaaataaagaaggttaatgctgggcaacaatttagactgtccatatcctcctcccttccagtgctaagtatagcctcaagagactgcyttcaaaatgctaaaataaattaatcgggagtcagttcctaagatatcactagcatattaaaccttcttaaaagattatgcctgactcatatacttctttagttattcattgatgtggaatttgagactacaaatcacatttgttacattttagaaaattctctttgcatagtttcagttacatcaaaactaaataaatcatctttagccaaaaaaaatttctt

SEQ ID NO: 232490 - DNA, 396 bp, Homo sapiens
aattattagcatttatgaaaaagatcactgcaagagaaattggcccagggtttttcatatctgttccaacagattattagatgctaaaataaagaaggttaatgctgggcaacaatttagactgtccatatcctcctcccttccagtgctaagtatagcctcaagagactgccttcaaaatgctaaaataaattaatcgggagtcagttcytaagatatcactagcatattaaaccttcttaaaagattatgcctgactcatatacttctttagttattcattgatgtggaatttgagactacaaatcacatttgttacattttagaaaattctctttgcatagtttcagttacatcaaaactaaataaatcatctttagccaaaaaaaatttctt

SEQ ID NO: 232491 - DNA, 611 bp, Homo sapiens
gccgtgctatgaactaaaagcccaggagagtgtttataatgaaaacagtatttgccaaaatgttttccccaaaatccatctgttcctgaaaacatttcagatttattaaccacagactctgcattgccacacttgtgtctatatcatcataaatgccatctcttcatgggtagaatccattgtgtgtcaattcccacagcacacaaataaatagtactataatgtggctaggtagtatccaaacaatgtataacaacgatcagactgttttgctacacaatgttctaccctttgctaaagagtgtcgtcttacattcccttatccttctctgtcttccttggaaactgctttctacttctttacttctttcaacctgcactcaacagaaataatgaaagatatttatctcaaaggcagataggtaagaatgtcaagaaaacaaaatagagacatgtaaaataagagaaaaaaawcataggaaaaactaagattagtgaaagaaacattattactttacctaatgcatctaaaagacaaaaagtgtaaaactggcataaatatgattgttatattaatgtactaggaggttgcaaagtaattcataagcagt

SEQ ID NO: 232492 - DNA, 595 bp, Homo sapiens
tgtcacaaattttttattggtttcccttgtaatcttagactactgcaaaacattaacagatgtgaagccagaggaatgcctcattattaaatcctaagtgttgcttcagtgaagtccaaactgtttttgtagattttgccattttgcggggatgggtagaggagaagggaatatgttttgtttgtttttttctgggcattctgaataaagcatgacctgagtattctgaaaccatcttctccttcaatgatagcaatcaaagtccaaaggagataacgtctggagatttttaattcatgtgccccaggaatatagcgtatatcattagcccacggaaggaagcttacagaaaaaaaaaaaaggaaaagaaaacataaccttaagaaaacaccaaaattcctacataatctgcttcagatcatatctaggaccccaacagccgaccatatgggcagtagacttcaagatgtaatattacrcccaatgtcttccagaaatctaatttaatacttttataaatgtctaaaatgagagtgattaatgccctaagataggatgttattttcagaagtcagttagctataatgcatgttgc

SEQ ID NO: 232493 - DNA, 610 bp, Homo sapiens
atgcatttattaggactcatgttacaatgtaactggtaatttactgcatacaatgtgataaatgacaaaatttgagcccttcaggatcactttgtatgtgtcattagcaattcacttcacattcttacctatacaaaatatcttaaaccacttaacagttttctaaagcgagctaargctcaagttattaatatctttattgaaatatagatctcaacatctccttggggactagtaaagcttctttcataatgctacaaagaaaaaagcaaattttgaaggaacatatctggctctctatctcctgtggatatgcaggtctctgtatgtttgcataagtttgccgttatcaaacaacactgccttgaacggttgtcttaataaaagatacaaaactccttaattctttgatcttgatatgtgtatagcaacaataaacttttaatttctatttaaaatttccaaaatcaaaatgttttcattcacttagctttgtttaatgtcagcatttaaggaaattgactctgacaacaaatgcattcaatatattattgtgaatctagacataactaacctttgaatattttcatcatcatgactaaatttagtc

SEQ ID NO: 232494 - DNA, 610 bp, Homo sapiens
atgcatttattaggactcatgttacaatgtaactggtaatttactgcatacaatgtgataaatgacaaaatttgagcccttcaggatcactttgtatgtgtcattagcaattcacttcacattcttacctatacaaaatatcttaaaccacttaacagttttctaaagcgagctaaagctyaagttattaatatctttattgaaatatagatctcaacatctccttggggactagtaaagcttctttcataatgctacaaagaaaaaagcaaattttgaaggaacatatctggctctctatctcctgtggatatgcaggtctctgtatgtttgcataagtttgccgttatcaaacaacactgccttgaacggttgtcttaataaaagatacaaaactccttaattctttgatcttgatatgtgtatagcaacaataaacttttaatttctatttaaaatttccaaaatcaaaatgttttcattcacttagctttgtttaatgtcagcatttaaggaaattgactctgacaacaaatgcattcaatatattattgtgaatctagacataactaacctttgaatattttcatcatcatgactaaatttagtc

SEQ ID NO: 232495 - DNA, 587 bp, Homo sapiens
acaagcacacattagtctattaagagctgagaaacagtaaggctgtctttggttgacaagggttaaaaagtgagccctggacattttattaaaaacccattccatgtattagccacagggaaagatgttagagagcaccatgagccatattgttcttcatcaactggggacattctctttacagtgctatactctctcaaggaaaaaggaacttggaaaaggttgagcatagattccttaggggaacagggctgggaaatgargaggaaagataaggggaggtgggataattagttgaaattatatacttgaattgaatctgcaccttcagtgactgagcagctcccagaatctgttaatgctaactttttaaaacatttattttcagactgtttaatctaattttcctagatctcagtaaaaatcagaataattgtcaagcattcagtgtctgccaatcacagtcatataggcaactgtggctgagggcttgactcaaagttatagttataaaagcactgaaattacagtttagtctgtagcagaacctaccttggttaaatgatatatgctgtatgatgtgactt

SEQ ID NO: 232496 - DNA, 548 bp, Homo sapiens
atacacataaagctgttagcataatgactgatccatggttagtgctaaacaactattggctatttttattgacttttatgttacctggctcctttttttatttgaataggcttttaattcactaaaatagattagtgaaaatagtatattataaactcctaacactacacaatagctgatgatttatatgagagaaatgttttttaaaacctgttatcataaattgagaakagacttttcaatacatacatattcagagaaaaaaaattagactgaaaattaaccaagggctatgttatctaaattataataagagattgtcatcttaacatattgaaaactagagagggatgagcaagagactaaaaatgtagtaagaaagtaaaagcagcaagagattcacttgaatgtcattatcttattgccttttggaactaaaaatgtattgtttctcatataaagcaaagcactgaaaactatttggcagcaaggttattatttcacatataattacatctcgtacggaggtacactggcagacatgcggt

SEQ ID NO: 232497 - DNA, 577 bp, Homo sapiens
gggtttttccttaatgtcctttttcaggttgagaatgttctcctgtatttgtagtttattgactattctttatataaaagggtattagattttgttaaatgtattttctgcatcttttggaatgattatgattttatcctttatttatatccttttttatccttatttcattaatgtggtatattagacagattgattttcatatgttaatatgccatagtaatgctcaagtgtgatgcctgtctgattttctttgaaatcagggaaggcagctttctttatctttaatgcaacttcactttttgttctttgtgctatctcttctgatgcagctaggggaagagttttaagttcatgtgctaagtaagaaaataatttctctrttgatcagacacaatgacaaatcccattcaagttaccaacccctgatccctccaactataacgcctttacagtttttctcttttattatgtaatttccagtgtcctgtaggtatgtcctgattgcgataaagggccagtcctcccccacaaaatctatattattttaatagaagtttccaaatgaaggtaagta

SEQ ID NO: 232498 - DNA, 604 bp, Homo sapiens
actgacctgtatgcaataaaatcaaaacttactaacacataaacactctgggctttttttccaatatttttagaatgctcacatttttaacatttcacaagaacaatttattattgattgatacccagtaaatatgatgttttartgacaatggatattatagtttttctttactataaaaattaaagtcctaatgagttctgtgaaattcttactctaacattatgtttaaaagggattcttctctaagaagtttttatgtaaattttcatttaattttttttctgtactttaaaaagaaagcaggatttcacttggtttgtttcagtgccatctgtgttattaacaaagaaaagctagtacaagcttaaaacaatgcaagggaaaaactatgtaaaattaagctaaaactgtcaaaatgaggctgctaaatttcacagagatcaaattccagtacactgaaaatgtttcttgggcctgcctagaatttctcacctcattaggcgtgaaaaaacataaattgagccctggtttgatttttgtttttcagaattttgtctatgaagagaacagttggggaaacaaagctctccatagttttagg

SEQ ID NO: 232499 - DNA, 604 bp, Homo sapiens
actgacctgtatgcaataaaatcaaaacttactaacacataaacactctgggctttttttccaatatttttagaatgctcacatttttaacatttcacaagaacaatttattattgattgatacccagtaaatatgatgttttaatgrcaatggatattatagtttttctttactataaaaattaaagtcctaatgagttctgtgaaattcttactctaacattatgtttaaaagggattcttctctaagaagtttttatgtaaattttcatttaattttttttctgtactttaaaaagaaagcaggatttcacttggtttgtttcagtgccatctgtgttattaacaaagaaaagctagtacaagcttaaaacaatgcaagggaaaaactatgtaaaattaagctaaaactgtcaaaatgaggctgctaaatttcacagagatcaaattccagtacactgaaaatgtttcttgggcctgcctagaatttctcacctcattaggcgtgaaaaaacataaattgagccctggtttgatttttgtttttcagaattttgtctatgaagagaacagttggggaaacaaagctctccatagttttagg

SEQ ID NO: 232500 - DNA, 492 bp, Homo sapiens
gaattcagaaagtcatgaatctcactattaggcttggaggggcaaaaggaaaagatgtacaaccagagtctgrttagatgtgtagccatggtggcctggggaaggagtgcttctcatcaggagctgtagtcttagaggcttgcagccacagcagcgggaagttaggaagcagcaggagacaaactacctgaacgttcctctcctgctcaccacctcccgtccatgcttctcattggctgaactcaatgggaagccagagagaagggagcctaagtgacgtcattcacagtcagccttcaagggcacaaggcagggcacagtaagccagagaactgagggaaggagttagcaaccgagaatagccaccatggtgctgaagatagaacacgagtaataaaaggggctcacagattaacccggtagttagatatgtaagttaatacaggcaaaaaattccaatactgtgagagagtgctatatgagaagaaattt

SEQ ID NO: 232501 - DNA, 635 bp, Homo sapiens
ttctttttttcttatgtcactgttttcctcctacaaaacattgcctccctcaaattacaggagttatgaattgcttaaaatatatgctttgtctgtaaattaactccaaatagaaggtagagaaaagtgaaaaattaacagattaacaaaattgtaaaattgtttactgttttatttctgacattaattattatgctttctgcctggccttaaagtgtgttaacatgaaaccaagtgatacagtgggaaaaaaattaatggaaatcaggaagcctaaattytcattcagatcttatgtatgttaaaactgccaccatgggggatagtgtttaaattctcagggctctgtttattcatgttataaaggcgagggtagaggggttgaatgaaatgaagctgactcgatgaagtaaagaacaatcttgtgaaattcaaagtggagacaattgccaaaataaagagtcaacagaaaggtaaattgaggctcattagtcagtctagatagtttttctctctgtgacccgagtcctggcaggaattgatatcttaatttgtagcttaaagacaggaccttgactcttttgttccagcttttaccattagcacctgcctaccaccgtggcgtatatgaatta

SEQ ID NO: 232502 - DNA, 560 bp, Homo sapiens
catcccttcccctataataatcctggggggaggccaacaccaagctcggagatgagcacagggcccaggccttaccaaactgagtctttacttgaacattttttggcactctaaggaaagttactttttctttatttgaagcctttaactcttaggaccatgtaagcctggagttgctgggggctatcttgtggccatatagaaagaacctgtcagagaatgaaatcaraactgtagaaagtagaataataaatagtgtcctgatgatgtttgagacctggatccagccatacctgaagctatgagatttacccctggacttttcagtcacataaaccaacagacttcctctaacccttaagttagtttgagttgggtttcagtcccttgcaatttattggtgctgagtaataagccttcagatataatgagtatctggaagactcaaaatgaaaacctatatgcaaaggctttgcagtaaagtgctacactgtcaggacaccacagcaagatggggcagtactattaaagaacttctgtcctcagcctccaccacgaag

SEQ ID NO: 232503 - DNA, 603 bp, Homo sapiens
ggacaaggactccaggccttttcattgttcactggacttcacaaattatgtagcctgtccagccccaggtggtctcgtctacaactaagaattccattatcacctgtgactgattaacttcctaggtgctacacctggtatggaataagaaccttttcctccgagaaacatatccaaaaaagtctaacttcttgtcgaccctggtacacagggttttatttattctgggcttctgattttctaccccaaatgtctttactcttttttcttcaggtaaagtcamaattttcctcaggaagcagtcctgggtccgcttcagcaaatgaataagagcttgattgtgtccctcaggtgctacagtgtaaagcaaggctcagatgacgttggcttggaaaaggttcaaaataagttgtactaatctgtccccaccagggctatgggaaaatctttaaattgcatctgtgaaatgtctgttgagcaaaatggcctccttgtgaatccatcagcatggattagctgcaaaatatgccatggaaccaaaaacgactgtgatggttaccagagactgggaagggtagtgggggtgggcgggtggttaatgag

SEQ ID NO: 232504 - DNA, 603 bp, Homo sapiens
ggacaaggactccaggccttttcattgttcactggacttcacaaattatgtagcctgtccagccccaggtggtctcgtctacaactaagaattccattatcacctgtgactgattaacttcctaggtgctacacctggtatggaataagaaccttttcctccgagaaacatatccaaaaaagtctaacttcttgtcgaccctggtacacagggttttatttattctgggcttctgattttctaccccaaatgtctttactcttttttcttcaggtaaagtcacaattttcctcaggaagcagtcctgggtcygcttcagcaaatgaataagagcttgattgtgtccctcaggtgctacagtgtaaagcaaggctcagatgacgttggcttggaaaaggttcaaaataagttgtactaatctgtccccaccagggctatgggaaaatctttaaattgcatctgtgaaatgtctgttgagcaaaatggcctccttgtgaatccatcagcatggattagctgcaaaatatgccatggaaccaaaaacgactgtgatggttaccagagactgggaagggtagtgggggtgggcgggtggttaatgag

SEQ ID NO: 232505 - DNA, 603 bp, Homo sapiens
ggacaaggactccaggccttttcattgttcactggacttcacaaattatgtagcctgtccagccccaggtggtctcgtctacaactaagaattccattatcacctgtgactgattaacttcctaggtgctacacctggtatggaataagaaccttttcctccgagaaacatatccaaaaaagtctaacttcttgtcgaccctggtacacagggttttatttattctgggcttctgattttctaccccaaatgtctttactcttttttcttcaggtaaagtcacaattttcctcaggaagcagtcctgggtccgcttcagcaaatgaataagagcttgattgtgtccctcaggtgctacagtgtaaagcaaggctcagatgacgttggcttggaaaaggttcaaaataagttgtactaatctgtccccaccagggctatgggaaaatctttaaattgcatctgtgaaatgtctgttgagcaaaatggcytccttgtgaatccatcagcatggattagctgcaaaatatgccatggaaccaaaaacgactgtgatggttaccagagactgggaagggtagtgggggtgggcgggtggttaatgag

SEQ ID NO: 232506 - DNA, 469 bp, Homo sapiens
gtaaggaaatcacacaatttaaaaacccgagtcccacttatcaaacacttgctagctgcagaatctgagcaagtcacctgacacttctgagcccatcttcttttaatackgagtaatctctcctgagcctgctctgtgctgcatggtgtgttagagaggtggaatgcagctacagtgatgcttaagacccactgcctgccctgagaaagctcacaggctagtacactaagggagacaggataatacacaactatagaggagaagcaaccctctacctctcacctatactaacccccccacctatccaccccccgagagccagcttccaggacacagactgggtcccatctgccatggggtggggctgcaggttttacaaggtttcatttgggcatggctgtctgattcctcctgtttccgtacttcagctgtggacacacccaattctgctctctcccttgggctggct

SEQ ID NO: 232507 - DNA, 469 bp, Homo sapiens
gtaaggaaatcacacaatttaaaaacccgagtcccacttatcaaacacttgctagctgcagaatctgagcaagtcacctgacacttctgagcccatcttcttttaatactgagtaatctctcctgagyctgctctgtgctgcatggtgtgttagagaggtggaatgcagctacagtgatgcttaagacccactgcctgccctgagaaagctcacaggctagtacactaagggagacaggataatacacaactatagaggagaagcaaccctctacctctcacctatactaacccccccacctatccaccccccgagagccagcttccaggacacagactgggtcccatctgccatggggtggggctgcaggttttacaaggtttcatttgggcatggctgtctgattcctcctgtttccgtacttcagctgtggacacacccaattctgctctctcccttgggctggct

SEQ ID NO: 232508 - DNA, 469 bp, Homo sapiens
caatttaaaaacccgagtcccacttatcaaacacttgctagctgcagaatctgagcaagtcacctgacacttctgagcccatcttcttttaatactgagtaatctctcctgagcctgctctgtgctgcatggtgtgttagagaggtggaatgcagctacagtgatgcttaagacccactgcctgccctgagaaagctcacaggctagtacactaagggagacaggataatacacaactatagaggagaagcaaccctctacctctcacctatactaaccccccmacctatccaccccccgagagccagcttccaggacacagactgggtcccatctgccatggggtggggctgcaggttttacaaggtttcatttgggcatggctgtctgattcctcctgtttccgtacttcagctgtggacacacccaattctgctctctcccttgggctggcttgagagaaaggcag

SEQ ID NO: 232509 - DNA, 415 bp, Homo sapiens
aattgccaacacctggagcgacaatgaccatgggcctgtagctgactgtcatctcagctgcccgccctttctacacagrgtgaaggagaaagactggattcccagcaggcctgagacacatgaaggaccagctacttaggacatgaaagaagaatgccagtatttatggagcaccttctatggagcagagcccgtccacctactccttcagggtgttacttgcttcatctttaaagatgaggaaactgaggctcagagaggctaagcagcctgatagaaaagggcagagccaggagtcagattcaggcctatgaggctccagagctcaggatgacctcaaataccacaagtgaatacatgaatgaatgagtcatggaagaatggaagactgcttttgacggtggtgcagctgatg

SEQ ID NO: 232510 - DNA, 594 bp, Homo sapiens
tcctcttttcatgtccccagttcctgcccaaaactctctttaattatgttttgccattaattaggatacagtcaaatcttacctcgaggcttcttgctctttgaagtgtaaatctcagtgggttatcttttctcctcatttcaagctgtctggggaggtttcactgkgtgagataaaagcctatggcaactggctttccaagtagggttctgtttgaacaatgcagctatgacttgtcactttttccagcaaggcttttgttttggcttactctccatacagacactgctttggtgatgtggaataatgatccttataaaaataatgtctgagtgttttaaatgtatgatttatctatggactggagatgttacagtcagtgtcatgctggtacaggatgttcagcctgttgacacttctcagcacatgccggcaatgtttcatttagctgacaatcttttgtgtcttcactgtgccaggcatcttgttaggcagggtgagacaataccacattgaccaggtttctctgatttctacatcctcagtctagtgggatagacaagcatgtaaataaataatggtaatgttgggttg

SEQ ID NO: 232511 - DNA, 452 bp, Homo sapiens
tgaattatatttacatggcttctcatatccaagccaagatatcagttcactgagagggctttgccaaattggaaatagatttgttttccatgttgkaattactgatgaaaactgcaggcataagttcttttcccttcctttttttttttgtaaatgtgaaatacatcttgctttgttctatttatttctttctcagtacaatacacttcatcgaataattctcaaacagttttgaaaagagctcaggtttgagaataagatttgtgctcaaattcaaactttgtactttttagctttctaactgggtcaatgtaacctcttagaacttcagtttctacctctgtaagatgggaacaataattattatatcctaaagctattttgtgaaataaatgacttaataaaatgtaaaacacatagcactttttcaagtcaaaccatatgaaactgcc

SEQ ID NO: 232512 - DNA, 456 bp, Homo sapiens
ggctcataatttttgaattatatttacatggcttctcatatccaagccaagatatcagttcactgagagggctttgccaaattggaaatagatttgttttccatgttggaattactgatgaaaactgcaggcataagttcttttcccttcctttttttttttgtaaatgtgaaatacatcttgctttgttctatttatttctttctcagtacaatacacttcatcgaataattctcaaacagttttgaaaagagctcaggtttgagaataagatttgtgctcaaattcaaactttgtactttttagctttctaactkggtcaatgtaacctcttagaacttcagtttctacctctgtaagatgggaacaataattattatatcctaaagctattttgtgaaataaatgacttaataaaatgtaaaacacatagcactttttcaagtcaaaccatat

SEQ ID NO: 232513 - DNA, 444 bp, Homo sapiens
cgcacattcaatccctcatcttaaacaataaattttatttgtagatttgtcttgttttgtggtggggctgggggtatgaaaagtgaagagaggatgaaaaaggatggactgaaaaaaaaagtggatctactttttccagatcgttttgagtcacccaggatcctaatgcttataaagattggttctcacatkcacttcagctgttccgcagcctttcctggtggttgccaaaaacagcttccagggcttcgtctccttcgctgcaaccatagagacatcgttaggtgctgaaggcagaatgaaggcctgaggcctatgggagccatcacaaatgctactctccctcctgctgacttcttttgaggccagcctctccccacatggagtgctcagaggcactatctcagaagaaccagcagaggcctttttctctttctccctgca

SEQ ID NO: 232514 - DNA, 624 bp, Homo sapiens
gtgtttaaaccagggacacagctcttcagcatctcagaatgtgttttgaatgaaaagacacccacagagagcagttggatgccaagccaacatgtaataaagtgctaaactgtgtggtacaggcaagtgcaaaaggaattagcagtatgcggatgcacaccatggttgtactgccttgactatgctgtgttatttagaggattattcagacttgagccaaaagatgattaagagctgggcaccttggttagatgttctactggtgaatgtttttgtattatttaaatcttccagctagaagaagattggaattaccrcttgtttctgatttaacttaatagtctctgcgatgtttacagggagatcagatacacacacatctgaccaaatttgatagtagtgcataaaaaatgattcataatcattttggggggaaatggggaaaaattatataaattaaggataagaaattatacaaaatttgaaaacctttcatgtagggtttaagaaaaaagcccaggatacctaaatacaaaataaattttaattaaatatttacaaactaatcactgttttgcatctcttacacctctgtcaaacactcagaaatttttgccagaattt

SEQ ID NO: 232515 - DNA, 600 bp, Homo sapiens
tacgttctttgctcaattcctagacgttggtcttggcatgctaattataaacagatcacgtcattctcagaaatctctaactgctcattgacactttatggaaattgtttgatcataggctcatgcaaccagtattaacttaatatcagttttgtttaaaaagcttagctgatgtttaatgttaaataatgatggcatgtaaattcctgatgataatttgcwttagcaaggtgaatactctctagtgagaaatggtgatgaagtagatatttctcatactgtaaaattaggtcaggttctgaaatggtctgaagtgtagaggtcacacaggattctgtattcattgggaagattacagtttgcagtgtgttcccagggactgaaaacacaccgtcgatgaaaaccagccactgatgaacagcctcagacctggccagtacggggagcacgtgaaccataactggcttagaaggactgatttcatgccaacttgaggggagaattccaaattccaaagacactcctctcacaggactatgaaaccatcttttaagaagttccaaggacaaaagtcacttccataattatagtcctggcaac

SEQ ID NO: 232516 - DNA, 599 bp, Homo sapiens
tacgttctttgctcaattcctagacgttggtcttggcatgctaattataaacagatcacgtcattctcagaaatctctaactgctcattgacactttatggaaattgtttgatcataggctcatgcaaccagtattaacttaatatcagttttgtttaaaaagcttagctgatgtttaatgttaaataatgatggcatgtaaattcctgatgataatttgcattagcaaggtgaatactctctagtgagaaatggtgatgaagtagatatttctcatactgtaaaattaggtcaggttctgaaatggtctgaagtgtagaggtcacacaggattctgtattcattgggaagattacagtttgcartgtgttcccagggactgaaaacacaccgtcgatgaaaaccagccactgatgaacagcctcagacctggccagtacggggagcacgtgaaccataactggcttagaaggactgatttcatgccaacttgaggggagaattccaaattccaaagacactcctctcacaggactatgaaaccatcttttaagaagttccaaggacaaaagtcacttccataattatagtcctggcaa

SEQ ID NO: 232517 - DNA, 406 bp, Homo sapiens
ttgttgtaacttcagtgtctcaaaataagtccttcagtcaggacactctagttagactctgtgtactcactgatggggtagtggaagtgcaaagtgcatgaacttgggagttgaacaagccttattagtttccaagggttgccacaataaaggaccaccaactgggtggcttgaaacagtagacatttattcttacagctctagaggttagaagtctraaaccaacgtatcagcgggactgcttgttctgatggttctagggcagaatccatctttgcctcttagcttctggcgtttactggcagtccttggtattccttggctcgtaggtgcatcactgtcatcatcacctcctgcatcacaaggtgttctctgtgtccaaatttccctcttcttatgcaagtgc

SEQ ID NO: 232518 - DNA, 619 bp, Homo sapiens
gagccaccatgcctagccgatatatattgtctttaatcactactgtaaaatattttgtagttttgaggcttacaacagtagattcagtcatgttgaaaataagactgtgaagatcttttaagtcctgaagttttgcattctgtaatcttcagttgtataaaatcactctgacttgtgtgctattatggaaattaactagtataaagattgctatttgccatatctattttatgtataaaatacttaagattacattttgtatcaaattatgcttaaaattaaatataaatgattatacaatgttaattcaagctgtgtgatttttaacaaccatatgaaaaaataaatacctaaatgagaactattatataaaaaagctcttcagagaaacaccttaacttaaaaccaatatatacattttgcagttgtccatttaaatcttaaagccacaattgctctaacagcaacaccagtgaagccattctgtgtgttattcagttgcartattcaggaaatttgctagatatagagaagaacattttgattatagcatttgctaaaatctgctgtggaagaagatcatgtatccacttccaccttggatagtttagttaatctt

SEQ ID NO: 232519 - DNA, 376 bp, Homo sapiens
ttgcctccccaggacagacaaycacatatcttaaaggctacaatgtatgctgattaccctaggactttggtgtatacctaaattacaaactacgagcttttgccttcatttctcaatgatctattacctgcattacatgtcaattacccttctcttgtaagggctaaatcttcctgtcttgtaatacagcagttttaattggttgcagcctctactccttttgtcaagaagaggcaattcagagggtcaatgtcttcagaaaataaataacaggacaagtgaataattcttggggttccactcaccatgctgtgtgaagaggtcactgtggacgatttcgatcaagcagtagagtttctggatggtcagcaagccc

SEQ ID NO: 232520 - DNA, 424 bp, Homo sapiens
gctgacacacagcaagccccagatgaactgggactggcaggcctggggaggccggctcgttaygtcggctcctttgtagcaaagtccattaaagtctatgattagaacactaagtagaaataactaggcttgttgaaaattatcctgacatgttaaatgagaccacatggagtttacatgtacaggtgatccttccagggtttaaatctcgattcctggctttaggggaatgggatgtgtgtgattctgagaactttgccctaccatggaaaaaaagtaaggtaaagagaaatgggatgaagacagacccaactcaacttctgaattagctgtgctccaaacatcattgctaagtaatttgtgttgaggttgccagggtagccctcaaaatcctttaatctatatggagattcagcattagaat

SEQ ID NO: 232521 - DNA, 424 bp, Homo sapiens
gctgacacacagcaagccccagatgaactgggactggcaggcctggggaggccggctcgttacgtcggctcctttgtagcaaagtccattaargtctatgattagaacactaagtagaaataactaggcttgttgaaaattatcctgacatgttaaatgagaccacatggagtttacatgtacaggtgatccttccagggtttaaatctcgattcctggctttaggggaatgggatgtgtgtgattctgagaactttgccctaccatggaaaaaaagtaaggtaaagagaaatgggatgaagacagacccaactcaacttctgaattagctgtgctccaaacatcattgctaagtaatttgtgttgaggttgccagggtagccctcaaaatcctttaatctatatggagattcagcattagaat

SEQ ID NO: 232522 - DNA, 424 bp, Homo sapiens
gctgacacacagcaagccccagatgaactgggactggcaggcctggggaggccggctcgttacgtcggctcctttgtagcaaagtccattaaagtctatgattagaacactaagtagaaataactaggcttgttgaaaattatcctgacatgttaaatgagaccacatggagtttacatgtacaggtgatccttccagggtttaaatctcgattcctggctttaggggaatgggatgtgtgtgattctgagaactttgccctacmatggaaaaaaagtaaggtaaagagaaatgggatgaagacagacccaactcaacttctgaattagctgtgctccaaacatcattgctaagtaatttgtgttgaggttgccagggtagccctcaaaatcctttaatctatatggagattcagcattagaat

SEQ ID NO: 232523 - DNA, 312 bp, Homo sapiens
gaataaaagggaaagaaggtttgcctgatgtactttccaacttgacttttcccttggcttagtgatttttggggtcctgagatttattttcctttcacactcatattcatctttctgtcaagaatcaactcacttcaaagtaaattcaatgtttgcaagaagtttctctgtaaatgtgatgggatttaatttttgratcatgacagtttagcatttttcctcaaaagtaccaactttactgaaaaatagaagatatttcatagggtaatacaagatactttttcaatatttatctcactttccagatacttg

SEQ ID NO: 232524 - DNA, 580 bp, Homo sapiens
tttctacttttaaaaggatactcattgaacaaatatatactgaatctaattaaaagccttagattaaatgaaagagatagtcagaggtagtttgatatgtagtctcgcaaaagaaaaagatacttaaaaagaaacaataagaaactaccaaggaataaaaaactatgaaggaataggaaggaattgaagcactttaaatgtttccaaatatttaaaatatagcatatacaatactaaaaatgaaagcattgctaagagctatcctggtaagcacaacagaatgactatgtttcagtttgaacagcttatatgacagaatttggatagtttttgcaaattaacatttactgatgaatttgagatatgtacaatggatactttaaaggtactccgtcatgtctacagtgtgtttttatgtatacccattttatatatgcccactgaatatacccatttttgggtaatggttcacaattgtttatactactttggatcttctgtttaaaatatatttgcatgattataatttaacrtgaacctcattgataatggtggatttataaccagaatatttgacata

SEQ ID NO: 232525 - DNA, 614 bp, Homo sapiens
agggtaggaataggccaaaaagaaaggtaggtgcttgcatgttttgtgtatgtgtgtgtgtgtgtgtgtgtgtgtgtgtgtgtgtgtgctgtttttgagagcatggtcgtggaacggttcattgatgaggggatgttcataagagacctgaatgatgcaagaaaatgagtcatgaaacatctagagggggagctttccagggagaaggtcaagcaggtaccacagccctgaggccagaatatgtctgggaaaaaaaaaaaagtagtctgaaarctttggctgttttcttttagtaaagacttatagagttcgtattcagctaccatatctaattcatgttaaatagcacagtaaaagagaagtatgtgaattctgagaaaatggatatataataccaagaatactccatatatatcaattacatcccagtcattcattgtgtcatctcactgagtggtaaccagaaagagcacaagatttttagtctagcagatctatttccaaatccccattcttctgtcatgtacctactgagtgatgtttctaaggcaaaggacatgtaacagcagcaacaataaaagcagttcttatttattaatttatgaaatgtgtta

SEQ ID NO: 232526 - DNA, 614 bp, Homo sapiens
agggtaggaataggccaaaaagaaaggtaggtgcttgcatgttttgtgtatgtgtgtgtgtgtgtgtgtgtgtgtgtgtgtgtgtgtgctgtttttgagagcatggtcgtggaacggttcattgatgaggggatgttcataagagacctgaatgatgcaagaaaatgagtcatgaaacatctagagggggagctttccagggagaaggtcaagcaggtaccacagccctgaggccagaatatgtctgggaaaaaaaaaaaagtagtctgaaagctttggctgttttcttttagtaaagacttatasagttcgtattcagctaccatatctaattcatgttaaatagcacagtaaaagagaagtatgtgaattctgagaaaatggatatataataccaagaatactccatatatatcaattacatcccagtcattcattgtgtcatctcactgagtggtaaccagaaagagcacaagatttttagtctagcagatctatttccaaatccccattcttctgtcatgtacctactgagtgatgtttctaaggcaaaggacatgtaacagcagcaacaataaaagcagttcttatttattaatttatgaaatgtgtta

SEQ ID NO: 232527 - DNA, 599 bp, Homo sapiens
gagattagttacataaatagtaggatgcctgtatatggaggaactttaagctattttagaaaagaaaagcggttatgatctaataaacataaatgccaagttatgatagtatgtagagtatgatcactattttacttacgttttaatatatatacattataattgtatatatattggtatygctacatccagtatattttctctattttctacattttcatatgctctgaaagaaaatagtaatgtaaaaagagacatgacttctcaaaactcaagaattttacttctaattcacacacatatgtaacatgtaaaggggcattcattgctgtactatttctaagaactaacatttggaaacaacttcaaagtccagcaattagagattagattaataaaatatggtatattcataggatagaatataatgtagcatttcagcaaaaaaaattaaatttttgttcaccagcataagtagatcttaaaaaatgtgtgaagaaagcacaatacagagcagtatgtgtctactgttatgtcaatggattcactggtacataaaaatataaggaagcccacgaatctaatgacactggatacca

SEQ ID NO: 232528 - DNA, 572 bp, Homo sapiens
gatgctatatcttctcaatgacatctttctactggggaaaaaaatcacaaatgaaaacctataaaagttaacgatgtagtggttagtcagtggcagtyaggagcttccaagactactctcaggttcaatactgctatagaaggactcacagaattcagcaaagctgtttacccacaattatagtttattacagtgaaaggacacagattaaaatcaacaccaagaaaaggcacataaagcatggtccaggagagaccagacagagttaccagtggtcttttcctggtggagttgtgcaaacaatgcttatttctcctagcaataatgtgtgactttgtgcattgagtattaccaaccaggaaactcacctgagccttggtgtctggggtttttattgggggataaccacccacatagctgaccttagtttctagcacctccagaggtcaagcctatactgcctgactcaaggcccccaacataaatcacattgttagcacagactatgtggcatggctcaaggaccccaagtcaaataaagacactcctctggctggccattccaaaagctt

SEQ ID NO: 232529 - DNA, 548 bp, Homo sapiens
cctaatagtaattgggtccaaacaacttaacagtagcatttgcatgtgttgataggtaatgctgtgattccctcaagaatttttaatgttccatgtgatcctatgggtttgctgcagtgcttcagaacacctcaacccatagtttggaaagttcagttccacatgatgctttaagttactacagartagaattattatattgtttctttcctttaaaaatgcttttttgggatcgaaatatgtgcagaatgccaggaactggccttccatatacaggtaaaatctgctctggaaagtttgaagtgtttcatagatgttataaagttaataataaagggaaatctggagaaaggattattttctctattaaacaagttagtaaaccaaattttccagagcttgacgcaggatctaacagacatccaggaaatgtttgttaaattcaattgtaacacaaaaaaggaagacttgcttaccttactctgtcttggatgtgcatgcaaatagtagcttttaacaccaagcttatttctctgttcattgagatg

SEQ ID NO: 232530 - DNA, 556 bp, Homo sapiens
tttctaccaattccattgctttaattattctagcttttgaatagtgtataataactgatacggtatattcttcctgataaaatttttaaaagattcttttccataaataaatacaagttcaccatttaagatgagttttagagtaattttgttttgttttattgaatattttagagacaggatcttgctttgtaagttaggctggagtgcaatgacaacatcataactcactgcagccttgagcttctgtgctcaagcaatcctcctgcttcagcctcctgagcaactagtactacaggtgcatgrcactttgtttggctaatttttaaattttttgtagagacagggtctcactatgttgcccaggctggtcttgaactcttggcctcaagagagccctgtacctcagtctcctaaagctactggattacagacatgagtcactgtgcctggcctttagaatgcttttaatgttccaacaaaacaaacaaaaacacataaatccaccacaattgagactttgatttgaatttcattatacttttggactcatttg

SEQ ID NO: 232531 - DNA, 410 bp, Homo sapiens
taatattttggacaaatgactgtttcttagtataattacaacaactaataytaaataatactaacttccaaaaagaaaagaaaaaaaaggattgtaaaaaagacacattccacatgttacacggtaaggtacttaaaagaaattcctgaatctaggtcgcatgtccatatttcccccaacctcaacaaaaaaaaaaaaaaaaaaaaaaaaaaaaagcctattcccaagggtcatagggacataatggattcattctcattacaagaaaacaaaatactgaaaatgattggtaccattaagaaaaaaatactctaaagtaacatggtcctacatctgcctctaacttcattcgtctctagtttacgaagatgtgaattttaaactgctcctttaaaagcaggctgacaaag

SEQ ID NO: 232532 - DNA, 586 bp, Homo sapiens
ctagaatgcaagaaccagaagaagaaagaccttgtctgtctcattcgtaactgtatttccagggcttaaaaatagtgcctgatccaaagtttgaatatttgagaatgaacaagaggaatgcctgatattattttgtgtctggctgtagaatgggtgttgcatcctgggtcataaatcatacaattggcttggaaaaggtctggcctgaataaaacgtgttgcttttattttccacgctctggattcgtcaccagtatcaattagaccagtgtttaacccatgcaatgatgttctttttgaaaattgtaatgatggtctatttgcttattcctgtaattcctatttagtttgtcctttattctttaatgctacttcttccttctccgtctcctaacctcctcagtcttctgttcttttattacggtttatagaygatcttttgtgtcttgggtaggaatgtttgctttatctctctcggcgaacacattttttttcatttgctgcctctgccgattattccacagtgactcatttccctatgtggcttgtcatctttgcgcatgagctcatcttcagtggggattaa

SEQ ID NO: 232533 - DNA, 601 bp, Homo sapiens
tctatcacagcatcgctacctacaggcttaggaataaggcacagtccagagagtctccgggggtcagtgtggactcagtccccaccagaacaaacaggctgtgtaagctttctctaaataaatgaattatgatcctcacaaattattaatatcaaggtggtcaagaatgtgggctttggagtcagacacagtttcacgttctacctctaccacttaccagctgtgagactgagcagaatattgaagtagttgagatcttttctccttgagttcaaatctcttttccaccacttaggaactatgkgaccaaggcaatttgtttaccctctccatgacctgatttcctcatgtgtaaaatgtagataataaaaataccttcttcacagggttgttgggaggattaagtgaaaactccttatagtattaagtcattaagacatgtttaatgattagtatgtgcctggcaatcatgtgtgcacacacacacatttatatttttatttcatatttgtaaacagaatagttaatgcttaatattacctgttgttgttattaatgacctaacttcctggcatctcagtttactcatgtaaaacagagg

SEQ ID NO: 232534 - DNA, 601 bp, Homo sapiens
tctatcacagcatcgctacctacaggcttaggaataaggcacagtccagagagtctccgggggtcagtgtggactcagtccccaccagaacaaacaggctgtgtaagctttctctaaataaatgaattatgatcctcacaaattattaatatcaaggtggtcaagaatgtgggctttggagtcagacacagtttcacgttctacctctaccacttaccagctgtgagactgagcagaatattgaagtagttgagatcttttctccttgagttcaaatctcttttccaccacttaggaactatgtgamcaaggcaatttgtttaccctctccatgacctgatttcctcatgtgtaaaatgtagataataaaaataccttcttcacagggttgttgggaggattaagtgaaaactccttatagtattaagtcattaagacatgtttaatgattagtatgtgcctggcaatcatgtgtgcacacacacacatttatatttttatttcatatttgtaaacagaatagttaatgcttaatattacctgttgttgttattaatgacctaacttcctggcatctcagtttactcatgtaaaacagagg

SEQ ID NO: 232535 - DNA, 599 bp, Homo sapiens
acagcaggggtgggagtgaggagaaacctttaagagacttacctgttgaagatcagaacctgcattctccatgctgcgagttgatttttttttaaacgaagtkcccatgtggatctgacatctgctttctgagtttgtgtggatgagacacacactctagagtctgtcagagaagattctagagaatagaactggtctcacctgggatcatgcaagacaaatcaatagcagctgttaagataattgtatataggactatagtcttgggaaaccacaatatgctaatcacttgatttaattttgtgactatctgcagatgtggatatgaatttaaattgcaacctcacaatgttgtgtctacaggtacaggttaaactgaaggaaggtggaagggtttaagagcctatctgttaaatttcaagtctcaagtaagccaagtcaatgtaagtcattgctgatttggagcaagtctttgtaaaacgtacctgatttgctttagcattgtgagttctcttaattgatgcttgcctaattttgtgggacttggtttcaaattttacaatggcttttgactccactccccattcttgtacataata

SEQ ID NO: 232536 - DNA, 490 bp, Homo sapiens
gtaaacacacattttgtgcaaaattccagggagttcacaaatcaggtggtccatcactttgggaggctgaggtgggcagatcacttgaggtcaggagttccagaccagcctgaccaacatggtgaaaccctgtctctaccaagaatataaaaaattagacaggcatggtggcatgygcctgtaatcccagctacttgggaggcagaagttgcggtgagctgaaatcacaccactgcactccagcctgggtgacagagcaagactgcgtctaaaaaaaaaaaagaagaattttttaatgcatcagaactaagatctctgaagtaagaaaaaaaagataaaaaaagaatttcttaatgcaaacctctgtctgtctgatgttctctgataggaatagagattctgaaagagaggaatgttgtgtttatgacttgaggcaaggggaggtggactgtcagtagcttatcattttcatcagtttccccctatctga

SEQ ID NO: 232537 - DNA, 479 bp, Homo sapiens
aggtaaacacacattttgtgcaaaattccagggagttcacaaatcaggtggtccatcactttgggaggctgaggtgggcagatcacttgaggtcaggagttccagaccagcctgaccaacatggtgaaaccctgtctctaccaagaatataaaaaattagacaggcatggtggcatgtgcctgtaatcccagctacttgggaggcagaagttgcggtgagctgaaatcacaccactgcactccagmctgggtgacagagcaagactgcgtctaaaaaaaaaaaagaagaattttttaatgcatcagaactaagatctctgaagtaagaaaaaaaagataaaaaaagaatttcttaatgcaaacctctgtctgtctgatgttctctgataggaatagagattctgaaagagaggaatgttgtgtttatgacttgaggcaaggggaggtggactgtcagtagcttatcattttcatcagtt

SEQ ID NO: 232538 - DNA, 559 bp, Homo sapiens
tggtggctatagttaatgatactgtatgatttatttgaaatttgctaagagtagatctttatttatttatttatttatttttttagtagagacaaagtcttactatgttgcccaggctggtcttgaacttctggactcaagcaatcttcccacctcagcctcctaaagtgctgggattatgagtgtgagccaccacacctagccaagagtaaatcttaagtgttttcaccacacacatgtgcacacacacataaaatggtgatagttgtgttaatttgattgtggcaatcattacacaatttayacatgtatgaaatcatcatgttatacaccttggatatataaaattttatttgtcaactgtacctcaataaagctggaaaaataaaagaataatgaccattaaagaaaaaaaagaaattatacaatatgtgaccttctgtgtctgggttatttcacttagcataatgttttcaaggttcatccacattgtagtatatataagcacttaattctttttttatgggtgagtaatatccattgtgtgttatgctgataa

SEQ ID NO: 232539 - DNA, 547 bp, Homo sapiens
tactgaattctcccaaccagccatgcaaataactgacactggggaatcaagtttctggccttgaggagctcctggtttcactggtgaggaagatggcaaaaagtgttgtacagaacactatggaagagcagaggtggggcatctaacccatcagggccctgaagtcttgctggggtaggggatccatgagctgaaggttaaagaaagaagtaggtggctcatgcctgtaatcccagcactttgggagtccgaggtgggtggatcacttgagaccaggagttcgagaccagcctggccaacatggtgaaaccccatctctactaaaaatacaaaaaattagccagacgtggtggtgtgcgcctgtaatcccagctactctggcagctgaggcacaagaatcgcttgaacccaggaggcagagtttgcagtgagcccagatcgtgccactgcactcagctagggcgacagagtgagaygccatctcaaaaaaaaaaaaaaaagaaaaagtaggaattaagcaggtgaatgagccaggtgatgtgggggc

SEQ ID NO: 232540 - DNA, 625 bp, Homo sapiens
ctggggctatgctggtcattgctgctctctctacacacacaaacacacgtgcacacacacggtcacacacacattcccagctgacccagcaagcccatccccacaaagctgcctcgttcccccatcccactgctgctacctccacttcctctgaaaatgccgtttcgctactgtgacacttactgttctgccaccagcctccagccgggcttggtctctgctccatggctgctggttctgctctgcttctgaccctgaggaaggaggctctccccacaagtggcaactggatggccagccctggaagattgtgagtcctgtaggtcccaaagagccgcgcttgcttttacatgtccacaggtctctctgcagagaatttatgacaagctcccagggcttagactggaaaacaagaggtaagaaacaatacattaaaaaawaaaaatttttttaaaaagtttgctgaagtcttccttccccatcataaccctcttttgccacatgtcccaattttttcctcctcaaaatgagttttctgccctcctggaacactctccccagagacagaggatagcttttatcttctctttgagctcaacttcattcctcgtacctaaacttacca

SEQ ID NO: 232541 - DNA, 618 bp, Homo sapiens
tgcctctggtttccaatagtttctcaaaagtcccctgtgtagtttagctcttcacatcctctcctggcagaacacacaatataaatgtaaactgtcatcatcatggcccgggaccccagggaaagagatgacattttcttgtgagactgggagaagcagcaggagcaggtgtggggaagggttgttttgcaaatcaaatgttgtggaatggtttttacagtcttgggggagacacagtgtttactaagaggaagtggataatggtcctcaggttgttccgtctacaatagtgaagaataagcagayggtgtgcgcctgtggtcccagctacttggaaggctgaggtgggagagttgcttgagcccaaaagtttgaggctacagcgcgctatgagtggtaccattgcactccagccaggaccacagagtgagatgctgtctcaaaaaaaaaaaaaaaagaaatgcagacaagatcagtgtattcagggtactggtgagtgcctgttgagcccaggaatttgaatccagtttgggcaacataacgagatcccatctctccaagaaaggaagaagcagcagatgtagctgatgatctagcttagcactctcaatgcctgct

SEQ ID NO: 232542 - DNA, 429 bp, Homo sapiens
gaattcttctgtattaatctgttttcatgctgctaatacagacatacccaagaccaggtaatttataaagaaaaagaggtttaatggactcgcatttccacgtggctggggagrcctcacaatcatggcagaaggcaaaaggcacatcttacatggcggcagacaagacagaatgacagccaagcaaaaggggaaatcccttataaaaccatcaggtcacgtgagacttattcactaccataataacagtacaggtaaaactgcccccatgattcaattatctcccactgggtccctcccacaacacatgggaattatgggagctacaactcaagatgagatttgggtggggacacagccaaaccatatcatcttgtcatctttacaaaccattttagtcacacttgcctgacatataattttgaattt

SEQ ID NO: 232543 - DNA, 520 bp, Homo sapiens
acacacctaaatttaggcccagcggtggctcacacctgtaatcccagcactttgggaggccaaggcaggtggatcacttgaggtcaggagtttgagaccagcctgggaaacatggtgaaatctcatctctaccaaaaaatacraaaattagccgagcgtattggcatgcaactgtagtcccagctacttgggaggctgaggtgggagaatcgcttccaaatgggagccggaggtttcagtgagccgagattgtgccactgaactccagcttgggtgacagagtgagaccctgcctcaaaaacaaacaaacaaaaaacaaaaacctaaatttaaagataaaagtgcaatgttaatagaaaaaagagtagattattctttgtgatcttgggcaggggagatctttttaaacaggatcctcaaagtatatataataaaggaaaaaatagatttgaatatattaaaaaatacttttgaggggggtgatgttgaaaggtgagcaccagtaccaaagtaaatgaat

SEQ ID NO: 232544 - DNA, 520 bp, Homo sapiens
acacacctaaatttaggcccagcggtggctcacacctgtaatcccagcactttgggaggccaaggcaggtggatcacttgaggtcaggagtttgagaccagcctgggaaacatggtgaaatctcatctctaccaaaaaatacgaaaattagccgagcgtattggcatgcaactgtagtcccagctacttgggaggctgaggtgggagaatcgcttccaaatgggagccggaggtttcagtgagccgagattgtgccactgaactccagcttgggtgacagagtgagaccctgcctcaaaaacaaacaaacaaaaaacaaaaacctaaatttaaagataaaagtgcaatgttaatagaaaaaagagtagattattctttgtgatcttgggcaggggagatctttttaaacaggaycctcaaagtatatataataaaggaaaaaatagatttgaatatattaaaaaatacttttgaggggggtgatgttgaaaggtgagcaccagtaccaaagtaaatgaat

SEQ ID NO: 232545 - DNA, 483 bp, Homo sapiens
gacaaataaatagccaacaagtctatttaaaactgctcaacatcactaatcattaaataaatacaaataaaacctgcaatgagatataatctcaccccagttaaaatggcttttatccaaaacacaggcaataacaaatgctggtgaggatgcagagaaagggggacccttgtacactgttggtgggaatgtaaattagtatagccactatggaagttcttcaaacaattaaaaatagaactacgatacaatccagaaatcccactgctgggtatatatctcaaataaattatatcaatttattaaagaaatgtcttcatkcccatgttcgttggagcaaaattcacagtatccaagataagaaatcaacctacatgtccatcagtgaattaatgggtaaagaaaatatagtatatacacacaatgaaatactactgagccataataaagaatgaaatcctgtcatttgcaaaaacacagata

SEQ ID NO: 232546 - DNA, 633 bp, Homo sapiens
aggtcctttctggcttttgttttattaaatatgtgaatacagtatattcatcaatctcttacctctgaaaacttggtatatggggtggagttagccagatctctagagcaacaatggagttttcagtccrtgcttgtaagagcaacacactgtagttatgactatgaatctgaacatcaaggcattgtcataaaaaaaaaaaaaacagccatctgggaatggctttgccaccgtgttttttttttttaatctgtgtaaagcactattcaatgaggcactcaacactgtgacagacttgtgtgctgtgcccaaaaatggctagacagttctaagagatctttgcgacaccatgactctcagtgatccactgagagtcctgggactcacctgcatcatattcaggagctgtggcctttatagctggaaaataggcctcagcctggaaaaatctctgggttcctaccacctccttttacttccaagggcagcctgcttgcttttagaaagacttcactgagccacacttgctcagaccttgcccaaatctgactttgtcttgaggggctttttcagttgataaaattcacttactatcaagttcactatttaaaagtatatcacttagtagttttt

SEQ ID NO: 232547 - DNA, 514 bp, Homo sapiens
atcacttcgaaacaatttgagaagtaaactgctaatgtgtgttagaaaaagataccatggaaaaaatgtacaattttccacaacatcagtgaaacgtagagtgagaatgtactatcaaaagtcacctagtattgtccagtattccaaatccttgcaacgctcttctccatgacaaccttaacattttagacatgctgttctccctgtgtggatgctttcccccctaattgaagttaactaatattattgagcacacattcagtacayagcaatttaatagtcactgagaattctggaataaatagggcatgacccttctgtaacgtagcctccaatctcatgttgcatagtatatctagcaaactaaatatatcaatgaatttaagacttggctttagactcctgttacccaatagaaagcttttcacagccaagtccaatgacatcaccattatgataatggtgatagttatgaaggtcattaactttcttttgtttatttgctactttgctc

SEQ ID NO: 232548 - DNA, 542 bp, Homo sapiens
tttaaacttgtaaacattcagcagctatttccccaggttcaaagtaagccatctgatcaagagtatggtaaactgccacagaccctcccactggtgtagggcagaacaagyggattataatcactggctctgagattctttgcaaggaaagaaggaattggagtacatatctaagattccaacccctccaactgcatctccaaaaaactgagttctattccacctttctcaaggcaatagcaagacttgacactctaatttcttggagccattaagaacaaagatagctagttggaaaagcaaaaagaggcacctagaatcactggctgagctaattatggaaaaatatctcctacaaaagaccacactaacaagactgggagaggtggttctcttatctaatgtgcagaaccaacatagtcaaggaaaatgaatgaacaggaaactatgttccaaataaaagaacaagataaatgtccagaagctgacactagtgaaatgaagatatgtgacttgcctgacagggaatccaaaaggacagt

SEQ ID NO: 232549 - DNA, 590 bp, Homo sapiens
cagaaccacacctttaagcatcattcaaaggccagcctctcaatgggttttacttccccaaagaatagttttgatcttctactataaattctgcaggaaacatcaagaccctaagactgtggcataactgtaaaacaaaccaaaatttaaatatacaatgataaagctcctagctaggaaaatgaagagtagaatgaaaaactaatttccaagatcaattttgaaggaaacacgaaaaaaatggttttaaagacatacttcctgcagttttgtctttccttttatattacagcaaatttcttttctcacagtgggattttaagttaatttataattatacacacttgcaggggatgagagagaaatgayctaattgtagaccaaatggataccctctggcgatcctgcaattagagctaccagggtaatagatgggctttatcctgccttgagtggattcagtggctgacctggcagtgagcactgacagtggtttgcagagtccacagcataatgtcaaaatctgcttaaattatttggaagcaaaaataaacaaatcaaagtaaaattccaagtgatcgtagaactca

SEQ ID NO: 232550 - DNA, 606 bp, Homo sapiens
ttttttcactacatgcttcccaaataaccaagttgtctctttctacagagaggggaatctggatctaactgtaaataaattaatatttacctggatctgagtggacagcttcatttaacaacacatgaatatgctcctcccataattaaaggccttcaattatgaatgttatgtttcatggcataaatctcattgaaaagtaacttaaagcaatttaaagtatggatgggctctgatgaagagttttttagagaggctgtgatatttttataaygcagggttccaggaatagttgtgaaatttacatgtcattattttgaagaaggtatatggcctgaaaataagtagaaattagctgatgaagctgatacacaatatgaataaaatgaggacaccaaaataaacatggtccttgagctcctggaataaaatgtcatgtgccttttatttttgactgtttattcaataaatgttagttgagtactgtgctatgtgcaaacatgaatgagatacaccttggattcatacagtgtcgggtggggagagacaccaatattgatatagacagtacagtatgggaagactgaaatgtacaaagcgcttaca

SEQ ID NO: 232551 - DNA, 507 bp, Homo sapiens
  misc_feature (1)...(507): n = A,T,C or G
gaaggtatgcatgctgatgagatgttctctgaagaggatcagtttcaggaaattcaggaaagtctggaggaagaaaccgaggcgtacatcaccagcaccacacaaatcagagttcacaaatggcaaagttggatggcttttgagaactatgtcctccaggaattctcaatgatttcttgtagtccacaataaatgttggaagatggtggtatcttagctcttctgttaataaaaccttttaatgtaamtttttacacattttaaatatttctaggggggctggaagaggagaacataacatatagcatgcagtattccatagaactagttaatnnnnnnnnnnnnnnnnnnnnnnnnnnnnnnnnnnnnnnnnnnnnnnnnnnnnnnnnnnnnnnnnnnnnnnnnnnnnnnnnnnnnnnnnnnnnnnnnnnnnaccctcctgagaattgttggatccacttagagactcaggctttgagtttgacacacactgctttgaccatttgc

SEQ ID NO: 232552 - DNA, 507 bp, Homo sapiens
  misc_feature (1)...(507): n = A,T,C or G
gaaggtatgcatgctgatgagatgttctctgaagaggatcagtttcaggaaattcaggaaagtctggaggaagaaaccgaggcgtacatcaccagcaccacacaaatcagagttcacaaatggcaaagttggatggcttttgagaactatgtcctccaggaattctcaatgatttcttgtagtccacaataaatgttggaagatggtggtatcttagctcttctgttaataaaaccttttaatgtaaatttttacacattttaaatatttctaggrgggctggaagaggagaacataacatatagcatgcagtattccatagaactagttaatnnnnnnnnnnnnnnnnnnnnnnnnnnnnnnnnnnnnnnnnnnnnnnnnnnnnnnnnnnnnnnnnnnnnnnnnnnnnnnnnnnnnnnnnnnnnnnnnnnnnaccctcctgagaattgttggatccacttagagactcaggctttgagtttgacacacactgctttgaccatttgc

SEQ ID NO: 232553 - DNA, 283 bp, Homo sapiens
ctctgcagtattcacctgagtaagagggcattttgtttttcttaattatctccctcaaaaagcatgatcaccccagtatccaaccctgtgcctacctcatcccataacccatgttcttgttattattcttctactgtcaaataagttggtcattgtgttccktatttaaaacttcatgtgccaagtttcagtctatttggaactaggaaaaggtttttcttctgccgagttgtggtaattttaccaggcaaccttctgtgcaaaagtccttttttggaatcac

SEQ ID NO: 232554 - DNA, 576 bp, Homo sapiens
aattctttggggttttgtaaaaggtaaagaattaaatttgttatgctcaacaacttttacttatgatttttaaatatatatattttatctatcaaatattatatttattgtttctatattagattttaggtgaaagtgtctatatgcaattctaattagcattttaaaatattttcttccccaagacattttaaaaaaattaagtaatttattcttagaattgagaaattagttcttattttcaaaaaaggaataaataataatatatctgtgagagtattttgtatttttcaatacattacttttttgatgaccataatgccctayaaaataggttgagaagctagtatttcctttattttaaggctaaagagaaataaagacatggaaataaaacattaagcaagggggggaaagagtcagagttaagtcattcaactggtgaccaagcaccctagaggaacaagtcaaccagactggaggaagctcagtctagccctgggctccagttcaaatcttctcaccaaaaattgtgtgtattttttcaaaagaagacgtatgagtggccaagaaaca

SEQ ID NO: 232555 - DNA, 587 bp, Homo sapiens
attaaaaaataatacaactagtaagtagtggcagcattaatattcatgttgaaatgtattcatcatttgtcagatgccaagtagataagaacctagcatacattagctccttagagccccacgaccattctatgagatagatatcgytaccatccacagttttgagatgattgaattaagaattaagcagaatgaatacatgcaaaatgtaagggtcaccaaaaatttcactaatcaagatagatgatatgttaatgcaatatttttaataatccacagtaatgcaaaaaatcataataaactaagtatcaaaatattttaaaagacaacatgattattatcttttttgttctttcttttgcttcaatattgctcagcatagcattgatgttgacactgatcttgtctttacataaaatgttgatattttgttcatcatgaacttttttcataattattttttcataatttttaataattatttttaaaatattgcattaaaatattatttatcttggttactgagcttttttagtcaataaactttatttgagcagttttagccttacagcaaaattgggtggcaa

SEQ ID NO: 232556 - DNA, 557 bp, Homo sapiens
tgtgtcttggacaagatctctttcctttcactgcctcttccaagtttgggcagcaggaaggtgagtaaagactcaaggtcaaagacttagtctttgtgaagctgttcctagactgccctagagaaggcttggaatatcattctgtcagaggtgtctacactttaggaagagaacccctgatattgacaaaaccccaagaascccccctttaggagctggcagtgactttactctcatataacctagcacttcagtatctacacatcctcactgcttccacagtatagtaggtggctatgagtgggggctctgggccatgtggcccaaagaaaagataatgcaagccacctgtcattttaaattttctagtagccatgctaaaaatcagacaaagaaacaggtgaagttagttttagtaatatattttatctaactcactgcatatccaaaatattacctatttaacatgtagtcaatataaaagttattactgagctattttacattctctctttctttttgaaataagtctttgaaactgggtttataatttacac

SEQ ID NO: 232557 - DNA, 501 bp, Homo sapiens
atgtgactttagacatgtcacttagcctcctattttttttttcctcataggcaaaatagagactatgctagcagggctgctatgaagaagtgatgccactgtgctcagttcagtgcctgactgagagaaggaactcgataaactttagcctcctttcctccagaccttcctcctgcttctactcccaaataaagggctagagcatcagaactgcagggaatgtgaaagatcatccagctcagttttatctttccagattaagtagggacatacagtgggaaagtggcggcccagatgagaggccaggttgcccagttcctcacccggtggtcaccctggcaccactctgccaccacatcacagtcatggcactgtcagctcagagctaaattctcctggcattatttaactgggattgtggctgtcttcattctctgaaattacrtcaactaagctttaatgaccattagctactgtggtttttcctttctgaggccgctc

SEQ ID NO: 232558 - DNA, 459 bp, Homo sapiens
ctgtatgatgatggggactgtgtatctggtcccctgctatgcccccagggtctgatgctacgtgagtacacagtcaacattatgaagtcatcacagccaactggaaggttgatatcattcctattttacagatgtggagactaaggcttgcccacagtcacagattaaataagtggtagagccaagacttcaacccagatctgtctgatccccaaacctgagagttttytattctatgaagctgcctgaggaaggtggctctttcacattatcctcacacaaaaggagagcccaggtgtaggcacagactcatggtggtctcaggactcatctggtaccctggttgtagaaagtatcaaggtattcagattcagtggtggtggggagagtatggcttcacaaacactgtgcctttagcccattgacttttattgccagtatgttcttttccagattggg

SEQ ID NO: 232559 - DNA, 625 bp, Homo sapiens
cggagatctttatgcttgcaagatacatttctagattctggaatagatataaagcaatataatatagttcctatctttgaagagttttcaatccaattgggaaaccagggaaggcttcaatgtggaagtttagcctgagctttcaaagtaaagttgtttggaagagaagaggagtattgttagaatttataatattccagacagagggaacaatataagcaaaggcagagagatatggaagtacatgctttcagaaaatccgtatttaaagatgtgtaagcactagaatggagggtatttaaaagttgcaacccatctgtaatatatcttatgtggtgtgaggtagggatataactttatactttctcccctcagcaccatttaatgaattgtcaatcgtttcccaactaattaaaaataagacctttttcatatatcaaattcccttaaagacttgggtctgtttctgaattctgtttctgtttcattgacctctttgtatctgggccagtaccacrttatttaaattcataaagctttgcaatatgtcttgacatctggtaggacaagaccctctctttgttctttttcaaaatagttatggctattcttgcacattgactct

SEQ ID NO: 232560 - DNA, 419 bp, Homo sapiens
atgcaagtccaaaatctaacagggcaatcaaatcttaaagcttcaaaatgatcttctttgactccatgtctcacatccaggttatgctgatgcaagagctgggttcccatggtcttgggcagctccatccctctggctttgcagggtatagccccactcttggctgctttcatgggctggcattgagggtctgcagcttttctaggtgcacagggcaagctgccagtggatctaccattctgggatctggaggatggtgaccatcttctcacagctccactaggcagtgccccagtggggactctgtgtgagggtccccaccccacatttcccttctgtacygccctagcagagaggttctccatgaaggctctgcctctgcagcacacctctgcctggacattcaggcatttccatac

SEQ ID NO: 232561 - DNA, 577 bp, Homo sapiens
attttacaatctcctctgagtttcagtattctcccaatataataccataattacccgtatggtatggaaggtggaggagaaaatgttatcaggaragcaggattaaataagccttccccttggatatgtgggctctgatcggtccctcctaacttgaggattctttctttttgtgactttcagttcatgagcacagaggatccaaattttactgggcttttaggtattggattctcccctcatggctagtgtgggcaagtgctgctatttagaaccgcaggggtctcaggcatcaactggacgaaaggtacgattttgggggacaataggaggccaggccatcaacacgtagcttccatttaattcctgaggaaaagcaggatagagaactctgaaagaccccaaagtctaggttaggaacccagagaactctagctctaattcaagccatcttaagaagagcatggtggcaactattgcttgggtggaatctctgtgcttgaggtcatagcatcagatggtaatatccaattgtgagttataccagcacttctccccaccccacaccatatccata

SEQ ID NO: 232562 - DNA, 524 bp, Homo sapiens
gttttaacatatataaatattagactgaattaaacagttttatcacttgaatatacaatttcctaatgcattaccttgctatgcatatatgtttgtctccttgattctattacaagcatactcataacagcaagtagacatatttgttgtctcccacttatttcaatrctacctatctggcttgagatatgcaatagttccttaacaaattataccagagtcataagcaaaggagactcttgggttttctgttagtagagggttttctgctacctctgttctagaatgggaaaaaaaaatgaaaaaaaatcaatcaaatgggtttttcaagggcaggttcactgtcctgcaccttccaccctcctgctgagtcagaccgcagctgtccctcctccatgatgtgtttctatccaaagataacatgctgactccttttgtgcttctctatgctgaccccttatagggctcacatcctcaacctgatctcaaggccaaaggtgcctttatgtctacttagaacctta

SEQ ID NO: 232563 - DNA, 547 bp, Homo sapiens
aataagcagcatggatttttatatcctggttcatgactgatgctgctacctcaagatgtccctggtcatctctgaacctcctcagggctgccaccctgcacctgtccacaagcggccatgtgtgaactcccccctgtggccaccatgcyggcctcctgtgctgctgtgttctctgtgactagagcatttgtcactcagctgggcatagctgtaccctgttgaggaagaccctgctgttagtcccagccctgaggggagggatgacgaatgcttcgctgctctgtttgagtgcaacatgggcctctcaatttcccactgcaaaaaaacagtgttggatgcaacctttcataaggatttagagatagtttgcagatcacagaaaataagaacagagcacagaaaaacttaaaaaaaaaaacccccactgtgcctatgcttagaactcaatttcattcattccgcaaatatttattgagcactgaccacatactagggagcttttctaggtgtggtgattagtgttggagaaatcagtcaataaatatga

SEQ ID NO: 232564 - DNA, 547 bp, Homo sapiens
aataagcagcatggatttttatatcctggttcatgactgatgctgctacctcaagatgtccctggtcatctctgaacctcctcagggctgccaccctgcacctgtccacaagcggccatgtgtgaactcccccctgtggccaccatgctggcctcctgtgctgctgtgttctctgtgactagagcatttgtcactcagctgggcatagctgtaccctgttgaggaagaccctgctgttagtcccagccctgaggggagggatgacgaatgcttcgctgctctgtttgagtgcaacatgggcctctcaatttcccactgcaaaaaaacagtgttggatgcaacctttcataaggatttagagatagtttgcagatcacagaaaataagaacagagcacagaaaaacttaaaaaaaaaaamccccactgtgcctatgcttagaactcaatttcattcattccgcaaatatttattgagcactgaccacatactagggagcttttctaggtgtggtgattagtgttggagaaatcagtcaataaatatga

SEQ ID NO: 232565 - DNA, 590 bp, Homo sapiens
ctgcgtcttctgcaactaggcagctctgcatacctctgggcctccccggggtcttgccaggcccctccctggaggttttaagggaaaagcagagagcagaacagagcagaagagtgaggcaccatggaagaaaacatatgtccttcccatgggagactaaacgttccgccaaagtcagcacctttgaacatcatctttgactattaaggcagttgctgacaccaccatttacttctctctcctcttcctcaaaacagacttctatcaaaagacataaaggcagaaccgtgggatcagcaccacacacagctgctttcttcgaacatctgaattatgacttcctgttcctgggatgatgctgggaacagccaaaaagttttagrgccagattccttatccaatgggcaaggaaggggtggcctgttgaaacatcctgaaatacatcaacccaaaatacgaccaacaaaaatgtggcttccaaaaataactccgccaggcgggtctgtgtgccggctgggaggaaagagaggtgggacagaaccagcttggaccttcccccatcccaggagtggccatcataccagcgtcag

SEQ ID NO: 232566 - DNA, 477 bp, Homo sapiens
aaatttttgcagaaatagttggtatcctgaagagggaataccacattaaggcttccctaggagacaggcacctttgccttcatgggcccatcctgtattaatacttaaattgtgtttccattgccatgatgtaaacacaaagatagagctggatggagtcattattacatatgcattattattgtattcatttttcttctgattttaatataaattaaagagaacgttatgatgggcccctataggtttgtaggtcctacacactgagccttctagactcataggcagtgggccctgagtgstagacccaggcacagatagtaagggccttcaagaattggattcacaatggtgcagacattggcagtttcacttacagacacatttctgctgggtcagagattgagtcctggaggaaacctctggtctgaaggctacagggcatctcctatttcaccccatgcctgaatttgggcc

SEQ ID NO: 232567 - DNA, 454 bp, Homo sapiens
atacattcttttaaaaggatatgtgattgctaccaataacatttaaccctcaaaactttttgttaatgatgaacatatagctggcttatttctattcaaaacaatgcaagatgagttcctgctttcattgagaatttgaaatagaaaatgtcagaatatctctttgctctgttgacagatatggaggactatgtttgaacaattgaccctgtgtagtttgtgtgataaattccaggcaagggaatataagttgaaaattttcttattttgaaaaaaaaaaaaaacacattataaactcatgttcatgaaagacattcyacaaatagtccgaaaataaacttcttaacattcacactaatggcagcttcatataaattcactttgctaccagctttttaatagagtcatttcatccatatttatgtactatcctttctcttttcagtcttatgga

SEQ ID NO: 232568 - DNA, 435 bp, Homo sapiens
tagttatagcatactcagtctcctagagttcattctcaatgggtcagggtaaggggataatttgcattggttatgagatmccaggtgatgctgctgctgttcagggacctcacttgagaggctctggtgcagaatgaacaccttagtctgtttagggagcctcctaccaaactgaatccagcctcaagacttcagcatttctggctttccttccagggtggacccaaactccccagttcttttggaggacccagttctttgtgccttagcaaagaaacacaaacaaaccccagccctgattgccctgcgctaccagctgcagcgtggggttgtggtcctggccaagagctacaatgagcagcggatcagagagaacatccaggtgaggagttgggtgggcatcagggctcctgcacagtgtccttcacacgtgtg

SEQ ID NO: 232569 - DNA, 435 bp, Homo sapiens
tagttatagcatactcagtctcctagagttcattctcaatgggtcagggtaaggggataatttgcattggttatgagatascaggtgatgctgctgctgttcagggacctcacttgagaggctctggtgcagaatgaacaccttagtctgtttagggagcctcctaccaaactgaatccagcctcaagacttcagcatttctggctttccttccagggtggacccaaactccccagttcttttggaggacccagttctttgtgccttagcaaagaaacacaaacaaaccccagccctgattgccctgcgctaccagctgcagcgtggggttgtggtcctggccaagagctacaatgagcagcggatcagagagaacatccaggtgaggagttgggtgggcatcagggctcctgcacagtgtccttcacacgtgtg

SEQ ID NO: 232570 - DNA, 538 bp, Homo sapiens
aaatagttattattatttgagacagagtctcactctgtcacccaggctggtgtgaagtgggacaatcttggctcactacaaaatctgcccccacccccaccttctttaccttgggctcaagtgatcctcccaccttggcctcccaaatagctaggaccacagacaggcatgataatgcctggttaagtttttgtatttttggtagagatgggatttcctatgttacccaggctcaaactccggagctcaagggatccacctgccttggcctaccaaagtkctgggattacaggcatgagtcactgcatacacactcctaattatttttaatatagtgaaattaacacatggaaaaaggcacatggaagaaattatggtaagaatacggtgtaagttcctatgattcgtctctcagtgatgtttcaggaaacacactgacttcctacagcatcacattttggcaacataggggaaatgttgactacaagggatgctatttggagactcaattcccaagattttaactgggtgctggtta

SEQ ID NO: 232571 - DNA, 520 bp, Homo sapiens
atttcaggtacttaatatcttatggtatctttaaattttttcatcttctatttatggttaaaatagaggtataagagatctttcaataaaacaatgggaaatatgaatactgactggataatcaatgatatgagggcattattgttatttccttagatataataattgcactgttactgggagaatatcttcattcctatgccatgctttgaaaggtctgtagaggtgaattgtgatcattggaatatattttgaagagattcaacaaatactacctgtattgatgcagatatactcatatatgcctatatacttgccaggttggcaaagtgtcaacaattttggaaatagatgataacatgtagatgtcctgtattatcccttcaaatttctctaaaatttgaaagttgtcataataawaattgagtaaaactaatattaaaaccacattaattcctttttaattgaaaatcatgattttgtattatattaccaaatacataaattttaaatacatgtt

SEQ ID NO: 232572 - DNA, 536 bp, Homo sapiens
tcaagatgtcttacatccatcatcaatattttaagttttctaaaaaatccagttcatggttttcaaagaagttgattctgactcatctgttagactctaccatatacatatgaataatgttctggttgatacatttttaaattcctatcattttgaatgtttttgggaggagacaggacaagaaaagaatactcaatgaaaatttgggaagagaaagcttccatttacttaaacatttactaaacacctattataccccaaatactactttaagacctcaaaatacatttgcctttttcttttcatttatttatgttggttttatcctaattcttctttattatcttttggggcaattatcatgtaacacacagcataatcattttgctagtgaatgaatccacatcacttgaagaaaattcatcagctgtgataytgactaagaaagtgttaatatttgagtaacagctagtttaaattttctttctttccagcttatttccaattaagtgtatttcttctcctggcctgacatg

SEQ ID NO: 232573 - DNA, 505 bp, Homo sapiens
aactaggtgacatcctctctgctgggaagaatcctttttttttttttttttttttttctggtgacaggktcttgctccatcacccaggctggagtgcagtggcatgatcttggctcactgcagcctctccctttcaggctcaagcaatcctcccacctcagcctcccgagtggagggggagccactgcagatctggagcaaatcagcaccagccactccagagcctgacctacataggactcagaaagcattgtctattgtgattgattattcctgtgttcagtcccaatggcctattgattgggggtttctctccaaaaggctgcatggcttttcttctctaagtgaatctcctttataacccatattttatgtctatataccaaacatgctatccatatttagtcaatgtccagttgcttgcatgtaagggcaatagagtaatcagaaaactcttcccagaaagcccccgaagacaaaactagtactggtagaaaactgggca

SEQ ID NO: 232574 - DNA, 505 bp, Homo sapiens
aactaggtgacatcctctctgctgggaagaatcctttttttttttttttttttttttctggtgacaggttcttgctccatcacccaggctggagtgcagtggcatgatcttggctcactgcagcctctccctttcaggctcaagcaatcctcccacctcagcctcccgagtggagggggagccactgcagatctggagcaaatcagcaccagccactccagagcctgacctacataggactcagaaagcattgtctattgtgattgattattcctgtgttcagtcccaatggcctattgattgggggtttctctccaaaaggctgcrtggcttttcttctctaagtgaatctcctttataacccatattttatgtctatataccaaacatgctatccatatttagtcaatgtccagttgcttgcatgtaagggcaatagagtaatcagaaaactcttcccagaaagcccccgaagacaaaactagtactggtagaaaactgggca

SEQ ID NO: 232575 - DNA, 632 bp, Homo sapiens
gagcaaggctctgtgggcgtgggaccctctgagccaggcgtgggatataatctcctggcatgctatttgctagaccattggaaaagcgcagtattatggttggagtgaaccaattttctaggagccttctctcacggcttcccttggttagcaaagggaattccctgaccccttgcacttcccaggtgaagtgatgcctcgccctgcttcggctcatggtccatgggctgcacccactgtcctgcacccacgtctgacaagccccagtgagatgaacccattacctcagttggaaatgcagaaatcacccatcttctgcatcgctcacactgggagctgtagactggagctattcctattcagccatcttggagcctccagttcctacaatcttatgaatctttgaggtgtggtttgcaagggtgtcacactggacaataggactgaagaaytgccagatctagaagtggcttacatcacctctgccatactccatctacccaacagagtcacctggtctcaatccaatgcaaaggggctgattcatccagaccttatgtgtgcccaggaataggaactagggctggtgaccatttaaccagtatctagaacacttgaaaatcaagaaagcc

SEQ ID NO: 232576 - DNA, 583 bp, Homo sapiens
taccccaatttacaatcttcaagcactgtctgtttacttctttgttgtgactatgaggagtgcattggccacagacaacagaaaacctgaccacagcagtaaaagtaagaagtctgtttttctcagaccacaagaaggccagaggttatcaatcttttcatatttttcattcagtagtgyttcacatgcatttgcctatataccacctgtattagcccattctcacactgctataaagaactgccagagactgggtaatttatgaagaggtttaattgactcacagttccacgtggctggggaggcctcaggaaacttacaatcatgatggaagggaaagcaaacacacccttcttcacatgatggcaggaaggagaagtgcctagcaaatgggggaaagccccttataaaaccatcagatatcgtgagaactcactaccatgagaagagcagcatgggggtaaccaaccccatgattcaattacctcccactaggtccctcccatgacacatggggattatggaaactacaattcaatatgagatttgggtaaggacatagccaaaccatacacatcacacc

SEQ ID NO: 232577 - DNA, 570 bp, Homo sapiens
ctttcataacacatcacctattgtttccaagagtagggtgtttgccccaagtgcagtcaaaaagtttattcattgtctatagagaagtggaaaatgataacatgacttactaaaatgctttgtttttattgtcaccattagctggcaatactatttcctaggggaaaatatgcgtttttgttatttttttttttcaggaattgtagttgctgtaaaattttgataatttatatttaatcttcatggtagcacttttttagcctttgatccacacagaatcagctggaagctctccttctcagagtacttttgtgacgatttgcaattgcttaagctcctttccaaagtggttkctatctccaatccctgtggatccagcacttgaacaatgggttcaaataagagtgatgcaccagggactataaagatggacagattacgacttggtccaattctgtcattctgtgttaacttggattttttctttgtgtatggaatacacaaataaatacagagtgaactgcaatgtgtaatgtttttgtttgctgtatgctgtagggcatacgtgaa

SEQ ID NO: 232578 - DNA, 172 bp, Homo sapiens
gaattcacttgtaacaggtgctagcacctgttcttccrgctcccagaatagttcctacttaaaatgaatcatactctaacagttcacttttaagcttactatttgaaatttggaatgtgtttccctctaaaaccagtgtcataaatactggttggcatgcaaggccaccctt

SEQ ID NO: 232579 - DNA, 437 bp, Homo sapiens
ctgataaagggctaatatccagaatctacaaagaacttaaacaaatttacaaaaaaaaatacaaacaacctcatcaaaatgtgggtgaagaatatgaacagacattcctcaaaagaagatatttatgtggccagcaaacatatgaaaaaaagctcaccatcactggtcattagagaaatgcaaatcaagagtctcttccaagatggcctaataggaacagctctggtctgcagatctcagcgagatcgacgcagaagatgggtgatttctgcatttccaactgaggtacctggttcatctcactgggactggttggacagtgggtgcagccccacagagggtgagctgaagcagggtggggtgtcgccttacccgsgaagggcaaggggtcaggggatttccctttcctagccaagggaagccatgagagactgtac

SEQ ID NO: 232580 - DNA, 599 bp, Homo sapiens
ctggcaggaatggaaaatgttaatttggttaccggatgaaactccttggacagcatcttacaaaattgagaggcttctgcctggggttccatgaaacagagaggggaaaaaaaaaagattttcttttgtgttgtggcttggtctccagggctatagtgtggcaagcagggtcgctagggccattcagggaaagagaacttagaaagctgacatgccagcaaaagggcaagaatttcttacagtcagacttctggcccctctctctctgtgcaaaccggttaaaggaatggtaaaaaccactgtttatctcctctgtaaagttttgattaatgtgaaaaaggattctgaggctagtcttaagctgtagcaaatctggtgtattttgtgmtatgaatttgtctttctttgtcattctgtcataaagaggggtaccttaggatagaacacgggcttaggaacccataagctcgctattcaagatggcccagaaagctggtctgttataaattttgctgcagatctctgaagaaagaaaaaaaaaatagatgaggcctccatcttgttttatgtccttgggagctaaaccttgtaaccacatg

SEQ ID NO: 232581 - DNA, 411 bp, Homo sapiens
agaacagcctgggcaacatagggacacctcatctctacaaacatatatattttttaaattagccgggmatggtggcatgcacctgtggtcccagatactcgggatgctaaggtgggaggatcactacagcctggggggtcgaggctgcagtgagccatgatcacaccactgcacactagcctaagcaaacagtgagaccctatctcaaaaacaaacaaacaataaaaccttttattggcatagtcgcatgcatactttcatatataaacatttaagcaagaatttgtgtccatagagacaaatctgaaaggatgtttatgaaaatgtaaacgtttccaagggcaggcagaatggcagcgttgtcatgagttgttacagcccagctgtgaattccagctccacttcctacca

SEQ ID NO: 232582 - DNA, 551 bp, Homo sapiens
ctgtgtgcaaacttttgcctgaatctctagctaagccctgaactgtgcatgggtgggtagtctgcaagcaaaccacctaaggataaaacaactgaatggagatttgagtaactgccaagaggcatagtttgcaagtttaagtctaacaaacttcactggcaaccaaaataaaattgccaacattcttaagaggattataattgaatccagtctccataacacaacattcacaatgtccaagatagaaatcaaaattagatacaaaaagacaaatattgtgttattctacttatgtaaggtatgtagaataggcaaactcataaggacagaacatagaagttaccaggggctggaaaaagggagactgagactctggaactctttaataaacagagtttccattgggatgatgaaaaagatctggagatggacagtggtgatgattccacacattgtgaagtacttattgccactgcaatgtacccttaaaaatggttaacattatayattttatattgtgtatgttttgccataaaatagaaaataaaccc

SEQ ID NO: 232583 - DNA, 436 bp, Homo sapiens
cacagtattcctgagtcagtgtgggattttcacctgctgtggtttgcagtttgaattctcccccatcatcacaagctttaccacctggtgtgtattaagcactccattactctgagaaatcattggtgttccagctgctagaatcaaataatcaggcacaatttgggaaataaaaatcttctcccattccacataaacaagttaggaggattctgtggaagtgccactgacttgggggtctgggtattcttttggttatatcacaaatcgccactctttgtgtctatgcatttacagttgtaagggaagggtgtgggaytgaatgacatttaagattccctccggctctgaagccgatgacctagtgttcagtgtgattctaggctactttgggcagaaagccgctcagtcttcatattcataaaaacaactttcc

SEQ ID NO: 232584 - DNA, 404 bp, Homo sapiens
aattttacggcagtctgactgccttccttctttcctttcttcattttttctctcattcccttactyctgtcctcactctgttcctaaaataatctaaagcagattacaaacacatacaaataacagggtgaaattagtggaaatttgtcagggaaagtaaaggcaagaaaataagatagatccagaagtgagttagtacagaaaatgcatgccttagagccttgtaaacatgtaagagctggccttcaagttttattctaaccctctcagagccagtttagcagggaaatatgatccattacaagattcacagtgtcctgctggtgacataaaacaaaaacaggtgctcaagagcacagcttttattgatactgagaccagaggaaaagttctcctgtgggttg

SEQ ID NO: 232585 - DNA, 505 bp, Homo sapiens
tgcttctgctttcgaggtttagagaaaaatccagagggaaagaaaagacctaacaaactgtgattcctctgaattaagttttaaataaaggctgtggcaagtgaaatccacccagaaagagaattacttgaatatgcacggaaaggaggacatgaaatctatcaattatattttcatgtaaatgcacatgttctttcttctttggagagtttcacaatttgggaattcaaagcttctgtgcaaatgttgtctaaacaaggcttccctttacaaaaaaaactccacctgccaaggtaaagactgaacagagagctgctcaaatacagcagaagaaacctacaccgtcggccaatatgctgctggctgtacagagtcytctggctgtggttcccttttatttctgccctttccctcaaagttgcatcagaaattactgccaaaaatagtgctccctgtgggtcaggaccttagattcagcagtctttccagactcacaacacagtaa

SEQ ID NO: 232586 - DNA, 204 bp, Homo sapiens
aactcatgggatgttttgtgagccagaactggaagtgatacacaacacttccacctacattccatagaacagaacttagtcacctagcctcaaccttactgcaacggaggctggaaaatrtaatcttcctatgtgtccaataaaaggaaatgaatttgatgaacacctaaccagtctctgcctcaatcacataatccattgttt

SEQ ID NO: 232587 - DNA, 574 bp, Homo sapiens
cactagctgtgctcattggtttggggatgttaacacttctagaccttttaagtgaacagagttaaggatgagctcatactgatatctctaattccaatcaagcaccataggattcttcctcttctcccatgccaatgatgtaccttctcccaccgtgagaaccctggcttgcaacaacattaatgtaatataatcactcatttccccaatcctataagcatacacaaaatagtttcagcgttgctatactgacaccactactaacaacaaatctaataagaatctttcaatatttatttatttttatctttaaattgagagtatatgattaaaaattacctgattaatttttgtttatttctgggttggttatgttatcactttgacatataattaatgtgtctccatttgtattcaattttaggggtttcctcaaacttrctgatttgatttcactttttgaatatggaaaatgcaaacatgacttcaagtcacaactatacatataggtatattctggtctctgaaaatgctttagttttttcatatctattatgtcctctttattccaaag

SEQ ID NO: 232588 - DNA, 563 bp, Homo sapiens
cgggtccatgaatactaaaatttattaatatgtgtttgccctcatccttgaatatcagtttgcctaagaacaggatttatggaagagactgctaattgcttattccaagtccagttttccctttttcctaaagaactaaacctcaatttttagcagagtacactactgccttgaataaacataatactttttagtctttctttggacaagtgtggccacctgatcaagttctagccaattaagttaaaataaatactatgtaggagttctaggaagcctccttaaggagaactgacaaaactgggagaggtgtccattttactcttcctctcacttcctttatttgactacttggaacttggataagatgrctggagccccaggagctaccttgagctgtgaggtaactgaggatggaagtcatatcttgaaaatggttgcaacagaaagataaaagagcctgagcactgataacttcatgaagctgggttgattctccatgcctcaatttttctctgatactttacatctctttgtcttttggtttaatattttgggaaatt

SEQ ID NO: 232589 - DNA, 522 bp, Homo sapiens
taatgtgagctgataaacagttgccatctaataaaaaccaaagggccagatattcaaatttatggttttgtgggacttatggcctctgttgcaattactgacattgtagtgtgaaggcagccatagactatttgtacataaatggatgtgattgtattccaataaaactttacttatggacactaaaagttgaatttcatgtaattttcaagtgccatgaaatattattattcctttcatttgtttcaatcacttaaaaacataaaaaartcattcctgcttgttgcccattcaaaattagggagtgagctggacttgtcttgcagaccatcgtttgatgacttcttttctagctattaccattaatgcttgttttggtcaaacaaacccaatagcatttatagcccttttttacttgacctgaatttcatcaccaactaatggatatttgggaaagaatcctaggtgtatcctttctgttatttctttcctactcagtctcattttggccctagcattatt

SEQ ID NO: 232590 - DNA, 633 bp, Homo sapiens
gactcttatactaatgtaggcacaatatarttattaatttatgcccaaatcagtccaaagtataaaaattgttataataacaacagttgttattttatgtgtgcttagtatggatgagtatttttgtgatatgctttacacgtataatgagggaaaaaagtcatcctccacacgataaaatcaaagagatggatggcaacttatttaaaaacttaattaaattcttttaggaagacattttcaagcctcagccagaccctcgcctattgaaagaaaaacccagtgctaagcttgggggttaagggctaaagacagctgaattgctctgtattgtaaagtggaaaaaatggggttcctttgtttccaaaagagagggagcagagaagaggactgagaaaggcaaattgaacaacttggaggcatggctagaggactttgaagaacattttgcattttaagctgttttccatgctgcaacaacttcctctacttccccaagccttcaataaagtatgctatgcacatacaggcactgcgaatggttgcttttgttaatatgttgggggtagtagtgttgttgttgctgttgtcaaaatcaaagaaagagtttgaatttaagtttagagctacaaa

SEQ ID NO: 232591 - DNA, 475 bp, Homo sapiens
ttttatttaattcacccttttcattctccccaactccacttactgatgcagttgtgaagctggcaattttcagcttaaactgtgtaaccacccctctctcagattccccaccccagcctccccgacccacatcagcatctgtctctctgtttcactgagttctgtcctttgaccccactcagagcaatgtcttagggctttgagcctccagaagatccccaaaggggtagagggcaattacaaaatggcagcagggaacccagtttgattcctgcattccccatgggacaggagagcgtcagattcagagcactggttcagaagtagcaggttgcatttgaatcctggctctaccacttactagctctgtggccttgggcaggtcacttgacttctctgggcctcaggcayatcatcagtacaaacggggaaggttaaatccaggggcatagtagtacctggtgcatagagctgc

SEQ ID NO: 232592 - DNA, 475 bp, Homo sapiens
ttttatttaattcacccttttcattctccccaactccacttactgatgcagttgtgaagctggcaattttcagcttaaactgtgtaaccacccctctctcagattccccaccccagcctccccgacccacatcagcatctgtctctctgtttcactgagttctgtcctttgaccccactcagagcaatgtcttagggctttgagcctccagaagatccccaaaggggtagagggcaattacaaaatggcagcagggaacccagtttgattcctgcattccccatgggacaggagagcgtcagattcagagcactggttcagaagtagcaggttgcatttgaatcctggctctaccacttactagctctgtggccttgggcaggtcacttgacttctctgggcctcaggcatatcatcagtacaaacggggmaggttaaatccaggggcatagtagtacctggtgcatagagctgc

SEQ ID NO: 232593 - DNA, 608 bp, Homo sapiens
cacacaaaattttagaaatgaaacccaacagtatgtacattatgactaagtggggcttatcctagaatgcaagtttcatttattatttaaaactcaatcagtacaattcaccacattagcaacttaaaaaagatgcaagtcatttatcatatatgtgcttggctagtatttacccagtctgaggcttgcyttttatttatcatgtgtgtttttcaaagagcataagtgtttagttttgatgcagttaaatttgtcaattattttctttgatagatcatgctttcggtgtcatgtctaagaaagctttgctcaatccaaggttgcaaaggttttctcctatattttcttttataagttttatacttttaggttttacatttaggtctatgatccgttttgaattaatttttgtatgtaatgcaaggcatggattgaagttctttttttgtatatggatatccaattgttccacaccatttattaaaaagatgagcctttctaagtgaatttaatttgcacctttgtcaaaaatcagttgtccatattcgtatgcatctatttctgaactctcttttctgttgttttgtctatcttgatgccaataccaa

SEQ ID NO: 232594 - DNA, 508 bp, Homo sapiens
ggaattctaacccaaccctcccacaaacaayttccctaggtttcgttatgggtcctcagggaattggcttaattacaatttttaatgacgcacatgttcacacaacttctgtattagctgccatctcttctagtgctctttagtatgtaataaacattattcttcactgaagctgagatccagtttctcatcttcaacacattaggatcatttgcgaacctctgattccactgacataagaaggctcagctgagaccttatagttgaggacagaatgttctctaccctgattccaaaaaagggaagacacccccaagcccacgaactccaaagaggtagcaaagtgagtcttctgagagacaacttcaaatcctgaaagctgttttcagaagaaggggatgggggctttgctgtgctactcataggtacctgtgatgtgtgagtctgggagagatacacttgcacttagagtatgacatgttccatctggatgattcagcaccatcat

SEQ ID NO: 232595 - DNA, 487 bp, Homo sapiens
tcctcagggaattggcttaattacaatttttaatgacgcacatgttcacacaacttctgtattagctgccatctcttctagtgctctttagtatgtaatamacattattcttcactgaagctgagatccagtttctcatcttcaacacattaggatcatttgcgaacctctgattccactgacataagaaggctcagctgagaccttatagttgaggacagaatgttctctaccctgattccaaaaaagggaagacacccccaagcccacgaactccaaagaggtagcaaagtgagtcttctgagagacaacttcaaatcctgaaagctgttttcagaagaaggggatgggggctttgctgtgctactcataggtacctgtgatgtgtgagtctgggagagatacacttgcacttagagtatgacatgttccatctggatgattcagcaccatcatttatgcacacagggcggtgatgattgaattc

SEQ ID NO: 232596 - DNA, 507 bp, Homo sapiens
gaattctaacccaaccctcccacaaacaacttccctaggtttcgttatgggtcctcagggaattggcttaattacaatttttaatgacgcacatgttcacacaacttctgtattagctgccatctcttctagtgctctttagtatgtaataaacattattcttcactgaagctgagatccagtttctcatcttcaacacattaggatcatttgcgaacctctgattccactgacataagaaggctcagctgagamcttatagttgaggacagaatgttctctaccctgattccaaaaaagggaagacacccccaagcccacgaactccaaagaggtagcaaagtgagtcttctgagagacaacttcaaatcctgaaagctgttttcagaagaaggggatgggggctttgctgtgctactcataggtacctgtgatgtgtgagtctgggagagatacacttgcacttagagtatgacatgttccatctggatgattcagcaccatcat

SEQ ID NO: 232597 - DNA, 580 bp, Homo sapiens
tgtccttctgattcagagagacatagagtcaacccaactctgtgccctggagcaaattacttaaaccttctgggtatctgtttcctgaagcttgaaactgagatagtaatattayctacccaaggggatgtttggaaataagatgatctgtatatagtgtttagcacagtttctgacatactgcaagtattccataaatgagagccacatctgtgtgtccctagaatcatgaatttttaccccttctttttaaaatccacactgcatgtgaactcataaaaaactactgttttcactataatttatatgccattgactgcccatctctctcacctatcccgacttcactcttatgctcaagactgcttattggatatatccacatggatgtcctactggcattgcaaacttcacatgtctgaaaccacacttatggttttcctttaatctttccatcagtgcccttcttccagtgctccttatctcaagtgttctcagttgcacaagcctgaaaacggggctccattcttgatggcctcctcttcctaactacgccctctcaattcaatcagtccacctc

SEQ ID NO: 232598 - DNA, 591 bp, Homo sapiens
tggttttctgttattccaaaaacgtataacacctgattttatcggtcagatcgacccttcatgaaaatggcagaacctgaagagtacacagagaaataaaacatctatatgaatatctatatatctatacaatattttatatatattatttataaagcattatcctgaaaaaaagaatttttctttttcagtggcactaaggaacatcaattcctcaaagcagaagcaatacagtgcaattattattattaactaaacaactactaattttaaaaaaaatagaaaatataattttgaaaatatccagttatatgaaacagactttactgaccacattttaaatatttcacaatctcatcaaacatcctttacaatatatatgttggggagaaccacaaaaagcaaaaggcaacagtaactttccttccctgtctttaatagacatttcagtacatgttaatcaccacaaatcactacactgttgatagtaaaaagaagatatgaaattcaataatcctattctatttttatttcagataaacaacaaagtcayaaaaacttctcgatattgccatattttaaaataaaatt

SEQ ID NO: 232599 - DNA, 599 bp, Homo sapiens
tgcaatgatggaagtggtgtgtatctgtgctgtccagtatggtagccaccaggcttatgtggttattgagcacttgaaatgtggccagtgtgactgaggactgaatttttaaactttattgaatttaaatttcaatagtcacatatagctagtgtctaccataccagccaaggcatctctaagctgtatgccactcccttcttgaaacattttctttccttggcttttatgttgccaactctctctccatacccctttaggattccctttcagcctcctttgttggctacttctttgctattggatgwtttagggtgctactaccattggtaaaatttgaatatggactgtatattaatcttttcactttctactctaggctttaatgatcacctacagagagagaattcacaaacttgtatacctggggagagtttgtgcatgtgtcttgagctgtgtctatgtagataaaacatatcaacattgacaaatggaattgcattttaaaaaggtatagacaagctagccctcctgatactacctttctggaaaggaatttggaaagatccatcaatttttactctcactggcagactagg

SEQ ID NO: 232600 - DNA, 548 bp, Homo sapiens
tttcaatagttctttttgcctccaaaaacaatgctcatttcactatttcacagtgaaaagtctcccatgagatcattctgtattgcggatgggtagaataakgcactttactttctgcctcttgaatgattcagcagggaatgtctaacattcctgtcatcttcatctatagatttgcaggatatcaagttttattttttagtggacactctggattgacattctagtactgattcttttttgttgttgttatttccaaacagaaccctgattttgatcaaggatccaaccctccctcatgtagccacgtgattcagggtttcctgagttctgaggccataagttcaagaggtatgcctgattgatctaatgcagtgacgtccccagatcagcagcagcagcatcacctgataacatgctagtaatgtacattcctgggccaccgtggacttgctgaacacaggactctgtgggagcagactagcactttgtattttaaaacaagttcttcaagtgatgctaatgcatgctaaagcatgagaaccatt

SEQ ID NO: 232601 - DNA, 548 bp, Homo sapiens
tttcaatagttctttttgcctccaaaaacaatgctcatttcactatttcacagtgaaaagtctcccatgagatcattctgtattgcggatgggtagaataaggcactttactttctgcctcttgaatgattcagcagggaatgtctaacattcctgtcatcttcatctatagatttgcaggatatcaagttttattttttagtggacactctggattgacattctagtactgattcttttttgttgttgttatttccaaacagaaccctgattttgatcaaggatccaaccctccctcatgtagccacgtgattcagggtttcctgagttctgaggccataagttcaagaggtatgcctgattgatctaatgcagtgaygtccccagatcagcagcagcagcatcacctgataacatgctagtaatgtacattcctgggccaccgtggacttgctgaacacaggactctgtgggagcagactagcactttgtattttaaaacaagttcttcaagtgatgctaatgcatgctaaagcatgagaaccatt

SEQ ID NO: 232602 - DNA, 545 bp, Homo sapiens
atcttcttaatagagcatttaatatttattaagcgatgatttggtatgtgacagacacagttttaagcccttataaactcagtattattgatccattctacagatgctgcatatgtaaggtagttgtgaggatttgatgagtgactttgggtaagtcaccttatatatcaccatcagtctaatggggtcaggagaargtatacatttctacttcatctactggaagaaggaaaaaaatgtataatgtgctatgagagatacatatataatataaagtttttatctattatagatattatagatataaacattacaatactatatatatgtttagatgagctgaaactttgaattgagtgtacagtgagacttgtaataatctaacctcactaaatctaataatctatagatttagctatatatgatgtttaattcaccagttgtttgacaaaaaataattggttgagttaataaaaaatgatgcttgtgtgtgcatgtgactgagtgtgcatgggtgtgtgtgtgcatattacttttcaattagt

SEQ ID NO: 232603 - DNA, 500 bp, Homo sapiens
cacaactcattgttcctgagggaattctttaggaaaaaagttgacaggagatgattcayactagatgtaaatatgggtacaaaatgcagtggtagagagagtataagatctgaaatcagaaaagggaacttcaccatttgcttgcactgttattttttaaaaagctaacccatattcagtgttttcacctataaagtggagataatggagataattacaccaaaacattagaaatattgcaagggttcattgaaataaggaatactaatagcctaataagactctaggtatatagcagatgctatgaaaaaaaaatgtgttctctttcctaaacagccagccaaagtgctggtgtcctgccaatcacatcagcaggtcatttcacacagatcttcatggcttgttcttctgcttggccaagggctcatctaactctactaaaaacatttctttcctttaaaagtctttcccctcttgcggctgtctctctcatgccagca

SEQ ID NO: 232604 - DNA, 565 bp, Homo sapiens
agttatatggaatgaatgagatctagtatttgatagcacagtagagtgactacagttaaaaataatctattgtacatttttaaaagtataattagattgtttataacacaaatacatgataaatgcttgaaataatggatactccatttatccttatgtgattattatgcattgcatgcctgtatcaaaatatctcacgtaccccataaatctatatacctgctatgtaccaaaaaacattaaaaattwaaaaaattacaaaaaatgatttcatcaattactatggagtatattttggcaatcaaattgtctacttactatctatctatcacaaatacacctattcttctatccagaatttttacctttgggaatttatccttcatctgtatttcaaaaatttttcagaggtttatgtattaaaataattactgaatcattatttgtaataatacaaaattgagaaaaatccaaatgtccatatatgagacaatttagtaaatgagggtaggaattgttaatagaatgctaggcagaagttaaaaacacaaaggcaggtctattt

SEQ ID NO: 232605 - DNA, 577 bp, Homo sapiens
tttcatcactttgtacactgaacttaggagcaaccaaccagctttattatgttctttggttctccacatatggtaaaaggtattatatagagagagagtcactaaactccttgcctctcacaagcaatgaatcaggagtgtcagatgcatttattttggataactgtctaaacagctcacgccaagggctatcagtattctccatactattagaaatagagtctttagcatttttggatctaatcatattaagcagccaactcccagaaacccccaaaccaatgaaatatatatatatatatatatatatatatatrtatgtatatgttaaatattaactgacatgatcactaggtccaacaattggccatctgcaggctgaggaccaaggatagccagcccgagttccaaaactgaataacttggagtccaatgttcgagggcaggaagcatccagcatggcagaaagatgtaggctgggaggctaggccagtctatcttttcatgtttttctgcctgcttatattctagccacgctggcagctgattagattgtgtccacccagattaaggtggg

SEQ ID NO: 232606 - DNA, 590 bp, Homo sapiens
gccaccacagctggtaatgtgctgagtctcacctgaaaccaacaagtctgagagacccatccaaggccctcaatgtagtacttggatatcactgctggttattcaaggcccaaggtagcatcttcaggtagtaggtgatgaatactgccaggaatgggacctttacttcaaggcagtgggttcccttctagcccaggatgtgtctagaaatgccttggagctgcggcctggaatgggggcctcacaactgtgactggtgccctatcttgctgtggctgagcaggtatgcaggaagcaagacaaacacctcccccttttttgctttcctctcctaaagcagaaggataagatctcttttggagctgtgagatgtgcaggctgtggctaggggaggggtgacrccagcactccctcggctgccccagctggtgtctcagtatgtcatgtgccctcccagtccactatctctgggcctagttcagcactgggccttgcctaagagatgcagtccttatggcctagactgtctttcaagtttccttggagacacagagtgctatagcctgttgtggtgaggcttgtaggcactt

SEQ ID NO: 232607 - DNA, 643 bp, Homo sapiens
agctgtgattaaagacaatatcattatgctttgatttcttcaatctataaggataagaactaataccttaccttcacaaaattatttaaaaacttaattgaaaactaaatatgccttattaatatactgcttacctgaaaaggtacataaatttttcaaatgctggatagtttaatttttcaaaatttagatcaatttaaatatagttataaaattaagaaytatgaaccaactatgaggtgagtgctgccagttttatagttttattttgtgttggttcttttaatttacgctccactccacaattttgcaaaaattttgcttttatttcttatagaatactttaggtcagataatagtaatgcttgaaaaaaatcaaatttaatttaactatgttaatttaaattgcagttattttttataatagaatattttatagaatttaaaatgatggttaatcaaaataaaatcgattttatttgcagcaaatgggtctcatcaaagattctactagagttcaacattagtgtgctaaaatagacatctgtatgaaaagaacaatattaaaactatagtattgtaaagcatagaattttataagctaaattgagaatttttgagctagataaaacatttggtcagt

SEQ ID NO: 232608 - DNA, 643 bp, Homo sapiens
agctgtgattaaagacaatatcattatgctttgatttcttcaatctataaggataagaactaataccttaccttcacaaaattatttaaaaacttaattgaaaactaaatatgccttattaatatactgcttacctgaaaaggtacataaatttttcaaatgctggatagtttaatttttcaaaatttagatcaatttaaatatagttataaaattaagaattatgaaccaactatgaggtgagtgctgccagttttatagttttattttgtgytggttcttttaatttacgctccactccacaattttgcaaaaattttgcttttatttcttatagaatactttaggtcagataatagtaatgcttgaaaaaaatcaaatttaatttaactatgttaatttaaattgcagttattttttataatagaatattttatagaatttaaaatgatggttaatcaaaataaaatcgattttatttgcagcaaatgggtctcatcaaagattctactagagttcaacattagtgtgctaaaatagacatctgtatgaaaagaacaatattaaaactatagtattgtaaagcatagaattttataagctaaattgagaatttttgagctagataaaacatttggtcagt

SEQ ID NO: 232609 - DNA, 643 bp, Homo sapiens
agctgtgattaaagacaatatcattatgctttgatttcttcaatctataaggataagaactaataccttaccttcacaaaattatttaaaaacttaattgaaaactaaatatgccttattaatatactgcttacctgaaaaggtacataaatttttcaaatgctggatagtttaatttttcaaaatttagatcaatttaaatatagttataaaattaagaattatgaaccaactatgaggtgagtgctgccagttttatagttttattttgtgttggttcttttaatttaygctccactccacaattttgcaaaaattttgcttttatttcttatagaatactttaggtcagataatagtaatgcttgaaaaaaatcaaatttaatttaactatgttaatttaaattgcagttattttttataatagaatattttatagaatttaaaatgatggttaatcaaaataaaatcgattttatttgcagcaaatgggtctcatcaaagattctactagagttcaacattagtgtgctaaaatagacatctgtatgaaaagaacaatattaaaactatagtattgtaaagcatagaattttataagctaaattgagaatttttgagctagataaaacatttggtcagt

SEQ ID NO: 232610 - DNA, 643 bp, Homo sapiens
agctgtgattaaagacaatatcattatgctttgatttcttcaatctataaggataagaactaataccttaccttcacaaaattatttaaaaacttaattgaaaactaaatatgccttattaatatactgcttacctgaaaaggtacataaatttttcaaatgctggatagtttaatttttcaaaatttagatcaatttaaatatagttataaaattaagaattatgaaccaactatgaggtgagtgctgccagttttatagttttattttgtgttggttcttttaatttacgctccactccacaattttgcaaaaattttgcttttatttcttatagaatactttaggtcagataatagtaatgcttgaaaaaaatcaaatttaatttaactatgttaatttaaattgcagttattttytataatagaatattttatagaatttaaaatgatggttaatcaaaataaaatcgattttatttgcagcaaatgggtctcatcaaagattctactagagttcaacattagtgtgctaaaatagacatctgtatgaaaagaacaatattaaaactatagtattgtaaagcatagaattttataagctaaattgagaatttttgagctagataaaacatttggtcagt

SEQ ID NO: 232611 - DNA, 530 bp, Homo sapiens
actggccttttaacagggtaactrtgcattgggaaaaggcaaatgatcagatatttcagggagtactggacactggctctgagctgccaatgattccaggggacccaaaacgtcattgtggtcctccagttaaagtaggagcttatggaagtcagggaaataatatagttttagctcaagttcaacttacagtcggtctagtgggtccccagactcatcctgcggtcatttccccagtgccagaatgcataattggcctagacatacttagcagctggcagaaccccaacgctggctccctgactggtaagatgagtgctattatggtgggaaaggccaaatgaaagccattagagctgcctcctcctggaaaaatagtaaatcaaaactaatattgcatctctggaggggttgtggagattggtgtcactatcaaggccttaaaagacacagggatggtgatttccaccaaatccctattcaactttcccattggcctgtgtagaagacagatggatcttgaaagatga

SEQ ID NO: 232612 - DNA, 610 bp, Homo sapiens
ccacggtggcaaagttggcatgaartcaagtcagacagctgagatccatgattcccctctagctaagaatgatttaaatgcttcctccatgggcaggagtcagctgagttttgtccagttttcctttctgctttaacaggatagccctaagtttactgcctcacaattgctgtactctctttccactagtgcccagagatgctctccataccacaccactaccaccagggaaaaggcgtggggtggtggtggtgattcaggagtgtttttttgaactgttcagtgcttctttcagcaaaatgaagataaaaccagtttctatgagagcttgccttatttttggttcttatgaaggcgttttttctgtgtagacagttgttaaattagtgttcctgttgggggataaattgtggaggttttgattccgccatcttcccctgccttcccacctgcagcacactattactaacccatgtttctggtcaattagacaagagaattaaagatagaaggaaagtgacttcaaagaaagagattgaaattttatttgaatatttgaacaattgtctgaagataactggcttaagactcattgggtataaaaagaaca

SEQ ID NO: 232613 - DNA, 575 bp, Homo sapiens
tagggtacaatgattgggagatacaggtaaacatgcacttataataaatatgaattagatatatagtttgcaaatattttctcacattctgtaggttgcctgtttaccctgttgatagtttcttttgctgtgcagaagctctttagtttaatttagttaggtctcatttgtcaatttttgcttttgttgcaattgcctgtggcatttttgttttggaatctttgccagttcgtatgtccaaaacggtattttctaggttatcttctacggtttttatagttttaggttttacrtttaggtcttcaatcatttagttgattcttgtgtatggtataaagaaggggtccagtttcaatcttctgcatatggctagccagttatcctagcacttattgaatagagtcctttccctcttgcttttgtcagctttgtcaaaggtcagatggttgtaggtgtgtggctttatttcttgtctaatatccaggatctacaaggaacttaagcctacaagtaaaaaacaaacccagtaaaaagtgggcaaaggacatgaatagacacttttcaaaagaagacat

SEQ ID NO: 232614 - DNA, 575 bp, Homo sapiens
tagggtacaatgattgggagatacaggtaaacatgcacttataataaatatgaattagatatatagtttgcaaatattttctcacattctgtaggttgcctgtttaccctgttgatagtttcttttgctgtgcagaagctctttagtttaatttagttaggtctcatttgtcaatttttgcttttgttgcaattgcctgtggcatttttgttttggaatctttgccagttcgtatgtccaaaacggtattttctaggttatcttctacggtttttatagttttaggttttacatttaggtcttcaatcatttagttgattcttgtgtatggtataaagaaggggtccagtttcaatcttctgcatatggctagccagttatcctagcacttattgaatagagtcctttccctcttgcttttgtcagctttgtcaaaggtcagatggttgtaggtgtgtggctttatttcttgtctaatatccakgatctacaaggaacttaagcctacaagtaaaaaacaaacccagtaaaaagtgggcaaaggacatgaatagacacttttcaaaagaagacat

SEQ ID NO: 232615 - DNA, 596 bp, Homo sapiens
aaaatatttcaactctaaccaatttggtgtgatgttagctgtgggtttgtcatatatgatccctaytgtgttgggctatgtttcttttatacatgatttgttgagggtttttattataaagggatgtcgaattttctcaaatgctttttcagcatctattgaaataatcatatggttttcatccttgattatgttaatatgatgcatcacttttattgatttgcatatgttgaatcatccttgcagccatgggataccacttgatcatggtgaatgatcttttaatatgttgttgaattcagtttgctagtattttgttggaaaatttttacatatatgttccttgagaatattgatctgtaattttatttttgttgttattgttgctatgtccttgtctgtttttttttaactttaaacagggaggcttaatataaagaattatgtaaactatgataggagagaactatagacagaaagagaactctaacgggtaatctgagattgaaggagagtatcttaaataggacaaacttagtaaaagtcccttcccaagtttggatgtcatgcttcactggagaaggtatatttggaac

SEQ ID NO: 232616 - DNA, 587 bp, Homo sapiens
caaaaataaataagtaaataaatctgtacaccaaacccctgagtcacaagtttacctatataacaaacctgcacatgcactccaaacctaaaataaaattaaaagattaaaaataaattgctaaataaaaacttaatgtaaaacacatgcattagtcctggcttctaatgtagatgtgaactgatgtggagacagataagcatcaactaaccacttagacataaagaggcttttagtgagcttctgggaaagctgttctcccctgacaagaggcaaggacactgcaaaaggaaagctctaggaatcccttctctctgaccttgttttggattccattgtttgaagtcacatgactgtgaggtcaagatggtgatcaccttgcaaccattaggggcaagctggaacatgaaagacaacatgctaatattagtgaagcagaagaatagcaaragcagggatccttgtgaatatttctgagatgcttaactaatatcaatactatttacctctggatatctcataggcaaacatttaatttcttgtggtttcagccactgttaggcttttgattttttacacccgaaagc

SEQ ID NO: 232617 - DNA, 385 bp, Homo sapiens
tgtgggacaactggacaggactctttttttttctcccccctgagacagggtcttgctctgttgcccaggctggagtgcaaagatcatagctcactataacctcaagctcttcagctccagtgatcttcctgcctctgcctcccaaggagctgggactataggcatgtgccatgacccacactcagataatttttaacttttttgtagacatacggtctcaactgtgttgtccaggcttatttcaaactcctggtctcaagttatccttccactttggcctttcaragcactcggattataggtataagtcaccatgccttgccaggactccttaaatgagtcagtgtcctgaagaacagagcaaagtggtaggtggagggagata

SEQ ID NO: 232618 - DNA, 578 bp, Homo sapiens
gaattcagtgatttaagctataaagctggtattcttggccttagcttatcttgaggggggtggtatttatttacaaataaaaggattatcagcacttagctcagtgtctggcacatggaagaaggcttttaatgaatgcagaatgaatgaataaatgagagcaaatggtayagaatgagcctacacaaaggagatgtttctcctctagttctaccagttggcaagatccctacagctaaaaacagttccaccatataatctccagacctggcctggccacagagtagatcagactaaaaatagagcctgctaagcttgataaaaaagactgatattggcacaccctgtccttccagactcctgcaagcctcgctacttctactctggtgtctagaatccacctcacaggaaaaactaaagaaatgttttcctttaatgtccaaaatcacaccagcatatttggaagttagttttcaacaaaggttctactgactgagtcagttccctggatttagaaggaaataaatttcttaagccctaactagaacaagaaatcaggagttagttcatacttagtt

SEQ ID NO: 232619 - DNA, 631 bp, Homo sapiens
tttcaaaataacaataacattttctacaatataaatatatattattttacttcatttaatacttgcaaccttatttgatgtaagtaaactcattttagagaaaactgtatcacagacaaacttcaatactaacacccagaactgaatctacatttcttggcttcaaggtccagcatttttggcattacaaactttatagtgtctgtttatagtagaatttggggtgtggaaaaaagacattagcattcttgtctaaggttcaaaaattaagaatgggtctagataatactctttaagtcagtatgaacttaagggaataatttcaaacctacagtaatccctggttcataagtctttaaaagacgggacttgtttctagaaggatcccaagtataatatataaagtccaatgtatttattgcattartttttaaagactaccatcaaaacaagttacaaattgcaatatttgagaagtatgtaattattttatattacagatgtctatcaagttttttcctattttacatttttaccatcatatattctgataggatagaaatggacatgagataatttcagtaagataagattctggagatctcatagtccagttatttgaaaattactt

SEQ ID NO: 232620 - DNA, 631 bp, Homo sapiens
tttcaaaataacaataacattttctacaatataaatatatattattttacttcatttaatacttgcaaccttatttgatgtaagtaaactcattttagagaaaactgtatcacagacaaacttcaatactaacacccagaactgaatctacatttcttggcttcaaggtccagcatttttggcattacaaactttatagtgtctgtttatagtagaatttggggtgtggaaaaaagacattagcattcttgtctaaggttcaaaaattaagaatgggtctagataatactctttaagtcagtatgaacttaagggaataatttcaaacctacagtaatccctggttcataagtctttaaaagacgggacttgtttctagaaggatcccaagtataatatataaagtccaatgtatttattgcattagtttttaaagactaccatcaaaacaagttacaaattgcaatatttgagaagtatgtaattattttatattacagatgtctatcaagttttttcctattttacatttttaccatcatatattctgataggatrgaaatggacatgagataatttcagtaagataagattctggagatctcatagtccagttatttgaaaattactt

SEQ ID NO: 232621 - DNA, 578 bp, Homo sapiens
tgcctcattaaatgaggcaaacaaaaaatgaccaaatgactactgaaaacatagaggagaaaaaatactaagaaagtttacagagactttccagtaacaaaagttactggaacaaaaatctgttttgttgactcaatagtaatcaatattcacttttatgttgttttatgcttaagacaggaaaacctgagccttcctctttactatcagagcaaatggtaatcatgaagtgaagcaaattgattattgattactgattacttgaatttctatgttttataagtagagcaaccatctgttaacaggaataacaggttttagcagggaaaggattaagggttttattttcctcaactgaggcccaaaatgagtgagatttttcaagttaactttcattccatttggctcaggtgtcagggatctatatttaacttgtgttaggcatgcgtccgaagagctggaaggctsaggatgtcaatggctttcagatgtcaggataaccttaaggatagatgaagggttgagagcctgtgcctcatttctgagttctcagctgctatgccgtggaaatcctgttt

SEQ ID NO: 232622 - DNA, 619 bp, Homo sapiens
cttgctctaagcttctcgtttttgcatcatttactcttaaaatgctaagtaacttcacacaacataggaagcctctccagaataaaatatctgtagtatggactctaagctttaggattgataacttcctaaaattatttcttcttgaactatttcatctgaaatggggaataaatactagtcttgattttatcttggtctcctggggagacctttaatttctattagccccatccttttaagagctgtttgggcaataggtacatctaagcagatgcatagacaaagaattacagtgcagaaaggtatgagctgtgataagcttaatatacagggataagagcattccttacagacctttgctattgcctagagttggagcatcttgccggcatataaactccataaaggtaatggagctattccatttgtaactacttgtgttagtaacagcaatgtcccagtacctgactcatacataatragcactcaatagagagattttattcatttatttaaaatattgtctaaatatttcctaaatcaaaatattcatcttctactaaggactatgactaaaattttaagaattttgaatcacgtaaataacttagataca

SEQ ID NO: 232623 - DNA, 579 bp, Homo sapiens
cttgctctaagcttctcgtttttgcatcatttactcttaaaatgctaagtaacttcacacaacataggaagcctctccagaataaaatatctgtagtatggactctaagctttaggattgataacttcctaaaattatttcttcttgaactatttcatctgaaatggggaataaatactagtcttgattttatcttggtctcctggggagacctttaatttctattagccccatccttttaagagctgtttgggcaataggtacatctaagcagatgcatagacaaagaattacagtgcagaaaggtatgagctgtgataagcttaatatacagggataagagcattccttacagacctttgctattgcctagagttggagcatcttgccggcatataaactccataaaggtaatggagctattccatttgtaactacttgtgttagtaacagcaatgtcccagtacctgactcatacataatgagcactcaatagagagattttattcatttatttaaaatattgtctaaatatttcytaaatcaaaatattcatcttctactaaggactatgactaa

SEQ ID NO: 232624 - DNA, 585 bp, Homo sapiens
aatttactgaacaggaaactgtagttaagaagtaaaaatcacagtgaaaaattttaacttttaatgggacaaagaggcttgaatcttttacggatgagagatgcttgtcasgggcctaagagatggggtttatttaagtctagtcagcagttttgattcttaaatttgaatagttcaaaagtcaaattagagtaggatcctgataactgagttgattccttgttaacagtaataaaaggtaaatattatcaataaatataaaatatctaccagttacttgggaagttaatatagtacttttggagtatattttatacagaaccaaatgcatataattagctaatgtgcttttgggtgtctatattttgtaataatactatctgaaaagttgttacagataaacatttattatttttctgaaagtcaaagggatattttgtatgcccggcttagcagcagttgtctatttgaaatgaaaataaaagagcattaatgccaatcagctttcttactagaaatattcctgtacttgatgtttttccacaaactcttaacacatcacagatattcttaaactacttgtat

SEQ ID NO: 232625 - DNA, 567 bp, Homo sapiens
ttctgactgggtctatgtatttaaaatgattgagcaacacatacaatatcagcagcaaagtgcaaaaagtgcttgaaaatagaggaaaggacagagaaaaatggtgaagcagtaacagaagcaaagataaatggatacaagatggaagaaaatacgacaatgtcttataaaaatcrtatgtctaaggtctaaattgtagttactgttcacaaagagcaatgagaaattctgaattctattttttattgtatatagtgaagtatttatttttttaaattttctatattcataaggtacaacatgatgttttgatatatttatacattggggaatgattaaatctggcctattaacttatccatcactgcacatacttatccatgttttgtggtgagaaccctcaaaatctactctctgggcagttttcaaaaatacaatacattgttattaactatcatccacatgctgtataatataagtcccaaacattccccctgtctaactgacactttgtatcttttaaccaagaactccccaagcccctctggtaaccacccttctaatctc

SEQ ID NO: 232626 - DNA, 476 bp, Homo sapiens
tagtttgagatattagaccttctgcttgtgtgtgtcttcctcaatttctggtagtcaacacatcagaattattactgtggattctaaagcccttttaaaactgaaaacaaagtgtaaactgatgctgcttataccytcttaaagcttttccttttatatttaaaaacttacattttaaaaatgaagataattttgtccttatgacatgtaagcatttaagttattggaatataaaaacatgaggtttgataagtatcttgcttaattaaaatcttattatctgtcctgctatgtctgcccctgctgcacatcaaggtatgttgcgtatttagatttttcacagatcagaaaatttccatcctctgtagtctagtaggtggtaaggcttccagccttgaatgggccttccatcaacaagctcctatatagaaagcagttagtattccttgctctaaacagaggagtttccccccttt

SEQ ID NO: 232627 - DNA, 476 bp, Homo sapiens
tagtttgagatattagaccttctgcttgtgtgtgtcttcctcaatttctggtagtcaacacatcagaattattactgtggattctaaagcccttttaaaactgaaaacaaagtgtaaactgatgctgcttataccctcttaaagcttttccttttatatttaaaaacttacattttaaaaatgaagataattttgtycttatgacatgtaagcatttaagttattggaatataaaaacatgaggtttgataagtatcttgcttaattaaaatcttattatctgtcctgctatgtctgcccctgctgcacatcaaggtatgttgcgtatttagatttttcacagatcagaaaatttccatcctctgtagtctagtaggtggtaaggcttccagccttgaatgggccttccatcaacaagctcctatatagaaagcagttagtattccttgctctaaacagaggagtttccccccttt

SEQ ID NO: 232628 - DNA, 448 bp, Homo sapiens
aatcaatgttaaattaactttcatctgaaaatgatttgaacttctatttattgttaatattattagagaatatattttagtaatttaagcacagaaaaacaggaatatgaataatttgaacatttgctgggggggaaaaaacaaacaaacaaacaaaaaaaaccctcttcttccctaattagatatgtcaattcttcagtagactgaattgtagctatgtttggttatattttaaaatgaaaacaagatgattgaaatgtgtgttatccaatgttatgttaatatatttttatttcatttgtggctkctttggtactaatctttttctaataaaatgtgttaaacaggttaaaatactaaaattattcttttgttttctaaaccatcatcttttttaaagcactttatctcttttactcaaaccttccatttttaatgctactctaac

SEQ ID NO: 232629 - DNA, 511 bp, Homo sapiens
aaaactagacagaagcattctcagaaacttactcgtgatgtgtgtcctcaactaaaggagtagaaccttcsttttcatagagaagttttgaaacgctctttttgtggaatctgcaagtggatatttggctagttttgaggatttcgttggaagcgggaattcatacaaattgcagactgcagcgttctgagaaacatctttgtgatgtttgtattcaggacacagagttgaacattccctatcatagagcaggtttgaatcactccttttgtagtatctggaagtggacatttggagcgctttcaggcctatgttggaaaaggaaatatcttcccataacaactagacagaagcattctcagaaacttatttgagatgtgtgtactcaactaagagaattgaaccaccgttttgaaggagcagttttgaaacactctttttctggaatctgcaagtggatatttggctagctttggggatttcgctggaagcgggaatacatataaaaagc

SEQ ID NO: 232630 - DNA, 430 bp, Homo sapiens
gaattcatacaaattgcagactgcagcgttctgagaaacatctttgtgatgtttgtattcaggacacagagttgaacattccctatcatagagyaggtttgaatcactccttttgtagtatctggaagtggacatttggagcgctttcaggcctatgttggaaaaggaaatatcttcccataacaactagacagaagcattctcagaaacttatttgagatgtgtgtactcaactaagagaattgaaccaccgttttgaaggagcagttttgaaacactctttttctggaatctgcaagtggatatttggctagctttggggatttcgctggaagcgggaatacatataaaaagcacacagcagcgttctgagaaactgctttctgatgtttgcattcaagtcaaaagttgaacactccctttcatagag

SEQ ID NO: 232631 - DNA, 245 bp, Homo sapiens
ttgaacattccctatcatagagcaggtttgaatcactccttttgtagtatctggaagtggacatttggagcgctttcaggcytatgttggaaaaggaaatatcttcccataacaactagacagaagcattctcagaaacttatttgagatgtgtgtactcaactaagagaattgaaccaccgttttgaaggagcagttttgaaacactctttttctggaatctgcaagtggatatttggctagct

SEQ ID NO: 232632 - DNA, 385 bp, Homo sapiens
gaatcactccttttgtagtatctggaagtggacatttggagcgctttcaggcctatgttggaaaaggaaatatcttcccataacaactagacagaagcattctcagaaacttatttgagaygtgtgtactcaactaagagaattgaaccaccgttttgaaggagcagttttgaaacactctttttctggaatctgcaagtggatatttggctagctttggggatttcgctggaagcgggaatacatataaaaagcacacagcagcgttctgagaaactgctttctgatgtttgcattcaagtcaaaagttgaacactccctttcatagagcagtcctgaaacactccttttttagtatctggacctggacttttggagcgctttc

SEQ ID NO: 232633 - DNA, 387 bp, Homo sapiens
tgtactcaactaagagaattgaaccaccgttttgaargagcagttttgaaacactctttttctggaatctgcaagtggatatttggctagctttggggatttcgctggaagcgggaatacatataaaaagcacacagcagcgttctgagaaactgctttctgatgtttgcattcaagtcaaaagttgaacactccctttcatagagcagtcctgaaacactccttttttagtatctggacctggacttttggagcgctttcagggctaaggtgaaaaaggaaatatcttcccataaaaactggacagaagcattctcagaaacttgtttatgctgtatctactcaactaacaaagttgaacctttcttttgatagagcagttttgaa

SEQ ID NO: 232634 - DNA, 459 bp, Homo sapiens
gaattcatacaaattgcagactgcagcgttctgagaaacatctttgtgatgtttgtattcaggacacagagttgaacattccctatcatagagcaggtttgaatcactccttttgtagtatctggaagtggacatttggagcgctttcaggcctatgttggaaaaggaaatatcttcccataacaactagacagaagcattctcagaaacttatttgagatgtgtgtactcaactaagagaattgaaccaccgttttgaaggagcagttttgaaacwctctttttctggaatctgcaagtggatatttggctagctttggggatttcgctggaagcgggaatacatataaaaagcacacagcagcgttctgagaaactgctttctgatgtttgcattcaagtcaaaagttgaacactccctttcatagagcagtcctgaaacactccttttttagtatc

SEQ ID NO: 232635 - DNA, 650 bp, Homo sapiens
tctgagaaacatctttgtgatgtttgtattcaggacacagagttgaacattccctatcatagagcaggtttgaatcactccttttgtagtatctggaagtggacatttggagcgctttcaggcctatgttggaaaaggaaatatcttcccataacaactagacagaagcattctcagaaacttatttgagatgtgtgtactcaactaagagaattgaaccaccgttttgaaggagcagttttgaaacactctttttctggaatctgcawgtggatatttggctagctttggggatttcgctggaagcgggaatacatataaaaagcacacagcagcgttctgagaaactgctttctgatgtttgcattcaagtcaaaagttgaacactccctttcatagagcagtcctgaaacactccttttttagtatctggacctggacttttggagcgctttcagggctaaggtgaaaaaggaaatatcttcccataaaaactggacagaagcattctcagaaacttgtttatgctgtatctactcaactaacaaagttgaacctttcttttgatagagcagttttgaaatgctctttttgtggaatctgcaagtggatatttggctagttttgaggatttcgttggaagcgggaat

SEQ ID NO: 232636 - DNA, 430 bp, Homo sapiens
gaattcatacaaattgcagactgcagcgttctgagaaacatctttgtgatgtttgtattcaggacacagagttgaacattccctatcatagagcaggtttgaatcactccttttgtagtatctggaagtggacatttggagcgctttcaggcctatgttggaaaaggaaatatcttcccataacaactagacagaagcattctcagaaacttatttgagatgtgtgtactcaactaagagaattgaaccaccgttttgaaggagcagttttgaaacactctttttctggaatctgcaagtggatatttggctagctttkgggatttcgctggaagcgggaatacatataaaaagcacacagcagcgttctgagaaactgctttctgatgtttgcattcaagtcaaaagttgaacactccctttcatagag

SEQ ID NO: 232637 - DNA, 580 bp, Homo sapiens
tctgagaaacatctttgtgatgtttgtattcaggacacagagttgaacattccctatcatagagcaggtttgaatcactccttttgtagtatctggaagtggacatttggagcgctttcaggcctatgttggaaaaggaaatatcttcccataacaactagacagaagcattctcagaaacttatttgagatgtgtgtactcaactaagagaattgaaccaccgttttgaaggagcagttttgaaacactctttttctggaatctgcaagtggatatttggctagctttggggatttcgctggaagcgggaatacatataaaaagcmcacagcagcgttctgagaaactgctttctgatgtttgcattcaagtcaaaagttgaacactccctttcatagagcagtcctgaaacactccttttttagtatctggacctggacttttggagcgctttcagggctaaggtgaaaaaggaaatatcttcccataaaaactggacagaagcattctcagaaacttgtttatgctgtatctactcaactaacaaagttgaacctttcttttgatagagcagttttg

SEQ ID NO: 232638 - DNA, 387 bp, Homo sapiens
tgtactcaactaagagaattgaaccaccgttttgaaggagcagttttgaaacactctttttctggaatctgcaagtggatatttggctagctttggggatttcgctggaagcgggaatacatataaaaagcacacagcagcgttckgagaaactgctttctgatgtttgcattcaagtcaaaagttgaacactccctttcatagagcagtcctgaaacactccttttttagtatctggacctggacttttggagcgctttcagggctaaggtgaaaaaggaaatatcttcccataaaaactggacagaagcattctcagaaacttgtttatgctgtatctactcaactaacaaagttgaacctttcttttgatagagcagttttgaa

SEQ ID NO: 232639 - DNA, 459 bp, Homo sapiens
gaattcatacaaattgcagactgcagcgttctgagaaacatctttgtgatgtttgtattcaggacacagagttgaacattccctatcatagagcaggtttgaatcactccttttgtagtatctggaagtggacatttggagcgctttcaggcctatgttggaaaaggaaatatcttcccataacaactagacagaagcattctcagaaacttatttgagatgtgtgtactcaactaagagaattgaaccaccgttttgaaggagcagttttgaaacactctttttctggaatctgcaagtggatatttggctagctttggggatttcgctggaagcgggaatacatataaaaagcacacagcagcgttctgagaaactgctttctgatgtttgcattcaagtcaaaagttgaacactccctttcatagagcagtcytgaaacactccttttttagtatc

SEQ ID NO: 232640 - DNA, 587 bp, Homo sapiens
aggtttgaatcactccttttgtagtatctggaagtggacatttggagcgctttcaggcctatgttggaaaaggaaatatcttcccataacaactagacagaagcattctcagaaacttatttgagatgtgtgtactcaactaagagaattgaaccaccgttttgaaggagcagttttgaaacactctttttctggaatctgcaagtggatatttggctagctttggggatttcgctggaagcgggaatacatataaaaagcacacagcagcgttctgagaaactgctttctgatgtttgcattcaagtcaaaagttgaacactccctttcatagagcagtcctgaaacacyccttttttagtatctggacctggacttttggagcgctttcagggctaaggtgaaaaaggaaatatcttcccataaaaactggacagaagcattctcagaaacttgtttatgctgtatctactcaactaacaaagttgaacctttcttttgatagagcagttttgaaatgctctttttgtggaatctgcaagtggatatttggctagttttgaggatttcgttggaagcgggaattc

SEQ ID NO: 232641 - DNA, 650 bp, Homo sapiens
tctgagaaacatctttgtgatgtttgtattcaggacacagagttgaacattccctatcatagagcaggtttgaatcactccttttgtagtatctggaagtggacatttggagcgctttcaggcctatgttggaaaaggaaatatcttcccataacaactagacagaagcattctcagaaacttatttgagatgtgtgtactcaactaagagaattgaaccaccgttttgaaggagcagttttgaaacactctttttctggaatctgcaagtggatatttggctagctttggggatttcgctggaagcgggaatacatataaaaagcacacagcagcgttctgagaaactgctttctgatgtttgcattcaagtcaaaagttgaacactccctttcatagagcagtcctgaaacactccttttktagtatctggacctggacttttggagcgctttcagggctaaggtgaaaaaggaaatatcttcccataaaaactggacagaagcattctcagaaacttgtttatgctgtatctactcaactaacaaagttgaacctttcttttgatagagcagttttgaaatgctctttttgtggaatctgcaagtggatatttggctagttttgaggatttcgttggaagcgggaat

SEQ ID NO: 232642 - DNA, 651 bp, Homo sapiens
tctgagaaacatctttgtgatgtttgtattcaggacacagagttgaacattccctatcatagagcaggtttgaatcactccttttgtagtatctggaagtggacatttggagcgctttcaggcctatgttggaaaaggaaatatcttcccataacaactagacagaagcattctcagaaacttatttgagatgtgtgtactcaactaagagaattgaaccaccgttttgaaggagcagttttgaaacactctttttctggaatctgcaagtggatatttggctagctttggggatttcgctggaagcgggaatacatataaaaagcacacagcagcgttctgagaaactgctttctgatgtttgcattcaagtcaaaagttgaacactccctttcatagagcagtcctgaaacactccttttttagtakctggacctggacttttggagcgctttcagggctaaggtgaaaaaggaaatatcttcccataaaaactggacagaagcattctcagaaacttgtttatgctgtatctactcaactaacaaagttgaacctttcttttgatagagcagttttgaaatgctctttttgtggaatctgcaagtggatatttggctagttttgaggatttcgttggaagcgggaatt

SEQ ID NO: 232643 - DNA, 650 bp, Homo sapiens
tctgagaaacatctttgtgatgtttgtattcaggacacagagttgaacattccctatcatagagcaggtttgaatcactccttttgtagtatctggaagtggacatttggagcgctttcaggcctatgttggaaaaggaaatatcttcccataacaactagacagaagcattctcagaaacttatttgagatgtgtgtactcaactaagagaattgaaccaccgttttgaaggagcagttttgaaacactctttttctggaatctgcaagtggatatttggctagctttggggatttcgctggaagcgggaatacatataaaaagcacacagcagcgttctgagaaactgctttctgatgtttgcattcaagtcaaaagttgaacactccctttcatagagcagtcctgaaacactccttttttagtatctggamctggacttttggagcgctttcagggctaaggtgaaaaaggaaatatcttcccataaaaactggacagaagcattctcagaaacttgtttatgctgtatctactcaactaacaaagttgaacctttcttttgatagagcagttttgaaatgctctttttgtggaatctgcaagtggatatttggctagttttgaggatttcgttggaagcgggaat

SEQ ID NO: 232644 - DNA, 641 bp, Homo sapiens
gaattcatacaaattgcagactgcagcgttctgagaaacatctttgtgatgtttgtattcaggacacagagttgaacattccctatcatagagcaggtttgaatcactccttttgtagtatctggaagtggacatttggagcgctttcaggcctatgttggaaaaggaaatatcttcccataacaactagacagaagcattctcagaaacttatttgagatgtgtgtactcaactaagagaattgaaccaccgttttgaaggagcagttttgaaacactctttttctggaatctgcaagtggatatttggctagctttggggatttcgctggaagcgggaatacatataaaaagcacacagcagcgttctgagaaactgctttctgatgtttgcattcaagtcaaaagttgaacactccctttcatagagcagtcctgaaacactccttttttagtatctggacctgsacttttggagcgctttcagggctaaggtgaaaaaggaaatatcttcccataaaaactggacagaagcattctcagaaacttgtttatgctgtatctactcaactaacaaagttgaacctttcttttgatagagcagttttgaaatgctctttttgtggaatctgcaagtggat

SEQ ID NO: 232645 - DNA, 587 bp, Homo sapiens
aggtttgaatcactccttttgtagtatctggaagtggacatttggagcgctttcaggcctatgttggaaaaggaaatatcttcccataacaactagacagaagcattctcagaaacttatttgagatgtgtgtactcaactaagagaattgaaccaccgttttgaaggagcagttttgaaacactctttttctggaatctgcaagtggatatttggctagctttggggatttcgctggaagcgggaatacatataaaaagcacacagcagcgttctgagaaactgctttctgatgtttgcattcaagtcaaaagttgaacactccctttcatagagcagtcctgaaacactccttttttagtatctggacctggacttttggagcgmtttcagggctaaggtgaaaaaggaaatatcttcccataaaaactggacagaagcattctcagaaacttgtttatgctgtatctactcaactaacaaagttgaacctttcttttgatagagcagttttgaaatgctctttttgtggaatctgcaagtggatatttggctagttttgaggatttcgttggaagcgggaattc

SEQ ID NO: 232646 - DNA, 587 bp, Homo sapiens
aggtttgaatcactccttttgtagtatctggaagtggacatttggagcgctttcaggcctatgttggaaaaggaaatatcttcccataacaactagacagaagcattctcagaaacttatttgagatgtgtgtactcaactaagagaattgaaccaccgttttgaaggagcagttttgaaacactctttttctggaatctgcaagtggatatttggctagctttggggatttcgctggaagcgggaatacatataaaaagcacacagcagcgttctgagaaactgctttctgatgtttgcattcaagtcaaaagttgaacactccctttcatagagcagtcctgaaacactccttttttagtatctggacctggacttttggagcgctttcagggctaaggtgaaaaaggaaatatcttcccatraaaactggacagaagcattctcagaaacttgtttatgctgtatctactcaactaacaaagttgaacctttcttttgatagagcagttttgaaatgctctttttgtggaatctgcaagtggatatttggctagttttgaggatttcgttggaagcgggaattc

SEQ ID NO: 232647 - DNA, 650 bp, Homo sapiens
tctgagaaacatctttgtgatgtttgtattcaggacacagagttgaacattccctatcatagagcaggtttgaatcactccttttgtagtatctggaagtggacatttggagcgctttcaggcctatgttggaaaaggaaatatcttcccataacaactagacagaagcattctcagaaacttatttgagatgtgtgtactcaactaagagaattgaaccaccgttttgaaggagcagttttgaaacactctttttctggaatctgcaagtggatatttggctagctttggggatttcgctggaagcgggaatacatataaaaagcacacagcagcgttctgagaaactgctttctgatgtttgcattcaagtcaaaagttgaacactccctttcatagagcagtcctgaaacactccttttttagtatctggacctggacttttggagcgctttcagggctaaggtgaaaaaggaaatatcttcccataaaaactggacagaagcattctcagaaacttgtttatgctgtatctactcaactaacaaagttgaacytttcttttgatagagcagttttgaaatgctctttttgtggaatctgcaagtggatatttggctagttttgaggatttcgttggaagcgggaat

SEQ ID NO: 232648 - DNA, 548 bp, Homo sapiens
ttttggagcgctttcagggctaaggtgaaaaaggaaatatcttcccataaaaactggacagaagcattctcagaaacttgtttatgctgtatctactcaactaacaaagttgaacctttcttttgatagagcagttttgaaatgstctttttgtggaatctgcaagtggatatttggctagttttgaggatttcgttggaagcgggaattcatacaaattgcagactgcagcgttctgagaaacatctttgtgatgtttgtattcaggacacagagttgaacattccctatcatagagcaggttggaatcactccttttgtagtatctggaagtggacatttggagcgctttcaggcctatgttgaaaaaggaaatatcttcccataacaactagacacaagcattctcagaaacttgtttgtgatgtgtgccctctactgacagagttgaacctttcttttcatagagcagttttgaaacactctttttgtagaatctgcaagaggatatttgcatagctttgaggatttcgtgggaaacgggattg

SEQ ID NO: 232649 - DNA, 548 bp, Homo sapiens
ttttggagcgctttcagggctaaggtgaaaaaggaaatatcttcccataaaaactggacagaagcattctcagaaacttgtttatgctgtatctactcaactaacaaagttgaacctttcttttgatagagcagttttgaaatgctctttttgtggaatctgcaagtggatatttggctagttttgaggatttcgttggaagcgggaattcatacaaattgcagactgcagcgttctgagaaacatctttgtgatgtttgtattcaggacacagagttgaacattccctatcatagagcaggttggaatcactccttttgtagtatctggaagtggacatttggagcgctttcaggcctatkttgaaaaaggaaatatcttcccataacaactagacacaagcattctcagaaacttgtttgtgatgtgtgccctctactgacagagttgaacctttcttttcatagagcagttttgaaacactctttttgtagaatctgcaagaggatatttgcatagctttgaggatttcgtgggaaacgggattg

SEQ ID NO: 232650 - DNA, 548 bp, Homo sapiens
ttttggagcgctttcagggctaaggtgaaaaaggaaatatcttcccataaaaactggacagaagcattctcagaaacttgtttatgctgtatctactcaactaacaaagttgaacctttcttttgatagagcagttttgaaatgctctttttgtggaatctgcaagtggatatttggctagttttgaggatttcgttggaagcgggaattcatacaaattgcagactgcagcgttctgagaaacatctttgtgatgtttgtattcaggacacagagttgaacattccctatcatagagcaggttggaatcactccttttgtagtatctggaagtggacatttggagcgctttcaggcctatgttgaaaarggaaatatcttcccataacaactagacacaagcattctcagaaacttgtttgtgatgtgtgccctctactgacagagttgaacctttcttttcatagagcagttttgaaacactctttttgtagaatctgcaagaggatatttgcatagctttgaggatttcgtgggaaacgggattg

SEQ ID NO: 232651 - DNA, 548 bp, Homo sapiens
ttttggagcgctttcagggctaaggtgaaaaaggaaatatcttcccataaaaactggacagaagcattctcagaaacttgtttatgctgtatctactcaactaacaaagttgaacctttcttttgatagagcagttttgaaatgctctttttgtggaatctgcaagtggatatttggctagttttgaggatttcgttggaagcgggaattcatacaaattgcagactgcagcgttctgagaaacatctttgtgatgtttgtattcaggacacagagttgaacattccctatcatagagcaggttggaatcactccttttgtagtatctggaagtggacatttggagcgctttcaggcctatgttgaaaaaggaaatatcttcccrtaacaactagacacaagcattctcagaaacttgtttgtgatgtgtgccctctactgacagagttgaacctttcttttcatagagcagttttgaaacactctttttgtagaatctgcaagaggatatttgcatagctttgaggatttcgtgggaaacgggattg

SEQ ID NO: 232652 - DNA, 493 bp, Homo sapiens
tttggctagttttgaggatttcgttggaagcgggaattcatacaaattgcagactgcagcgttctgagaaacatctttgtgatgtttgtattcaggacacagagttgaacattccctatcatagagcaggttggaatcactccttttgtagtatctggaagtggacatttggagcgctttcaggcctatgttgaaaaaggaaatatcttcccataacaactagacacaagcattctcagaaacttgtttgtgatgtgtgccctctactgacagagttgaacctttcttttcatagagcakttttgaaacactctttttgtagaatctgcaagaggatatttgcatagctttgaggatttcgtgggaaacgggattgtcttcaggtaaaatctagacagaagcattctcagaaacttctttgggatgtttgcattcaagtcacagagtagaacattccctttggtagagcaggtttcaaacactctttttgtag

SEQ ID NO: 232653 - DNA, 343 bp, Homo sapiens
gaattcatacaaattgcagactgcagcgttctgagaaacatctttgtgatgtttgtattcaggacacagagttgaacattccctatcatagagcaggttggaatcactccttttgtagtatctggaagtggacatttggagcgctttcaggcctatgttgaaaaaggaaatatcttcccataacaactagacacaagcattctcagaaacttgtttgtgatgtgtgccctctactgacagagttgaacctttcttttcatagagcagtttygaaacactctttttgtagaatctgcaagaggatatttgcatagctttgaggatttcgtgggaaacgggattg

SEQ ID NO: 232654 - DNA, 539 bp, Homo sapiens
tactcgtgatgtgtgtcctcaactaaaggagtagaacctttcttttcatagagaagttttgaaacgctctttttgtggaatctscaagtggatatttggctagtttggaggatttcgttggaagcgggaattcatacaaattgcagactgcagcgttctgagaaacatctttgtgatgtttgtattcaggacacagagttgaacattccctatcatagagcaggtttgaatcactccttttgtagtatctggaagtggacatttggagcgctttcaggcctatgttggaaaaggaaatatcttcccataacaactagacagaagcattctcagaaacttatttgagatgtgtgtactcaactaagagaattgaaccaccgttttgaaggagcagttttgaaacactctttttctggaatctgcaagtggatatttggctagctttggggatttcgctggaagcgggaatacatataaaaagcacacagcagcgttctgagaaactgctttctgatgtttgcattcaagtcaaaagttga

SEQ ID NO: 232655 - DNA, 539 bp, Homo sapiens
tactcgtgatgtgtgtcctcaactaaaggagtagaacctttcttttcatagagaagttttgaaacgctctttttgtggaatctgcaagtggatatttggctagtttggaggatttcgttggaagcgggaattcatacaaattgcagactgcagcgttctgagaaacatckttgtgatgtttgtattcaggacacagagttgaacattccctatcatagagcaggtttgaatcactccttttgtagtatctggaagtggacatttggagcgctttcaggcctatgttggaaaaggaaatatcttcccataacaactagacagaagcattctcagaaacttatttgagatgtgtgtactcaactaagagaattgaaccaccgttttgaaggagcagttttgaaacactctttttctggaatctgcaagtggatatttggctagctttggggatttcgctggaagcgggaatacatataaaaagcacacagcagcgttctgagaaactgctttctgatgtttgcattcaagtcaaaagttga

SEQ ID NO: 232656 - DNA, 400 bp, Homo sapiens
gaattcatacaaattgcagactgcagcgttctgagaaacatctttgtgatgtttgtattcaggacacagagttgaacattccctatcatagagcaggtttgaatcactccttttgtmgtatctggaagtggacatttggagcgctttcaggcctatgttggaaaaggaaatatcttcccataacaactagacagaagcattctcagaaacttatttgagatgtgtgtactcaactaagagaattgaaccaccgttttgaaggagcagttttgaaacactctttttctggaatctgcaagtggatatttggctagctttggggatttcgctggaagcgggaatacatataaaaagcacacagcagcgttctgagaaactgctttctgatgtttgcattcaa

SEQ ID NO: 232657 - DNA, 400 bp, Homo sapiens
gaattcatacaaattgcagactgcagcgttctgagaaacatctttgtgatgtttgtattcaggacacagagttgaacattccctatcatagagcaggtttgaatcactccttttgtagtatctggaagtggacatttggagcgctttcaggcctatgttggaaaaggaaatatcytcccataacaactagacagaagcattctcagaaacttatttgagatgtgtgtactcaactaagagaattgaaccaccgttttgaaggagcagttttgaaacactctttttctggaatctgcaagtggatatttggctagctttggggatttcgctggaagcgggaatacatataaaaagcacacagcagcgttctgagaaactgctttctgatgtttgcattcaa

SEQ ID NO: 232658 - DNA, 646 bp, Homo sapiens
gaattcatacaaattgcagactgcagcgttctgagaaacatctttgtgatgtttgtattcaggacacagagttgaacattccctatcatagagcaggtttgaatcactccttttgtagtatctggaagtggacatttggagcgctttcaggcctatgttggaaaaggaaatatcttcccataacaactagacagaagcattcycagaaacttatttgagatgtgtgtactcaactaagagaattgaaccaccgttttgaaggagcagttttgaaacactctttttctggaatctgcaagtggatatttggctagctttggggatttcgctggaagcgggaatacatataaaaagcacacagcagcgttctgagaaactgctttctgatgtttgcattcaagtcaaaagttgaacactccctttcatagagcagtcttgaaacaccccttttgtagtatctggaactggacttttggagcgatttcagggctaaggtgaaaaaggaaatatcttcccataaaaactggacagaagcattctcagaaacttgtttatgctgtatctactcaactaacaaagttgaacctttcttttgatagagcagttttgaaatggtctttttgtggaatctgcaagtggatatttg

SEQ ID NO: 232659 - DNA, 646 bp, Homo sapiens
gaattcatacaaattgcagactgcagcgttctgagaaacatctttgtgatgtttgtattcaggacacagagttgaacattccctatcatagagcaggtttgaatcactccttttgtagtatctggaagtggacatttggagcgctttcaggcctatgttggaaaaggaaatatcttcccataacaactagacagaagcattctcagaaacttattygagatgtgtgtactcaactaagagaattgaaccaccgttttgaaggagcagttttgaaacactctttttctggaatctgcaagtggatatttggctagctttggggatttcgctggaagcgggaatacatataaaaagcacacagcagcgttctgagaaactgctttctgatgtttgcattcaagtcaaaagttgaacactccctttcatagagcagtcttgaaacaccccttttgtagtatctggaactggacttttggagcgatttcagggctaaggtgaaaaaggaaatatcttcccataaaaactggacagaagcattctcagaaacttgtttatgctgtatctactcaactaacaaagttgaacctttcttttgatagagcagttttgaaatggtctttttgtggaatctgcaagtggatatttg

SEQ ID NO: 232660 - DNA, 646 bp, Homo sapiens
gaattcatacaaattgcagactgcagcgttctgagaaacatctttgtgatgtttgtattcaggacacagagttgaacattccctatcatagagcaggtttgaatcactccttttgtagtatctggaagtggacatttggagcgctttcaggcctatgttggaaaaggaaatatcttcccataacaactagacagaagcattctcagaaacttatttgagatgtgtgtactcaactaagagaattgaaccaccgttttgaaggagcagtttkgaaacactctttttctggaatctgcaagtggatatttggctagctttggggatttcgctggaagcgggaatacatataaaaagcacacagcagcgttctgagaaactgctttctgatgtttgcattcaagtcaaaagttgaacactccctttcatagagcagtcttgaaacaccccttttgtagtatctggaactggacttttggagcgatttcagggctaaggtgaaaaaggaaatatcttcccataaaaactggacagaagcattctcagaaacttgtttatgctgtatctactcaactaacaaagttgaacctttcttttgatagagcagttttgaaatggtctttttgtggaatctgcaagtggatatttg

SEQ ID NO: 232661 - DNA, 363 bp, Homo sapiens
cagaagcattctcagaaacttatttgagatgtgtgtactcaactaagagaattgaaccaccgttttgaaggagcagttttgaaacactcttttyctggaatctgcaagtggatatttggctagctttggggatttcgctggaagcgggaatacatataaaaagcacacagcagcgttctgagaaactgctttctgatgtttgcattcaagtcaaaagttgaacactccctttcatagagcagtcttgaaacaccccttttgtagtatctggaactggacttttggagcgatttcagggctaaggtgaaaaaggaaatatcttcccataaaaactggacagaagcattctcagaaacttgttta

SEQ ID NO: 232662 - DNA, 539 bp, Homo sapiens
tactcgtgatgtgtgtcctcaactaaaggagtagaacctttcttttcatagagaagttttgaaacgctctttttgtggaatctgcaagtggatatttggctagtttggaggatttcgttggaagcgggaattcatacaaattgcagactgcagcgttctgagaaacatctttgtgatgtttgtattcaggacacagagttgaacattccctatcatagagcaggtttgaatcactccttttgtagtatctggaagtggacatttggagcgctttcaggcctatgttggaaaaggaaatatcttcccataacaactagacagaagcattctcagaaacttatttgagatgtgtgtactcaactaagagaattgaaccaccgttttgaaggagcagttttgaaacactctttttctggaatctgcaagwggatatttggctagctttggggatttcgctggaagcgggaatacatataaaaagcacacagcagcgttctgagaaactgctttctgatgtttgcattcaagtcaaaagttga

SEQ ID NO: 232663 - DNA, 401 bp, Homo sapiens
aggagcagttttgaaacactctttttctggaatctgcaagtggatatttggctagctttggggatttcgctggaagcgggaatacatataaaaagcacacagcagcgttctgagaaactgctttctgatgtttgcattcaagtcaaaagttgarcactccctttcatagagcagtcttgaaacaccccttttgtagtatctggaactggacttttggagcgatttcagggctaaggtgaaaaaggaaatatcttcccataaaaactggacagaagcattctcagaaacttgtttatgctgtatctactcaactaacaaagttgaacctttcttttgatagagcagttttgaaatggtctttttgtggaatctgcaagtggatatttggctagttttgagga

SEQ ID NO: 232664 - DNA, 646 bp, Homo sapiens
gaattcatacaaattgcagactgcagcgttctgagaaacatctttgtgatgtttgtattcaggacacagagttgaacattccctatcatagagcaggtttgaatcactccttttgtagtatctggaagtggacatttggagcgctttcaggcctatgttggaaaaggaaatatcttcccataacaactagacagaagcattctcagaaacttatttgagatgtgtgtactcaactaagagaattgaaccaccgttttgaaggagcagttttgaaacactctttttctggaatctgcaagtggatatttggctagctttggggatttcgctggaagcgggaatacatataaaaagcacacagcagcgttctgagaaactgctttctgatgtttgcattcaagtcaaaagttgaacactccctttcatagagcagtcytgaaacaccccttttgtagtatctggaactggacttttggagcgatttcagggctaaggtgaaaaaggaaatatcttcccataaaaactggacagaagcattctcagaaacttgtttatgctgtatctactcaactaacaaagttgaacctttcttttgatagagcagttttgaaatggtctttttgtggaatctgcaagtggatatttg

SEQ ID NO: 232665 - DNA, 517 bp, Homo sapiens
gcagcgttctgagaaacatctttgtgatgtttgtattcaggacacagagttgaacattccctatcatagagcaggtttgaatcactccttttgtagtatctggaagtggacatttggagcgctttcaggcctatgttggaaaaggaaatatcttcccataacaactagacagaagcattctcagaaacttatttgagatgtgtgtactcaactaagagaattgaaccaccgttttgaaggagcagttttgaaacactctttttctggaatctgcaagtggatatttggctagctttggggatttcgctggaagcgggaatacatataaaaagcacacagcagcgttctgagaaactgctttctgatgtttgcattcaagtcaaaagttgaacactccctttcatagagcagtcttgaaacacyccttttgtagtatctggaactggacttttggagcgatttcagggctaaggtgaaaaaggaaatatcttcccataaaaactggacagaagcattc

SEQ ID NO: 232666 - DNA, 646 bp, Homo sapiens
gaattcatacaaattgcagactgcagcgttctgagaaacatctttgtgatgtttgtattcaggacacagagttgaacattccctatcatagagcaggtttgaatcactccttttgtagtatctggaagtggacatttggagcgctttcaggcctatgttggaaaaggaaatatcttcccataacaactagacagaagcattctcagaaacttatttgagatgtgtgtactcaactaagagaattgaaccaccgttttgaaggagcagttttgaaacactctttttctggaatctgcaagtggatatttggctagctttggggatttcgctggaagcgggaatacatataaaaagcacacagcagcgttctgagaaactgctttctgatgtttgcattcaagtcaaaagttgaacactccctttcatagagcagtcttgaaacaccccttttgtagtatctggaactggacwtttggagcgatttcagggctaaggtgaaaaaggaaatatcttcccataaaaactggacagaagcattctcagaaacttgtttatgctgtatctactcaactaacaaagttgaacctttcttttgatagagcagttttgaaatggtctttttgtggaatctgcaagtggatatttg

SEQ ID NO: 232667 - DNA, 547 bp, Homo sapiens
caaattgcagactgcagcgttctgagaaacatctttgtgatgtttgtattcaggacacagagttgaacattccctatcatagagcaggtttgaatcactccttttgtagtatctggaagtggacatttggagcgctttcaggcctatgttggaaaaggaaatatcttcccataacaactagacagaagcattctcagaaacttatttgagatgtgtgtactcaactaagagaattgaaccaccgttttgaaggagcagttttgaaacactctttttctggaatctgcaagtggatatttggctagctttggggatttcgctggaagcgggaatacatataaaaagcacacagcagcgttctgagaaactgctttctgatgtttgcattcaagtcaaaagttgaacactccctttcatagagcagtcttgaaacaccccttttgtagtatctggaactggacttttggagcgatttcagggctaaggtgaaaaaggaaataycttcccataaaaactggacagaagcattctcagaaacttgtttatg

SEQ ID NO: 232668 - DNA, 550 bp, Homo sapiens
gtctatttgctgttgtgttatattggtaaataaaacctctagctttataacatatatagtcaaaactgttttgaatttacrtttgccccctgtaaacactttaagacagaaaataataaatgacactcaataatatataatttataataaagttaataattcagagcagatattatatatactcgttaaaaacagcactgaagtgcatcttccattttctataaatttgtaattattcatcaaaccttacaatgagaaatagtatctgtacaactaatatactgtattatttgtattctttcactaactcatatcaggaaaagtattaccagcaacagtcggaaatatcaattatgagaaaataatgttttttattttgttaagatcaattgtacatgtttttccctctatttacatttttcttccatatcaaaaccagtgttgtttctatatataattttaataaaaatgttgtgggtttatcactttgcttgctgaggtaagtaacatgtcgcatcttgtatatctttacattcagaattaaaaataa

SEQ ID NO: 232669 - DNA, 633 bp, Homo sapiens
cctcaccaccatattttgacctctcattttagacagggcaatctttctaataactccaatacatatggatagacactgcattgtaggtgtactctttgtattttattgcctgttgtcatgagtctcctatgatttgttatgttaaattctgtccagcttaggtttctggggtacttgcaaatcmgcatttgtttctgatggaaccaacattgtacaaaatagtaaaaagaatcctaaagtcctgtaatagcaggtagtggtaccattctgtactggaacattgacagaataggcagcaagccaagctttggatgtaaaatgaggttttacaatgagaatgaggtgattggtgacatttttgagattgtctctatacttaaaaatatttagaattatttttactcaatttaaaggcaacctttaatgagaataattacctcaatcaatgcctagatctatctataaatttgattacaaatattatattaagcatattcattagcacacattgggattaaatataaagtatgagatttagcttatgattgtctacttaagatgatagaatcaaacctgataaaagaattgaaaattctgtttaattaacaattaattctttcttacttattcctg

SEQ ID NO: 232670 - DNA, 496 bp, Homo sapiens
aaaactacaccacataaccattgcccattagctgggaaagatatccgtataaatgcaggattaaatgaatttttaagtattggagaagcagaagaactttgagagaaaataaaacggctttcttatattgaaartactgggtgatgtagttgaaatcagaagtaagcagctttagggctcagctctactgatgagcttttgaacaagggaaaattatataattgaagagcccattttttcatctgctttgaagatagggataagctgatctatcttttttaatcattgtgaggattaagtggacttgaaacactcagcatagagtgatttcttaaaatagtagttactggtaataattttaattggtttagaaatagcttctatgatcccaaagattgttttaatgtatcattttaaaatgtcttcaaaacagaaaattactttattaattatggaaatactgattttcttcaaatagtaaggaagaagtaattga

SEQ ID NO: 232671 - DNA, 538 bp, Homo sapiens
ctattacctaccaagcaatcagtgagtgatttctgtttgtctcctctcccttctttgtccatattttagttatatgtttctattttgtcaccatattaagttggtgcaaaagtaattgyggttttcatcatttaaaaaaaaaaatgccataaactgcaataacttttgcaccaacctgatacatatttactcttatccctcccccccaacttttattttaatctaaagtcttcagctacattaattttttgctcattttttttctactcatattttctggaatgaaggtcattctctattaggttctctggtaatagtggctcttgcgcacaatgttaattctattgtggcatatttggaactttatttctgtagagtttatacttgaaggtcagattaggtggatatatacttgtccagtgaaagaaatcatggatttcttcttgttacttcactgctgtcataccctgtgtgctgccatccagaattctgactcatgtctcattttctttcctgtgtatgtgacttggtctgtttt

SEQ ID NO: 232672 - DNA, 538 bp, Homo sapiens
ctattacctaccaagcaatcagtgagtgatttctgtttgtctcctctcccttctttgtccatattttagttatatgtttctattttgtcaccatattaagttggtgcaaaagtaattgcggttttcatcatttaaaaaaaaaaatgccataaactgcaataacttttgcaccaacctgatacatatttactcttatccctcycccccaacttttattttaatctaaagtcttcagctacattaattttttgctcattttttttctactcatattttctggaatgaaggtcattctctattaggttctctggtaatagtggctcttgcgcacaatgttaattctattgtggcatatttggaactttatttctgtagagtttatacttgaaggtcagattaggtggatatatacttgtccagtgaaagaaatcatggatttcttcttgttacttcactgctgtcataccctgtgtgctgccatccagaattctgactcatgtctcattttctttcctgtgtatgtgacttggtctgtttt

SEQ ID NO: 232673 - DNA, 538 bp, Homo sapiens
ctattacctaccaagcaatcagtgagtgatttctgtttgtctcctctcccttctttgtccatattttagttatatgtttctattttgtcaccatattaagttggtgcaaaagtaattgcggttttcatcatttaaaaaaaaaaatgccataaactgcaataacttttgcaccaacctgatacatatttactcttatccctcccccccaacttttattttaatctaaagtcttcagctacattaattttttgctcattttttttctactcatattttctggaatgaaggtcattctctattaggttctctrgtaatagtggctcttgcgcacaatgttaattctattgtggcatatttggaactttatttctgtagagtttatacttgaaggtcagattaggtggatatatacttgtccagtgaaagaaatcatggatttcttcttgttacttcactgctgtcataccctgtgtgctgccatccagaattctgactcatgtctcattttctttcctgtgtatgtgacttggtctgtttt

SEQ ID NO: 232674 - DNA, 538 bp, Homo sapiens
ctattacctaccaagcaatcagtgagtgatttctgtttgtctcctctcccttctttgtccatattttagttatatgtttctattttgtcaccatattaagttggtgcaaaagtaattgcggttttcatcatttaaaaaaaaaaatgccataaactgcaataacttttgcaccaacctgatacatatttactcttatccctcccccccaacttttattttaatctaaagtcttcagctacattaattttttgctcattttttttctactcatattttctggaatgaaggtcattctctattaggttctctggtaatagtggctcttgcgcacaatgttaattctattgtggcatatttggaactttatttctgtagagtttatacttgaaggtcagmttaggtggatatatacttgtccagtgaaagaaatcatggatttcttcttgttacttcactgctgtcataccctgtgtgctgccatccagaattctgactcatgtctcattttctttcctgtgtatgtgacttggtctgtttt

SEQ ID NO: 232675 - DNA, 567 bp, Homo sapiens
agtgcttaataaatacattctctttacgcaaatttgcagagacaattaatatcggtagatttattttcttgtataaacttataactcaataggatggagtctytgtgaactgaacttgaacttctcgatggtagttaggatctcctaggataatttcattccattttcctaaataatcagtaaggaattctctggaaacaaactaaagcccaagagaaaacaaaattaaacaaaacaaaagccaaaaataaacctacatcctattaaacagtatttatacaagatataaataacttatatgtcataatgtttaaaatgtttataatacagcattgaaattcctgtttcattaaaactgaaaaattatttaaatgttttaatcaaaacaattttgtctcagaattttaaaggcactgatatgtttctgtatgtttattcttgtatttatcttttctaatttatgttttaatatttcactaaagcaatcttaaggaattggaaatccagggccttctaaataaagtatttatgtttgatttgcaaggctcagtcctccctttacaacag

SEQ ID NO: 232676 - DNA, 567 bp, Homo sapiens
agtgcttaataaatacattctctttacgcaaatttgcagagacaattaatatcggtagatttattttcttgtataaacttataactcaataggatggagtctttgtgaactgaacttgaacttctcgatggtagttaggatctcctaggataatttcattccattttcctaaataatcagtaaggaattctctggaaacaaactaaagcccaagagaaaacaaaattaaacaaaacaaaagccaaaaataaacctacatcctattaaacagtatttatacaagatataaataacttatatgtcataatgtttaaaatgtttataatacarcattgaaattcctgtttcattaaaactgaaaaattatttaaatgttttaatcaaaacaattttgtctcagaattttaaaggcactgatatgtttctgtatgtttattcttgtatttatcttttctaatttatgttttaatatttcactaaagcaatcttaaggaattggaaatccagggccttctaaataaagtatttatgtttgatttgcaaggctcagtcctccctttacaacag

SEQ ID NO: 232677 - DNA, 620 bp, Homo sapiens
agtgcttaataaatacattctctttacgcaaatttgcagagacaattaatatcggtagatttattttcttgtataaacttataactcaataggatggagtctttgtgaactgaacttgaacttctcgatggtagttaggatctcctaggataatttcattccattttcctaaataatcagtaaggaattctctggaaacaaactaaagcccaagagaaaacaaaattaaacaaaacaaaagccaaaaataaacctacatcctattaaacagtatttatacaagatataaataacttatatgtcataatgtttaaaatgtttataatacagcattgaaattcctgtttcattaaaactgaaaaattatttaaatgttttaatcaaaacaattttgtctcagaattttaaaggcactgatatgtttctgtatgtttattcttgtatttatcttttctaatttatgttttaatatttcactaaagcaatcttaaggaattggaaatccagggccttctaaataaagtatttatgtttgatttgcaaggctcagtcctscctttacaacagtaatatcaaactccttaactaggttggatatatgttaatcactttaattaatt

SEQ ID NO: 232678 - DNA, 629 bp, Homo sapiens
gtacctatatagacacatacatatgtctgtatgtacctatatagacacatacatatgtctgtatgtacctatatagacacawacatatgtctgtatgtacctatatagacacaaacatatgtctgtatgtacctatatagacacatacatatgtctgtatgtacctatatagacacatacatatgtctgtatgtacctatatagacacatacatatgtctgtatgtacctatatagacacatacatatgtatatatgtgtatatacacatatactgatatcctgtacatatgtacatgtgtacatatatacatactgtacatatgtaatttttgatccacaaaattaagcatattaaaatacgtattaaatacatatattacatatactgtagacatactgtacatatgtacatatacatatgtatccatgtacacactatatatagacacatttatatttatatatacacactaacatatattcaaggggcatagggtatatatgtccatatatggacatattgtacatatgtccatatatacataatatagacatactgtacatacatgtacacatacaggcatatactgtacacatgcacatatatagacaaatactctacatatg

SEQ ID NO: 232679 - DNA, 629 bp, Homo sapiens
gtacctatatagacacatacatatgtctgtatgtacctatatagacacatacatatgtctgtatgtacctatatagacacatacatatgtctgtatgtacctatatagacacawacatatgtctgtatgtacctatatagacacatacatatgtctgtatgtacctatatagacacatacatatgtctgtatgtacctatatagacacatacatatgtctgtatgtacctatatagacacatacatatgtatatatgtgtatatacacatatactgatatcctgtacatatgtacatgtgtacatatatacatactgtacatatgtaatttttgatccacaaaattaagcatattaaaatacgtattaaatacatatattacatatactgtagacatactgtacatatgtacatatacatatgtatccatgtacacactatatatagacacatttatatttatatatacacactaacatatattcaaggggcatagggtatatatgtccatatatggacatattgtacatatgtccatatatacataatatagacatactgtacatacatgtacacatacaggcatatactgtacacatgcacatatatagacaaatactctacatatg

SEQ ID NO: 232680 - DNA, 611 bp, Homo sapiens
ggtacagcagtgcaaactaagcagattagaactgttcaataggatctgggaactgacaaattttggagcataatgtgtgctcttcagcaaatatatagtaaaaatcattataaaagaaagtgcacaaaatatttatatgttacaggaataaacagcgttagaaaattagaggattagtggcacatatcagttycatatcttgatgttttaaatcttgtaatttatttcttgaatatgaaataagtatgtcctttaggcatcttaaaattaccttgggaaagattggtgaaacctagtaatcaattgcaatgtgatatagcctttttagtatagatgctatataccatgttgatgaactcatagttgctttcagtttatcaaactgcatcagaagagagcaataattcaaaatatatatatttttaaaatgctaggatttccaacgtttgactgcattgtattttaatatcttaagcaaggtgtaaatgatatataaggtatggtctgatgaattttaatatcaccttttttcaaagatgacagttaacatttaggtgtatccctaaatagagtggaaacagatattaatttggcatgaagtgttaagaaag

SEQ ID NO: 232681 - DNA, 209 bp, Homo sapiens
tctctagtcctctttgtgcccatcggggcaatgaaaatgggtttggctgtgatctcagaaacccccgccacttctgcaagcctgtaagtatgcttctaaggctagataggagtggaaccctaggyacagtggcctcaaaaccgtagagagagtaggcaattcagaatgagctaatagagctgttgtttgtggaatacctactatgtgtc

SEQ ID NO: 232682 - DNA, 528 bp, Homo sapiens
cttgtaaatgttggatattagtcccctgtcagatatatagtttgcaaatgctttttcccattctacaagttgtctgttctctctgttgattatttcttttatttgcagaaactttgcagtttacatctcatttgcctatttctgtttttgttgcctctgcttttgaagtcttagtcatgatttctttgcctagtgtctagaggagttattcctaggatttcttctagaaatcttttttttcttagatggagtctggctctgttaccaggctggagtgcaaaggygccatcttggcacactgtagtctccacctcccaggttcaagcgattctcctgcctcagcctcccaagtaactggaattataggtgtgaaccaccatgccaggttaattttgttatttttagtggggacaggtttcaccatgttggccagactggtctcgaactcctgacctcaagtgatccacccgcctcagccttctaaagtgttaggattacatcttctagtatttttatagtttcaagtct

SEQ ID NO: 232683 - DNA, 547 bp, Homo sapiens
gctgcaataaactgcaagtgcatgtatcttttttgataaaatgatttattttctttyggttatatgcccagtaatggaattgcttggtcaaatggtagttctattttaagttctttgagaaatctctaacctgctttccacagtggttgaactaatttacactcccaccaacatatatgtggtccctttctctccatagcctcactggcatctgttgttttttgacttttttagtaatagtcattctgagtgctgtaagatggcatcacattgtggtttggaagtgcacttctctgatgattggtgatgtggagcattttttcgtatgtttgttgttgtttgtatgcctcctttagagaagtatctgttcacgtattttgctcatttttaatgtgctgtttgttttttgcttgtagatatgtataagttctttatagattttggatattagacctttgttggattcagagtttgcaaatatttttacccattctgcacgttgtctactctgtagcacagcataagaaactatctttcttacggatgc

SEQ ID NO: 232684 - DNA, 601 bp, Homo sapiens
tgcaaattgtctctgatcctgaaatttagtagagaatctctcagtcagctgcaaatggagatatactcaatggcgtttattgcagcattgactataatataatactaaaattacaatttaatgggaaagggatcgaaaaattggtatagccatacaactgtgcacatagttaaaattactaaacgtgagtttatatatccatatagataagcctaggaaaacaaaatttaagcaaaaaacttcagagtgacatggagtatatgctatccattaagcaatttttaaaacatgttaaacagttttatataatgcttacagataaatacgaaataaatatgtgaaagaatacacaccatcttcagagtaatagctctttgaaaacctttgcctcaagttattttctcagaattacccagaattttaattttaatgtctgtggtctttaaacttgattgctgggaaatcgggagctgaaacaccatgaggatagagggaactgaggaatggggagaagcattaatagaatgtgggasgtggtttggaaagggaagcaaagaggcatgtcttccttccagaactgtctttgtcatacctcatgcag

SEQ ID NO: 232685 - DNA, 471 bp, Homo sapiens
acatcaattctgttttccggataagcactataagaactcaacggaaaagagcagttttttcaatgacaatgcatgacagaagccaaaaggttttaaagcaaacatacaaatgcgtcatctaatagtccatcaaccagcccttgtcacacagataaaccttttatctcactttcccagattttaatcagcagactggtttgcatgtttcttgtgtcactgtggcaaccaacctaatggggattctttatgccctgagaaatcaactcatttgggcctaaatgaaacatttcgctgtcttgttttatctcccrctctattcacattaacataatagcttttaattggattgtatttgtgattggagtcagcaaaggtggtgttctctcagaggaaattgactgcaaggcaagctgctgagcctccatctgggagaattttttgagctattggccacggggcaagatggcgtca

SEQ ID NO: 232686 - DNA, 558 bp, Homo sapiens
cttaaaattaattctggaaagaatcaaactaattctaagtaatgcaacttaatcacagcaagaagcccaaaaaataattttaaaaaatctagcatccaacaatgtaaaatttataatttctagtatccaatcaaaaattatcagtcatgcaaagacacaggaaaatataacccataaccaagagacaaaaaattattcagwagaaatggagccaaaaataaaaggatgacaattagtaggcaaggatgttaatgcaattataagtgtattcctatgttcaggaagtttgaggaaagaaaaaatataagaaaaacggaagatatgaaaaagatgcatatttaacacctaaagattaaaaataaaatatctgacataagaataaaaccagattggattaatagcagcatagaaactgcagaaggaattaatcaacttgaagacataataatatgcactgaccacagtgaactacagaaagaaaaggagactaaaaaaaatgaacagaaggtcagtgagtgttgaggcagcatcaagcagtccaaacacatgtataattgg

SEQ ID NO: 232687 - DNA, 618 bp, Homo sapiens
tactcagtctcaccaaattgtacaattgttgaattttatagtaaataaaatataccttgcttatgctaacaaaaaaataaagcacaagttgagatggttaggtgaccaaagatgtgcagaatgacggaagggtggagtcaaaaaagcacagtaaagtaggacagagaggaagaggccactgtcttaaaccaggcacattgcataagctaaaataggcgtcagggagcggcatagggagggtggcatgagtatggtcttccagatgacagataactgcagatagtgccagaaaatgataactgtagaaatggtagaaccaaagtgatagtttgtatcagggtatcctgtgccccgagaggataaagtctatgaagacagtcccatccctttgcctattacagtgcctggtgcatagaaggcatataatatgtatttttggaaagaaacaatgagtaatccaggtggattgacagcaagatgtcaacacaaatggagaatccatgccaggaagtgattgataggtccaggaaggcaggcagctcagtctcatctgaaagtccrccactaggtcaggacaggtgcttccttgggggcaatcataaggggagaggtaggaaa

SEQ ID NO: 232688 - DNA, 186 bp, Homo sapiens
gtctaaggtattttgttatagcagcctggacagactaagacagctatactttgtgaaaagccatttagcatcttaaggatgtgagatagaataaaatggggacacagagtatataaatattctttgtgaaaactaaaattgcttcacatrgcaggatagtgttacgccagtgttactaatcatatg

SEQ ID NO: 232689 - DNA, 487 bp, Homo sapiens
tgagcatctccattataaggtaagtgtggttctttgtccttgaggaacttactgtgcagttaggtaaagataatctcttcatgtggtctgtctatatatccattcccctttctattgatttgtctacttattgactcatctattatttataatatatatgataaaaagtcccaaataaggtataaagatagtattacgggaggcaaaagaagtgagattgctataaactaggagagaaactctgtcattctcaaaggtttccaagcaaaggtaatatttaagcttgggtgtaaaagctagaaatgataattgaaataaacacagaaggtgaaattctttgactcaaattattgttctarttctgctatttagctgtacaattttatacaggtaacttaaattttctaaatttaaccttcttcatccataaaatgtgaacgatgacaaattctatttcttgaacaccaataaccatagcaactctcca

SEQ ID NO: 232690 - DNA, 345 bp, Homo sapiens
tagtctgtttcttgtcatgagaataaaacctcatatatacacactacagaatggaaatcacctatttcccttcagctcatcttgcatttatagcctaattgagaattttaggaatagttgtttcccttcgatgtggcctgtgctaatacttaaatgactgcctcactttaactttatttatacatgaataatataaatgattttaaggcaattaaagcattttaaaaagtgggaatgtaacaatgttggactctttcttacaatacacttgaactgatttgaagactttctcagtcaccatttgctatcttttcatttgctcmaatggctgtaactattaccctt

SEQ ID NO: 232691 - DNA, 562 bp, Homo sapiens
tctcaaagataaataaataaataaataataatttatctgcttgaaatattaaataaagctaaataattccagggttggagaatgatattacatacaactgaagcagtgggacttggagtatgaacaatatatttttaaaaaattacaaagcataatagtcatgattcaagagtttgccaaaatttgtacatatatctggaaatataaggactagaaggtaaaagcctcaaaaagaaaaaaagtagatgagctagtcaaacagagtcttctcccttccctcccttgatagccttttctttctttcccttttttttttttttttttttcttagagggagtcttactctgtcacccagactagagtacagaggcgctgtcttggctcactgcaacctctccytaccagcttcaagtggccctctcatctcagcctcccaagtagctgggattacagacacgtgccattatgaccggctaatttttgtattttttgtagagatggggtttcatcatgttgaccaggctggtctgagccacactatgcccggccttgatagcctttt

SEQ ID NO: 232692 - DNA, 505 bp, Homo sapiens
atagtagcagtagatcagaacaagcatgggagctggggacaggggctcacacctggaatcccagcactttgggaggctgaagcaggaggagcactttagcccaggaatttgagagctgcctggacaacatggtgaaaccctgtctctacaaaaaatacaaaaattagctgggcttgatggtgcacgtctgtggcccagctactcaggaggctgaggtgggaggatcacttgagtctggaaagtcgaggatgcagtgagccatgatggtgccactgcactccagcctggacagcagagtgagaactcgaaaaaaaaaaatgatggaatactatgcagccatgaaaaagaataagctgatatcctttggtagaacatgcatggagctcgstatggtttggctatgtccacacccaaaatctcatcttgacttgtaatccccatatgtcaagggtgtgaccaggtggaggtaactggatcatgggagcagtttcccccatgctgttct

SEQ ID NO: 232693 - DNA, 583 bp, Homo sapiens
cgtgtgactgagtcatgaagcgtgctcggaagtgtagctccctcctcactcagaactggcagtccggctgtgggcctaaggtttctccacgcaggccaaattctctcccttcttggtgcacttccaaaagaggctgaggtcaactctcctaccccttttatttagagcctatcttccccgttgacctagaaaaatggtgacaaactttataggtgttgtttcttccaggagacgtacagggtcttcatacatggcctgacctaactcccagagttcccaagagaggtatgcagactggtaccctgattgtgacattagtcacagcccttcccatattttgccttacagatcttatttctccctctctcctctcataggttacttgaggacatggcatttcctctccctctttttgtataaatttagggaatacaagtgsagttttgttacctggatgaaagaggtgaagttcgggtctttagtgtaattctcacctgaataatgtacattgtatccattaagtaatttctcatccctcatgcccagtctcccacccttccaagtctccagtgtctattattct

SEQ ID NO: 232694 - DNA, 606 bp, Homo sapiens
agatctgggattttcctttcatgatacagttagtgggttccaaccctgcctgggttcgtmgtctctgccctaaaacacacagagtagttggtgcaatgggaaacattgacatcacccgggaatgagatgcacattatcatgagattaggcttagaataaaatccaatgtaatatacaaatataaggggagcttagtggaagataagctgacagaagaacctgagaacaaagaatagaagatgtaagataaggtaagggagaggtggtgtcaggaaatttgaaaagtgtcacaggttgcagagaggtgcaatgaaataacgaatgagaaaagaaatatctactggatttcacaattggatgtgttggggaattcctggatggacttacaggagaaagccagcatttgtagaagtggaggagacgtggagggtgagagggtagggtaaacgactctccactggaggcaatgagagatgggctggaaaccacagggaggcagaagtcaaaatttctatttctatgtttctaacagaggagaaacttcagcattcatataaatcatggggaaagagaagacagagagggaggctggagctaaaggcagag

SEQ ID NO: 232695 - DNA, 604 bp, Homo sapiens
atgatacagttagtgggttccaaccctgcctgggttcgtagtctctgccctaaaacacacagagtagttggtgcaatgggaaacattgacatcacccgggaatgagatgcacattatcatgagattaggcttagaataaaatccaatgtaatatacaaatataaggggagcttagtggaagataagctgacagaagaacctgagaacaaagaatagaagatgtaagataaggtaagggagaggtggtgtcaggaaatttgaaaagtgtcacaggttgcagagaggtgcaatgaaataasgaatgagaaaagaaatatctactggatttcacaattggatgtgttggggaattcctggatggacttacaggagaaagccagcatttgtagaagtggaggagacgtggagggtgagagggtagggtaaacgactctccactggaggcaatgagagatgggctggaaaccacagggaggcagaagtcaaaatttctatttctatgtttctaacagaggagaaacttcagcattcatataaatcatggggaaagagaagacagagagggaggctggagctaaaggcagagatagcaacagagaaagag

SEQ ID NO: 232696 - DNA, 657 bp, Homo sapiens
aaaacacagtgtatacacacrtgggctcagctgcttatatttttgacctgttctattgctgtttaattggctatatcatggctgaagactgaaatgcttgatgactagatacagtgagttctcacttcacgtcatccataggttcttggaaactgtgactttgagtgaaaccacatataataaaaccattttttaaaaaaatcatccacactataactaaacattaaatcaaagggtgttatttgaggacctactgtacatttcgcttatggtcatggtttccaagaacttacagatgatattaaatgaggacttactgaggttacttctttttaaaaaaataaattgattttcataggttttaggggaacgggtagtatttggttacatgcccaagttctttaggggtgatttgtgagatttttggtgcacccatcacccaagcaatatccactgtaacccagtttgtagtcttgtatcccttaccccgctcccaccctttccctctgagtccccaaagtccattgtatcattcttacgcttttgtatcctcatagcttagttgccacttatgagtgagaatatacgatgtttggttttccattcctgagttacttcacttagaataatagtctccagttccatctaggttgttgc

SEQ ID NO: 232697 - DNA, 657 bp, Homo sapiens
aaaacacagtgtatacacacatgggctcagctgcttatatttttgacctgttctattgctgtttaattggctatatcatggctgaagactgaaatgcttgatgactagatacagtgagttctcacttcacktcatccataggttcttggaaactgtgactttgagtgaaaccacatataataaaaccattttttaaaaaaatcatccacactataactaaacattaaatcaaagggtgttatttgaggacctactgtacatttcgcttatggtcatggtttccaagaacttacagatgatattaaatgaggacttactgaggttacttctttttaaaaaaataaattgattttcataggttttaggggaacgggtagtatttggttacatgcccaagttctttaggggtgatttgtgagatttttggtgcacccatcacccaagcaatatccactgtaacccagtttgtagtcttgtatcccttaccccgctcccaccctttccctctgagtccccaaagtccattgtatcattcttacgcttttgtatcctcatagcttagttgccacttatgagtgagaatatacgatgtttggttttccattcctgagttacttcacttagaataatagtctccagttccatctaggttgttgc

SEQ ID NO: 232698 - DNA, 657 bp, Homo sapiens
aaaacacagtgtatacacacatgggctcagctgcttatatttttgacctgttctattgctgtttaattggctatatcatggctgaagactgaaatgcttgatgactagatacagtgagttctcacttcacgtcatccataggttcttggaaactgtgactttgagtgaaaccacatataataaaaccattttttaaaaaaatcatccacactataactaaacattaaatcaaagggtgttatttgaggacctactgtacatttcgcttatggtcatggtttccaagaacttacagatgatattaaatgaggacttactgaggttacttctttttwaaaaaataaattgattttcataggttttaggggaacgggtagtatttggttacatgcccaagttctttaggggtgatttgtgagatttttggtgcacccatcacccaagcaatatccactgtaacccagtttgtagtcttgtatcccttaccccgctcccaccctttccctctgagtccccaaagtccattgtatcattcttacgcttttgtatcctcatagcttagttgccacttatgagtgagaatatacgatgtttggttttccattcctgagttacttcacttagaataatagtctccagttccatctaggttgttgc

SEQ ID NO: 232699 - DNA, 564 bp, Homo sapiens
ttttataaaatacattaaaataactgagaataccaagctcccagaatgaaaacacataattctcagagagatatcttattaatataaacacttcatcatttttaggcaactgatacagaaaagcatttttaaacacttgttataatgaagttttctttttaagtcaatgtattgtttgaaatctcgtgccatctttaggatctaaagatgaaataaattaaccagttggcctctgtagtaaattcccagctgggggaggggataggtgttttaaacttagcagtggaaaaaaggaaataaatacatatatttttctacttttttttcctgtttttttttttttttactttgaaacactttaactgcacgtcttttggttaatgaaaaacatggaaattttaggcgagttaaatttttttttcagtttttgcaggtacatacagagtaggtgtatatatttatggggtacatgagatattttgatacaggcatgcaatgtgtaataatcacaytatggaaaatggagtttccatcccctcaagcatttatcctttatgttacaaa

SEQ ID NO: 232700 - DNA, 479 bp, Homo sapiens
atagcaaatctaatttaggattttgttataatctgaaaggctgagaatctctcaattcatcaaatcctgtttctttggacttcatgttttttcctcaaatgagctcttacctcttaaatttttctatcggcagccagaggaaaccaggccrcatctctaacactaggcttggagatctcctctgctaaatgcccaagtttattacttgctagtagtttgttctccacataagtataggacacaactcatgaggctttcttaaactatgtaactcggatctccttcctttcagtttccatgagcatgtcctacatttctttctgagtctgcaccagaagagcttttaacattcttccttctaccaacagtctgttcatgatgatttagctatgcctgaagatgctttaggtttccccaccatgctcctcacttctttctgagtcttcaccaagagtcttaacatccatacttcttctaac

SEQ ID NO: 232701 - DNA, 583 bp, Homo sapiens
caaaggtctgagtggcaaagagctgagggtatagattccagtctcagtctgaaggcttcagaagcaggagtgcaaaagggaagagaaaattgatgtttctgctcaagtcatcaggtacagttaattcaaccttcctccacctttccattgtattcaggctctcagtggattggatgatgcctatgcatattagggggatctattcaccctgtcctccaatttacatgctaatctctttcagaaaaactctcagagacacagtcagaaattacatttaatcaggtatctgggcatccttggcccagtcaawttgagacaaaattaataaccacattatactatgtttaaaatactctaagacaacactgaaaatatccgtatgtaacaagaaactataatgtgacctagtatatttgaaaaaaaaacaatcaaagagattttctaggagtgaaaacttaacagctgagattaaaaatttgatgaatgggattagtgcaatattaaatacagccaaaggtaaaattaataaatatgaatatatgtaaaaatacattgcttagatataacatgtagagacaaaaat

SEQ ID NO: 232702 - DNA, 611 bp, Homo sapiens
agctttttgatgtgctgctggattcagtttgaaattattttgctgaggatttttgcattgatgttcatcaaggatattggcctgatgttttcttttttgttgtgtctctgccaagtttttgtatcagaatgatggtggcttcgtagaatgagctggggaggagtccttcctccccagttttttggaatagtttttatagaaatggtaccagctcttctttgtacatatagtaaaattcagctgtgaatccatgaggtcctgagctttaktttggttggtaggctatttattactgacttacttttggagatcattattggtctattcaggggatcagtttcttcctggttcagtcttgggagggtgtatgtgtccaggaatttatccatctcttctaggttttctagtttgagtgcatagtggtttctagtggttatttttatttctgtggggtcagtggtaacattcccttcgtcatttccagttgtgtttatttggatcttctctcttttcttctttattagtctagctagtagcctatctatcttattaattttttaaaagaaccaactcctggatttgttgatcttttgaatggtttctcgtgtctc

SEQ ID NO: 232703 - DNA, 610 bp, Homo sapiens
ttaggcaaatgagatttatgttcaacatttttgtggttaattattccatgttgctgcttaataaattttctaatttttaagaaatacaattcaaaaatgaaagttttgattatattrtagggtattagcacatgttcagaattttcagaattggagttctctgctgccctaactgacaatgacaaaatcaagggtagaaacttaagcttatgcttatttcataatgctggtcaaattcaattaaaattagtaatgtaatctttgagtggttactttatatttgtgttctcaagcagggacaattttacttttcaggggatagttgtcaatgtctagaagcctttttgatagttgtcaaaacttggagaggaggaggtacgctactggccagagacactgctaagcatcctatagccccctctgcattaaataattgtctgacccaaaatgtcatagtgccaatgttgagaagctgtgctctacattcttcttattcctttattaaatcattattatgtgtgaagtgactgttacataactagtagtaaacaatattttattgaccacttatcacgtgccatgctctattctaagaactacatacattcat

SEQ ID NO: 232704 - DNA, 510 bp, Homo sapiens
gattaaccccactgcaacctcacctgaccccttaggatgtcctttcatgcttttcttgattttgttgaagttatgtattgagaataatggaaaatcacagaaggcgattttctgatcccaactccttagctatgaccttgtgtctctagctcatgatcatggtttatgaagcaygggaaggactgggaaaagtagaaagtaggtaggtaagatgagatgtctgatgatggaggttattggggtcaggacaggtgggtaggcaaggtgaagtgtgtaagctaagcaggaaatgcaaatgaaaatcagagagaaggtaccccttcagaacagattcttagaaagccattattaggaacatatgggccacatctttgaggagagttgtggaattcacattacagtaatggcatcacttagattcatgctcttctctcagggagagatatcaatatttataggatatcaaagggtcttcatcatgtgtctcagtctgtttttattgctataaac

SEQ ID NO: 232705 - DNA, 590 bp, Homo sapiens
cttgacaatgctgcattggggattgagtctcaatatgaattttgaaggggacatatacattcaaaccatttcacatggtatttaaagccttgggctggattgagatagaagaccaagggtaaagaagagggccctatagcactacaaatttggaagactagtagggaaggaggatcagccaagcagggagatccacattgtctgttccaagaggtatatatatttaaccctttgagtgttgaatctgtgaattagtcagtttggctgccataacaaaacaccatagactgggtggcttaaacaatagatattaattttttcacagctctgaagagggaagaggaagatcagggtgccagcgtggttggcttctagtgagtgcactctgtgccttgcagayagctgccttctcactgcacgctcatgtggcctttcctcggtgcttgccatagagagagctctctctctctctccgtctttttatgaggctacagtcctatagaattagggtgccacccttatgactcctgtagccttagttatctgccaaggaccctatcttcacatacaatcacactgaggattagggc

SEQ ID NO: 232706 - DNA, 516 bp, Homo sapiens
ctgtcaatcacaacatcttcaccaccttccccttgccaaaggcttacaacccaagccagkcaatcagaatgttcctagggttggattaattgttgttaggagaaaggcactttttgccatggagcaggcaaactcaggatgagaagctgggctactggtggccaaagaaagtgtttctcacagaagagttgaggaaagaacaggaggcaggggccagagatgatgagggagacagagaactccgtaaacaggagtaccgaagtttgttgtagccccggacttcccagatgtgtaagacaataaattctctttttgcttactagcttgaattgggtttctgtcatttaaaacctaatggctccaacttgtgggcacttctgacttacagggcagctcccacagacctcagtagctttaccagtcttccttgtcttgtgagctaccatcttctactcttttgggagtgtgcgtgcatgcttcggattatcaaatgatttcaatgacaacaaagaactg

SEQ ID NO: 232707 - DNA, 516 bp, Homo sapiens
ctgtcaatcacaacatcttcaccaccttccccttgccaaaggcttacaacccaagccaggcaatcagaatgttcctagggttggattaattgttgttaggagaaakgcactttttgccatggagcaggcaaactcaggatgagaagctgggctactggtggccaaagaaagtgtttctcacagaagagttgaggaaagaacaggaggcaggggccagagatgatgagggagacagagaactccgtaaacaggagtaccgaagtttgttgtagccccggacttcccagatgtgtaagacaataaattctctttttgcttactagcttgaattgggtttctgtcatttaaaacctaatggctccaacttgtgggcacttctgacttacagggcagctcccacagacctcagtagctttaccagtcttccttgtcttgtgagctaccatcttctactcttttgggagtgtgcgtgcatgcttcggattatcaaatgatttcaatgacaacaaagaactg

SEQ ID NO: 232708 - DNA, 516 bp, Homo sapiens
ctgtcaatcacaacatcttcaccaccttccccttgccaaaggcttacaacccaagccaggcaatcagaatgttcctagggttggattaattgttgttaggagaaaggcactttttgccatggagcaggcaaactcaggatgagaagctgggctactggtggccaaagaaagtgtttctcacagaagagttgaggaaagaacaggaggcaggggccagagatgatgagggagacagagaactccgtaaacaggagtaccgaagtttgttgtagccccggacttcccagatgtgtaagacaataaattctctttttgcttactagcttgaattgggtttctgtcatttaaaacctaatggctccaacttgtgggcacttctgacttacagggcagctcccacagacctcagtagctttaccagtcttccttgtcttgtgagctaccatcttctactcttttgggagtgtgcgtgcatgcttmggattatcaaatgatttcaatgacaacaaagaactg

SEQ ID NO: 232709 - DNA, 539 bp, Homo sapiens
ggaaaccatggcacatggtcacctagcaatgggagattaagaaaataagatttttttctgttttctaggaatttatgttccatagggtagatgttgacaaagatacatgcaaagattgtagattacattatactctgaattaatttccaaaagactggaagtagatgttggggaaaaaatagattagaatttatcagtcacagggcctggatgctttataaggatcaaaaagaagatgcctagactagcatttgaaattgaattttttctctctctccaaactggcagtacattggcatcgcctgtggagcttaaaaattatttactttattgggaaataattcaaacacgaagatacaaaaaaggctaatgtrgtgaacatccctatacccacaacttggttttactaaattttaactttgtgcttcagttacttgccttaaataaattgaggtctactggtccctttcctggatcccattcttcttcctttctcaccagtggtaattgttgtcatgaattgagcatttatattatcc

SEQ ID NO: 232710 - DNA, 441 bp, Homo sapiens
tggtcatgttggtatctacttccatgtctctaaaaaacattcatttctcaatttcttatatttctcaattttccagtttttggtattatctaytgacttcccactctagaaaatgactgctcccaccatatatgtgccttctttcctcttcacgccctcacaatacagtcatattatgtttgcgtttgatatcaagcaatatatttacattaatataactatgcacaaactgttcacagctgagccatgtaggaaactatgataaatttttctttcctgagcagctttttgcttgccctggagctaattatcttgttttaccatttgcttagttttctatgtacttatcactaatttaatcccaaattatttgccagttctctaaatcttctcttaagctactaagatgcattgctttcatcttcctgacaaaatatgctt

SEQ ID NO: 232711 - DNA, 441 bp, Homo sapiens
tggtcatgttggtatctacttccatgtctctaaaaaacattcatttctcaatttcttatatttctcaattttccagtttttggtattatctactgacttcccactctagaaaatgactgctcccaccatatatgtgccttctttcctcttcacgccctcacaatacagtcatwttatgtttgcgtttgatatcaagcaatatatttacattaatataactatgcacaaactgttcacagctgagccatgtaggaaactatgataaatttttctttcctgagcagctttttgcttgccctggagctaattatcttgttttaccatttgcttagttttctatgtacttatcactaatttaatcccaaattatttgccagttctctaaatcttctcttaagctactaagatgcattgctttcatcttcctgacaaaatatgctt

SEQ ID NO: 232712 - DNA, 441 bp, Homo sapiens
tggtcatgttggtatctacttccatgtctctaaaaaacattcatttctcaatttcttatatttctcaattttccagtttttggtattatctactgacttcccactctagaaaatgactgctcccaccatatatgtgccttctttcctcttcacgccctcacaatacagtcatattatgtttgcgtttgatatcaagcaatatatttacattaatrtaactatgcacaaactgttcacagctgagccatgtaggaaactatgataaatttttctttcctgagcagctttttgcttgccctggagctaattatcttgttttaccatttgcttagttttctatgtacttatcactaatttaatcccaaattatttgccagttctctaaatcttctcttaagctactaagatgcattgctttcatcttcctgacaaaatatgctt

SEQ ID NO: 232713 - DNA, 441 bp, Homo sapiens
tggtcatgttggtatctacttccatgtctctaaaaaacattcatttctcaatttcttatatttctcaattttccagtttttggtattatctactgacttcccactctagaaaatgactgctcccaccatatatgtgccttctttcctcttcacgccctcacaatacagtcatattatgtttgcgtttgatatcaagcaatatatttacattaatataactatgcacaaactgttcacagctgagccatgtaggaaactatgataaatttttctttcctgagcagctttttgcttgccctggagctaattatcttgttttaccatttgcttagttttctatgtacttatcactaatttaatcccaaattatttgccagttctctaaatcttctcttaakctactaagatgcattgctttcatcttcctgacaaaatatgctt

SEQ ID NO: 232714 - DNA, 612 bp, Homo sapiens
caacaaataaaagataaataactcaatttttttaatggacaaaagacttagacacttctctaaaaaaaagacatgtaaatggtcaataagcaactcaaaagatgctaaaaccacaatgagataccactttgtacctactagaatggctataattagaagaaaaaataactagtgttgttgaacatgtggagaaattggaaacctagtatactgctggtgggaatgtaaatggtttaactgctgaggaagatagtttggcaattcctcaaaacgtaaaacagaattatcacccagtaattctactcttaagtatatacckgatatagtttgactgtttgttcctatgcaaatctcatgttgaaatataattaatctccagtgttagagttggggcctggtgggaggtgattggatcatgggagtggtttctcatgaatggcttcaccatctctagctgtcatcaagattgtgagttctcacaagatttgattgtttaaaagtgtgcagcacctccccacttcctctcttgctctggcttttgccatgtgacatgcatgcacccactttgccttccatcatgattggaagcttcctgaagcctccccggaagca

SEQ ID NO: 232715 - DNA, 635 bp, Homo sapiens
ttattatggcatttaaatataaaatatgtaggaataaatgtaacaaatgatatgcaaggcctctatacagaaaactatgaacattattgggagaaaccaaaaagtactatataaactgttactgtattagctcaattttgtaacattctttccaaattaatccatagattaaattcaattccaataaaaatatcggcaggtttctttgaattgtttgacttcattagtaatcaggggaatggaaatgaaaactatgaggtaacgctacacaacaaacagatgagctaaaagaataccaaatgtggtgaggacaaagcactgggaactatcatagttctcttgtagaaatgtggagtgataccaatgttttaaatgttataaatacacataccctatgatctggcagttccacycctacatatatacccatcagaaataagtgcagtgtttatcaagagacatatgaaagaatgtccatagcagcattactcatattggatccaagcaatagaatggatagtttgtactgagttcatacaatggcatactatacagcaatgaaaaccaattataacatttacaaatgtgattttaagtaaaacatgttgggcccaaaaggataccagctgcataat

SEQ ID NO: 232716 - DNA, 579 bp, Homo sapiens
tagtgtttcacatcactaccatctatgccttcttccattgtccctttaagttactcaccagtgaattgtgttacttctatcagtaaatgctctttgtaatgattgttttttataaaatctggagttaacagctagcattgttacattctttttttaatttacatatattctttccagttttgcattgtttataatgtaatacgaaaatttgagggaaattttatttgtaaactaattgaaatgttataaaaggaaactgaaacatactaaccttctgttttcctaaattatctcttagaattatgaataattctctatgtccaaacccagagcaaaataaattayagcatttttctgattaaaatatggagaaaatatttacagctaattaaatgtaaaacaggtatatctttttcaatgaaagttgactttgatagttcacattttggtcaagagatagaattgcatctattaaatgaattattaaagtatccatgacatggagttagaggattagtgtttcatgcccagcaggacaaatcagcaatacatcccttataatgcaaattgtaagttgtt

SEQ ID NO: 232717 - DNA, 572 bp, Homo sapiens
cattcagaaaactattataaaactgttttttccaaaactgctcaaactgcaaccagctaaacgaatggaaagaagtacttatacacactattaaatgttaaccatttcattgcccttggcttctttcaaaattttacatttcatatatactgtaaaatattaaaattatttatctccttgattcattagaagcttagtacattttgagagcagaaaaaaacaaaaaacattttaagatggattaaagtcattatgaccatgagaaaaaaaatggytttttttccagtgttcattgtatgtaacctagagtattatagattacatttttctttggattcagtttatttaaacaaagtttattgtggcattgaagatattagaactaaatttttaagaaactgacaaattcatcatttcctgggcttcactggtcatttaggaatactgatttggaaaatatgccaagtggcccattaattatccacaaggccatttttacggtgtatagtcccacctggactgtcctgaacttcacagtgtaaaatgacagaaggaatgaaaatgacattaaa

SEQ ID NO: 232718 - DNA, 572 bp, Homo sapiens
cattcagaaaactattataaaactgttttttccaaaactgctcaaactgcaaccagctaaacgaatggaaagaagtacttatacacactattaaatgttaaccatttcattgcccttggcttctttcaaaattttacatttcatatatactgtaaaatattaaaattatttatctccttgattcattagaagcttagtacattttgagagcagaaaaaaacaaaaaacattttaagatggattaaagtcattatgaccatgagaaaaaaaatggttttttttccagtgttcattgtatgtaacctagagtattatagattacatttttctttggattcagtttatttaaacaaagtttattgtggcattgaagatattagaactaaatttttaagaaactgacaaattcatcatttcctgggcttcactggtcatttaggaatactgatttggaaaatatgccaagtgrcccattaattatccacaaggccatttttacggtgtatagtcccacctggactgtcctgaacttcacagtgtaaaatgacagaaggaatgaaaatgacattaaa

SEQ ID NO: 232719 - DNA, 562 bp, Homo sapiens
ttatgcaccttctatttacgacattggcaccaaccagccaattacagcagtggagataaggccatgaaatacagacataacttctggggtctactgctagaaattaaaagatagttcctaaagaatggggaactgctttaagktgagaaaccaatgcaaaagtatattttaaacgatttctgaaaaaatacactccatgcccatattacagaaattctcggtattatcctaataaaaaatctggaatagtctgtgagacagattcaactgcagtgtagtatataataaaaatagagtacctggttttaaataccatatatactgtgataataattagattcctatctccagaccagatattccctctgagtaaacagactcacagtgaacttccaacttcatatcctatgtgagtatctcaaagtcctaacatgtccagaaaatccttatgcctaccctactctttctcatactatgtttgttgctcaaacaaaaacccagaaatctatcctggatttctcaatttctgtcagcccccatactgcatccaaacttgttaatt

SEQ ID NO: 232720 - DNA, 482 bp, Homo sapiens
aatagggtatgattccatttatatgaggtacttagagtagttaaaatcacaggggcaaaaagtagaatggtggctgccagggttgggggaaggggraatggagttgtttaatgggtatggagttcagctttgcaagatgaaaagagttctagagatggatagtggtgatggtgcacaacaatagaattgaaaactattgagctgcacacttaaaaatggttgagatggtaaattttatgttatgtgtattttaccacaattttaaaattgaagaaaaaaaaggaataaaattctgatacatgctacaacatggatgaatcttgatgacatcatgctgactaaaataagcgagacaaaaaaaggacaaatacagtatgattccacttatatgatctacccagagtagtcaagttcatagagacagaaagtagaatattggttatcagaggctgggatgacagaataaagacttattttttaat

SEQ ID NO: 232721 - DNA, 398 bp, Homo sapiens
gacttccttcacatccactctaacttttcaggcctcgggcacatgatgctcctttgttggctgtttcagctgcagtgaagggggtggatccaagcagaggaccaggaacatctgaggggcagagycgtgacccagatgagggcacatgctctgcaggtgagcagcgagctggcaattgctgtaaggcagctccaccttttgaacagattctatttccaccagacgctgccagcccctaaagccatcacccacagagtcatcaagacagcaaattagctggccctctgctcacacctatcccaccctgcagtcactcccaactgacacaccaaactcgtggttacgaggaatacattgtcccagttcagctcccagtgtccatcctcaatatttttgag

SEQ ID NO: 232722 - DNA, 398 bp, Homo sapiens
gacttccttcacatccactctaacttttcaggcctcgggcacatgatgctcctttgttggctgtttcagctgcagtgaagggggtggatccaagcagaggaccaggaacatctgaggggcagagtcgtgacccagatgagggcacatgctctgcaggtgagcagcgagctggcaattgctgtaaggcagctccaccttttgaacagattctatytccaccagacgctgccagcccctaaagccatcacccacagagtcatcaagacagcaaattagctggccctctgctcacacctatcccaccctgcagtcactcccaactgacacaccaaactcgtggttacgaggaatacattgtcccagttcagctcccagtgtccatcctcaatatttttgag

SEQ ID NO: 232723 - DNA, 474 bp, Homo sapiens
tcttggggtctctgtaggtggtaggcgtgtggtgaagggagataaacattccttggaacagtggagaatgcaggaaaaagaaggcatttccctttggtggccccactactaagatacaggaagggggtggtctcagctgccctcactactcatggagccgaggttcctgtcagagcccccttgggctccctatgtaccaattcccaacagagatttaatgtcatcaccttgaactcagagatgaccagggtcaatgaagtaccagacccggttgggccctgacccagaggaaattaagtgaagcaccacagcctctgatgtaaaatcccaaggagaagttttgcatccaccagatccctctgcctgcctggaatctgagggaaatgtgccstcctgggccctgaactcacccctgaactttgttttataaccaaccagcttgttttgtgcctagcccgtaccctgtctcaaaca

SEQ ID NO: 232724 - DNA, 604 bp, Homo sapiens
gaaaccaaagaacaaatctggactcacactgtcccaggttctataaggtacatagggtaagtggatactatctctcaagacttcagaaattgacatgaggttagcacacagcaaataacctgaacatcagttgttctcagagattaggaaccataygatcaaaaatggcttgaacaaccaggaaagactagacagagggaaggggctcaagtggaagccatgatttgcacaaatgaattaactagataaagatttattattaacctgtgctacatggttattcaggtacctccttgacattttgacaaactgtgaatggcattcatacttttggtctcatctcagaatatatcattgcctacaaagtttaaggctaaaaaaattcaagtttcaagcaggcatttataagatcctattgggcaaattctgtcaggcaattccagaattccatctgcaggctcattcattcagtcaaattacattttttccaaagctcatatatactaatgtgatgaaataaaacattactaaaatgcaaacttcatatttctttgagtttgaatccagatattactgcctcatttaccaaaaaatccccaaatac

SEQ ID NO: 232725 - DNA, 467 bp, Homo sapiens
acatacatcagaatgttcacggtgtttatctctgagtgatagtattacagatatttttaatttttattttgtacattttggttttgttttctaaaattattacagtgaatgcaaattatttttcttatgacaggaaaacactgtacagcaaaaatggttgtgggacctagggagttctattttgttggaggtgtttgagcagaacctgtagttgctgttgwtaactcccaggatgttgaaaaggagactgttatagacaggaagatggctattacctcttttaacctctatggtgcttcagattctgagaatctattgcacaaaatagtaattataactaataattataaccactataactattaacatataacctgtagttattaatagttatgattaataaagtcatagaatctcagatttgtcagggaactcagaagtcaactttcccagccaatgtaagacag

SEQ ID NO: 232726 - DNA, 456 bp, Homo sapiens
agtcagacagacctcgttctgtgataaatgctgcctctgaaaagctgcagccttttggactcctcacttaacccctctcagtctccttagctataaaataaggatatgaatgttgccacggcctttttgtcaggctctgatgagggcatgtggtgctgtaccttcattgcactcctgctggactcactgtttccttaccccatccttggaaagcacaagtttgggttatctattcaccakggtaaacacctccctgacataaaactaagagaagaacttcacattcacataattcctaaaataaagccaatcatccacagcattctttaaaatatactaagaagtatttattttttacatcttcatgcaaaacctggacaggagccttctccaaaccattgatttccaagatgcattttcaaactaccctgagcactccctttttcttctgggtcc

SEQ ID NO: 232727 - DNA, 544 bp, Homo sapiens
attcactatcacaagaatagcacaaaaatgacckgcccccatgattcaattcaatcactgggtctctcccatgacacatgggaagtatgggcactacaattcaagatgagatttgggggagacacagccaaaccatatcaactggtctctacatttggtgatacacctgataaggtggcaggtagagttggagttggaagaaatggcactggggttatttataagatgcaaaacattcatcctctagttgtctgtactccttgaaagaagagtaccaggccatcttccttgacactattgaatgaagtccctttttactaaatttggatatctagtgagttttcaagggacatttattttaagtagaacttttgcacttgtctctgtgcactttcttttaactcaagatgagaatggggatggaaatatgaagcatgtgatcctcctcagccccttcccaaccccttgttagagatcagtaatcacagttggtctttttttctcaagagggagcatcgtgcattgtcagcaagaagaggctcag

SEQ ID NO: 232728 - DNA, 528 bp, Homo sapiens
acaagaatagcacaaaaatgaccggcccccatgattcaattcaatcactgggtctctcccatgacacatgggaagtatgggcactacaattcaagatgagatttgggggagacacagccaaaccatatcaactggtctctacatttggtgatacacctgataaggtggcaggtagagttggagttggaagaaayggcactggggttatttataagatgcaaaacattcatcctctagttgtctgtactccttgaaagaagagtaccaggccatcttccttgacactattgaatgaagtccctttttactaaatttggatatctagtgagttttcaagggacatttattttaagtagaacttttgcacttgtctctgtgcactttcttttaactcaagatgagaatggggatggaaatatgaagcatgtgatcctcctcagccccttcccaaccccttgttagagatcagtaatcacagttggtctttttttctcaagagggagcatcgtgcattgtcagcaagaagag

SEQ ID NO: 232729 - DNA, 521 bp, Homo sapiens
aaaaatgaccggcccccatgattcaattcaatcactgggtctctcccatgacacatgggaagtatgggcactacaattcaagatgagatttgggggagacacagccaaaccatatcaactggtctctacatttggtgatacacctgataaggtggcaggtagagttggagttggaagaaatggcactggggttatttataagatgcaaaacattcatcctctagttgtctgtactccttgaaagaagagtaccaggccatcwtccttgacactattgaatgaagtccctttttactaaatttggatatctagtgagttttcaagggacatttattttaagtagaacttttgcacttgtctctgtgcactttcttttaactcaagatgagaatggggatggaaatatgaagcatgtgatcctcctcagccccttcccaaccccttgttagagatcagtaatcacagttggtctttttttctcaagagggagcatcgtgcattgtcagcaagaagaggctcag

SEQ ID NO: 232730 - DNA, 542 bp, Homo sapiens
tcactatcacaagaatagcacaaaaatgaccggcccccatgattcaattcaatcactgggtctctcccatgacacatgggaagtatgggcactacaattcaagatgagatttgggggagacacagccaaaccatatcaactggtctctacatttggtgatacacctgataaggtggcaggtagagttggagttggaagaaatggcactggggttatttataagatgcaaaacattcatcctctagttgtctgtactccttgaaagaagagtaccaggccatcttccttgacactattgaatgaagtccctttttactaaatttggatatctagtgagttttcaagggacatttattttaagtagaacttttgcacttgtctctgtgcactttcttttaactcaagatgagaatggggatggaaatatgaagcatgtgatcctcctcagccccytcccaaccccttgttagagatcagtaatcacagttggtctttttttctcaagagggagcatcgtgcattgtcagcaagaagaggctcag

SEQ ID NO: 232731 - DNA, 584 bp, Homo sapiens
acactttaactgttatgttttaatgctttagttattcttatgggagttttgtaataacttgtcaggacaaaagggcgatttttttaaaaaaataacaaatatacgattatgggtattataatattatttttaagtaggtcttttatactgggagataaactctgttaagattgttgattaatctattcagattaggtagtttgatcttccatgcatttctttggatcatacttgaataaatattaattcyatatatgaaaagttcctttcttcattacttactagacttttaaagtctgaattttgctttggttgggtttggattcctatttcagaatttaattttagcacaaagtataacattgctgaaataaactatagaaacaaatttacaacaaggttatctgagacttcatcctgcgaggtttagttgctaatacacccaaagaagttctgtagaaatctcagctttgtggcagaaccgtatcatggactacaatgacacaatttctagtgctggtacttgaagttttaactctagcatttcactgttacagggaattccctttaattacaagtattta

SEQ ID NO: 232732 - DNA, 329 bp, Homo sapiens
aagagctgcaacaaaactttcagcaccatgcacgagctggtgacacacgtctcggtggagcacgtcggcggcccggagcagagcaaccacgtctgcttctgggaggagtgtccgcgcgagggcaagcccttcaaggccaaatacaaactggtcaaccacatccgcgtgcacacaggcgagaaacccttcccctgccccttcccgggctgtggcaaagtcttcgcgcgctccgagaacctcaagatccayaaaaggacccacacaggtaaccgcgggctgggacagggaccaggcgcggaggggagacacgcacaggctgagactcaggc

SEQ ID NO: 232733 - DNA, 460 bp, Homo sapiens
tggtgaaacaccatctctactaaaaatacaaaaaaaaattagccaggcatggtcacaaactcctgtaatcccagctattcgggaggctgaggcaggagaatcgcttgaacccgggaggtgaatgttgcagtgagctgagatcacaccattgcactccagcctgggggcaagagcaagacttcatctcaaaaaaaaaaaaaaagtgttgttaggcgatttcaccattgtgcgaacatcatagagtgtacttacacaaacctagatggtatagcttactacacacataggctatatggtatagccaccattgtatatgtagtcagctgttgactaaaacttccttatgggtgcatgactgtatttgaaaaaaaaattgtttgtattgaatatgtacagacttatttttcttatyagtattccctaaataatagagtatatcaatcatttgcatagcatttat

SEQ ID NO: 232734 - DNA, 573 bp, Homo sapiens
gctaaatttgtggattcatgagatgagtttcaaaaacttaaccctatatgtttctattaatggtcaaaggattgccccccccaaccccaattaaaattcttctctcagattacagtattttctcttaaagaatctataggctggctgagctctgttgttcaggcctgtaatcccagccctttgggaggcaaaggtaggaggatcacttgaggccaggagtttcagaccagcttgagcaaaataggaagaccttgtctttacaaaaaaaaattaaaaatttagccgggcatggtggtgtgtgcctgtagtccttgctactcaggaggctgaggcaggaggattgctttcgcttgagyccaggacttcaaagttatcatgagctgtgatcacgccactgcactccagcctggggaacaaagtgagaccctgtctctaaagaaaacaacaggctgtgcccagtggctcacgcctgtaatcccagcactttgggaggccaaggtgggcagatcacaaggtcaggagatggagaccatcctggctaacatggtgaaaccctgtctctattaaaaatac

SEQ ID NO: 232735 - DNA, 610 bp, Homo sapiens
tgctgttggaatgtatattttttgaagggtgaaaaaggaacgtagatggtgatttctaaaattttttttatcatttcattggctgtgaagattttctgttttttaaaatatgtctgaattaaagagattcaaagcartatgacatagaatagttgctgacatttgtacttcctggttaagagcgatgtatggtatgtaaggaatgaaataccctataatattgctctacaagtaaaatgccatggcttgattttgtgaattcttcctctttgcaagctgaaggcagtgcttcctttatctgttctttgtatctatttcatgatctattacactaccttctgtgaattgaaaaattatagtattttaaaatccattgaaatacttagtaaaggtctatttgtttttactcccttcttgagtttactgttttctcttgaaatgagtagtatttttctaacacgttagtgagacaggcattaaattccagggaaaatctatttttattatgtggatgcactttgacttatgatagggttacatccttataaacccatcataagttgaaaatatcataagtagaaaatgcgtttaatatacctaacccacctaa

SEQ ID NO: 232736 - DNA, 610 bp, Homo sapiens
tgctgttggaatgtatattttttgaagggtgaaaaaggaacgtagatggtgatttctaaaattttttttatcatttcattggctgtgaagattttctgttttttaaaatatgtctgaattaaagagattcaaagcaatatgacatagaatarttgctgacatttgtacttcctggttaagagcgatgtatggtatgtaaggaatgaaataccctataatattgctctacaagtaaaatgccatggcttgattttgtgaattcttcctctttgcaagctgaaggcagtgcttcctttatctgttctttgtatctatttcatgatctattacactaccttctgtgaattgaaaaattatagtattttaaaatccattgaaatacttagtaaaggtctatttgtttttactcccttcttgagtttactgttttctcttgaaatgagtagtatttttctaacacgttagtgagacaggcattaaattccagggaaaatctatttttattatgtggatgcactttgacttatgatagggttacatccttataaacccatcataagttgaaaatatcataagtagaaaatgcgtttaatatacctaacccacctaa

SEQ ID NO: 232737 - DNA, 610 bp, Homo sapiens
tgctgttggaatgtatattttttgaagggtgaaaaaggaacgtagatggtgatttctaaaattttttttatcatttcattggctgtgaagattttctgttttttaaaatatgtctgaattaaagagattcaaagcaatatgacatagaatagttgctgacatttgtacttcctggttaagagcgatgtatggtatgtaaggaatgaaataccctataatattgctctacaagtaaaatgccatggcttgattttgtgaattcttcctctttgcaagctgaaggcagtgcttcctttatctgttctttgtatctatttcatgatctattacactamcttctgtgaattgaaaaattatagtattttaaaatccattgaaatacttagtaaaggtctatttgtttttactcccttcttgagtttactgttttctcttgaaatgagtagtatttttctaacacgttagtgagacaggcattaaattccagggaaaatctatttttattatgtggatgcactttgacttatgatagggttacatccttataaacccatcataagttgaaaatatcataagtagaaaatgcgtttaatatacctaacccacctaa

SEQ ID NO: 232738 - DNA, 610 bp, Homo sapiens
tgctgttggaatgtatattttttgaagggtgaaaaaggaacgtagatggtgatttctaaaattttttttatcatttcattggctgtgaagattttctgttttttaaaatatgtctgaattaaagagattcaaagcaatatgacatagaatagttgctgacatttgtacttcctggttaagagcgatgtatggtatgtaaggaatgaaataccctataatattgctctacaagtaaaatgccatggcttgattttgtgaattcttcctctttgcaagctgaaggcagtgcttcctttatctgttctttgtatctatttcatgatctattacactaccttctgtgaattgaaaaattatagtattttaaaatccattgaaatacttagtaaaggtctatttgtttttactcccttcttgagtttactgttttctcttgaaatgagtagtatttttctaacaygttagtgagacaggcattaaattccagggaaaatctatttttattatgtggatgcactttgacttatgatagggttacatccttataaacccatcataagttgaaaatatcataagtagaaaatgcgtttaatatacctaacccacctaa

SEQ ID NO: 232739 - DNA, 632 bp, Homo sapiens
ctgcacatttcatttattgggcaaaatgttttctacttcttgattgaattgtagtattcttttttccagaaatttgttttgtctgagttttcaattttttcttgtttttcattatatgtttttattatctttatcacttctgctgtatatgtatttatgtctatttttagatttctaatattacacattttctcttctttgaacatatgaaatatgattataataataggcaytttaatatccttgcatgataattctagcatctctatcagttctgggctggtttccacttactactttttctccttattatgagtcaaattttcctccttcttttcatacttgataatctttaactggatgccaaacattgagactcttatctgatatatttatattctgataaatatttttgaacattgatccgggatgctgttaggttttgtgacaacagagtcatccttttgggtcttgcttcatagatttgttaggagataccatggcttctgatttagtcttgggctaattcctcagcactgaggcaacactcttctgcgtaccataatcagtgccccatgaatgatgaagttttccagtctgaatggtggaaggaggcactattccaaccatgt

SEQ ID NO: 232740 - DNA, 256 bp, Homo sapiens
gcacaaactggaggaccatggactaaactctgtcagtgaaattgtttatttggttaaaactctgtgtgwgtgtgtgtgtgtgtgtgtgagagagagagagagagagagagagagagagagattttttaactgatttttgaatgcctttggttggagcatatgctcagtatgcactctgtagttccccataggccctgctactttctattctctaatatctatctgcctttttagtccctaagggcagttgagtgtg

SEQ ID NO: 232741 - DNA, 256 bp, Homo sapiens
gcacaaactggaggaccatggactaaactctgtcagtgaaattgtttatttggttaaaactctgtgtgtgtgtgtgtgtgtgtgtgtgwgagagagagagagagagagagagagagagagattttttaactgatttttgaatgcctttggttggagcatatgctcagtatgcactctgtagttccccataggccctgctactttctattctctaatatctatctgcctttttagtccctaagggcagttgagtgtg

SEQ ID NO: 232742 - DNA, 532 bp, Homo sapiens
tacactgatttctatgaattataaatttaagagcaaaaacttagcttttggtgtagtgaaaatacaatgcctgagagataagtaacttggtttttgtcctaggtaacaacttctgccattaaataattctgttaccttggrcaaatcactaaatttctggacttcggtttccttatctatgaaattgggagattcagagtcccttcagttctaatatcatggtattataatacacaattctgttgcacacacagtagtggaccacaaatatttactggttaaatactacaaatgtgaactgagttaaagagaaagctgaaaaaaaacagaatttttttttccctctgtaaaatgagaggcatgccagagataggactattcctttcaactctaaattccacctttaatgtttcttttagcaaaggtctaactctgccttagggtaatcatgatagaaatatcagtgatctttgtttagtttttcatgtgaagatggcacagtgcatcagctcttctttcttttctgtagcaa

SEQ ID NO: 232743 - DNA, 561 bp, Homo sapiens
gaaaacatgaatttgtatgacagattataatgagtgtgttttgcacccctgcttaccttgttcattgagtttcttcacttttaccaagtgctcacttgcccagcactaatagagaaatcacagtggaaaaactaacatagggagactacaaattcttgactgttgagttcaaaatgccgcagtccaggcttaagataggaagatgtgaatggtatatgatctgtcgtaatcagtagccacttcccttcccaatttgttactctactagatatttgttaatagcagaagagaaagattttaaaaaatggagttggttaataagagaagggacagagctgtaccttgacaggtcccccaggacaaaatgtggaggtggaagcacagggaggcagctgaacccttgggtgagtttgagaaatcaacagtacaaaaaaaaccaattttctcctttctatcttaatttcttakaggatggcaatctcctcagagtccctagtatggatggaaggaaagaaagggctacctagggagaagtcctgctccctacatggccaagaatag

SEQ ID NO: 232744 - DNA, 561 bp, Homo sapiens
gaaaacatgaatttgtatgacagattataatgagtgtgttttgcacccctgcttaccttgttcattgagtttcttcacttttaccaagtgctcacttgcccagcactaatagagaaatcacagtggaaaaactaacatagggagactacaaattcttgactgttgagttcaaaatgccgcagtccaggcttaagataggaagatgtgaatggtatatgatctgtcgtaatcagtagccacttcccttcccaatttgttactctactagatatttgttaatagcagaagagaaagattttaaaaaatggagttggttaataagagaagggacagagctgtaccttgacaggtcccccaggacaaaatgtggaggtggaagcacagggaggcagctgaacccttgggtgagtttgagaaatcaacagtacaaaaaaaaccaattttctcctttctatcttaatttcttataggatggcaatctcctcagagtccctagtakggatggaaggaaagaaagggctacctagggagaagtcctgctccctacatggccaagaatag

SEQ ID NO: 232745 - DNA, 453 bp, Homo sapiens
ctcatcttctctgaagttccttgttaaagtgtgaaaataacttgtagtgtttttcatcttcggtggaatgattaaactcacgtatattgacacaaaatttgtaaaaagaaatatactgtgtaaatgtgaatttttaaataataacaatacataaagaaaaaaggaccaagcatttttcattgcagaaataggatagggaaggrctgaagtaatcatttgatttcagcaaatcacatctcactctgttcgtcatcttggctccatccaagaggtctgagggctgggagggactaatagtagagttcctacttatctgtataatatcaaaaattcataaattttaagtcttgtgatctttcccctatcttttttttctggagttttcttgaggaattgtgaaacggactgagttgaaatcagaaccatggaaagttgattatttacttattaaaa

SEQ ID NO: 232746 - DNA, 546 bp, Homo sapiens
aactttgaatggaaggcagatttgcactaagcaattggggtcccaagaattaacacacccatcagatcaggacttgaccaggggtccagcttcagctccccagcatcagggagtccaccctctactcaaggaaggcctttgcagccaaccccccaccacacacactgccctaccttaagctctcccctggagcagaggccctggccaggaggggagaatggcaagctacakgggtgtgcacctacgctgcgtccagggcttctctccctggtaccacctcctcctgttgatgcctctttgtctccatagcccctgcacgggcctggcacagcatattgattgatgaatgaatgaatgaatgaatgaatgaatgctgacatgtattcccacttcacctcgccccctcacaggactgtgagctcatggagggtaggggccaccgcttgttcatcccagtattcccacaaagcctggtctgaaagggaaattcacaaacaggaaaacgtctgttggaccaaagtgaattaaaatgactgcgaactgaga

SEQ ID NO: 232747 - DNA, 530 bp, Homo sapiens
tttgtaaacacaccaatcagcaccctgtgtttagctcaaggttttgaatgcaccaatcgacactctgtatctagctgctctggtggggccttggagaacctgtgtgtcaaaactctgtatctaactaatctgatggggacgtggagaacctttgtatctagctcagggattgtaaacgcaccaatcagcgccctgaccaaacaggccactgggctctaccaatcagcaggatgtgggtggggccagataagagaataaaagcaggctgyccgaagcagctttgacaacccgctcccgtcccttaccacactgtggaagctttgttctttcactctttgcaataaatcttgctaatgcttactctttaggtccacgctgcttttatgagctgtaacacttaaccgccaaaatctgcagcttcacgcctgagcccagtgagactacgagcccactgggaggaatgaacaactccccacgcgctgccgtaagagctgtaacactcaccgggaaggtctgcagcttcactcttg

SEQ ID NO: 232748 - DNA, 530 bp, Homo sapiens
tttgtaaacacaccaatcagcaccctgtgtttagctcaaggttttgaatgcaccaatcgacactctgtatctagctgctctggtggggccttggagaacctgtgtgtcaaaactctgtatctaactaatctgatggggacgtggagaacctttgtatctagctcagggattgtaaacgcaccaatcagcgccctgaccaaacaggccactgggctctaccaatcagcaggatgtgggtggggccagataagagaataaaagcaggctgtccgaagcagcwttgacaacccgctcccgtcccttaccacactgtggaagctttgttctttcactctttgcaataaatcttgctaatgcttactctttaggtccacgctgcttttatgagctgtaacacttaaccgccaaaatctgcagcttcacgcctgagcccagtgagactacgagcccactgggaggaatgaacaactccccacgcgctgccgtaagagctgtaacactcaccgggaaggtctgcagcttcactcttg

SEQ ID NO: 232749 - DNA, 576 bp, Homo sapiens
ataactaaatgggagaagtaaatcattctttatcagtaattacattaaatataaatgagtaaaattctcttattaaaaggcagagattggcagactgaataaaaaatgatatactgtctacaagagactcattttagatataagagcataaagtgattgaaagtaaaaggatggaaaaagatatccaatgcaaataaatagtaatcaaaaaagagctgggatagctatattattgctacacaaaatagatattaagtcaaaaaagttcacctagmagatataacaattataaacatatacatacctaaaaacatatacatacctaaacccaaactatatgaagcaaaaatggacataattaaagggagaaatagacagttctaaaataatacttggagacttcaacacctcactttcaataatggatagaacaatcagacagaaaatcaataaagaaatagacaactgaacaatgtcatgagtcagttatatctaacagaaatatatagaacacttcaatcaacaacagcagaataagcattcttctcaagtatgcgtggaaccttctccaggatg

SEQ ID NO: 232750 - DNA, 517 bp, Homo sapiens
actatgaacaattacacaccaaccaattagatgacttagagaaatggacaaattcctggaaacacaaactatcaaaaccaacttaaaaggaaatagaaaacttgaatagagatataacaagtgaagagattgaatcagcaatcaaaaacctcccaacaaataagagtccaggactagatatcttcactggtgaattctacctaacatgtaaagaaaaattgacaccaatccttctcaaactcttccaaaacattgaagaggagagaacctttccaactcattctgtgatgccaamgttaccctgataccaagccaaagacactacaagaaaactataggccaacataccttaagcatagagatgcaaacatcctcaacaaaaaactggcaaaccaaatttagcagcatattaaaaggattacacaccatgaccaagtgggatttatccccataatgtaaggatggtttaacatacaaaaatcagtcaatataatgtactacattaatagaatgaagg

SEQ ID NO: 232751 - DNA, 550 bp, Homo sapiens
cctacggaacaccagaccctgctaggggagagtcccactgtccatctttctttccctctccttcccacacaccccaaatgcaccccactcaggtaccccagccctgctcccagagacagccaaggtcacaggaagcccctctcaagagaaaacaacagttaccaggcttccagctggacagcttaccactgcggctcctgcagggaccccctggattctgcacctcagccccctcacccattcccatgacaccccctgccttccccctgacaatattctcccgggaccctccactcctcctgggccccaaggaggaaaggggacggaaatttcataccccttccaaggccagggrgcacaggaggggcggttctaggcaggcaggggccaggtgtccttctctgggggcctctgaaggtcacactgtggccaggcagccactcctccccctcctccctacttggaggcctgtagccaaggcctttgtgccagggtctgaggaacttgcggtgttagcagcgacccctgtccatggctttcctcttgcctc

SEQ ID NO: 232752 - DNA, 520 bp, Homo sapiens
gagattcaaagggaagggaaatagacttcacctcttggcaagaaaatgccaaagttttaaagaacatatgggatgggagataatgttgtggagtttggaaatacaacctgctgcaagcactgcttatatgcgatgccttcactaaatctctctctctctctcacgcacacacacaccttattaattcctcacaacaaatcaatgagataattcttatcattccctgtttttacagatgatgaaactaaggctcagagaggttaggtcatttgtccagggacttgcagtcctctagttgtaaggttgggtttcaaaatcaatgtacgttcttaaacagtacactccactgcctcctgacacaccgaggtaaatgccaccctgggaagttactrgaagcctgtcagccagtcttcctagtgactcccacattaccatacatagtaagtgtggtgggagaatatttcaaagtattaactagcatgccttcctccttaaaccatcacattcctttacttgtgcc

SEQ ID NO: 232753 - DNA, 381 bp, Homo sapiens
atttacaaagcctctgaagatgggactttagagaaaatgcttcctgcaaatagcagttaactgtgcatggccttctttgctcatcttcaaagcagttgtgcagcagaagaggtgaggggcaggtctggcccgtgctccctggggaaatgactcttcagtcaaatgacggccaaaggggcttggggactggagcagttgggcttggagaccttggtgacagcaatgagattggacaatgtatgaacagcccacagggacttattggttgtgctcttggccagccttactgcccatgcaagagcaccacaggtggakgtagggccacgcactgtcctctctctccaatctggggaataactgcctctttagcccctaggctgg

SEQ ID NO: 232754 - DNA, 526 bp, Homo sapiens
taacggtactaattgctcctggtcattgttggtctgaggggccgtagggagaggaggagctgggcacagcctatttatctgctcwgtgatttctctgatggctggattacaggatgtgatttccttctcagatccttcagtgatttccaaggtgagcagaagttgcagattccttaattgggaggcctgatttaatgattacagaaatgcagtggctggaacttgctttgtagctggcaaagaaggaatgcccgggagtggcttctccagtggtgttggatttaagggaaagggagggtgacttcagtggcaggaaggctcagtggacagaagggaaaattgctttttctttgggctgtgtaaatctattgtcagtgaaggaatcctggaactggatgatctgtgggccctgaatcatctcataaggagcagagaggtgcaacaaagcagacactctgtgatagaaagatttggctggagactagtggtttatccaaggctaggtatagattggctaagtcactta

SEQ ID NO: 232755 - DNA, 511 bp, Homo sapiens
agtctttgccatgtctatcttttatgtcgtgctaaagtagacattgaaaaggatctagaagtgaatgactggggacctgtattcttgaaattcatactcagaatttgtagtagaaacagaataatattcattagatgattacactaataagctrtgaataaatttaacattatttcggggcttttattgcatggagagttaagggatccagaaagatgaagagtagcttctctcagaattggcatccatgatacaactcacagctaatcaagggagacttcttgagggaagtgagtaaagtgtgtagctactagaacattggagaacactgggttgctggggctggttgacaagcagatcccattgtgccaaagactcatgtatgccaaagtcatgggctagacctcaatgttacatttttcctttcctcttctgtatttgtgcctgttgtgaaatgggcatatcacatggattggagctatctgtagaatatctgcagcctgttccccag

SEQ ID NO: 232756 - DNA, 482 bp, Homo sapiens
gaattccaggtaatagatgaagagaattgaaccattctcctgatcacagctgggggagtttggtggggctttttaaagggagaaggagagaagggatggctattcctatgctgacttgtaatgtctcctcaaayggtgagaacagggcattgttcaagaacaagccagatacctgatgaagagcagtctatgtctcttccctcctaaaaaaaaagacaaagggtagggagaggggtctgctttaggcagcttcagtatatttctaattatagtgtccatttgtaaccaagactttggccttccaagaaggcttgattatgacattcataattcattggcagtcagtctattacagattcaatgatttctccagccagggagagaatcttgatcctttaaaaactgatttttcacattagaatagcaaaagcaattagttttatttttagctcagttaagcaagagctctaatgaagctgaaa

SEQ ID NO: 232757 - DNA, 387 bp, Homo sapiens
tgtggatttatttctggattatctaattctgcttcaattatctatttgtcrgtttttacactagtactatgctgttttgactactatagctttgtagtatattttgaaatcaggtagtgtgatgcctccagctttgtttattgtgctcaacattgctttggttattcaggctgttttgtggttccatatacattttaggactttttttttctattcctgtgaagaatgtcattggtattttgatatgaactgcactgaatctgtagattgctttgggtattacagtatgaacattttaacaatattaattcttccaatccatgaacataggatatctttccatttatttgtgttttcttcaatttctttcatcaatgttttatagtt

SEQ ID NO: 232758 - DNA, 387 bp, Homo sapiens
tgtggatttatttctggattatctaattctgcttcaattatctatttgtcggtttttacactagtactatgctgttttgactactatagctttgtagtatattttgaaatcaggtagtgtgatgcctccagctttgtttattgtgctcaacattgctttggttattcaggctsttttgtggttccatatacattttaggactttttttttctattcctgtgaagaatgtcattggtattttgatatgaactgcactgaatctgtagattgctttgggtattacagtatgaacattttaacaatattaattcttccaatccatgaacataggatatctttccatttatttgtgttttcttcaatttctttcatcaatgttttatagtt

SEQ ID NO: 232759 - DNA, 522 bp, Homo sapiens
tccttgggaaaatgccaagcttatggtgccaggccccttgctctgcagacatttgaaagggggaatggggtggccatggccttatcagacagagctcagccggagaggggactcaggagctggagccagtgagtggagttggcctcagaactgtggtatcttttcttatctaatagtaaaatcccagatgctagttggccctggtgccccatggtggagaagyagtgagtctggtctggagcccaggtcccagatctccttctcattggttttaagtaaagagggaaaagaggctctgtagctgcttttcacaaatgtcgtcattctcatcagcagatggtagaggagagaggctaattcagaactcctgtagcatataaaacaaaaaccagccaaaggaacccacaaggtaaatgatatcattataagggaagtaaaggaaacagcatctgtccctgctgtggcaggaaccagagctaggatgctggagaggtgcctgctccctgggccttgcagggaagt

SEQ ID NO: 232760 - DNA, 569 bp, Homo sapiens
gtgaaactctatctaaaaaaaaaaaaaaattgtcatagtaatatatatttttcctttttagtaagtggcaaagtacccctgattttgaaacatgtatggtcgtgatatcaagagtgacaacctgggcaaaagagagccattgcaaagaagaaaggcctttagggaaatggagcagaaagaggaagcagtaagatatygtctttagcgcctacaaccatatatggattgggtggtccagaaggaagaatgtggcaacctcccacaggggctgtcggcactgctgtggtgggatgggcaggaatgatttctccctccaggatcactctgtttccaatgaaagacttttagagttgtcacagctcttattttttcagtgaggtgattgaagtccagaggaattaactgacttgtgcaagaccacacagctagcccaagatccattcagagccaagaaagagagtcctgacggcacattctagttaccttagacaacatgtcagtgcaattcatcaagttcttcataatccagaagtatcattagaaacactaaccatataacactgtaatat

SEQ ID NO: 232761 - DNA, 582 bp, Homo sapiens
atgagtctccaaacccaattgcttgggttggtgtctcactcaggtatttaagagctgtgtgatcttggacatgtcatttagcctctctgagctgtggtctcttcacctgtaaagggggtagaatggtaatactaatgccccagggacaatatgtaagtctatagaatatatataaaatgcttggaactgtgcctggtgcacagtgtttgttgttgttgttattgtcrttaccatttacttattattgctcttagtggttaaaagtgtagactttggtttgagtcttggcgttgccacttaccactaactttgtgaccttggacagtttctcaacttttcaaagcctctatttcctcatctgttatttgaggatgtctcttacttcctggggttactgtgagggtcaaatgagacaatatgtgcaaaacacttagcatggtatccatcacagagaaagcacttcattgacgttatctattttatcatcttgagaacactattcattcatcaaatatttctgaagcctgtgctgagtgtaggcttggtactgtaataaaatttcttccttctttaatgaggaaa

SEQ ID NO: 232762 - DNA, 614 bp, Homo sapiens
atttatcatgaatgctttagtaccaccctcttggtcctattctagtgatactgagtgagctcttgtgtgatctggttgtttaaaagtatatggcatctccccccttctctctcatgctcctgctgtcaccatgtgatgtgcaagttcttgcttcatctttcaccatgattgtaagcttcatgaggcctctacagaagcaaatgctaccatgtttcctgtatagcctgcagaaycataagccaattgaacctccattatttatcaattacccagtctcaggtatttctttatagcaatgcaagaatagactaatgcagtaaattacaacctaatgggttcttcttgcctgctacaccaaaaagccaatacactgagacagtggtgttgcagcaaacagtttaattatcacaaagcagctgagtggaaggataagaatagttctcaaatctgccttcccaaaagctcagagtctagtgttactaagaataatttggtgggcaggggcttagggaatgggtgctgctgattgtttggtgatggaatcataggagtgtccaaaatgtttttgggtgctaagtcagtttctgggtggggaggggtcatgagactggttg

SEQ ID NO: 232763 - DNA, 461 bp, Homo sapiens
gagctgttcctatttggccgtcttggaatgaaatttttgtggtccttttcactttcttgatagggttgtgatggaggctgagaagtccaacttcaagggaccacatctggtaagacccttcattctgatgagagcyttcatgctggtgggactttctttcagggttccaaggtggtgcagggcatcacatggtgatggacctgagtgtgctattaaaataattctttcattccatcagtattttctattttatcagcttagaattgtgaatagtgtttatatatgctatgtactccccatatttattattgtataccctagttctatatttccctcccattcctatagaaaagggagcaagtgcttccccctcatttcaagtcatgtaagaaggacttcaaggaggccacttagaaagcatgatttatttcccttggagattggggagcatatttggctaa

SEQ ID NO: 232764 - DNA, 461 bp, Homo sapiens
gagctgttcctatttggccgtcttggaatgaaatttttgtggtccttttcactttcttgatagggttgtgatggaggctgagaagtccaacttcaagggaccacatctggtaagacccttcattctgatgagagccttcatgctggtgggactttctttcagggttccaaggtggtgcagggcatcacatggtgatggacytgagtgtgctattaaaataattctttcattccatcagtattttctattttatcagcttagaattgtgaatagtgtttatatatgctatgtactccccatatttattattgtataccctagttctatatttccctcccattcctatagaaaagggagcaagtgcttccccctcatttcaagtcatgtaagaaggacttcaaggaggccacttagaaagcatgatttatttcccttggagattggggagcatatttggctaa

SEQ ID NO: 232765 - DNA, 584 bp, Homo sapiens
tgctgacattttctttggggcagaatttactttgtcatatctacagaattttgatctattttaatttttttagtaatgggcttttaactatatgtataaatagattagagcaagaaagacataaatctttgtaaagattttttttccatgttatatctttaccacttttcaattgaatagtttggtacaacagagtataaagatatgatttataaacttagctaggcactccagaatgaacagcagtctggaccattcactttttccagaaagctttatttctcattatccatggaagcttggagacaatccaaacttctttgcacatttgtataaccctktcatgcccctcttgatcgcaaacagatgactttgattttgttccttcacagagggaagtttacgttaacttctaaccaccaaacctgtgaactaatatgcacctgtagatacactctttttattctctctctccagttacaattgattggcacaaatgacaagaatacaaagaaggcagtactctagttttaaccaggctagcgatgacacctatgggattgcagatcacccaaacataactg

SEQ ID NO: 232766 - DNA, 584 bp, Homo sapiens
tgctgacattttctttggggcagaatttactttgtcatatctacagaattttgatctattttaatttttttagtaatgggcttttaactatatgtataaatagattagagcaagaaagacataaatctttgtaaagattttttttccatgttatatctttaccacttttcaattgaatagtttggtacaacagagtataaagatatgatttataaacttagctaggcactccagaatgaacagcagtctggaccattcactttttccagaaagctttatttctcattatccatggaagcttggagacaatccaaacttctttgcacatttgtataacccttycatgcccctcttgatcgcaaacagatgactttgattttgttccttcacagagggaagtttacgttaacttctaaccaccaaacctgtgaactaatatgcacctgtagatacactctttttattctctctctccagttacaattgattggcacaaatgacaagaatacaaagaaggcagtactctagttttaaccaggctagcgatgacacctatgggattgcagatcacccaaacataactg

SEQ ID NO: 232767 - DNA, 385 bp, Homo sapiens
ttaaattgtataacatgtattgtgcctagaattattcctgtcacataataattcagagcagagcttttcttggcatattcaacaaatattagttatcatctccctagtaaatatttatttcrttatttgctcatttgtggtgctgaaattttcattttttaaaatgtcaggtcttggtagaatcttgtgtgtgaccctacctctctttctaaggaaaaacagaggcagaaacgatctgaccattttcccctacatgactctttctcatgaccccacatgtatccataacccaagattcctaggaaagcagtgtaattctttaggaaatctgtagtcccatctttcacttctgcaatgccagtgcaaggatacctgtggaaattct

SEQ ID NO: 232768 - DNA, 488 bp, Homo sapiens
cctcttcttttgtttgaatgctaatgtggaagtcttcatcaatatgaaatgcagttgaactagactgactttattgcagctttagttatattaaattgaccactgacttcatgtggtttgcagggaagatctaaactttcccttcagcgtggcttaggatctgagccctagtcagattcaggagttttatttgtgctttagagctgaaccactacttttctgtgccagaaatgatatygctctgttttatagctcagctgccaactttttgattcactgtaaagaagtctttgctttccagggtcatccttggttttcaactctggatatctcttttcaccctgatttccattcaccagtcttacagctatgaagcactggagtgtgtcaaaatttttatccttctttgtcccagcctgtgtagctgagagaccagtgggtctcaactctcctactcatcacgtccctccccttcagttggctgctct

SEQ ID NO: 232769 - DNA, 532 bp, Homo sapiens
attggtcttcaaatttgactgggccctcagtgcagttcagcaatacatgttttcctagtgtttcctgccttatgttttcctagtgaggtctttctcggttttccaaagaaacaattttagaatttcccttctttttctaatgtctgaccccaccacttccaatgcatgtatagcagatgatcttccctcttaatcagcagagaaagaaggcattaccttaacttcttccaatcacagccaaaaaatcatctctattatgtcttatttttttctctgtggctacrttacaaggaaagtagtgcaagtcttctagttcaaatctgaactccctgatgttctggctcccaactcctctctctatttcagaaatttagttcaatcaataaccaactctaccaaaaccactcttcctttctatatctccagattctttgttgtaatagcgccttctctttagtatttagacataattataatgaaaggtttctaagacatatatcttattttatgttctcgctttcctatcctattt

SEQ ID NO: 232770 - DNA, 565 bp, Homo sapiens
ttttggaatgttgtgtttacaattccattcatttccagaaatattttttatttctctcttaatttcttcattgatccagtggttgttcaggggcatgttatttaatttttcatgtatttgtacagtttctagagttccctttgttataaatgtwtagttttattcaattgtggtctaagaagatacttaagttgatttgaatttttttatcattgttgagatttgttttgtgccctaacatattgttcatcttggagaatgttccatgtgccgatgagaaaaattgtattttggagctgttggctgaaatgttctgtaaatatctgttaggtctacttggtctgtagtgcagtttcagtctgatgtttctgtgttgattttctgcctcgattatttattcaatgctgaaagtgggatgttgaagtccctgctgtaatttgaatgtttgtcctctccaaaactcgtgttgctacttaattcttaatatggcagtattgaaaggtgcagcctttataaagtgattgagtcatggaggttctgttgtcattatgaattcatccattct

SEQ ID NO: 232771 - DNA, 609 bp, Homo sapiens
gggcagccctcctagccccccaaccagagtaagttcagagagactccagcactgctgcacagtgaaagaggatttatggacagaagaaggaaagtgaagtaacagaaaagagatgtgaggtacagaaacagtcagattggttacagctcagtgtttgccttatttgaacacactttgaacagttggctgcctgcaagtggctgaagtatggcttctgtgattggctgagactcagttacttgttacaagagtaggttatggtctatttacagtccagttaggttacacgtcactatgtagggagaaaccttaccaagggttctgaacttaaaatgaggcagctttaagctaaacttaatttaacaataaaaaatgtttaatggcagaacaatattctaccatgtaccrtactgtttttcttaactctttctcttattggtggatattcaggcaatcctaatgttttacttttattataatgctgcaataataatctttatggaaaactctttttcccatgtcttgagttattttcttaatagaaatttccagggcttggcacagtggcatacacctgtaatcccagcactttgggaggccaagactgga

SEQ ID NO: 232772 - DNA, 587 bp, Homo sapiens
cattcttcacagaattagaaaaaaacaattccaaaattcagatggaaccaaaaaagagcccacatagccaaagtaagactaagcaaaaagagtaacaaatctggaggcattacattacctgatttcaaactatcctataaggacatagtcaccaaaacagcacrgtactggtatagaaacaggcacattgatcaatggaatagaatagagaacccagaaataaacccaaatacttacagccaactgatctttgaccaagcaaacagaaacataaaatggggaaaggacacccttttccacaaatggtgctgggataattggctagccacatgtaggagaatgaaactggatcctcatctctcaccttatacaaaaatcaactcaagatggattaaggacttaaatctaagacctaaaactataaaaattctagaagataacattagaaaaacttctagacattggcttaggcaaggatttcattaccaaaaacccaaaagcaaatgcaatgaaaacaaagataaataactgggacctaattaaaagagcttttgcatagcaaagggaaccatcagcagagtaaacag

SEQ ID NO: 232773 - DNA, 657 bp, Homo sapiens
gaccagtaataaagataatatatttcctcctctatctgccttgcacttgtatagttcatttggcaaaaaaacttagagaatggaggtgataatttattgggacccttcaaatttcaacattaggttagatatttggagggtccctgattaatataatatataggtcccaaatccatatgtatttctaatatatattttccaataacagcacaaaagagctaggtaggaacaaggctatattggtctaaggaaataacctcaaatggtaatttgaatccacacgaaaaaatgagatccaaaaatgattaaaaagaaaataaatataacaaaagccataaatatatacttgtcctttcttctttcaaagatataaaattatataaaataataactataacaatttactgttggttttgtaacatttatagatgtagtatttataacaatatcagaaaaaggggtaaaagggaatggaactatamagaaatgtttctatggttcactggaattaagtttgtataaatctgataaaatgtatatggtaagctctagagcaactaaactaaaatatgcatagtagagattatttaaaaaattacatgctatatttgaagacatttactactgcaaaataagtgttaaagtagaataacaaac

SEQ ID NO: 232774 - DNA, 578 bp, Homo sapiens
tctccctgtgatgctgtgcttcagtggtcacactcctagtccaccttcatgttccatcctgtacacctggctctgccttctagatagcagtagtaaattagtgaaagtactaatagtccctgatatgcagaaataatgacgtagctgtctttctctctgtctcctctccctctctgccttggctgccaggcagggaagggctccctgtccagtggacacgtgacccacrtgaccttacctatcattggagatgactcacattctttaccctgccccttctgccttgtatccaataaataacagcgcagccagacattcgtggtcactaccagtctccgcgcattggtggtagtggtccaccgggcccagctgccttttcttttacctctttgtcttgtgtctttatttctacactgtctcatcgccacacacagggagagacccaccgaccctgtggggctggtccctacactcaaaagcattttttgagcacttaatgagatcattgatgggtcattgtttggaaaagttgaaagtgctgaagaaatgtcaacaatcagtccaccagtcagatggta

SEQ ID NO: 232775 - DNA, 643 bp, Homo sapiens
atactaagtactaaatacatttaaaaaaaataaatggctgaataaataaacctgtcccattatctcaggctactcagatccttttagattttggttttaatgacaaatgtattatgttttgtttttaaattgtgtaatctacaaatctgatcaatattgtctctaagttcttactcaagcractagcaataaactccaccactacctagtcaaagacagagccttcagatacatttttaaaaacctccctcagaccattaattaacaactgaaatgagataaatgagatttccctttgagagttaaaccataaatcaatatccatatgcagagcaggtacagcaaagttgcctttaaaaaaacaaagaaaatgtttcagacctgtatcacatgcctgaaacctggttgaatgtattaacttaagaatatgtcagtcagaagtgaactggagaaaatagaatgtattgaagatcccatctagcctttgtccaggttctagggcctagtcagaccaactacagaatgtctgctttggagatggaaaacatcagcctttaagagcttaatgccgttaaacattggcaccatctaactaactctcactgctctgattccatcatcaccaagacacctgcttcaccac

SEQ ID NO: 232776 - DNA, 643 bp, Homo sapiens
atactaagtactaaatacatttaaaaaaaataaatggctgaataaataaacctgtcccattatctcaggctactcagatccttttagattttggttttaatgacaaatgtattatgttttgtttttaaattgtgtaatctacaaatctgatcaatattgtctctaagttcttactcaagcgactagcaataaactccaccactacctagtcaaagacagagccttcagatacatttttaaaaacctccctcagaccattaattaacaactgaaatgagataaatgagatttccctttgagagttaaaccataaatcaayatccatatgcagagcaggtacagcaaagttgcctttaaaaaaacaaagaaaatgtttcagacctgtatcacatgcctgaaacctggttgaatgtattaacttaagaatatgtcagtcagaagtgaactggagaaaatagaatgtattgaagatcccatctagcctttgtccaggttctagggcctagtcagaccaactacagaatgtctgctttggagatggaaaacatcagcctttaagagcttaatgccgttaaacattggcaccatctaactaactctcactgctctgattccatcatcaccaagacacctgcttcaccac

SEQ ID NO: 232777 - DNA, 643 bp, Homo sapiens
atactaagtactaaatacatttaaaaaaaataaatggctgaataaataaacctgtcccattatctcaggctactcagatccttttagattttggttttaatgacaaatgtattatgttttgtttttaaattgtgtaatctacaaatctgatcaatattgtctctaagttcttactcaagcgactagcaataaactccaccactacctagtcaaagacagagccttcagatacatttttaaaaacctccctcagaccattaattaacaactgaaatgagataaatgagatttccctttgagagttaaaccataaatcaatatccatatgcagagcaggtacagcaaagttgcctttaaaaaaacaaagaaaatgtttcagacctgtatcacatgcctraaacctggttgaatgtattaacttaagaatatgtcagtcagaagtgaactggagaaaatagaatgtattgaagatcccatctagcctttgtccaggttctagggcctagtcagaccaactacagaatgtctgctttggagatggaaaacatcagcctttaagagcttaatgccgttaaacattggcaccatctaactaactctcactgctctgattccatcatcaccaagacacctgcttcaccac

SEQ ID NO: 232778 - DNA, 614 bp, Homo sapiens
tgtttactctgctgactgttccttttgtcatgtaaaatctctttagtttaattaagttccatctattcatctttatttttattacatttacttttgggttctcggtcatgaatccttgccaaagccaacgtcaggaagggattttmcaatgttattttctggaatttttatagtttcaggtcttagatttaagttcttgatccatcttgagttgattttggtataaggtgaaagatgacaatccagtttcattctccgccatgtggcttgcccattatgccagaatcatttgttgaatagggtgtcctttccccactttatgcttttgtttgctttgtcaaatatcagttggtgtaagtatttgggcttatttctgcattttctattctattccgtttgtctttgtgcctatttttataccaatatcatgttgttttggtgaatatggccttatagtgtagtttgaaatcagatgatgtgatgcctctaggtttgttctttttgcttagtcttgctttggttatgtgggctattttggttccatatgaattttaggattgtttcttctagttctgtaaagaatggtggtggtattttgaatgggaattgcatga

SEQ ID NO: 232779 - DNA, 459 bp, Homo sapiens
aaatatttctggatatgagtggagagtgcatcactgcaccaacttatctatgtgaaaaggaaggggtagctcaggcttctaatccaggtgagcaaatgtgttaaatgactggaaatatgtgtaggcacggaacaaaggaagcaccactgaaacaagttctttgcaagggaaggaaggtgtggcccaragtcccaatctaggtgagcaagagtgatatctgccaccctattgctcctcagagccagttcagctcactcccctgacttaccaaagtagcagctggggccattcaacaatgccacatgtaaactggtcccaggttgccaagctagacctggctgcaaatctcaccacccgagagaaaccatggctccagcagctctcttcccactccagccctgtgacgagagaggacccactgccagcccaatcccagcatgttctatactctccactcaa

SEQ ID NO: 232780 - DNA, 598 bp, Homo sapiens
ttaaaatcaaactattagattttttcctgttgagttgtttgagtcccttataaattctgcttattaatcccttgtcagatgcatagtttgcaaacattttctcccaatttgtgggttctctctactttgttgtttcttttgctgtgctgaagctttttaatttgatgtgattttatttgtccatttttgctttggttacctttgcttttggggcattactcaagaaatctttgcccgctccaatgtcctagagattttcaccaatattttctttgagaagtttcataacttgaggccttatrtttaagtctttaatacattttgatataactttgtatatggtgagaggtaggagtctagtttcattcttctgcatatcgatatccagttttcccagaactctttattgaagaaattgtcctttccccaatatgttttcttggaacctttgtcaaaaataagttcactgtagatgtatggatttatctctgggttatctattctgttccactgatctatgtgtctgtttttatgcctgtaccatgctgttttggttactatagctctgtagtataatttggagtcagcaaatgtgatt

SEQ ID NO: 232781 - DNA, 377 bp, Homo sapiens
gctttactaggtctttaaaatacattctcaggttgttattttaattatttttaaatgtagtcacttacagctataaattttcttcttagtacygcttttgctgtatcccattgattttggcatgtcatattttcatcataatttgcttcaagaaaattttcaattttctttttaatttcttcattgacctacttgtcattcaggaacatattaacttccatgtgtttgcatagtttccaaaatttctcttgttagttatttctaattttattccattgtggtcagagaagatacttgatattatttcaatgttttaaatttttaaagatttgttttgtgtcctaatgtatgatctatccttgagaatgatccatgtg

SEQ ID NO: 232782 - DNA, 377 bp, Homo sapiens
gctttactaggtctttaaaatacattctcaggttgttattttaattatttttaaatgtagtcacttacagctataaattttcttcttagtaccgcttttgctgtatcccattgattttggcatgtcrtattttcatcataatttgcttcaagaaaattttcaattttctttttaatttcttcattgacctacttgtcattcaggaacatattaacttccatgtgtttgcatagtttccaaaatttctcttgttagttatttctaattttattccattgtggtcagagaagatacttgatattatttcaatgttttaaatttttaaagatttgttttgtgtcctaatgtatgatctatccttgagaatgatccatgtg

SEQ ID NO: 232783 - DNA, 594 bp, Homo sapiens
ctctgtacaacatggtcactgccagaggatgatggagaggtgatgtccatgattcaagactgtgtttcctaccctcttccattgtatctttcagcaatatgaagttaaaaccaggtactgtgagtgctcacctgattttttattcttttgaactgctttgtgtgtgtgtgtgtgtctgcagagagttgttaagttgatgtttatgtagggaagatgattggtggagacttctatttggccatcttgctctgcctctctctgtcaaggctaatacatttggcacaccccctttattgtgataatgtgtgttctaacaaataaatatttagcaaacttcctgaagaaagtccagstaataggattatcctcagcagatactcagttaacacgtgatgcaattcttgttcattttttccctagattactgctaaagacaatcatataaatgtagttaaaaaaaaaaaaaccttctcttgaaaataatcatgtacttatttgttctgaaccctggctgcccattggaattacatggacaactttcaaatctagcctcagtgtggttttattggactgggagtgattttaaattgtgtc

SEQ ID NO: 232784 - DNA, 454 bp, Homo sapiens
gtaaactgaaaaaaatacactggtgattatttaaatcccgttcacatctgtggccatgtttcaaagtgggtccttatgttcaccttggcttagaattctaacaatagtttagccaaaatagcagctttgtgaataccaaaaattggagcttaatagacattccacctcctgaactgcagaggctggaaagccagaagttgcattatgcaaagtcccttgcagctatcttaargaatgtaatttgggtttggctggttacatgagatttgaaaggcagaagaggggttgaagctcagaggtgaaactgaatcactgatgcttctagtatttctactgataaacccagttgtgaaggtttttgtttttctgaggttgtgttagcagaagttccagtggccagtcaccagctttcttcaaaattgagggcatgggcatccattgtgcttccatgaat

SEQ ID NO: 232785 - DNA, 454 bp, Homo sapiens
gtaaactgaaaaaaatacactggtgattatttaaatcccgttcacatctgtggccatgtttcaaagtgggtccttatgttcaccttggcttagaattctaacaatagtttagccaaaatagcagctttgtgaataccaaaaattggagcttaatagacattccacctcctgaactgcagaggctggaaagccagaagttgcattatgcaaagtcccttgcagctatcttaaggaatgtaatttgggtttggctggttacatgagatttgaaaggcagaagaggggttgaagctcagaggtgaaactgaatcactgatgcttctagtatttctactgataaacccagttgtgaaggtttttgtttttctgargttgtgttagcagaagttccagtggccagtcaccagctttcttcaaaattgagggcatgggcatccattgtgcttccatgaat

SEQ ID NO: 232786 - DNA, 577 bp, Homo sapiens
agactgggttgtttgaacaacagaaatttatcttttcacaattctggaggttagaagtccaagatcaatgtgttagcagggttggtttcytatgagggctgtgggggaaggattcattgcaggcttttctccttggcttgttaatgccatcttctccttatgtcttttcttgctctttcctccatgtgtgtctgtgtcctaatctcttcttctaacaatactagtcatattggactagggctcaccccaatgacctcattttacctcaattatctctttaaaattctatttctaaatgcaatcacaatctgagttactgtacctcaatatgaattttgagaggacacaattcagaccataacagcgtgattcaggataaggcatctggattaaaatatttcatgtagttatgaattggtgtacttctttgaactttggcttcattaatagcatagggaaaacaagaaataagattttattttggtgtattttgagactaaacacaggtaacagatttatacacatgtaaatgtatcaagagtcataaaatattataaatagaaaaagggaggtaaac

SEQ ID NO: 232787 - DNA, 577 bp, Homo sapiens
agactgggttgtttgaacaacagaaatttatcttttcacaattctggaggttagaagtccaagatcaatgtgttagcagggttggtttcctatgagggctgtgggggaaggattcrttgcaggcttttctccttggcttgttaatgccatcttctccttatgtcttttcttgctctttcctccatgtgtgtctgtgtcctaatctcttcttctaacaatactagtcatattggactagggctcaccccaatgacctcattttacctcaattatctctttaaaattctatttctaaatgcaatcacaatctgagttactgtacctcaatatgaattttgagaggacacaattcagaccataacagcgtgattcaggataaggcatctggattaaaatatttcatgtagttatgaattggtgtacttctttgaactttggcttcattaatagcatagggaaaacaagaaataagattttattttggtgtattttgagactaaacacaggtaacagatttatacacatgtaaatgtatcaagagtcataaaatattataaatagaaaaagggaggtaaac

SEQ ID NO: 232788 - DNA, 596 bp, Homo sapiens
tcccaaaaactgtcctccaccaaaggcagctgctttgctcaaatatactcaccccaatcatgggagccctaattcaaagattgattgttagagcttgggagttacaaagatcttatttcattgcctcaatttgggacttctctaaaagagcatcagcttcaccactctttgtgggctaggmaactacattgcagttaaactccctctgcccacttctacttccttcactccctcatagatgctatatccaagagcatgtcaaataatttgtgtatacaaatctccatatcagtgtttgtttctgggccatcttacctatacaaaccatttcatatagcccagaatagaagttatgagcctatgggaacatgtagcctccattttcctttccttagtagggttacaaagagaaatgtttttttcataattattaatagacatatatatcaaggaagaaagctcttgaaacaaaaaagctgtaagctggggctttctttggggcagatggatagcctattttaaccttctttgcttaggagcaataaaaaatgattgcagtttgttaagcccaccaattttctaggatatataaggag

SEQ ID NO: 232789 - DNA, 673 bp, Homo sapiens
acccccgcccttacttaggtagaggcgcataagtattctggccatgaaatacaccttctgttttatagagatttggcatatttgatatatgttctttggaatttatgaaatagaaaacccaaaggaaaaagaaaaaaattaaacttttttttaaaaaaatatttcatttagaaagaaaaaattaaaagtttttgttatttccactttgacatgtgtatgaggagyattagaatctgtgttatgaagtgatacccagatggctttgcagtgacagaaaacacttctaatttttcaaataagttagaaaggaggattttgagaatctggaagtgaatgccgtggaactgtggagaaactcctaacaatactggcatgctgagtttgtcacctacacagcagaaagcattttacaggtattagacttaaaaatacctcattatgctatattttcatttcatttcaaccaacatttactgcaagcctgctatgtgccagtctctagtaagaataacatggagagaaaatagacgggcagacgatagcagtaatttcagaatgggcggaggaggtggaaatgcagagtgttcttgggtgctcggagtagggaacagttcatatgacacaggacatcatatttaagctggacattgatctgtccagtggaagtttgcca

SEQ ID NO: 232790 - DNA, 564 bp, Homo sapiens
atttatggcaaacaggaatgttgtatggagtctttagaaagcaccagaaggacaatcacagcacaaaactctggggttttagtgcacatctatgccttattctggataaaaactttgccttttgaaaaatagcatctcccttgctactaggctgtggtagagattgaatgcctaaccatggtatgctgggtgaytatgtaatctgaacttctcatcatgaattgggtgttgtatgaccctcctagacataaggccatgtgtgcgcagcagcaatctaccattaaatggaaatggtatccaagagactgggattgggcaggtccagatggtgcaagcaagttgcatgggcaagtggcttagattcctttgactctgaaggtacgttgcctcttccactcatatggtttatggcctcttgaagatactccagttgaatgaggaagaaataacaagactggtttgaagatttttctgtattacacacagatattactcagtttcactcatgggtgatcctgaaggacactggtgaagaaaaattctcccagtcgatagaactttgag

SEQ ID NO: 232791 - DNA, 483 bp, Homo sapiens
agatcttgttgaactgtggttatggaggacggccagagattccaaaagggctcaacctggcttttcaaagtgtggtccatggattagccccatcagcatcacctaggagcttgctagaaatatcaaagtgaaatagtgctaccatttttcccctttatgttcaaagatccctgatgctgaggcaatcataatcataatagtaaaataataataaaaataatagaaaaatagtaatagtaaaataataatgataataataaaataccgttgatgagtgcttactgcattagtcatatgcaatacatatgactatgtaaatagtcagcaactatttatataataactctaatgcaattatcatagtcctcaatttgtgcataaaaaaactaaagctcaaagaagataatttatccaaaatcacatagmtgggaaatgttccatccaaatctattcagctgcaaagcctggactctctctttgcca

SEQ ID NO: 232792 - DNA, 545 bp, Homo sapiens
aattcaagaccagcctgggcaacatagtgataactccatctccaccaaatgttattttaaaaaaatcattacccaggcatggtggtgcatctgcagtcccagctacttgggaggctgaggtgggaggtttgtgtgagcccaggagttcaaggctgcagtgagctatgatttccactgcacattccagcctgggtgacagaggggaccctgtctcaaaaaacaagcaaacaaacaaaaaaacaaaaccaacaatgctacataagacatggtaagtaagcaattaattctgtgagaaaaggcctgaaagaactgggaagtctctagggagaaaaaagtaggtcagttgagtcttcaggaatcagtagtatttcagccagaagaaggaaagttgttttttttccagaatgactacactgaagtaataggtaaggcatacaragtttctaaactagaagagtgacactggggatgggaaggagaagaaaaggtcagaaacaatgttatgctatcaacagctattctttacatccatgcttcaagataca

SEQ ID NO: 232793 - DNA, 545 bp, Homo sapiens
aattcaagaccagcctgggcaacatagtgataactccatctccaccaaatgttattttaaaaaaatcattacccaggcatggtggtgcatctgcagtcccagctacttgggaggctgaggtgggaggtttgtgtgagcccaggagttcaaggctgcagtgagctatgatttccactgcacattccagcctgggtgacagaggggaccctgtctcaaaaaacaagcaaacaaacaaaaaaacaaaaccaacaatgctacataagacatggtaagtaagcaattaattctgtgagaaaaggcctgaaagaactgggaagtctctagggagaaaaaagtaggtcagttgagtcttcaggaatcagtagtatttcagccagaagaaggaaagttgttttttttccagaatgactacactgaagtaataggtaaggcatacaaagtttctaaactagaagagtgacactggggatgggaaggagaagaaaaggtcagaaacaatgttatgctatcaasagctattctttacatccatgcttcaagataca

SEQ ID NO: 232794 - DNA, 496 bp, Homo sapiens
ctcagcacaaacattcagtttgtcatccagctttggccatattaactaagggtgaacatattgtacacattataacttaacttcgccattcccaggcatatgcctgacagaaatatggtcatgtgtttatcaaaaattaagggcaataaatagtggtatattcacaaartgagatattatacagcagtaagaaagaacaatctccagctgaacacaaaaacatggatgtatcttaaaaacacaatgttgagctaaggaagccagacatataagagtgcaaatggtatggtcccgttgatataatgtactaaataagtaaagtcaatcacctctgccaaaagtcaggatagtggtttctctgagctgatagtgacttgaaagggacacacaaaaaatttgtggggtgttggcaatatctgcctcttgatcttgggactagttgcacagtatacctacttatcctaggtatacactctgtgaattttcacgaatacct

SEQ ID NO: 232795 - DNA, 529 bp, Homo sapiens
aagaacatagaaacaaagggctcagcacaaacattcagtttgtcatccagctttggccatattaactaagggtgaacatattgtacacattataacttaacttcgccattcccaggcatatgcctgacagaaatatggtcatgtgtttatcaaaaattaagggcaataaatagtggtatattcacaaagtgagatattatacagcagtaagaaagaacaatctccagctgaacacaaaaacatggatgtatcttaaaaacacaatgttgagctaaggaagccagacatataagagtgcaaatggtatggtcccgttgatataatgtactaaataagtaaagtcaatcacctctgccaaaagtcaggatagtggtttctctgagctgatagtgacttgaaagggacacacaaaaaatttgtggggtgttggcaatrtctgcctcttgatcttgggactagttgcacagtatacctacttatcctaggtatacactctgtgaattttcacgaatacctacttatcctaggt

SEQ ID NO: 232796 - DNA, 596 bp, Homo sapiens
ttaacacttctccaaaagacatattaaggtgtggtcattatgattcagttgacttactttgccttaatgtaatgttttaaaaattgcactttttaaggcatttttattttatttttagaatgcactatttatttctttttacttttcttcacattttaacctcaacaccaacctttccaagttttgttgaatataattccatacactgcctgctggaatgaggcatttttcctttcagagcaacctaaacagattagaaatcgcaaaatgtttctgattttaattccctgcagagttgctaaagagtygttttagattattctggtgacatttattaagatcagaagactccgagataagaccatccgaaatgtttattttacttaactatttagtacctcccacatctgcttagtccaatgacccaaactatcttgtaatggcctgtattaaatacttagtggatgtgaggcaagaatatgccaccttagggagaacgcgtgcacttttcttttacatcagttttcatgaatggttctcattctaattaatggataaaatgaaaaaagaaatcactaaccgagttatttgatata

SEQ ID NO: 232797 - DNA, 420 bp, Homo sapiens
gccaccttagggagaacgcgtgcacttttcttttacatcagttttcatgaatggttctcattctaattaatggataaaatgaaaaaagaaatcactaaccgagtyatttgatataaaagtatattgtaattcagcatgtagggaagttttcaagaggcactcaaagtgatttttcagtattacaagtttaataagaattagggtttaatccacgaataatttttgtatccacccatctttctatttagaaaaagatgataattttttatttaaaaagcaaacttagctttcttgtgtgtttttaaaacatctttacaaacatctagcaattgaatcattttctactatgtcattaattttcctttggattttaagcaaaaactgacaatttaatgtttagaaatcaagtttactaacata

SEQ ID NO: 232798 - DNA, 420 bp, Homo sapiens
gccaccttagggagaacgcgtgcacttttcttttacatcagttttcatgaatggttctcattctaattaatggataaaatgaaaaaagaaatcactaaccgagttatttgatataaaagtatattgtaattcagcatgtagggaagttttcaagaggcactcaaagtgatttttcagtattacaagtttaataagaattarggtttaatccacgaataatttttgtatccacccatctttctatttagaaaaagatgataattttttatttaaaaagcaaacttagctttcttgtgtgtttttaaaacatctttacaaacatctagcaattgaatcattttctactatgtcattaattttcctttggattttaagcaaaaactgacaatttaatgtttagaaatcaagtttactaacata

SEQ ID NO: 232799 - DNA, 420 bp, Homo sapiens
gccaccttagggagaacgcgtgcacttttcttttacatcagttttcatgaatggttctcattctaattaatggataaaatgaaaaaagaaatcactaaccgagttatttgatataaaagtatattgtaattcagcatgtagggaagttttcaagaggcactcaaagtgatttttcagtattacaagtttaataagaattagggtttaatccaygaataatttttgtatccacccatctttctatttagaaaaagatgataattttttatttaaaaagcaaacttagctttcttgtgtgtttttaaaacatctttacaaacatctagcaattgaatcattttctactatgtcattaattttcctttggattttaagcaaaaactgacaatttaatgtttagaaatcaagtttactaacata

SEQ ID NO: 232800 - DNA, 510 bp, Homo sapiens
gacttttcctttcttcctttctctttctttctttctgtgttttccttcttccttccttccctttttaaaaaataatttgaagactttgagccaaaggtgaaattgagagagtcctctgaaatagctcgtgccaagccaacaataactgaccataaatcttggatagggatgtgatgggagtgaggagtagagagaccacagtgtccatctaaggcagaattgtcayagctcagaatgaaacctttattcaaggtgcctagctttaacttctagcttccactacctactagctatagagtctggggaaacctgcctgtcttccgtacacagttttgtcatctgtaaaatggagatagcaatagcacttacctcataaggctgatgggaaggtttactcatgtgtataacacacttagcacagtgcctggcacatagcagacacatgtagatgtattatttattaaaagagtgctataatatgtgatgactgcttattgtatattggaattc

SEQ ID NO: 232801 - DNA, 510 bp, Homo sapiens
gacttttcctttcttcctttctctttctttctttctgtgttttccttcttccttccttccctttttaaaaaataatttgaagactttgagccaaaggtgaaattgagagagtcctctgaaatagctcgtgccaagccaacaataactgaccataaatcttggatagggatgtgatgggagtgaggagtagagagaccacagtgtccatctaaggcagaattgtcatagctcagaatgaaacctttattcaaggtgcctagctttaacttctagcttccactacctactagctatagagtctggggaaamctgcctgtcttccgtacacagttttgtcatctgtaaaatggagatagcaatagcacttacctcataaggctgatgggaaggtttactcatgtgtataacacacttagcacagtgcctggcacatagcagacacatgtagatgtattatttattaaaagagtgctataatatgtgatgactgcttattgtatattggaattc

SEQ ID NO: 232802 - DNA, 566 bp, Homo sapiens
tagcaaattatccagcattgactaggatagccactgtaattatactttaattaccaactcctamtacaacttataagacaaaatgttttagatttttttctaattaaaaatagtagtcaacaaaatttaatgattacaggaaatcattacacagaaagttccctgtaattttcccaccctggaaaatcattatcaacaatttgataccaaattacccctctcaacatattcttatttatacttataacaagaaaaaaaactacatacagtatttttaagaaaaatgtgatatgtattctaatttgttatctgtctcctcatattctatcacatttaggtatctttctgtgtgtttcagaagagaactaagttctaaaattcattttgggaaaacaaaaacctcattttttgaatgttcccttttagtaatatcttgtctaaatccaaatatctaccaattgtagtaaactcaaatggaaaacaagaagatattgttgagtatctaatgctccttaaagcatagcattttccaaagtcacaaagtatatcaagaaatccacgaattc

SEQ ID NO: 232803 - DNA, 566 bp, Homo sapiens
tagcaaattatccagcattgactaggatagccactgtaattatactttaattaccaactcctaatacaacttataagacaaaatgttttagatttttttctaattaaaaatagtagtcaacaaaatttaatgattacaggaaatcattacacagaaagttccctgtaattttcccaccctggaaaatcattatcaacaatttgataccaaattacccctctcaacatattcttatttatacttataacaagaaaaaaaactacatacagtatttttaagaaaaatgtgatatgtattctaatttgttatctgtctcctcatattctatcacatttaggtatctttctgtgtgtttcagaagagaactaagttctaaaattcattttgggaaaacaaaaacctcattttttgaatgttcccttttagtaatatcttgtctaaatccaaatatctaccaattgtagtaarctcaaatggaaaacaagaagatattgttgagtatctaatgctccttaaagcatagcattttccaaagtcacaaagtatatcaagaaatccacgaattc

SEQ ID NO: 232804 - DNA, 566 bp, Homo sapiens
tagcaaattatccagcattgactaggatagccactgtaattatactttaattaccaactcctaatacaacttataagacaaaatgttttagatttttttctaattaaaaatagtagtcaacaaaatttaatgattacaggaaatcattacacagaaagttccctgtaattttcccaccctggaaaatcattatcaacaatttgataccaaattacccctctcaacatattcttatttatacttataacaagaaaaaaaactacatacagtatttttaagaaaaatgtgatatgtattctaatttgttatctgtctcctcatattctatcacatttaggtatctttctgtgtgtttcagaagagaactaagttctaaaattcattttgggaaaacaaaaacctcattttttgaatgttcccttttagtaatatcttgtctaaatccaaatatctaccaattgtagtaaactcaaatggaaaacaagaagatattgttgagtatctaatgctccttaaagcatagcattttccaaagtcacaaagtayatcaagaaatccacgaattc

SEQ ID NO: 232805 - DNA, 584 bp, Homo sapiens
tttttttaatgaagaatgtggacacatgaaacatgcttgccttcagatgatatgcaaatttacataatatctatcttgtctaagtcttctttctatttttctgtctttctctcccttccttctctcactgcagtaagcagggcataagggcagctggaacatgtggtcttttatttgatcaaaggtaatgatcaaccaagccagaggaaggtaggtcagctttcctagttcacctgctaaatagaatctttttacattctctccaattgtgagtccatctgtgccaccatcaagaaaaaaaaatctacagaaatggagtagctacaataggaactgaacatttaaagwtgctttgaatatgcatgtgtagaaactgccattctgtgaatggaaatgtgtgcttagctgatttcttttcatctaaagagccatagcgtgtctttttgctgtttgtttgcttattttattttttattttcttgtcctactacattatttttgtcattttatttctcctttttcttctttaaattttaagagaggacacaaatctcaattttatgccaagaaactccaaaacatgca

SEQ ID NO: 232806 - DNA, 584 bp, Homo sapiens
tttttttaatgaagaatgtggacacatgaaacatgcttgccttcagatgatatgcaaatttacataatatctatcttgtctaagtcttctttctatttttctgtctttctctcccttccttctctcactgcagtaagcagggcataagggcagctggaacatgtggtcttttatttgatcaaaggtaatgatcaaccaagccagaggaaggtaggtcagctttcctagttcacctgctaaatagaatctttttacattctctccaattgtgagtccatctgtgccaccatcaagaaaaaaaaatctacagaaatggagtagctacaataggaactgaacatttaaagatgctttgaatatgcatgtrtagaaactgccattctgtgaatggaaatgtgtgcttagctgatttcttttcatctaaagagccatagcgtgtctttttgctgtttgtttgcttattttattttttattttcttgtcctactacattatttttgtcattttatttctcctttttcttctttaaattttaagagaggacacaaatctcaattttatgccaagaaactccaaaacatgca

SEQ ID NO: 232807 - DNA, 630 bp, Homo sapiens
tcatgcatttctaaacctcactcagtcctccaggttactcctgggggtatatgagtgaatctgagaagtgggctgggggttagcaatggaggaaatgcacctactgtgcatttcactaggtaattaaaaagccaaaaatttaagatctacctttagactagcctaaatgtgtctgtgccttattgctgtatcagaacttcctgcttcaccagaaaagtaatatatctttgtgtgttctctgtatacatgtgtatagtacagtggccttaatcctaccctaattcaatgcaggcagtcagaaagttttatgagatgtgtgcataacttgaattttgtagaaatctccaccttatgaagatttttgtggctgtttcactttaataacagggcttgcttttggrcaaggaataccaaatcattaggggggatacacaactgattaggtcacttgattgccgatatagcaattaaaaagcacacaaccaaatagagaaatacttctggtgtagattctgctttcactcaccaatcaccaaggctatcccatttttcttcttcaaggattttgagggagggcttggaagaataatgctcataaatggataagtagtgttgcagatgctaccaagg

SEQ ID NO: 232808 - DNA, 630 bp, Homo sapiens
tcatgcatttctaaacctcactcagtcctccaggttactcctgggggtatatgagtgaatctgagaagtgggctgggggttagcaatggaggaaatgcacctactgtgcatttcactaggtaattaaaaagccaaaaatttaagatctacctttagactagcctaaatgtgtctgtgccttattgctgtatcagaacttcctgcttcaccagaaaagtaatatatctttgtgtgttctctgtatacatgtgtatagtacagtggccttaatcctaccctaattcaatgcaggcagtcagaaagttttatgagatgtgtgcataacttgaattttgtagaaatctccaccttatgaagatttttgtggctgtttcactttaataacagggcttgcttttgggcaaggaataccaaatcattaggggggatacacaactgattaggtcacttgattgccgatatagcaattaaaaagcacacaaccaaatagagaartacttctggtgtagattctgctttcactcaccaatcaccaaggctatcccatttttcttcttcaaggattttgagggagggcttggaagaataatgctcataaatggataagtagtgttgcagatgctaccaagg

SEQ ID NO: 232809 - DNA, 630 bp, Homo sapiens
tcatgcatttctaaacctcactcagtcctccaggttactcctgggggtatatgagtgaatctgagaagtgggctgggggttagcaatggaggaaatgcacctactgtgcatttcactaggtaattaaaaagccaaaaatttaagatctacctttagactagcctaaatgtgtctgtgccttattgctgtatcagaacttcctgcttcaccagaaaagtaatatatctttgtgtgttctctgtatacatgtgtatagtacagtggccttaatcctaccctaattcaatgcaggcagtcagaaagttttatgagatgtgtgcataacttgaattttgtagaaatctccaccttatgaagatttttgtggctgtttcactttaataacagggcttgcttttgggcaaggaataccaaatcattaggggggatacacaactgattaggtcacttgattgccgatatagcaattaaaaagcacacaaccaaatagagaaatacttctggtgtrgattctgctttcactcaccaatcaccaaggctatcccatttttcttcttcaaggattttgagggagggcttggaagaataatgctcataaatggataagtagtgttgcagatgctaccaagg

SEQ ID NO: 232810 - DNA, 322 bp, Homo sapiens
aactacaatttatttttttttcatttaatcagtgtgcttttgaaayggacaggttgtgttctctgccatttacaaactcaactcaaggatttaatttaaaattcaataattgaatgagatggtataataaccttttatataaattcatcatttcttatctttcccaaagaacttatgtcctgtatgccataatcactactgtttacttttctggaaggtttttgtataaatttctatatctcaccctggattgtaaatccatcctcaaaatacagcgtgaacagtttactactccaggccttacaagagctcatagctgcta

SEQ ID NO: 232811 - DNA, 556 bp, Homo sapiens
aaatgtttgcatcttcagatcttcactggttttatttgataattttgaaactatgattaataatgagctcacattttaaactcttagtgtgcatgacaagctctgcaagtatctccattcactatggagttgtccatagtaccagtgactttaaaacaatgtcagccactgcatattcatttttmtttactcttatggaagtctgagtgaataatgatatttgcacagtagagattttttttaaagttttagcaccccctcccacattggttgtttaagtgcctccagctgctgttcccatgaacacagtgttgataggtggtaaagaggacaccatttctctactgcttgttccatgggagtccagggtttcttgagctggatactggttggaagttccatacatacattgggatgaggaagaaggaattggggtttgcaaactggaagctgtaagggaaaatataatcagcaattgaaaattgattgacattttcttttctctgcaaatgccactcattttaataccctgtatttatttttgcacttagcacac

SEQ ID NO: 232812 - DNA, 556 bp, Homo sapiens
aaatgtttgcatcttcagatcttcactggttttatttgataattttgaaactatgattaataatgagctcacattttaaactcttagtgtgcatgacaagctctgcaagtatctccattcactatggagttgtccatagtaccagtgactttaaaacaatgtcagccactgcatattcatttttctttactcttatggaagtctgagtgaataatgatatttgcacagtagagattttttttaaagttttagcaccccctcccacattggtkgtttaagtgcctccagctgctgttcccatgaacacagtgttgataggtggtaaagaggacaccatttctctactgcttgttccatgggagtccagggtttcttgagctggatactggttggaagttccatacatacattgggatgaggaagaaggaattggggtttgcaaactggaagctgtaagggaaaatataatcagcaattgaaaattgattgacattttcttttctctgcaaatgccactcattttaataccctgtatttatttttgcacttagcacac

SEQ ID NO: 232813 - DNA, 436 bp, Homo sapiens
gaggaagaaggaattggggtttgcaaactggaagctgtaagggaaaatataatcagcaattgaaaattgattgacattttcttttctctgcaaatgccactcattttaataccctgtatttatttttgcacttagcacacatacctattctaaatttgagtctgtatggtttaccagagcaatcatyttttcttccatttgttcccacttgctagtctcccagaaattatttcctctacatatttcacaaagaaaactccatttcaacttaagtgctaccaccaaaatatatcccccaatcaacctcctctttccatctgcactttcacgattgtagttcaaaccaccatcttttctctcctggaccaacacagcagcctcctgactggtctcatgatctccacctttgtttcacccactcaccttcccgagagca

SEQ ID NO: 232814 - DNA, 436 bp, Homo sapiens
gaggaagaaggaattggggtttgcaaactggaagctgtaagggaaaatataatcagcaattgaaaattgattgacattttcttttctctgcaaatgccactcattttaataccctgtatttatttttgcacttagcacacatacctattctaaatttgagtctgtatggtttaccagagcaatcatcttttcttccatttgttcccacttgctagtctcccagaaattatttcctctacatatttcacaaagaaaactccatttcaacttaagtgctaccrccaaaatatatcccccaatcaacctcctctttccatctgcactttcacgattgtagttcaaaccaccatcttttctctcctggaccaacacagcagcctcctgactggtctcatgatctccacctttgtttcacccactcaccttcccgagagca

SEQ ID NO: 232815 - DNA, 436 bp, Homo sapiens
gaggaagaaggaattggggtttgcaaactggaagctgtaagggaaaatataatcagcaattgaaaattgattgacattttcttttctctgcaaatgccactcattttaataccctgtatttatttttgcacttagcacacatacctattctaaatttgagtctgtatggtttaccagagcaatcatcttttcttccatttgttcccacttgctagtctcccagaaattatttcctctacatatttcacaaagaaaactccatttcaacttaagtgctaccaccaaaatatatcccccaatcaacctcctctttccatctgcactttcacgrttgtagttcaaaccaccatcttttctctcctggaccaacacagcagcctcctgactggtctcatgatctccacctttgtttcacccactcaccttcccgagagca

SEQ ID NO: 232816 - DNA, 436 bp, Homo sapiens
gaggaagaaggaattggggtttgcaaactggaagctgtaagggaaaatataatcagcaattgaaaattgattgacattttcttttctctgcaaatgccactcattttaataccctgtatttatttttgcacttagcacacatacctattctaaatttgagtctgtatggtttaccagagcaatcatcttttcttccatttgttcccacttgctagtctcccagaaattatttcctctacatatttcacaaagaaaactccatttcaacttaagtgctaccaccaaaatatatcccccaatcaacctcctctttccatctgcactttcacgattgtagttcaaaccaccatcttttctctcctggaccaacacagcagcctcctgactggtcycatgatctccacctttgtttcacccactcaccttcccgagagca

SEQ ID NO: 232817 - DNA, 594 bp, Homo sapiens
caatatcatcataaaaacatgaaagaataagacccactggtagaacaaacacacaaataggtaaaagtccaaatgttaccactacagaaaaccaccaaaccacaatgataaacaataagagagaaagaaagaaacaaagggtatgtaaaacaatgataccatcataaaaacacatgaaaatatgaaacctactggtagagtaaacaagcaaataagaaagagaaagaactaaaatattacctctacagaaaaccatcaaactaaaatgaaaaaaataagagagaaagaaaaaacaaagggaacacacacasacacagaaaacaagtaacaaaagaataggaataagtccttacatttcaataaccttgaacataaatagattgaactttccactcgaaaggtatagactggctgaatggattttaaaaaaagcacaacccaactctatgctgcctacaagaaactttacctcacctgtaaagacgcacatagatggcaagaaaagaaatggaaaaaaaatattccatgtaaacagaaacaaaaagcaaacaggaatagctgtacttatgtaagataaaacaagagaatataata

SEQ ID NO: 232818 - DNA, 571 bp, Homo sapiens
ctttgtgtgtttatacactgaacatcagatcacccagatgtataaaacaaatattatcagatttaaagggagagataactctaatacaatagatggacctataacgtatacaggacatttcatttaacaactgcagaatacacattctttttaccagcacayggtacattcttcagggtagaccatatgttaggccacaaaacaagtctcaatcagtttttaaaaatccaaattatatcaagtatcttctcaaaccacagtggaatgaaactagaaatcaatattaaaaagaactttggaaactatacaaatacatgaaaattttacaatatgttccggaatgaccattaggtaaattaaataattaggaagcaagtaaaaaaattcttaaaacaaatgaaatacagcacccggtattcccaggtggtctttcagccaagttctaaccaggcccaaccctgcttagcttctgagatcagaagaaatcggctgcatttagggtggtatggttgataagagctatttatgacaaacccatagccaatatcatactgaatgggcaaaagctgga

SEQ ID NO: 232819 - DNA, 444 bp, Homo sapiens
gaggacatagcgagatggcaccatctatgaatcagaaagtagaccctcaccagacaccaaatctactggagccttgattttgggctttccagcttccagaactgtgagaaataaatttgtgctgtctataggccacttgtattttgttttagcagcccacacagatgaagacagttggcttcttctctgtcttaggtattcaacttcccactgtcatcatctgctcttggcctaacagtatgcatggcattttgaatataaccagttcaagggagagtttgtcccatttgtcctcatgtaagccatgttctgcaatayagttttaaaggtcaaaaattgaggacagaaaagtttgactcctctgtctccttttctctgtggtcccaagctgaggtgagataaaagaatgttaacactgagtttaatcaaaatctcaacaattcc

SEQ ID NO: 232820 - DNA, 575 bp, Homo sapiens
agaatccaggcaataagtgaaggttcctattccaggaataagagagattcaagaggtatataggaaaattaatcatcaggtctcaggtgaacttatgacttcagaacaaaaaggtcctaagatccaagcagcgtccccacactgcccccttcccccagttgctagcactcaatttgcctccaatgctaaagccagctgctaatctaactcaaaatctgttctctctcwgctttgtcagagctagcaacgcacttggactgacagcattcctcagggttctcagtggtgctacaaacagttgagtctcttgcagctcctcctcaggcatcctaggccgggtagtccaccccagcctctgctgtgggtcgcattagcctgcaccgtgaccagccaagggctcccaacttaacccctaggtcctcctggggcaggatgtgcactggagcaggaggaagttttagatctcatccataccacccaagaattcagagtggccaaaaagtgaagttcacagcccattaaaatcactctccatctaacttacctaacacttcttcaattcagaaatttgaaca

SEQ ID NO: 232821 - DNA, 527 bp, Homo sapiens
atagaaaagccagtgcagctatcaaaattgattggccccaagaaatctttattgttggtgaattgataatctcagtaaagttatatttatggtgtataataaaacaaagaaaactttcctagtctgatgaagaaaaaccattcctaaatcagagtcaatatataatccctgtaccatttgaataagaagaggaggctatgtatccttgaggaagggcccttaaatgctgtcacaagagaactataaatatacattttcatcttgttgaaatggatctgcatccatctatcaaggtaactgygtagtaggaaatagggcaataaaaataccctttcatgaatattatatactgactcagctctgaaccaatatgagtccccgaatgtcactgaagtttaccagtcagaatgtgatcaataaaagacataaaataaatgaaatttcaacttgaatatgcttaatagaaacctaattcttcatggtaaacccaaaagaaatctaatcctttcccaaagttatttacctag

SEQ ID NO: 232822 - DNA, 598 bp, Homo sapiens
tatgcagctatgctaaataatacctattgatattacttggatctctgtccccacccaaatctcatgttgagttttgatcctgagtgttggagatagggcctggtgagtggtgattggatcatggggatggtttctaatggtttagcacaatctccctaatgctgtctcatgatagagatgtcacaagatctggttgtttaaaagtgtgtagtatcttccccttctttctctctctctcctgctccaccatggtaagatgtgtttgcttccccttcaccttccaccatgcttctaactttcctgaggcctcccagccatacttcctgtacagcctctggaattgtgagtcaattaaacctcttttctttataaattatgcagtctcagggatttctttatagcggtgtgaaaacagactaatacacccatctttgaaaacatctgccttcaccctaaatatccttccagtaacatctccatttctctgttcctgtttatagcagaattcacaaartagtctatatcctgtctccatctcttcccttctcattttatttactactcctctgaaacagttcttgagaaggtcactgataac

SEQ ID NO: 232823 - DNA, 572 bp, Homo sapiens
caatgactcaagtagtgagcatagtacccaaatggtagtttttcgacctacactccctwcccttcctcccttctcttgtagtccccagtgtctgctgctcccatatttatgtccatgtgtattcaaagtttagctcccacttataaatgagaacatacagtatttaattttctgttcctgcattaattcacttaggataatggcctccagctgcatccatgttcctgcaaaggacatttcattcttttttatggctgcatagtattccatagtgtatatgtatcacattttcttatccagtccaccattgatgagcatgtaggtggattccatgtctttactattgtgaatagtgctgtgattaacatacaagtgcatgtctttttgctagaacaatttattttcctttgagaatacacccagtaatggtattgctgggttgaatggtagctctgtttcaagttatttgagaatctctaaacttctttccatggtggctgaactaatttacattcccaccaacagtgttataagcattcccttttctccacagcctcattaacatctgttat

SEQ ID NO: 232824 - DNA, 368 bp, Homo sapiens
caataagggaatcaaaaaggagaaagccaaaaccctgctacagaataacatcttacataaagtcttccttgtacaccatatgattttttgaatgatcattcttagaaaaatggaaattgttgaaacagaacctgtctttcaaaacactagttcaaacctttgtgtttttaagctaccatggaggacaaattctgaggtgaactttttgccttcatttatcttttgctgtaaataaaagggtacagaaactgagatatgaaatgaaaacacatgttgaggatttattctttgtacctttgaactacagtataaattaaaccttttacacaaacggaaacaaattggaataytatgaaatcacatgtaca

SEQ ID NO: 232825 - DNA, 608 bp, Homo sapiens
ctaattgctgatgtacttttgaacagagatttaaaacacataaagcaaatactgacataactgcaaggagaggcagataaacccacaattgttgaagatttaagcaattatctctcaataattaatataattgatatcactataaagaatataaaacctgaacaacactttcaatctacttgacctaatgaacatttatagaacaatccacacaaaaatagcagggcacaaagcttttaaaaatgtttacatgaaatttatcaggagagatcatattttattgggccataaaaccagtctcaataaayttaaaaggagtcaagtcacacaaagtatgtttcctaattacagtgaaaataaattttaaaaatcaacaatagaattatatctggaaaaatcttcaaatgcttagagactaaataacatgcttctagacaacccagatgtttttcaaaaaaaaaagagagaaattaaaaagtattttgaatttaatgaaaataaaaacacagcacatcaaaatttgtgggatacatttaagatagtatttagaagaaattataaagtactaaaaacctgtattagtaaaaaggaaaggtcttacataaatg

SEQ ID NO: 232826 - DNA, 604 bp, Homo sapiens
tagtctttttttctttctttttttttttttttacaggaacagatgtgtgtctcctagaagtctacaaaattatactttttacacacattctcaaatttagacacagtctcaaactcaccatttaataaagatattgctgaatcaggtagcatgttgatacattaagataccttactttttataatactgcaatttatacatgagagaaatgggcacgaaccttggcaggctccagggctcctggagggcctgtccctctgccccaaaggcctccagtagcgctgctgtccagtctcctgctgcccggatgtgcacgctgaaaaagtcttcytggggggcagaggtaagggtgaaggggtgccactccagcgaagatatggctgggcactgcaccaagatgtactgccctggcgccattttaaagccacgctttttcatgtgaagttccaggactccagaggggtggcttaccacctatgtgagagtgagagagttgtttgcctttgtcctcaaaataataaagaaacacctttcattccatcaaaggtgttgaaaattttagatcagcttgtttcaggtgtaatttacatatcccatctgctgt

SEQ ID NO: 232827 - DNA, 555 bp, Homo sapiens
aatcgcttaactgctatctgattcttcatctgtaaaataaagctactgacactgaccttcctcatagagctattgtgtsggataattaattaataattgcagaatcctttaagagtataaagtgcaacataaatgctaagcataatttccacacagtctctgctggctcttctcaagcacattccggcggcctcggggtctttgatctgctgttatcacctgcaatagagcaaacaatgcctttgtatcattaagcaaatacataatgaatggtattcattgttaaaggttacttagcaatataactttttttttgccttttgaatgggaacatccaccggtgagaggattacgtaagctaatagctaatgtatcaaaggaaaggagagaaaagaaacagccatggcaaccagagcaatagggcccaggctttggccctcagaagaaacctgtatccacctagcaaaaggaggataaggactaactgggagaaaaccagaggggatggtgaacagaaaagtcaacaacaggaaatggcagactgtggcctagtca

SEQ ID NO: 232828 - DNA, 438 bp, Homo sapiens
agcactttttgcttttggatttcactagcaatactgaagattctgaatgtgaaactagtattgcttattcagatattcaatgttcaataactatagaaaagtgctgcattcttatccagtctgttcttaggagtcggttggtttcaaatcagtttgaaaggaatttgcrtgggacagatggaaactacaatattagctaaatttaagctaagaaactttgtcatgataatcctgtgtgtgttaagggactggtacagttcaatggtgatgtggtagcatattcgattgccacttcatgttaatttaggtagagagttaaatagtcaaataaatattatacataaaggatcaattgattgggtaatggctgaatttttatagaagatttttctctctaaatttcatacgttgaaatttgccaagttaattgagataact

SEQ ID NO: 232829 - DNA, 536 bp, Homo sapiens
tcacagggaaaaaataactgaattcaagactcttcatcttctatttggaataaggtccataaggtataaaagctcatatgcctttttttgtaaaacactaatattagatggagctttatattttctgtttttaaaaaattaccatttgcataaagaaattttctaaaatttagtcattatggcaagtgggaagattaagtaaatatggactgttttgaagactgattcactaatacattygtgtatttctttaacacagccaagtcctttggattttaccttgtaaatatccctactatgcatacactcctctctaactcactggctccctatagtggcactactgtcatctatctcaggttgactgaagcacctcccaactgtaatacatttcttacattgtatccagatgaactttaaaaaatgaaaatctgatgtttcttgaaagcttggaatggcttccaattgctcttaaagaccaaactccttatgatatctgcaaagcctcatgtgatctgggccagctctgtctccag

SEQ ID NO: 232830 - DNA, 536 bp, Homo sapiens
tcacagggaaaaaataactgaattcaagactcttcatcttctatttggaataaggtccataaggtataaaagctcatatgcctttttttgtaaaacactaatattagatggagctttatattttctgtttttaaaaaattaccatttgcataaagaaattttctaaaatttagtcattatggcaagtgggaagattaagtaaatatggactgttttgaagactgattcactaatacatttgtgtatttctttaacacagccaagtcctttggattttaccttgtaaatatccctactatgcatacactcctctctaactcactggctccctatagtggcactactgtcatctatctcaggttgactgaagcacctcccaactgtaatacatttcttacaytgtatccagatgaactttaaaaaatgaaaatctgatgtttcttgaaagcttggaatggcttccaattgctcttaaagaccaaactccttatgatatctgcaaagcctcatgtgatctgggccagctctgtctccag

SEQ ID NO: 232831 - DNA, 371 bp, Homo sapiens
cttattggcctctacttcacagctattacaggccagttaattcagtgggacatctggtatttgggatagactctgcaaaaagagggtgaatctgttttatagttttactcattcctggaaaaacatctgtaatatgtaacatgtaaatgggyctatggtattttatttagataattctgaggtataaatgtatgaatcacattgctttagaataccctggaaaagtcaacgtgcagggtatggcctggcatcacaggggctgatgcaggggaaatgcagtccaagtgccagccccagaggaagtgctccatgtgtgtacacctctgtgatgattgcacgctgatgccctcctatcttcagcacttccctgc

SEQ ID NO: 232832 - DNA, 371 bp, Homo sapiens
cttattggcctctacttcacagctattacaggccagttaattcagtgggacatctggtatttgggatagactctgcaaaaagagggtgaatctgttttatagttttactcattcctggaaaaacatctgtaatatgtaacatgtaaatgggtctatggtattttatttagataattctgaggtataaatgtatgaatcacattgctttagaataccctggaaaagtcaacgtgcagggtatggcctggcatcacaggggctgatgcaggggaartgcagtccaagtgccagccccagaggaagtgctccatgtgtgtacacctctgtgatgattgcacgctgatgccctcctatcttcagcacttccctgc

SEQ ID NO: 232833 - DNA, 620 bp, Homo sapiens
gggtatggtgattaagcgaggtaatacatataaggttcttaacagtgcctgttctgaacaactgttagtcattattatcctgctagcttgagaattctaagaaggcactgtttgtgtcattatagcattacagtagctattattaaaatagtcttgggataattaagtacattgcccaaggttacctacccacaaagtggtagaaagagcattcgaaccctggctggctccagagatagcccctcttcaccgacgcaccacctctggagtatcgagtcctcagtaggggttctatctgttgagtccttttggtccagacagataaacttaccaccaattgtgggacagttttaaacaaggcaaaaattttacaacatctttgaagaatttgatcaatctcttaatataacgggggtcataatagttattgatgatggtgattcctccacataaagatctgcctgagtcaaatcacatttctttacctgggaactaacagggcacactgcattgcttgcaggattttccacaaccaygaccttgggtgttctcaaggccaactgcctatcgaatctctctgcacatcctccttaatagacccaatgaaatgaaatgacagc

SEQ ID NO: 232834 - DNA, 584 bp, Homo sapiens
ctttgcattttacttgtaatgttaaggctttctaaaagtggattataaagaacagagacattcccccaatccttatcagaaacagacgagtctgcagtgaatcccaaactgttaatataacagctaaaatgcaaaattttgagtggrctcatacaccattttagttcattttaaaaaatatttcagttcagtttgtatggtttatgcattttaaaaaaaatgctgagttatttcttatcctgacctctctgctgttttgatagatatttaattcttttgcaggctggaaagaatcaggaaggcccctaaagactcaaaggagtcttcacagccctgtacacacgctaacactcctttaaggcagttatttaaaaaaatagaatcatctatgcttttaaagtggtctaaaggcatttagagtaacccactcaggataatgtaatttggaggagaaagatcaccagtttgcttcttgaaagctaggaagagatgaccagatgcaaaaaaaatgtgagaaacatgacgttattggctactcaaagataaaatttgaattaaccaatatgataaaaattaagttttga

SEQ ID NO: 232835 - DNA, 584 bp, Homo sapiens
ctttgcattttacttgtaatgttaaggctttctaaaagtggattataaagaacagagacattcccccaatccttatcagaaacagacgagtctgcagtgaatcccaaactgttaatataacagctaaaatgcaaaattttgagtgggctcatacaccattttagttcattttaaaaaatatttcagttcagtttgtatggtttatgcattttaaaaaaaatgctgagttatttcttatcctgacctctctgctgttttgatagatatttaattcttttgcaggctggaaagaatcaggaaggcccctaaagactcaaaggagtcttcacagccctgtacacacgctaacactcctttaaggcagttatttaaaaaaatagaatcatctatgcttttaaagtggtctaaaggcatttagagtaacccactcaggataatgtaatttggaggagaaagatcaccagtttgcttcttgaaagctaggaagagatgaccagatgcaaaaaaaatgtgagaaacatgaygttattggctactcaaagataaaatttgaattaaccaatatgataaaaattaagttttga

SEQ ID NO: 232836 - DNA, 596 bp, Homo sapiens
ctgataaaacaaattgcttgttttgtgacttgacttactggtataaaatgcttaatttaattyaggtaagcatgaataacaaagaatttaggggttctttgttcaatctctaaacacacacatcaacattgcccaaccctgtgtttccaaccagagcagcccgtacctgaattccacacacacagggagattgtctggcatgatgtctcagatcctctctgttttgacttcttcctggacagggaaggtggactcacccattcatgatttgagaggaggaagtaagcacagcctagctctgtgctttctgccccccacaatgacagggagtattttgttctgtttcacttttagtgaagttggaggcacagccttaccaggggagacctacagatttctagtgctacctaagactgggtggacacattgtcctctttctcaggtgtggagcaaaccacagaggagacaggtggtgtcacttcctccacccccgcgtcccctgtggcgtgggtgatggcctgctctgcacctgcctctctttggtctttttcagtttgttccaaactgatttgagtaagaacatgctaagtgttcga

SEQ ID NO: 232837 - DNA, 596 bp, Homo sapiens
ctgataaaacaaattgcttgttttgtgacttgacttactggtataaaatgcttaatttaatttaggtaagcatgaataacaaagaatttaggggttctttgttcaatctctaaacacacacatcaacattgcccaaccctgtgtttccaaccagagcagcccgtacctgaattccacacacacagggagattgtctggcatgatgtctcagatcctctctgttttgacttcttcctggacagggaaggtggactcacccattcatgatttgagaggaggaagtaagcacagcctagctctgtgctttctgccccccacaatgacagggagtattttgttctgtttcacttttagtgaagttggagrcacagccttaccaggggagacctacagatttctagtgctacctaagactgggtggacacattgtcctctttctcaggtgtggagcaaaccacagaggagacaggtggtgtcacttcctccacccccgcgtcccctgtggcgtgggtgatggcctgctctgcacctgcctctctttggtctttttcagtttgttccaaactgatttgagtaagaacatgctaagtgttcga

SEQ ID NO: 232838 - DNA, 589 bp, Homo sapiens
atttaggggttctttgttcaatctctaaacacacacatcaacattgcccaaccctgtgtttccaaccagagcagcccgtacctgaattccacacacacagggagattgtctggcatgatgtctcagatcctctctgttttgacttcttcctggacagggaaggtggactcacccattcatgatttgagaggaggaagtaagcacagcctagctctgtgctttctgccccccacaatgacagggagtattttgttctgtttcacttttagtgaagttggaggcacagccttaccaggggagacctacagatttctagtgctacctaagactgggtggacacattgtcctctttctcaggtgtggagcaaaccacagaggagacaggwggtgtcacttcctccacccccgcgtcccctgtggcgtgggtgatggcctgctctgcacctgcctctctttggtctttttcagtttgttccaaactgatttgagtaagaacatgctaagtgttcgagattatacaactgacaccacatgcattagggatgcatattcaaaatctctttttcaaatttaattccagccgtagagg

SEQ ID NO: 232839 - DNA, 593 bp, Homo sapiens
taagtcatcatattagtgaacacatagattcatttctattaccaactcaaggaacaaaacaaaaatagtatctctcttccttcaatttgccttacttctttatttaacctgcatgagatgttgactaatttgcaaaacaatagtaataaacctagaagtcttttttaatattttgcagtctaggagtgtttcatgctcatgttggatttctaagtcagtttacccattaattataatatgatattaagaatactatgtacttatatcaaatcaaaatgttgcattccttgaatacatacaacttttatttatcaataatgccaaaataaagctgggaaaaagaaccctaaataatctttatctactttgctaacattgaaacatgttgaacactaagtataaatattcccatgaaaacctgaagaggaaaacaaaakccttagttgtctattttccaaagcctcaagaagcactcgtatgcatttgtgtttatatattaacataggaattttaccagtgttttctagtttaaattttccattttttaaaaaagtttattttagctctatcttgagtgatagctgtggttatgt

SEQ ID NO: 232840 - DNA, 326 bp, Homo sapiens
aaaacatgtaaaaataaaatgtaataactctttaaaactaccttcatgaagaaagctggaattattttgtaaaatcatttcctaaaccagcacttaacaaaatgtgaacaaccatgtggactactaatttggaagaaaaatatttctttaagaagctaaagtaacgcccccracttcctagtcatttgatctgagagagtgaagtgacctagagaaaacgtggagaatacaggacaatgagcaatgttcatatcttttattatttctctaagactcaaagtgtttatcaggctcctgacagaagacagttagctaaatagttaagt

SEQ ID NO: 232841 - DNA, 571 bp, Homo sapiens
acagtattgagatgcatcaaaaatttaaaaaattatgttatgattcagcaattcaacttctgaatgtatacgcaaaataactgaaagcagggattgaaaaaaagcatctgtacaaccatattcataacaacattattcacaatgagcaaagtgttgcagcaacccaagtgtccatcaacagatgaatgagtgcataggtgtggtgtacacatgcaatggggttttatcaagccttaagaaggatggaaattctgacgtacactacaacatagatgaacctgagaccaytatgctaagtgaaataagccattcacaacaaaacaaatactatgtgcttccaactgaggtttctagagtagttaaaatcatagacacagaatggaatggttgcttccaggagctcaggggagctgggggaaggagaatgattgtttaatggatacagattttcagttttgcaagatgaaaaagttctgtagatctgtttcacaacaatgtgaatatataattaacagtactgtaaacttaaaaatggttaagatagaaaattttatgtgatgtgtatttcacc

SEQ ID NO: 232842 - DNA, 590 bp, Homo sapiens
aataatatttttattttcattgcctaaaacaagcagtccaggtagattgtactcacctgcatctaagaaagtcagtataaatatttacttaagtttcctcccctctctgaggggagggaacttagaggttgggtcaggtgccacaaaccactatggcacctgtacgcctgtgtaacaaacctgcacgttctgcacatgtatcccagaacttaaagtaaaattaaaaaaaaaaaaaaagaatagcttttaggtggatcgcagtgcctagaccagtgcctagcatgcatagtaggggcttaataattatttgttgaatgaatgaatggaaaaattacatcccatctgaaaatttaaaaaaaattcactctggaaattagttttgaatgatatataaacaaataagttataatcccaggtttctactaaattcagaaagagtagacacttttttattagaattattgagcgtaagaccagtagattttttmaaattaaaaacatgaagatgaaaaggctgctccttctggcatcaaatatatctggaagaagatattaagtggctacaaggttggaaaagagaaagaaagtta

SEQ ID NO: 232843 - DNA, 460 bp, Homo sapiens
aggtgttgtttgataccagaggaaagcaacttaatgtaaaaatttggtattatgaataggatactgataaaacagagaagctaaaatgttgagattggcttcagggccagacaaaargcggcaaagaaactattattagaacctaaacactgataaccaggcaacagaaaaacatttggtaaaattgtgggtgctaaccaggaaggtagacactatacccaattgacttatggatttggttgaagagattttaaaaagagaatattattgctacaattggtctatatcagccatagtagttaaggtactccaagaaatatgagctcagaaaagaagaagcctatttgcaagaagagatacatggaaaagaaattagactatttggaaatactgggaatttcataattggaaaatgaaattatttgttatctccaataagaaaataaaattaaatgaattt

SEQ ID NO: 232844 - DNA, 480 bp, Homo sapiens
tggtgggttaattaatcttgattatcacaaggggatatagttgctgtacaaaagattaattaaagcctcagcaactgctgtagctatggggactgcaatttgtttcaccaaccctcctgccatttaactgtactttagagactatggcccgtgactataatacgttgcaacatcaacatcagagcctactcagtgtaagccagagctgatctatgcacatccaggagtggtggactgtggcagacaatgttgatgttccatccatgcgtccttgacctatgtctaatttaacctgcaactacagtagagttcccatgcatactgacaacttcccaccccaagcagctgtctttktgcttcttggcctgagagctttacctggcgtcataggagctatctcatcctgcacacagggcaacccagatgtgctgggaatttaaacccttgtgagcaaatttaacaatgaaaaatagcagtcat

SEQ ID NO: 232845 - DNA, 355 bp, Homo sapiens
ccatcaaccttattccttgttgcacaagatactgtgtgtttgtgcatacgtgggagtgtgtgtaaactgcttacttcattttagataaagtacaagctcatgtaaatatatggttttcagtaaggccttactaaggctatctgaaaatcyagagttcatagatgcctagataatcgccttacagtgtcgttatacacagcttctacaattgtgaggcaaaactagacaatgtgcatgcaggcgatgagacagacgtataataagcacttaaactcatctttggctacaacggccagaggtagctccatatctgctgtcttcttcccacagccacttcatgacagcggatcccaga

SEQ ID NO: 232846 - DNA, 636 bp, Homo sapiens
tgcgcaattaacttctaaaactttccatttcaatgtgcatattcttaaatttattggaacacatttgaaatttgtagagcatacccagttgtctgcatgtattttaagactctacttatctctccaaaccaattccagactactcattctttctcacacatatgcagtctctctcgttacagtataaaaattattattatgctyctgggtctatcacaaaaatgccggttgtacatcccagggttatttcagcctggaaaatttccaataaatattcagctcaggcctaaattattcatgcccttaaaatatactttttacaaatattctcaccagacagggggaagggaatgagaaaacacaggcccacactgagctgagctgtgtttaaaattacctggacttgtttcttgaacaagttgaaggagccatcaatgtttgtggggctttttgtatttaaaagtcacacatttcagtctgtttcttatattgacattttgtttcatttggagctttagaaacatgtttgcatctctcagtgagtcccttcctggaaataaggccactttagcccagcccataataacctctcagagaccacttggccttgtctcctgcctgtacacaggtctttgt

SEQ ID NO: 232847 - DNA, 593 bp, Homo sapiens
tttgactttttaagtcagcatacgtaatattttgacttgtttttaaaaagaacagaaaaagcttgggaaaatatttgccatgtttctgcaaatgagttaatagtcattaggttttaaaagaaatacctctaattatatttagtagtatttacaatgctgttgtaaaaagggttttacagttttttcaagtgagaatgattgcgaacaccttaacaaaattttgattttgtctgttatagaaacacattttttatttggaaacattttaaacatttagaaaagtataaagggtccaatatacacatttctgtacccaccaaccaaagtaaaaaacaaatgataattttatcatttcccttcagttttttgtatcaaagaaatagaatgttatggacaaatttgaagtctttttcattctcctctagtctcattccctttcaccacctctgaaggcaattctcattacgaatttkgtgcatacatttccagtccacattttatgctttcattacatatggaaatattctcataaaccatgtaatatattcttgcactgtttttagtattttgtaaatatattcatatggtgtaaa

SEQ ID NO: 232848 - DNA, 577 bp, Homo sapiens
ggctgggtatttcccacttctattgttggtttggcttaggtaaaactcatgatggttaggctctggtaaaatcgggtctttttgagattgggtcttagttaacaagaacagaaagatctgagtgtatttaaaaatggttacttttggccgggtgcagtggctcacgcctgtaatcccagcactttggaaggacaaggtgggtggatcacgaggtcaggagatcgagaccatcctggctaacacagtgaaaccctgtctctactaaaaaatacaaaaaattagctgggcgtrgtggtgggtgcctgtagtcccagctactcgggaggctgaggcaggagagtggcattaacctgggaggtggcgcttgcagtaagctgagatcgtgctactgcattccaacctgggtgacagagtgagactctgtctcaaaaaaaaacaaaaaaaaaacaaggttacttttcccctctctctgtctaaagtataggggattttttttctgatccttgctctgataacttggtggggctcctggagataacactgaagaacatgtccccaccccatgggcccccaagag

SEQ ID NO: 232849 - DNA, 492 bp, Homo sapiens
tcacccttctcactgggaacagagccctaggaaaacataataaatcattttagctccaagtaactaataccttactgtctattggggatagtaaaagtagagacagagggcatatgaagactaatgatttcaaagaaacttgtgataaattcatgattgctatcccttatagacatgaaatggagatatttaggaattttcataacataaccatcccatgttgactgggaggaggcctttctaccctgtcaaagattgtccgttgagatgtttgggggtctggagataatgaggcatttctgtaggcaacaataagactcttttattcttggcgacagagatccttctctttccttctttagagctttccatgsccctggctcctgctcttgatgagagtttctggagcaggtggtgtaaaaaaatttttggctgatactaaaacaccttccacaaatactgaaataccacaccaggtgtttcaatgatttt

SEQ ID NO: 232850 - DNA, 503 bp, Homo sapiens
caaattcagggaaccatctaactcgtcattagtcagattagtcagaagataatgaaacaatgtgtttaaagtgctaagggaaaaaaatctttkgagcctaaaattctatgcccaaactatcattgcagtatgagagtaaaataaaaatattttcagataaagacctagatgatataccacactttctgtgtgaggaagtcttctgagtatatatactagtaaaacaaggagaaaaaacagaaagatgacatggaatccagggctagactttcatcctggaggtcactaataggaagcccaaggatggtggctgtgcagctgatctggacaacaacaggtccaggataggagagtctgggagagaccctatcctggggcaccatgagaggataaagggattcaagacaatagttaacactattgaaggtctggatacagttgagattatgatagagagttgagattcttttccaaataagaaaaaaataactcaattagaaacc

SEQ ID NO: 232851 - DNA, 519 bp, Homo sapiens
aaactccccaagagtatggatctaattgacagcctttctgaggccctgaggagcttccagcttcagggtttccatggcaacgtgtccccactgctagagctctactgctcacagtcatcatttacagggacccacattttagacactcctttaagctatccaggaacttcactatcccaaagggtaacaaattcaattttccaagcaggtaaaayttcccactttggggctaagcttccacttccaatttctaagaattctttgttcaatttatgattgaacaaagatcaatttgatatattaatttatgcatttctttctttcagtctggctctgtagcatacttcttgtacctttaaggctgtaggtcttaaacttcatggttgtctttcatcttcttccaaaggagtaacattgcaccagaatctgtccccctgggaagtaacgcttgccatgactagtcatctaagtcacaacaaactccaggctcaccagtccccaggtaaggtagggagaggt

SEQ ID NO: 232852 - DNA, 519 bp, Homo sapiens
aaactccccaagagtatggatctaattgacagcctttctgaggccctgaggagcttccagcttcagggtttccatggcaacgtgtccccactgctagagctctactgctcacagtcatcatttacagggacccacattttagacactcctttaagctatccaggaacttcactatcccaaagggtaacaaattcaattttccaagcaggtaaaatttcccactttggggctaagcttccacttccaatttctaagaattctttgttcaatttatgattgaacaaagatcaatttgatatattmatttatgcatttctttctttcagtctggctctgtagcatacttcttgtacctttaaggctgtaggtcttaaacttcatggttgtctttcatcttcttccaaaggagtaacattgcaccagaatctgtccccctgggaagtaacgcttgccatgactagtcatctaagtcacaacaaactccaggctcaccagtccccaggtaaggtagggagaggt

SEQ ID NO: 232853 - DNA, 519 bp, Homo sapiens
aaactccccaagagtatggatctaattgacagcctttctgaggccctgaggagcttccagcttcagggtttccatggcaacgtgtccccactgctagagctctactgctcacagtcatcatttacagggacccacattttagacactcctttaagctatccaggaacttcactatcccaaagggtaacaaattcaattttccaagcaggtaaaatttcccactttggggctaagcttccacttccaatttctaagaattctttgttcaatttatgattgaacaaagatcaatttgatatattaayttatgcatttctttctttcagtctggctctgtagcatacttcttgtacctttaaggctgtaggtcttaaacttcatggttgtctttcatcttcttccaaaggagtaacattgcaccagaatctgtccccctgggaagtaacgcttgccatgactagtcatctaagtcacaacaaactccaggctcaccagtccccaggtaaggtagggagaggt

SEQ ID NO: 232854 - DNA, 520 bp, Homo sapiens
atatgcagactgtgaaagccctgaccttctcaaagcggaaggcctgccagacacagaaaaagtgggttctgctattaaagccatccaattagaggattttttctcacagattgctacctgcatagggctcattggcattttaaagtcaattgtcccttatatgtgtatggtgccaccttctgggctgcggcacacacaggagcctcagatttctccagtaagaagtgacagccaccctggtggttatttgtacacagtgctctgtgttcaaacaagatggcttggatgtgctaatggattcttatcagttaattgaatcagacactgctcatttacctgggcacctctgatggggtctacaaacagcccttcacaatcaagatcttcccaaaatcacagggaggactggatggcttccctcacactgttgtccaaccacagtgggaaaggaaagttcaggtcttgtattcccatgtggkaaaacaaacaaataaacaaaaacttgtcaagcacagggcaa

SEQ ID NO: 232855 - DNA, 604 bp, Homo sapiens
caaatgcacaacacaaagaaaataataaagacagcagcagtggatggaggagcccagcacaaaatgcaatacctctgtagagactcctgcccacttataggcagtacctccaccaccccaaatactcagagatccttcagtgtgccctaaggaacttcattatgaacacatacagactggtttaagcmaaacgcttcccatggatcatctagccagtcctcactgtaaactttcaagcaaggtcacatgttggttagtatagaaattgggactctaacccagccagtcttatgataaagccacacttgtaaatttcatcttatactgcatagtttaggggagaaaaaaaaatacagtaactgtaaagttacaattaaaataatttttaaaatagcaaaacttatgggatcctggtacagcaaaccttatttgtgaaattaaagcattagatgatgctatacaattaaaaaaaatcaaaaatgatgattctaagcattccacttaaaaataatgggaaaaagggaaaaataacacagaataacataaacaaaagtaaacataaacgaaaagcaagagaagaaatcacaatggggtacaatctgct

SEQ ID NO: 232856 - DNA, 661 bp, Homo sapiens
ttgatgtgatgtgatgagaagggcacatcgcctctgtggttttcttcctccagatccacacttcactctaatcacgagaaaacatcagacaaacctaaactgatatatattctacaaaacacctgacaagtattcttcaaaagaatcaaggtcataaaagcaaaagactgagaagctcttagtaattgcatagactaaggagacataacaattgaatacaatgcagtatccttgatggatcacagagcagagaaagaatgtttagtgggaaaactggggaatctgaaaaaagtttaagtttagttaacaatattacaccaatgttaatttcttaattttaataattgtaccatgtttttgtaagattttaacattagggaaagctgagtgaagggtattatattagctccctattagtgctgtaacaaattaacacaaattgcttaaacaataaaaatgtatcttacagttctggagaccaggaaatatcacttggctaaaatcaagatgttggcaggtgtcttagayctctttgtgctggtataacaaaatccctgaggctgagtaatttatggagaacagattgctttcttacagttctggaggctgggaaatctaaggttgaggagcccacaactggtaagggccttcttgctgcatc

SEQ ID NO: 232857 - DNA, 661 bp, Homo sapiens
ttgatgtgatgtgatgagaagggcacatcgcctctgtggttttcttcctccagatccacacttcactctaatcacgagaaaacatcagacaaacctaaactgatatatattctacaaaacacctgacaagtattcttcaaaagaatcaaggtcataaaagcaaaagactgagaagctcttagtaattgcatagactaaggagacataacaattgaatacaatgcagtatccttgatggatcacagagcagagaaagaatgtttagtgggaaaactggggaatctgaaaaaagtttaagtttagttaacaatattacaccaatgttaatttcttaattttaataattgtaccatgtttttgtaagattttaacattagggaaagctgagtgaagggtattatattagctccctattagtgctgtaacaaattaacacaaattgcttaaacaataaaaatgtatcttacagttctggagaccaggaaatatcacttggctaaaatcaagatgttggcaggtgtcttagatctctttgtgctggtataacaaaatccctgaggctgagtaatttatggagaacagattgctttcttacakttctggaggctgggaaatctaaggttgaggagcccacaactggtaagggccttcttgctgcatc

SEQ ID NO: 232858 - DNA, 553 bp, Homo sapiens
cctaaaaattccctgtgctctacctattcatccctctccctcttttcgacaatccctggtatttactgatcttctcagtgcctataggttttgccttttccagaatgccatatagttggaaatgtataatatatagtcttttcagactgattctttcactaagcaatatgcatttaagattcctccatgccattttgtgatttgatagttcatttttattattgaatcagattctattgyatgaatgtataatagtttgtttatccattcatgtttgaaaaatattaatttttaattaccatggatatataatatgtgtatatatcccattcatctttttaaggtccatttgattacttctagattttgaaaattatgaataaagctactataaatgttcacgtgcaggtttttgtgtggacataagttttcaactcattaggggaaataccttggagtgcaaagattaaattgtacggtaagtcttttagctttgtaagacactgccaaactgtcttccagtgtgattataccattttgaattcccatcaaa

SEQ ID NO: 232859 - DNA, 553 bp, Homo sapiens
cctaaaaattccctgtgctctacctattcatccctctccctcttttcgacaatccctggtatttactgatcttctcagtgcctataggttttgccttttccagaatgccatatagttggaaatgtataatatatagtcttttcagactgattctttcactaagcaatatgcatttaagattcctccatgccattttgtgatttgatagttcatttttattattgaatcagattctattgtatgaatgtayaatagtttgtttatccattcatgtttgaaaaatattaatttttaattaccatggatatataatatgtgtatatatcccattcatctttttaaggtccatttgattacttctagattttgaaaattatgaataaagctactataaatgttcacgtgcaggtttttgtgtggacataagttttcaactcattaggggaaataccttggagtgcaaagattaaattgtacggtaagtcttttagctttgtaagacactgccaaactgtcttccagtgtgattataccattttgaattcccatcaaa

SEQ ID NO: 232860 - DNA, 440 bp, Homo sapiens
ggacagtcaggcagaaaatcaataggaaagagtcgagtgcggcaggtcacagtggcaakggacactgataacattatttccagaaagaggatttcaccatgagtgagaaaatataaaacaggtcagagtcctcataagttggagtactgattactgaataatttaaataaacagacttgaaaatgttcagaaccaaagaggtaatcctggaagaccctgttctacggaagaggtggtagctagaaagagagaagcatctctgggtgggttggtggtaaacgaagaaggaagcaggtagagggaattcacaattctatcaaaaagaaagagaactgatgaatcagaagacattttaactttcttcattcatgattttatctccaacaaaattctctctgtaccaagagagaaggatgctcttgaactagaaaacctagtag

SEQ ID NO: 232861 - DNA, 578 bp, Homo sapiens
aagcttgttgattttatttgcaaattctctttgtaccttggctccttatgtctcagccaaaataattgaaaacactaagagaaaatggatgtttttatcatctcctaataaatttaaggctctaattctctcacaatggttcagtccttttcttttcagtccgaataccaggttcttgaagaagccaatggaatgtaaggaaattcactttcctttctccatcagtattacacagttgatcccaagtttatctcttggacttctccagctcttagagtaactgagaaatcctttactgggagtcttagtgtttttgtaaaccacagctcaccctggttcccgtctttcatgtctctgtccaccatgtgcctcctttccattttgagtgtttcttttttacaattagaaatgattactgttcagtgggaaggtccaatgtttcctttagataacaattttgttagttaactggtgaaatgatttacttattccacatctgattctggggagagtttgaagcagctatacctatgctgtactaatcattatccattgcrtgttagctatttaaaatagca

SEQ ID NO: 232862 - DNA, 429 bp, Homo sapiens
ctcctccttcttgaagttcactcatcttctcctcttctccttacagttcctacaggttcccaaccattctcttccttttactcagtgttcttcacatttttcctgcccccatctctcagtcctccctcctttttctcatgtgctgagttttaattatgcacatctaaaagcattgtgaattaaagtcagtagctctagttctactatcttttcctccagcatcaaatgagatgtacctggggaattggaggcaagggaggaacaaatgagcctgtgatcagagacaaaccactttggagagagtagacaacattgtctttcaaacaagggcaggctgcctgcttttggcctccttggaggagctctgtctaccaagccttgtgcttttygcgacagcagccctggcttccctgtccccagactttcctg

SEQ ID NO: 232863 - DNA, 543 bp, Homo sapiens
ggaggggacaagctggatgcctgaaccattttgttctatcttttaggacagtgaaagagcaagaagcagggttggggtgggggacacatattctgttgagcattgtcaccactgtattcaccgaaattcatctgcatgcttgtatgtatacttttgatttgcctgatacactgaaaattatatgaaattgktctctattctttaggtaattataatctaagtgctaatatgaatcttagaatttatatgaaatatttatgcccacaacaagacatttcagctatttcctagataacaatctcacttcaccctgcacaaaacaggcacatgatcatgtcactctgacctggtttgagtccaaggagacttttgcttttaaaataatttaggttagtagttaaaatatgaactttgggccaggagtggtggctcatgcctataatcccagcacttcgggaggctgaggcgggcggatgacttgaagtcaggaattggagactggccttgcccacatgctgaaaccccatctctactaaaaaaaaa

SEQ ID NO: 232864 - DNA, 462 bp, Homo sapiens
tgctacaatgcattggtgaccacagacaaaaggtgcctgttgttgttatagtttgttttctgtcttrtttttcatcatgggaggacaaaaagaaaaaatgggggcaatggtgaaggggaaatgaaaaagacctgcttttctatgggtggaagcgactaaacgagagaataaatttggattacacaacaaatgcaaatcaagttagaagcatgaaaggcatgattaaggccatggttctaatagagatcagccagcggaaccaggagcatgccacacccagagaggctgcagagccattgccttctctcctgtcaatgctaaattaacgaaatggaactcacagaagcctacgtaatcaaatattggtgggacacaagcaaattctgaaaaagtttcattgatcagtgataatttcttttggtgtaaatatctcctcaaaacatttcaggaaaaaaaaataaa

SEQ ID NO: 232865 - DNA, 421 bp, Homo sapiens
cctgttgttgttatagtttgttttctgtcttgtttttcatcatgggaggacaaaaagaaaaaatgggggcaatggtgaaggggaaatgaaaaagacctgcttttctatgggtggaagcgactaaacgagagaataaatttggattacacaacaaatgcaaatcaagttagaagcatgaaaggcatgattaaggccatggttctaatagagatcagccagcggaaccaggagcatgccacacccagagaggctgcagagccattgccttctctcctgtcaatgctaaattaacgwaatggaactcacagaagcctacgtaatcaaatattggtgggacacaagcaaattctgaaaaagtttcattgatcagtgataatttcttttggtgtaaatatctcctcaaaacatttcaggaaaaaaa

SEQ ID NO: 232866 - DNA, 598 bp, Homo sapiens
tcataccaacaggctccttccaaaacctttcaatgcaaattctagcaaatgcacacttggaagaaaaatgttccatgaagttgtatatgtaatttatactttcagcatttatgtatataatttcaggggaagtgggatcaacttaacattattaaacatagtcctacgatatttacaacataacttcagaaacattttattactagaagtattaaaaaaatgatgtaccatttaggatttaagacacaccccacaaatgaaaaaacaaattagattataaacaacattttttwaaaaaattatgccatctctttcactacaaaatcctcctgggggaaaaatatcttttccttcattattaaaagatgttatcagagcacagtggaattctttcagatttagtcagaaggttctctggagttgagagatctactggagaatattttatttgaaagtccatgtcctttcctcaggcctacatcatatataaataaacatttcagaaaaggggccatgttaggagaaagtgggttgaagattgtaagacctgtttcctgggtgccaaataattcacaagttggaataagctgggtttttg

SEQ ID NO: 232867 - DNA, 513 bp, Homo sapiens
ggtaaaatctgaatacgttctacagactacagtattatgtacatattaattttttgattttgacaattatcatatggttatgaaaaaaattgttcttaagaaacacctattaaaatgtttagggacatcaggcctgcaattaactcttaacagttaagattatataaaatatataaatgtatacatatgtgtgtctgtgtgcatgtacatatgtgcacatacatctgcttcagttttaatcagtggttctctttgatcttaacccaatttgaagaaaatatacaaagactttttttgtttactctgccttctttttgttagtacctcagaagtattcagcatgggaaaagaagagcaattcaagcataatgcaaaccaaccatttgggtctccagtactataaataatcctgagttactacaggcagaccgtaaatttggtctgtataaaaccttcctcactttccattccaayccacagctacttttccacaagagaaagaaatctatatac

SEQ ID NO: 232868 - DNA, 662 bp, Homo sapiens
gatagaatttttgtaggcactgaaagttgtccaagttgtccttgtgaagtcttagcaatatggaaactatgttgatatgataataggaaaaattattttatgcagataaaattgtagaaaacttactattatttctattataaatatgtatattaaaataaatttatagataaatagtaatcatttgattacttttattataaacattttatatgggaaaaccaaagttcagcactgttaagtaattttttaaggccatacagctaatcagtgatagaggctggacttgatctcatggttgtctgcctcctaagactatgccttttatattatattaaacttgtaatattgcttctgaattttaaatataaatatattttataagaaaaactaaggagaaatctagaattttaccataaaatgtgtttttgggacttaatttgttcacctttaattttcttttggtcttttattttttcctactcttcttcattgattcttccctttccttttctattcttttcttcttccccacattttcaattttcaaccaggaatattcatacttctagttagattgtgttttggtgaataatcaaakcactgcctcccgcaacctcacctgctgttcctgcctggtcttcttcccccatccttgacca

SEQ ID NO: 232869 - DNA, 639 bp, Homo sapiens
tttattgctttttattgttactgtagccccctgcacaaaaatggcatatgaatagtaataatattttataatctgctacagtaaccatatttgcttatttgcaacaattacataggactggaattaaagatatagagacctgagaattgcccatcatttgcaaaaaactcttttcatgcaaaagtgaaaaatttacagtgacagagcaagaaggaacctttagaatgtcttccccattcttatcttaaggcagcctcacacttaagacagctcgagaaaatgacatgctgccctatttgggaagccattaaaattattttcagaactttggccagtatcatcttttcaaaatatagttaaatcctgctagaggagctgttttattaatattttacttaagcccttagagtagaattcaagcttagtatttcatatcctaatcaagagaagtaatatacaacagcagtgaagagtatgaaccctgcaaatagactccctgggttcacgttgtgactttgccacttaatgctgtgtgaccttgataagatatttaacttcacttcaccatactattctcatctttaaaaytggataacactggttgtgaaaatttagtgatatgttgcatgtaagatactt

SEQ ID NO: 232870 - DNA, 632 bp, Homo sapiens
tatataaattatataaatttactaagcacacattccagatcagctggaattattttttccatagcaagattttcttgataaagtgaattaatttgcattctatgaaacctctttatctggtcatatataacacttatacctaacgatcaagagaccggcacttcacgttgcgctgrtctacaactggggtcagaaatttttttggtaaagatctagatagaaaatatttcagactttgaaggctatatggtctctgttataactattcaactctacctttgcagtaagaaagcagccatagatactacttaaaagagtggtatggctatgttccaataaaaccatatttacaaaaacaggcatcagattggattttgcttacaggctatagtttgctcactgctgttctacagataaagattcagcctgttaggctctgaggaataactttctattgcaatttctaccttcaaatttacataagtattcggacacccagatatgcccatttcatggattcatgcaattacttaaatacatcatgccttttcatttctctatgcctcctttatgttggtctttcttctgggcacacttataacttctggtattggtcctccttccataatact

SEQ ID NO: 232871 - DNA, 632 bp, Homo sapiens
tatataaattatataaatttactaagcacacattccagatcagctggaattattttttccatagcaagattttcttgataaagtgaattaatttgcattctatgaaacctctttatctggtcatatataacacttatacctaacgatcaagagaccggcacttcacgttgcgctggtctacaactggggtcagaaatttttttggtaaagatctagatagaaaatatttcagactttgaaggctatatggtctctgttataactattcaactctacctttgcagtaagaaagcagccatagatactacttaaaagagtggtatggctatgttccaataaaaccatatttacaaaaacaggcatcagaytggattttgcttacaggctatagtttgctcactgctgttctacagataaagattcagcctgttaggctctgaggaataactttctattgcaatttctaccttcaaatttacataagtattcggacacccagatatgcccatttcatggattcatgcaattacttaaatacatcatgccttttcatttctctatgcctcctttatgttggtctttcttctgggcacacttataacttctggtattggtcctccttccataatact

SEQ ID NO: 232872 - DNA, 632 bp, Homo sapiens
tatataaattatataaatttactaagcacacattccagatcagctggaattattttttccatagcaagattttcttgataaagtgaattaatttgcattctatgaaacctctttatctggtcatatataacacttatacctaacgatcaagagaccggcacttcacgttgcgctggtctacaactggggtcagaaatttttttggtaaagatctagatagaaaatatttcagactttgaaggctatatggtctctgttataactattcaactctacctttgcagtaagaaagcagccatagatactacttaaaagagtggtatggctatgttccaataaaaccatatttacaaaaacaggcatcagattggattttgcttacaggctatagtttgctcactgctsttctacagataaagattcagcctgttaggctctgaggaataactttctattgcaatttctaccttcaaatttacataagtattcggacacccagatatgcccatttcatggattcatgcaattacttaaatacatcatgccttttcatttctctatgcctcctttatgttggtctttcttctgggcacacttataacttctggtattggtcctccttccataatact

SEQ ID NO: 232873 - DNA, 525 bp, Homo sapiens
ttttggggtgtgtatgtataacttttcatccagtctatctttgtctttcaattgcgtatttagcccaaacatatttaatcttttgttactttagggttcaattttaccaccttaccattttatactctttgtttcaactttttgcatttcttctttcatttcyttccctaactaacctgagttaaagatatttttgctttacttttctattttattagttgttagttaaaaaatcttataattttcacatcatctgagaaattaaacatatctttaatagttttaaaaaattcatccctcacctattgaatatttacctcctttttatttttcaaaaaattagccttgagttgtaattcacatatcataaagttcacacttcacgtaatttttgaagtatacaatgtagagaattttagtatattcagagttgtcaatctctattaaattccaggacattttgatcatcccaaaaagtaaccccttatccattctacctttctctatcctttggaagactttctc

SEQ ID NO: 232874 - DNA, 525 bp, Homo sapiens
ttttggggtgtgtatgtataacttttcatccagtctatctttgtctttcaattgcgtatttagcccaaacatatttaatcttttgttactttagggttcaattttaccaccttaccattttatactctttgtttcaactttttgcatttcttctttcatttctttccctaactaacctgagttaaagatatttttgctttacttttctattttattagttgttagttaaaaaatcttataattttcacatcatctgagaaattaaacatatctttaatagttttaaaaaattcatccctcacctattgaatatttacctcctttttatttttcaaaaaattagccttgagttgtaattcacataycataaagttcacacttcacgtaatttttgaagtatacaatgtagagaattttagtatattcagagttgtcaatctctattaaattccaggacattttgatcatcccaaaaagtaaccccttatccattctacctttctctatcctttggaagactttctc

SEQ ID NO: 232875 - DNA, 557 bp, Homo sapiens
ctgcactcttaacttctcacccgctcatgctgctgagcatcttaaggtgctgagtacctctccgccaagacacattcttgtgtctcttttctagtcctgctgatgctttttaaaaaggcactctccaaggttccacagtcattctcttctcttacagttcagtcgtgacgttacccatttgacattaataatttcctatagtctctctctcatgttccccttagatttccctttcccttttccccttgcttcccttccctttctttccctttgtttccccttgtttcctttcctatccttcttgtctttcctatcagttctcttgtaaatcacatcctttgtcccattccaaccaaatatcatgttgaaatttgatctccagtgtggcagtgctgggaggtgaagcaggagatatttgggtcatgggcgctgattatctatgaatggcttgtgcttttctagcagtagtgagttcccactctcaggagactggattgattcttgtggggaagggattagtgggtcgttatraagcaaggaagcctcttaggcttggt

SEQ ID NO: 232876 - DNA, 634 bp, Homo sapiens
ggtaagatgagtgagcatctatttatgctgcgccagtaagagcttcctgcccaacagccatgaaacaaacatattctcatcagtactgtacccccaatgtaaagcagaatccagattactctcagaaaactattatggctcttcttttagaatgatacaaaatgagccatgaagagagtaactaaggctcaaaggagagtggaacaacttctgattttaaaataactgacttacayagtgtattaaatgatttcacaacattactttttaaaaatagaattcatacaaccaaacaattattcagataaaagatttgtgaaagtcctgacttttaaaagtgaagatgaattttaatgattacattatctgtttttttaattaaattcacatttttaaaatataattggagtttccagagtcatagaaaaaataatgtgttactagcaaaactatcatgaaatgatcagtctataaaattcaaattaatttggaacattatcaaggtcaagaaaacatcatttctaaccaatcagtaaaaatcaattttgaaaggcattgaaaaaaatgtatagcaaatgagtcttctttatattaataccacactatatacaaatcactgagaaaaaatatgttc

SEQ ID NO: 232877 - DNA, 634 bp, Homo sapiens
ggtaagatgagtgagcatctatttatgctgcgccagtaagagcttcctgcccaacagccatgaaacaaacatattctcatcagtactgtacccccaatgtaaagcagaatccagattactctcagaaaactattatggctcttcttttagaatgatacaaaatgagccatgaagagagtaactaaggctcaaaggagagtggaacaacttctgattttaaaataactgacttacacagtgtattaaatgatttcacaacattactttttaaaaatagaattcatacaaccaaayaattattcagataaaagatttgtgaaagtcctgacttttaaaagtgaagatgaattttaatgattacattatctgtttttttaattaaattcacatttttaaaatataattggagtttccagagtcatagaaaaaataatgtgttactagcaaaactatcatgaaatgatcagtctataaaattcaaattaatttggaacattatcaaggtcaagaaaacatcatttctaaccaatcagtaaaaatcaattttgaaaggcattgaaaaaaatgtatagcaaatgagtcttctttatattaataccacactatatacaaatcactgagaaaaaatatgttc

SEQ ID NO: 232878 - DNA, 511 bp, Homo sapiens
aaaaactgcatgcacatatctatatgtatatgatttatttaacctgtaaatctttctttaagcawatgtcaggattattataattttatacttcattgaaaattatttcaatgtgctacatctaaatgtccaccaggaaattgagttctacttatgagatatagcttgaattgtccatgcctctccaattttaatgctaccacctcattaaatttttactacctcttgcttagaataataaatctcctcattggtctttcacatctaccgttgattcactctattcattcttcacacatcacttagaataatttttttaatggagattggattaaatcatgtcccccaatccacttcttaaaacctgctaaagtctttttaattgacataggataccaggaagtgggagcaagaaggaaaaaagtgaagttgattaatgggtgcaaacatacagtttaatggaagaaaaagatctagtgtttgataaatcagtagagtgactatagtttac

SEQ ID NO: 232879 - DNA, 489 bp, Homo sapiens
tcatctgtaaacagagacaatttaacttcttcactatcaagtatgatgttaactatgagcttgttgtatacggctttgacaatcttttatttgtccataggcctagagagacacctagaaagttgtctattgaacatcaaygttgatttgagaaactgtggtgattttctaaattccctgttataacttgatttattcgtgagcaggcatcacttttacaaaaacaatgcattctttatttttcaatttgtttattgctttaagtatggtgattgcaaagaatttgtgcttagacaaaatatcacctagagagtaattttgttttgtgtgttttaatcagacatattggtgaataaggaatcaacccttagctacttttaaagtataagtaatttggatattggaaatgaactctctgctttgaatccaactgaagagcaaggtttaccaaatctctgctctctccattagtgggaagaatgacgaggc

SEQ ID NO: 232880 - DNA, 440 bp, Homo sapiens
tatgaggagaaacccattctgagaagtgcatagtgatctaagaagactggagtttggcactcagactgagagctcttaaagtgcacgacaagagggaacatgatctcctccctggagtgatcagaggctggggcccaacaacattctcaattgccgaaaacgtaacattcatccctgctctatcatcttagcctcactggtctgcrgagcaccagctccatcccatgcagagtcaggtgatggggctgattccagtcttttcagttgtagctatgtgacacagctctgatcctacccaccactcagcatcctaacaggatcgattggtgttaccactgtgtgtcatggttttcatagaactctggagacagctgaatccctctctcgaaggctagtaaaacaagaggcagaattgaacaaatttacccttacctctcaat

SEQ ID NO: 232881 - DNA, 386 bp, Homo sapiens
cagaacctctgtataatgtttaatagaagtagtgagagtatacattcttctcttgttcctcattatactaggaaaaattcactattttcaccattaattatgatatcagctataagggtttttttgtagatgccctgtaacaagttgaggagcttctcttctattccyacttagctcagactttctgtcaaaaggaatactagtggataaagaaactgtgtggggtgtgtgtgtgtgtatatatatatatatatatatatatatatacatacatatatgatggactactactcagccataaaaatgaatgaattgacagcattagcagcgacctggatgagattggagactattattctaagtgaagcaactcaagaatggaaaac

SEQ ID NO: 232882 - DNA, 521 bp, Homo sapiens
ctgtttctcctatgtgccaagaaaaatctcaacactacagaagagaagtatgcatggcatggaacctaagaaaacttcagcatttgccacaattaatagggttattttatcctgtaagaagggaatctcctgggtgctgtggctcatgcttgtaatcccagcacttagggagactgaggcaggcaggtcacctgaggtcaggagttcaagaccagcctggccaacatggtgaaaccccatctctactaaaaatacaaaaattagccaggcgtggtggtgggcacctgtaatcccagctactcgggaggctgaggcaggagaatctcttgaacctgggaggcggaggttgcagtgagcccaggttgcgccactgcagtccagtctgggcaatsaagtgaaactgtctcaaaaaaaaaaaaaaaaaagaaaagaaaaaaagggaatccattggtataacccataacctgagcaggggattatcaaatttataagaactttataaaaagacaaacagttgggaa

SEQ ID NO: 232883 - DNA, 236 bp, Homo sapiens
gaattctacaacacatgtaaacagaaagaatagtaacccaacatgtactcttccataaaatagaggaagagggagcactctcacgtgtattttatgatgtcaatattactctaataccaaaaacagaaaaatacatgacaagatgatagaccartatgtctcatgaacataggcacaaaattttgtactaaattagccaataaagttctgcacataagacagtacgtcatgatcat

SEQ ID NO: 232884 - DNA, 600 bp, Homo sapiens
tattttagtaagaaaatgttagtttctttagtaataaaatgttatattattttttacttaatatataaaaataacccatgcattattcctttccttttttaaaaacacaacaaaataacaacccatcttttcatttttgaagtgatgttactattctctccactttgcaaaagttaaccaacaaattatctagcaatggaattaaggtgcttgaacatcagttttgagcccaacagttatgcatagttttatttatgcctcagcatgatatgtggtaataatatgttatagtttgcattgactattttgaatggaatagaatcctgttctaagaattgtaccacatagtgtttattttaccttaatcattctccttttacttaatataatttgaaaaataaaagagtcctccttgctattcctgtatagtttttcccaataaatcaacttagtgcaacagtctttttacaaaagagggagttccttgcttggatattaaggtgaactagaataatgtatcarcactcagggaggccgaggtggtcagatcatttactgtcaggagtttgagaccagcctgaccaacagactgaaaccccg

SEQ ID NO: 232885 - DNA, 618 bp, Homo sapiens
aaatttatacaaccacaagtgattcaaacaataaaaccgaacttttgataagaaatactggggttagtcagggtttaaatgcagaygatctaaatcaccataaatattttaagcagaatgtaattttatggagagaattttacatagataaaatgttgaaatggttagaggagtgagctctattgaggtcttccagaaatggctcccagaattggctctccatgaaaccgactaccaatacagaagtcacagaacatctttcttgatgacttctgggaaattagagatcttctgagtttaactagggataagccaacattcagttaaatatcctagttacgtagcacataataatgaaaaatagtaagttcctttattaagatgtaggcttagctgctatgccaaaccacaagatagcagtgaaaaggtgagagattattctctttttcacagaacaatatgagctaagaaatcgtaggctgatatggcagctctttagtgtctgggggatgggaaccagaccccttctaccatgttctttgctgaagaggcaattcttcaaactcatgaactgagatcaaagcttgagctcctgccctcacattcacatgctggcca

SEQ ID NO: 232886 - DNA, 618 bp, Homo sapiens
aaatttatacaaccacaagtgattcaaacaataaaaccgaacttttgataagaaatactggggttagtcagggtttaaatgcagatgatctaaatcaccataaatattttaagcagaatgtaattttatggagagaattttacatagataaaatgttgaaatggttagaggagtgagctctattgaggtcttccagaaatggctcccagaattggctctccatgaaaccgactaccaatacagaagtcacagaacatctttcttgatgacttctgggaaattagagatcttctgagtttaactagggataagccaacattcagttaaayatcctagttacgtagcacataataatgaaaaatagtaagttcctttattaagatgtaggcttagctgctatgccaaaccacaagatagcagtgaaaaggtgagagattattctctttttcacagaacaatatgagctaagaaatcgtaggctgatatggcagctctttagtgtctgggggatgggaaccagaccccttctaccatgttctttgctgaagaggcaattcttcaaactcatgaactgagatcaaagcttgagctcctgccctcacattcacatgctggcca

SEQ ID NO: 232887 - DNA, 618 bp, Homo sapiens
aaatttatacaaccacaagtgattcaaacaataaaaccgaacttttgataagaaatactggggttagtcagggtttaaatgcagatgatctaaatcaccataaatattttaagcagaatgtaattttatggagagaattttacatagataaaatgttgaaatggttagaggagtgagctctattgaggtcttccagaaatggctcccagaattggctctccatgaaaccgactaccaatacagaagtcacagaacatctttcttgatgacttctgggaaattagagatcttctgagtttaactagggataagccaacattcagttaaatatcctagttacrtagcacataataatgaaaaatagtaagttcctttattaagatgtaggcttagctgctatgccaaaccacaagatagcagtgaaaaggtgagagattattctctttttcacagaacaatatgagctaagaaatcgtaggctgatatggcagctctttagtgtctgggggatgggaaccagaccccttctaccatgttctttgctgaagaggcaattcttcaaactcatgaactgagatcaaagcttgagctcctgccctcacattcacatgctggcca

SEQ ID NO: 232888 - DNA, 431 bp, Homo sapiens
ccactggggtaaccaatagccatgagtacctactgggtaattgaaatgtgactaattcaaattgagatgtgctgtgagtatacaatacacactggatttaaaaacttagtatgtaaacaagaatgcaaaatatctcattaatactttatactgattttgtgttaagctgctaaaatttgggtagatcgaattaaaatatattattaaaattaatttcgtttttaaaaatgtgactattagaaaatgtaaaagtaaatatgtggcttacacattgtgactctattggaaattcatggtattccttaactcgcttgcaccaacttccataaacatcaaaagaaacatgctggcttttcatttgttcaagataccacyattcccacttctggctttatcctcccttccatatagatacagacagatgttagata

SEQ ID NO: 232889 - DNA, 523 bp, Homo sapiens
tacgatatgattagtataattaatatgatattattttcaattctatcacattgccctcttctttattaacagatttctggaggaaaattacacctgtttattctcttgctctgtctgcactttaacactgagtgaagttagaccagccttgagtcatatgttgcaatgtatgggagacagcagaggaagaatcaaatagaaatttagtaggaattaaagggctgagtttactttctttctgtgacttctgaaagcaagattccttcataaactcttagagcccattgtcaaaggaatacaagatcattaaattgctatgcattatacaaaaagacttttcatgattaagaaataacaggaacaaaagaagattatttttaatctcatgaaacttaaattattttattttcttcttttgcttattycactgccattcttgtacttgaaacactttttcagttctgtaagattctctgggctccatttaaatacaacaaaaccccagaacagtaattatccaaat

SEQ ID NO: 232890 - DNA, 626 bp, Homo sapiens
gggatgctgctagctttcaggttccagtcaaagtcctcatctttctcctgcttccaggaacaaagatcaaattcgaaatcacagcgcccactggaggtacctggaaaatatttccaaatatatgttacagaaaatggaaatttgcctactttaaaacatgcaattcaaaactgcagtgatcttgctgtatcatgtaatatttgaaaccttcataatgctatcctgatagcaacatataaagagactattttggtttgcgatacacacagctatttccgtggcttctgtaagttcatttctctacaaatctggtcccagtttcaaaactgataaactgttttagcattacacacatttccttctctaaatacctatttggtcaatataatttatttattctgtcttctcatctatgcttctcaggtcttggtaagaaatttatkaagtttattattctgcaatacattttaggttgggtaatgctgccccaagcaaaagttatcatttatcatagtagttatttttttagaacagttctttattttagagaaaattgtgaaacagaaaagtgaggtaaaaaggtgtgataatttgaatgagcttattgaaataagttgcagaaatta

SEQ ID NO: 232891 - DNA, 574 bp, Homo sapiens
atgttgatatgtcttcagataaatgtttctctcttaaataagcctcatttacacaattgttcaaaatttttaaggcaaatgagggcaaaaatgattctgtcatcaaaacactcagggatttgctctccaatgcacaagccaaagaaacgcagataaccccacagatgctatggtaattcctggacaaatcatgtactctattttattacatatgactctttaagaatgtccaagttctattgcacttggcatcaaatcagtgaggtttttgtttgtttktttctgtatagatacattcttatagttatcccaagtcagataaaattatctcaaggtgcaaaataaaccaattactctttgtagtttataaggtggagaatatgaaagcatatgaggctgggtggagtgcttcacccctgtaatcacaacattttaggaggctaaggtgggaggatcacatgatgctaggagttcaagaccatcctggccaacaaagtgagactttgtctctacaaataattaaattaaattttaaaaattaaaaaagaaaacatgcgagttttaccatcgtttc

SEQ ID NO: 232892 - DNA, 574 bp, Homo sapiens
atgttgatatgtcttcagataaatgtttctctcttaaataagcctcatttacacaattgttcaaaatttttaaggcaaatgagggcaaaaatgattctgtcatcaaaacactcagggatttgctctccaatgcacaagccaaagaaacgcagataaccccacagatgctatggtaattcctggacaaatcatgtactctattttattacatatgactctttaagaatgtccaagttctattgcacttggcatcaaatcagtgaggtttttgtttgtttgtttctgtatagatacattcttatagttatcccaagtcagataaaattatctcaaggtgcaaaataaaccaattactctttgtagtttataaggtggagaatatgaaagcatatgaggctgggtggagtgcttcacccckgtaatcacaacattttaggaggctaaggtgggaggatcacatgatgctaggagttcaagaccatcctggccaacaaagtgagactttgtctctacaaataattaaattaaattttaaaaattaaaaaagaaaacatgcgagttttaccatcgtttc

SEQ ID NO: 232893 - DNA, 356 bp, Homo sapiens
tatttttcttttgatcttttcccttgttttgaagttatgtttccttggaaagtttatttctaatataccagtggggaaaataaaataagcaaaaataagtagtttgaatttcacgtcactgtgatgagggggaacaacttataatttcatatcctattatttcctataggcaccaggtaataaaaggagcacatagtcttgggaactgatgccaattcctggcatttgtggtgcaattaatgccaatatcagacacctgtgccatcaggaagacaatgrtcacctttgtctaaagctgtgtcatcaatcaaactattttctacctttccaaatcctataatttgtccattgatcaa

SEQ ID NO: 232894 - DNA, 425 bp, Homo sapiens
aaatctttataatgtaaatcatatttttcttttgatcttttcccttgttttgaagttatgtttccttggaaagtttatttctaatataccagtggggaaaataaaataagcaaaaataagtagtttgaatttcacgtcactgtgatgagggggaacaacttataatttcatatcctattatttcctataggcaccaggtaataaaaggagcacatagtcttgggaactgatgccaattcctggcatttgtggtgcaattaatgccaatatcagacacctgtgccatcaggaagacaatgatcacctttgtctaaagctgtgtcatcaatcaaactattttctacctttccaaatcctataatttgtccattgatcaatgtctcttacaggtacaaaatttgtakgctgaaaaccacgaaatgctg

SEQ ID NO: 232895 - DNA, 596 bp, Homo sapiens
gtccctgtggacgtcatcttccacatcatctcgtttcttctttaaaaaagctgtccacttgtgaactactgatttctttggtgcattgtccccccaaacttcttgtaaagcatcagtgatttcaccgttctttcacccaagcttcatcataatctaatgtttgttcttgcttcaattttagcagaatttacattgctctgctaggggctcttttcaaactaatgtctactccttcttactgtctcaaactagatcctgtgcagacgtgctataataaattagtataaataatttagtataaataataattagtctaaataaataatttagtataattagtataaataaatagtatatttatttatataaataattagtataaatacataatttagtataaataataaaactcataaattagtatgagtttattttgctgccaaaattgaaacctttgcatagttttttttcataatatacattttccatgaaytttttaaggcctctcatgtatccacaggtagagtgccttacctattctgacttcagtcaattattcaagacctttccttgtcagtgatacattagaaaggtag

SEQ ID NO: 232896 - DNA, 437 bp, Homo sapiens
aatgctcacatttcggttttaaatacccttttccactaaaagggacaagacttctcagcaaaatgactgaatccagggctgtgattgggaaagtataagattaatctggaatatcttgtgacactgaaaagtaagtgcgtgcttagaggatgattggggaccagtcaaaaagatacaggtgataaatcaaaggccacatctgcacaccatgacaccgtggacaaatggacacatggatacacaaaaaaataatgatagtaacagataatataccactgaataaaataactcatgagttcatactcatataaatgaatatataactagggaagaaagaaagccctttgttattgaagctcttagatgccaactaataaacatagaaggaatgatggaattmgaattttgctatttgacaccatcatagtaaacatcct

SEQ ID NO: 232897 - DNA, 627 bp, Homo sapiens
cctcttacccaccccttagctcctggtaaccaccattctactctccatttctatcacttcaactattttcaagatggcgcatataagtgagatcatgcagtatttgcctttctgtgtctggcttagttcacttagcataatatccttcaagctcatctatattgtcacaaatggcaagatttcctcctttttgaaggctgaataatactccattgtgtaaagatatatatatacatgtatgtatatatatacacacatatgtatagatayatatctgtgtgtgtatgtgtatacatatatatatatatatagtgtgtatatatacatatacacacaaacaccacattttctttttccattcgtctcttgatggacacttaggttgtttctatatattgattactgtgaatagggctgcaatatgcttgggaatgcagataattcttcagataatgattttatttcctttggatatatactaagtagtggaattgctggataatatagtagttctattttgaatttttaaaggaatctccatactattttccataatggctgtgccactttacagtctcactaactttgtacaagtgtttccttttctccatatccttgccaatactt

SEQ ID NO: 232898 - DNA, 541 bp, Homo sapiens
gaggaagtggcctgccaaggctgtatagatacttccttcatggagctgccattgaaamcctggcctgttgagtgggttgtcaaggagagtgtggaacaggatatcaggggacatgggtatgaaagtctgctctgctagcgtgtgctttggggaaaactgctgttcccttatgcgccacagcttctacatctgtaacatgtgggtgccataccggatggccttaaaggtcctcatttggatacagaaatggcatcaggatattaagttggcttccagccccattcctgatcatcctcaactgacattaggaatacatccttggacacttctgtagctgaagccatggtgccacctacttaggcaaacctctgaaggactggctgatccttggcagagctttcttgccactgcctacaccacagcacaccccaattggtaatggctcatccccaaattgccctggtgttcatttattcacctaatatttattgagtgtgcactaacactccaggcaaggaagtgtggaaacattgtgagcaag

SEQ ID NO: 232899 - DNA, 551 bp, Homo sapiens
ctgtctcaaaccaaaaaaaagaataattggcataaattaagaatatataccagctgcaagagcagcaaaggaggttggaaaattgctaaaactgaaaagagaaatggagcccttgggatggattttcaaaagaggatgtgggagttctaacaggaagggcagacatcattccaccatgaagcaagcaaactctctgccaagtccccttcctttttgtgctctagcctataaagcagagtttctcaaccaggctcagtccttcagaaaaaactgcaagcataggagtccacacatatatgtgcatctggcacttgagcaataccttccaatggtggttcagagaggagcctctaaacccacgctccttgagtccttttcttatgacctgggtgatttggggcaagttatttaayctttatgaaactcaatttctttatctgtaaaactaagataataagtttccaactcaataggttatggagaagattgaataaaagactctgtgtaaatgtgcttttagaataaatgtctggcacacaggaagctgaaaa

SEQ ID NO: 232900 - DNA, 560 bp, Homo sapiens
caacacatttgttgaatgaaataacacaaaagtgatttgaggcagctcacttcctgttttactcttgaatacattgctcatttcaacttagcaaatgtttatttyttccttatcaatggtaagggaggggcattgttctgtataccaaacagggtaatacttgcttatttcaaatattttatttgaagtaattaaaaaaacgtagttgaggaaattatctttaattcgtcttgtctttcaaaaagaagttttaagaaaagtgaaagagagcgactttcattcaatctctgcacgtttaaaacctaatggtgacaatgaagaaatgcctcctggtcatcagaaggaatgtcaattgaaaaaaaaaaaatccaatggccaaatgtcaattgcaaaaaaaaaaaaaaaaaaaaaaaatccaaaggccaacagagcctggagatgtttgaaaagaaaaggggcagggagacaactagcaaaagaattgcattaattttagaagtggaaacacttattggaagcatttttcaaagcccttcagaagctagtaaaatcatatttta

SEQ ID NO: 232901 - DNA, 537 bp, Homo sapiens
ctctgaagtttatttgttttgaaggtgagatttctttcttttcttttttcctttttagatttaaagattttaaacatatgacrtcttgcctcgcatagtttctatggaaagggaggcagtatatctgaggatggaaaaagtaattattctgccaaaactgtctttcaccaatgctgaacgactgggcaaattcaccacattttccaccttctcacatgtcttaaaaacctagtcgttgccagtttcaccactggtacaatattggttatgcacaattcaaatgttcatctgtaatggcaaaacccttaataataacaatgatagtaaaaataacaggctaaattttgcaatttataaaggacttccacatgcattatctcatatgatcttcacaacgttgtcttaagggggcatgaaatttttgttctatagacacaaaggcttgaggttcatgtatagttagtgacaaaacaaaaaacttagcttttctgaaatcttgtttaacattttttcactatacactgtgcacttaagact

SEQ ID NO: 232902 - DNA, 595 bp, Homo sapiens
aaaatcacacacacatgcctcttccatgtttatcacttcttaaacctgagctatcttctggatttcatactagcctccttctcttaatagctgagcttctagaaaaaactatgaatccttttttcctctatttcctcccctcaattcatttctcgctccagtgccatccaacttaaactctcgcctctcagtggaaatggctacaaccacgaccgcctaattcctgtacttaatgtactcttttcacttttcaagggaaattgtcttcttaggggtaaataatactgttgaacattctccctccctcttgatttctctcctttcttggcttttttgtaatcaagttctcctggttttcccatccccttcccacccgcctgccttcyttctttacttcactctgtcattggtggtctcctctcactccagtccttctcccttccacctacactcagacctccactacctcctaaaggctaatgagccctactcatatatctccatccagaattctctcctgacatccagattcgtgtattcaaatgactggacatctctacctggaggaaggcaactccatcatcttttcctcaga

SEQ ID NO: 232903 - DNA, 596 bp, Homo sapiens
cctctaggacaaagcttccagaggaaggaacaggcagcaatctttgctgttctgcagcctccgctcatgatacccaggcaaacaggatctggagtgggactccagcaaactccagcagacctgcagcagagagkcctgactgttagaaggaaaactaacaaacagaaaggaatagcatcaacatcaacaaaaaggacgtccacaaaaaatccccatctgaaggtcaccaacctcaaagaccaaaggtagataaatccacaaagatggggaaaaaccagcacaaaaaggctgaaaattccaaaaaccagaacatctcttctccaaaggatcataactcctcaccagcaaaggaacaaaactggaagaatgagtttgacgaattgacagaagtaggcttcagaaggtgagtaataacaaactcgtctgagctaaaggagcatgttctaacccaaggcaaggaagcaaagaaccttgaaaaacaggttagagaaattgctaactagaataatcactttagagaagaacagaaatgacctgatggagctgaaaaacacggcaaaagaacttcgtgaagcatacacaagtaccaatagctg

SEQ ID NO: 232904 - DNA, 596 bp, Homo sapiens
cctctaggacaaagcttccagaggaaggaacaggcagcaatctttgctgttctgcagcctccgctcatgatacccaggcaaacaggatctggagtgggactccagcaaactccagcagacctgcagcagagagtcctgactgttagaaggaaaactaacaaacagaaaggaatagcatcaacatcaacaaaaaggacgtccacaaaaaatccccatctgaaggtcaccaacctcaaagaccaaaggtagataaatccacaaagatggggaaaaaccagcacaaaaaggctgaaaattccaaaaaccagaacatctcttctccaaaggatcataactcctcaccagcaarggaacaaaactggaagaatgagtttgacgaattgacagaagtaggcttcagaaggtgagtaataacaaactcgtctgagctaaaggagcatgttctaacccaaggcaaggaagcaaagaaccttgaaaaacaggttagagaaattgctaactagaataatcactttagagaagaacagaaatgacctgatggagctgaaaaacacggcaaaagaacttcgtgaagcatacacaagtaccaatagctg

SEQ ID NO: 232905 - DNA, 596 bp, Homo sapiens
cctctaggacaaagcttccagaggaaggaacaggcagcaatctttgctgttctgcagcctccgctcatgatacccaggcaaacaggatctggagtgggactccagcaaactccagcagacctgcagcagagagtcctgactgttagaaggaaaactaacaaacagaaaggaatagcatcaacatcaacaaaaaggacgtccacaaaaaatccccatctgaaggtcaccaacctcaaagaccaaaggtagataaatccacaaagatggggaaaaaccagcacaaaaaggctgaaaattccaaaaaccagaacatctcttctccaaaggatcataactcctcaccagcaaaggaacaaaactggaagaatgagtttgacgaattgacagaagtaggcttcagaaggtgagtaataacaaactcgtctgagctaaaggmgcatgttctaacccaaggcaaggaagcaaagaaccttgaaaaacaggttagagaaattgctaactagaataatcactttagagaagaacagaaatgacctgatggagctgaaaaacacggcaaaagaacttcgtgaagcatacacaagtaccaatagctg

SEQ ID NO: 232906 - DNA, 562 bp, Homo sapiens
ggaacacataagtctgtgctaattaaatttctcccaaaagcccctgatgagagcagtaactagaagatgcaaatgtaaaagcctgttaaaactcttcagggctttttctagtccttacaacagagctacatctggtgacagctggtagcagaggcctgaagaaggaagaaaacatttgtaaggaaagccacaagccactrctaacagagtggttatctaactccaggaactggtcaagcaattaacaagcatgttatgggctgtgtcctcctagaatacacatgttgaagccctaacctactatgggaggtggtggggttgcggggaaggcagtatttggagatgagtgcctttgggagaaattgatttagatgaggtaatgaaggtggggtctctatgatgggattaatgcccttaagagaggagacataagagagctctctatctctctctccatgtgtgtgcaccaagaaagaccatgtgggcacacattgagaaggcagctgtctgcaagccaggacaagagccctcatcaaaacccaaaccctgcagaactgggtct

SEQ ID NO: 232907 - DNA, 629 bp, Homo sapiens
atgaaggagatcgctgagatgatgaaatgttgcttgactgtggtgttggatacacaaaattacacatgtgataagatgacatagaactacacctccctccgcgcgcgcgcgcacacacacacacacacacacacacacacacacacacgcaggagagcaccagaggctgctgaagcctgagtaagtttgcggattgtacaatgccaatctctctgattttcatattgtgctatagttgtgcaagatgttaccggggaaactgagtaaatggtasagggaacctctatggactactcttgccacttcctatgtatctagaatcatctcaaaataaaatttttaaaaagtaaagtttttcatatctacatctttgtggaagatgggagtctatgtggaggtggggcagggaggggacagaaaggtctttacctgctgtgcctgatatttttggcagccatgtgtgttgtccaaaggccatccgtctgctggagaatttcctcttgctctggggagttcagtctttgtctgattcaggacttcaactgatgggatgaggcccacccacattatgaaggaaaatctgctttcctcaaatctcatttcaatgtaaatcacacccaaaaaccagc

SEQ ID NO: 232908 - DNA, 629 bp, Homo sapiens
atgaaggagatcgctgagatgatgaaatgttgcttgactgtggtgttggatacacaaaattacacatgtgataagatgacatagaactacacctccctccgcgcgcgcgcgcacacacacacacacacacacacacacacacacacacgcaggagagcaccagaggctgctgaagcctgagtaagtttgcggattgtacaatgccaatctctctgattttcatattgtgctatagttgtgcaagatgttaccggggaaactgagtaaatggtagagggaacctctatggactactcttgccacttcctatgtatctagaatcatctcaaaataaaatttttaaaaagtaaagtttttcatatctacatctttgtggaagatgggagtctatgtggaggtggggcagggaggggacagaaaggtctttacctgctgtgcctgatatttttggcagccatgtgtgttgtccaaaggccatccgtctgctggagaatttcctcttgctctggggwgttcagtctttgtctgattcaggacttcaactgatgggatgaggcccacccacattatgaaggaaaatctgctttcctcaaatctcatttcaatgtaaatcacacccaaaaaccagc

SEQ ID NO: 232909 - DNA, 605 bp, Homo sapiens
ctcagaggtgggatttagttgtttacgtgatgctcaggtgtaggatttcttcagtggctgatggaaggagccatgcagctggaagtgctgtaggaatgtaatttgtgggccacagctgttggtaagacaaataggacacggaagctatgagacacggggagcctgcatggaatgagagcatgtgccccacaagaaggaacttgagccagagtggtgactatgaatgtggaagaaggaagaacgatggagctgttattaaagaagaagtagtgtggcttagtaattagctggatagagtaaaaaaaaagattcttgagactttggaaccatgagtggaagtaggaaaccctagaggagaagctgatttgagagagaaatattatatgagtttgttctcacactgctatgaagaaatacccgagaytgagtaatttatgaaggaaagagatttaatggactctcagttccgcatgtcttgggaggcctcaggaaacttactatcatggcagaaggcaaaggagaagcaggaaccttcttcacagggcagcaggacagagtgagtgcaagcaggggaaatgccagatgcttaaaaaaccgtcagatct

SEQ ID NO: 232910 - DNA, 605 bp, Homo sapiens
ctcagaggtgggatttagttgtttacgtgatgctcaggtgtaggatttcttcagtggctgatggaaggagccatgcagctggaagtgctgtaggaatgtaatttgtgggccacagctgttggtaagacaaataggacacggaagctatgagacacggggagcctgcatggaatgagagcatgtgccccacaagaaggaacttgagccagagtggtgactatgaatgtggaagaaggaagaacgatggagctgttattaaagaagaagtagtgtggcttagtaattagctggatagagtaaaaaaaaagattcttgagactttggaaccatgagtggaagtaggaaaccctagaggagaagctgatttgagagagaaatattatatgagtttgttctcacactgctatgaagaaatacccgagactgagtaatttatgaaggaaagagatttaatggactctcagttccgcatgtctkgggaggcctcaggaaacttactatcatggcagaaggcaaaggagaagcaggaaccttcttcacagggcagcaggacagagtgagtgcaagcaggggaaatgccagatgcttaaaaaaccgtcagatct

SEQ ID NO: 232911 - DNA, 371 bp, Homo sapiens
ggaagaacgatggagctgttattaaagaagaagtagtgtggcttagtaattagctggatagagtaaaaaaaaagattcttgagactttggaaccatgagtggaagtaggaaaccctagaggagaagctgatttgagagagaaatattatatgagtttgttctcacactgctatgaagaaatacccgagactgagtaatttatgaaggaaagagatttaatggactctcagttccgcatgtcttgggaggcctcaggaaacttacwatcatggcagaaggcaaaggagaagcaggaaccttcttcacagggcagcaggacagagtgagtgcaagcaggggaaatgccagatgcttaaaaaaccgtcagatct

SEQ ID NO: 232912 - DNA, 587 bp, Homo sapiens
gtggttcatggaagcttttcatagttttcacaaatgatgatcaatataataaatttataaagcccatttctttcaagtagaatcagtgatagaattattatacatattcattttaaaataaacatcttctctctatcttcagagtcaaattattaactgaggaacatactgaaaagaagaataaaatgagtaaattaatttttcctccagagatagttactagtaataytttggtatacgttcttccaataagtttttctattcatatttacacatttttaaaggttatctaaaatataccatctgtaacattttttcactacactactgaaaaacttttcatgttagtatttcttactaaattttttttatttttgtaattttttattttgatgttgtggatacatagtaggtgtatatatttatggggtacatgagatgtttcgatccaggcatgcaacgtgtaataatcacatcgtggagaatggggtctccatcccctcaagcatttatccattttgttacaaacaatccagttatatctttttaattattttaaaatgtaaaattaagtcattattaactct

SEQ ID NO: 232913 - DNA, 587 bp, Homo sapiens
gtggttcatggaagcttttcatagttttcacaaatgatgatcaatataataaatttataaagcccatttctttcaagtagaatcagtgatagaattattatacatattcattttaaaataaacatcttctctctatcttcagagtcaaattattaactgaggaacatactgaaaagaagaataaaatgagtaaattaatttttcctccagagatagttactagtaatactttggtatacgttcttccaataagtttttctattcatatttacacatttttaaaggttatctaaaatataccatctgtaacattttttcactacactactgaaaaacttttcatgttagtatttcttactaaattttttttatttttgtaattttttattttgatgttgtggatacatagtaggtgtatatatttatggggtacatgagatgtttcgatccaggcatgcaacgtgtaataatcacatcgtggagaatggggtctccatcccctcaagcatktatccattttgttacaaacaatccagttatatctttttaattattttaaaatgtaaaattaagtcattattaactct

SEQ ID NO: 232914 - DNA, 647 bp, Homo sapiens
taaatgcaaactgaactattatagcttttgacaaacggagagctatccttattttcattatgacactctaaataaaactctgagggtgatcaccagaaaaaataacaagctttgagattgtttcccagggtggaaagttgtcataagcacccaggttaagaacacaaacccaggttaggtgatgccatgggggtgaacattcctgaggatatattcttatttagsgggcctctgatctgcatgatctcacctttgtaactcttaaagacatcagacgtaaatttacctatcaatttatgaagagaagcaccctgacaagatgcacaatgttctggatcaagggttagaagatctatcttcggactgggcgcggtggctcaggcctgtaatctcagcactttgggaggccgaggagggtggattgcctgacgtcaacagggagaaaccccgtctctactaaaaatacaaaaattagctgggtgtggtagcccatgcctgtaatcccagctactcaggagactgaggcaggagaattgcttgaacccgggaggtggaggttgcagtgagctgagatcatgccactgctctccagcctgagtggcagagtgaaactccatctcaaaacaacagcaacaacaacaacaaaa

SEQ ID NO: 232915 - DNA, 647 bp, Homo sapiens
taaatgcaaactgaactattatagcttttgacaaacggagagctatccttattttcattatgacactctaaataaaactctgagggtgatcaccagaaaaaataacaagctttgagattgtttcccagggtggaaagttgtcataagcacccaggttaagaacacaaacccaggttaggtgatgccatgggggtgaacattcctgaggatatattcttatttagggggcctctgatctgcatgatctcacctttgtaactcttaaagacatcagacgtaaatttasctatcaatttatgaagagaagcaccctgacaagatgcacaatgttctggatcaagggttagaagatctatcttcggactgggcgcggtggctcaggcctgtaatctcagcactttgggaggccgaggagggtggattgcctgacgtcaacagggagaaaccccgtctctactaaaaatacaaaaattagctgggtgtggtagcccatgcctgtaatcccagctactcaggagactgaggcaggagaattgcttgaacccgggaggtggaggttgcagtgagctgagatcatgccactgctctccagcctgagtggcagagtgaaactccatctcaaaacaacagcaacaacaacaacaaaa

SEQ ID NO: 232916 - DNA, 541 bp, Homo sapiens
ctaactgatagaaacaataacaaaaatgttctaagcaggaatatcagaggctgtacacaaaggaaatcagcctcacagttagtttattcaaatcacttacgaaataaaaacatgaccaagcaaacaacaatattacctcagaggcttgggcaaattaatattcagagttgctatgctgtattatctaaaatgaccagttttaaataataagaattgtaaggaaacaggacagtatgacacatatgcaggggaaaaaagttgataatagaaattttgtttgatgtaaccgaggtgtcaaatatagtagmtaaagacttaaaaacattgtggctatattcaaggaactaactaaacagaagtaaataattaaagtgaagtttgaggatagtgtctcatcaaatagaagaaaaaaatcaaataaagaaagtataaaaacaataaaatgaaaattatgggccaggcacgggggctcatgcctataatctcagcaatttgggaggctaagccaggcagatcacctgaggtcaggagttcaagacca

SEQ ID NO: 232917 - DNA, 460 bp, Homo sapiens
cacacgtgtgaaggacactgtgcaggagccctgatgcccacccaactcctcacctggatgttctctctgatccgctgctcattgtagctcttggccaggaccacaaccccacgctgcagctggtagcgcagggcaatcagggctggggtttgtttgtgtttctttgctaaggcacaaagaactgggtcctccaaaagaactggggagtttgggtccaccctggaaggaaagccagaaatgctgaagtcttgaggctggattcagtttggtaggaggctccctaaacagactaaggtgttcattctgcaccagagcctctcaagtgaggyccctgaacagcagcagcatcacctggtatctcataagaaatgcaaattatccccttaccctgacccattgagaatgaactctaggagactgagtatgctataactaaaatttttcatcaaaatggcatttt

SEQ ID NO: 232918 - DNA, 524 bp, Homo sapiens
aggctggattcagtttggtaggaggctccctaaacagactaaggtgttcattctgcaccagagcctctcaagtgaggtccctgaacagcagcagcatcacctggtatctcataagaaatgcaaattatccccttaccctgacccattgagaatgaactctaggagactgagtatgctataactaaaatttttcatcaaaatggcattttaggtaaacttcctgatgctcttattaccatagtttatgtcgttgggttcccagagcactgtgggcaaccagaacaatgtcttttgacttgcagaaatccagcagtttgctctggttgaggtaaggatgacattctacctttagatgatcaagagagaaaagcatcagataattcaaaacagatatgttaatataaagattaaaataagctgaataaagtataacattaaatttgaacagaatattactgtcaagtaacaatcaktttataaaaatacagtttatattactggtctaaaagtatatatagaaatgt

SEQ ID NO: 232919 - DNA, 524 bp, Homo sapiens
aggctggattcagtttggtaggaggctccctaaacagactaaggtgttcattctgcaccagagcctctcaagtgaggtccctgaacagcagcagcatcacctggtatctcataagaaatgcaaattatccccttaccctgacccattgagaatgaactctaggagactgagtatgctataactaaaatttttcatcaaaatggcattttaggtaaacttcctgatgctcttattaccatagtttatgtcgttgggttcccagagcactgtgggcaaccagaacaatgtcttttgacttgcagaaatccagcagtttgctctggttgaggtaaggatgacattctacctttagatgatcaagagagaaaagcatcagataattcaaaacagatatgttaatataaagattaaaataagctgaataaagtataacattaaatttgaacagaatattactgtcaagtaacaatcattttataaaaatacagtttatattrctggtctaaaagtatatatagaaatgt

SEQ ID NO: 232920 - DNA, 551 bp, Homo sapiens
ctcactgaaaaaacttcaactggactatgttgacctctatcttcttcatttcccaatggctctcaaggtagggaatttgtgagatcaacttctcttctgttctcagcatgaccatcctttatgatggttgaattgaacttcttctaaggagggtgtaggtgttattacatggcagaagagtcctaagtataatgcctaagccattttcttgaagagtacaaccttccttctgtaacgtatgatgacaagagaagacagtacatcaacctcaaagcctctgmttcaaaaattcaagaaaataacaacagccaccttcaaggctctgtcttaattagggttcctgagtccatctcttaggatcttcacagatacagagatccatgcagctgtggtaccccaaaaaaactgctgcacatgtggtgtacagtgagtttccattatctttccccattttaagctgaagtagatttggtggaactcactctgggtgagttttaaaaaggaaaccataataggacctgagaatccttgcctttttcactaaggcttat

SEQ ID NO: 232921 - DNA, 428 bp, Homo sapiens
aagcttggtgattttagtgattttggtcaataagctgtcttctcttgagttgcccagaagtatttctggtgtcagtttggggcattctcttaagatttctagactccaacattctaactagaccttttagtttttttttttttttttttaagtctctgacaggtgctaaaccctcttaattaatttgagtcattagaaagaataaaagcacagtgaaacaacttgatgcctgcatttagctgtcttttttgcttgcctgggttctgatttggggcttgtaataggggtatatttgacttcatactgaatttttgtattttttttwattgcatatccaatgagattgtgtcttaatggaagcattttattctgggataatcctgaaagtcagcacaaggttaaaactgttaacctctaaggaaagagaa

SEQ ID NO: 232922 - DNA, 610 bp, Homo sapiens
aacacaacactgtaatatgttagttgtttactcagtgcatctactgcatcataattgggcatttcaacattattttaggatttagttagatgcatctgtgcaataaagtatgtggtaagacaatggatcatgttttcttctgtcctcattttcactgtagactccctccgaaatgagccagttgrtctgagacaatattgtaggggatatcaagctcatagatcaggtatcctgtaaattgaatagaccaagcattgtaattagggaagtcacactcatatttgtaatagctgtatattccagcaaggagtgaattactaccttccccaggatagaaatcatatgtgtgtgtgtatatatatatataccctccccaccaacttactgagtgatctcctttagaaatagtgtcaaactgagggcaagatgtctctttcctcaataggtaattatttaggattttcagtaaataaatcagccttaacgagaagcccatactgtctggatcgcaaagagcatccatctccaccattatggtaactttgttcatgagccccttgtgaaaacaatgatgtgagtaaggaaagagactggttgaatttcacaggac

SEQ ID NO: 232923 - DNA, 628 bp, Homo sapiens
aggtgcattggctttgctgatactaaatacccattgggatctgataacttaaaagaccagatgagaaggttctcataccttgggacccactgattttcgagattcactttatacttctctgtagttggctgcaccatcatgctgtgcccttctggtagtggcaataaagtaaccatgaatatgtgtttgtaattatataaaatctaaaagcaaagaaaactacaagcaaatggcttctgcttacaaattcaatttatacaagtgccaacctataatttagaatggtggcttgagtgcctcttcatgcagaaatttgcaattgatggggacatatacagaatcaaataaggaaacaatgtattcttattgcaccccattgtcagaggtgatgaatagatttgaaaagcggcaaaggagcagagcaaaattctgcaccacctggaatgttcaaggagagagagaagagaacaggcattcttgatgggtcaagttgaccttaggcaggctccagatgyagctataaaatatcctcatatccttgatacttgaacacccactattttagctttatcttcaaaacaactgaaactgatccccaggctagagaaggattttctaattatggtgc

SEQ ID NO: 232924 - DNA, 585 bp, Homo sapiens
tttaagttttagtaaactttacaagagcccaaagaccaatgataaaaccatataacaaggtaactccatgtttcggccaggcgcggtggctcacgcctgtaatcmcagcactttgggaggccaaggtgagtggattaccagaggtcaggagttcgagaccagcctaaccaacatggtgaaaccccgtctctactaaaaatataaaaatttgccagttgttgtggtgggcacctataatcccagctactcaggaggctgaggcaggagaatcacttgaacccgggaggcggaggttgcagtgagctgagatcacaccattgtactccagcctgggcaacaagaaagaaacttcgtcctccaaaaaacaagaagaaacgaacagaaaactccatgtttaatcctgtcctagaatttcagaataagaaaaccaatagtcaaactcacatccccaaatggatacatactaaacatctcagagttaacggaaccataactgaattcttcaatcctaaaatgtacttcaccttcagtcttcctcattacaataaaaatcagcccaaccatcaatttgctaaagccagaagt

SEQ ID NO: 232925 - DNA, 625 bp, Homo sapiens
cattccctggtgctgcagtccacaagctaaatttcttcctcagagtgctttcaactggttggaagagacccccrccaatttattaagggtaatctttatttaaagtcaactgatgattgaggaggggcttcaagatgaccaactagaggaatctggtgctccttttatctaaaaaggagaaacaaaatagtgatgagataatcatatttcaaatagattagatagatataacactggaattcaacagaggagtgacaggaaacacctaatgcaaagaagatgagggaagtgaggcagcctgcttggcctgaattggctgggaaactggagatgctccccagtgtggggaaaaggtaagtgagacatccccagttgcccacaatcctattgcagactcctgcagtcttagccacaagacaaccccttgacccttttgggccctgagattaacagagagagctacctggagtccacatgaaggcattgccccaaagaagatcatgatgggtccccacatattccaagtcctaagcagctacagcaaggtgccatattgaaagcccagccccgaccagactgcatcttgcctggggccccacagtccatatatcttcacatctctgga

SEQ ID NO: 232926 - DNA, 512 bp, Homo sapiens
ttcttggaagccccatgcttttccataggttatgtgctcaggttaaatacttgatgcgtataaaataaagtattataaattaatttatatggctgggtgcagtggctcacaccagtaatcccagcactttgggaggccaaggcgggtggatcacttgaggtcaggagcttgagaccagcctggccaacgtggagaaaccctgtctctactaaaaatacaaaaattagctggtgtggtggtgcatcccygtagtcccagctactcaggaggctgaggcatgagaatcatttgaatccaggaggcagaggttgcagtgagctgagatcacacaactgcactccagcctgagtgacaaagcaagactctgtctccaaagaagaaaaaaaaagaaaataatttataagtttctcttgaatctgagagcattgggatatagggcttcgaaggcaaaatatttaaccctttgaccttgtttgccaagcgataccacctacttctaaaagtatttactt

SEQ ID NO: 232927 - DNA, 531 bp, Homo sapiens
ggaagccccatgcttttccataggttatgtgctcaggttaaatacttgatgcgtataaaataaagtattataaattaatttatatggctgggtgcagtggctcacaccagtaatcccagcactttgggaggccaaggcgggtggatcacttgaggtcaggagcttgagaccagcctggccaacgtggagaaaccctgtctctactaaaaatacaaaaattagctggtgtggtggtgcatccccgtagtcccagctactcaggaggctgaggcatgagaatcatttgaayccaggaggcagaggttgcagtgagctgagatcacacaactgcactccagcctgagtgacaaagcaagactctgtctccaaagaagaaaaaaaaagaaaataatttataagtttctcttgaatctgagagcattgggatatagggcttcgaaggcaaaatatttaaccctttgaccttgtttgccaagcgataccacctacttctaaaagtatttacttttggaccctgggcaacatgatgaa

SEQ ID NO: 232928 - DNA, 531 bp, Homo sapiens
ggaagccccatgcttttccataggttatgtgctcaggttaaatacttgatgcgtataaaataaagtattataaattaatttatatggctgggtgcagtggctcacaccagtaatcccagcactttgggaggccaaggcgggtggatcacttgaggtcaggagcttgagaccagcctggccaacgtggagaaaccctgtctctactaaaaatacaaaaattagctggtgtggtggtgcatccccgtagtcccagctactcaggaggctgaggcatgagaatcatttgaatccaggaggcagaggttgcagtgagctgagatcacacaacygcactccagcctgagtgacaaagcaagactctgtctccaaagaagaaaaaaaaagaaaataatttataagtttctcttgaatctgagagcattgggatatagggcttcgaaggcaaaatatttaaccctttgaccttgtttgccaagcgataccacctacttctaaaagtatttacttttggaccctgggcaacatgatgaa

SEQ ID NO: 232929 - DNA, 498 bp, Homo sapiens
ggtgcatgcctgtggtcccagctacttgggaggctgaggctggagggtcctttgagcctgggaggttgaggctgcagtgagctgtgatggtgccactgccttccagcctgggtgatggagcagcaccctatcaatcaatcaatcaataacagtactgttgggagtagcctatgatttggccagtgtggaggtgtgttttaatcttagattaatgtcctgatgcttctgttccaygggaggtctattcagggccagcaggagttggcctgtagaaacatggaaaacagaggcagtcggagcaaaaccctgggaaatgcatattgggaagcctctattttttttaatgccttgttttaaattctgagtctccctctccacccataaattagagttgaatgtatttacttaaattacatgtcatcaaatcacaagtcctgcccagagaccagacaagtatttggagcaagtctgaaaaagaaagttaacccattgtaaact

SEQ ID NO: 232930 - DNA, 589 bp, Homo sapiens
atacatcaattgattaataaaatttcacttataaagtatggctgtggataccacttttggcaactatttgtagttgagaagtcatgggaccattatggctcctgccccatgttagtctaagaaattattgacytggcacggtgactcgcacctgtaatcccagcactttgggaggctgaagagggcagatcacttgagcctaaaagtttgggaccagcctgggaaagatggtgagaccccatctctacagaaagctgaaaaattagctaagtgtggtggtgcatacctgtggccccagctacttgggaggctgaggtgggagaattgcttgaaccgaggagactaaagctgcagtgagctgtgttcatgccactgtgctccagtctgggtgacagagtgagaccctatttcaaaaaaagaaagaaatttcatcatttaattcaaacgttgaagtttgttgttgttgttgttgtttttgagagcgtctgctattggtgccatgtggcaaagatattgtgaagttatctttaatttctggctatgttaaactttttttgaatgaaaagaacatggtgaataatgccttgta

SEQ ID NO: 232931 - DNA, 589 bp, Homo sapiens
atacatcaattgattaataaaatttcacttataaagtatggctgtggataccacttttggcaactatttgtagttgagaagtcatgggaccattatggctcctgccccatgttagtctaagaaattattgacttggcacggtgactcgcacctgtaatcccagcactttgggaggctgaagagggcagatcacttgagcctaaaagtttgggaccagcctgggaaagatggtgagaccccatctctacagaaagctgaaaaattagctaagtgtggtggtgcatacctgtggccccagctacttgggaggctgaggtgggagaattgcttgaaccgaggagactaaagctgcagtgagctgtgttcatgccactgtgctccagtctgggtgacagagtgagaccctatttcaaaaaaagaaagaaatttcatcatttaattcaaacgttgaagtttgttgttgttgttgttgtttttgagagcrtctgctattggtgccatgtggcaaagatattgtgaagttatctttaatttctggctatgttaaactttttttgaatgaaaagaacatggtgaataatgccttgta

SEQ ID NO: 232932 - DNA, 589 bp, Homo sapiens
atacatcaattgattaataaaatttcacttataaagtatggctgtggataccacttttggcaactatttgtagttgagaagtcatgggaccattatggctcctgccccatgttagtctaagaaattattgacttggcacggtgactcgcacctgtaatcccagcactttgggaggctgaagagggcagatcacttgagcctaaaagtttgggaccagcctgggaaagatggtgagaccccatctctacagaaagctgaaaaattagctaagtgtggtggtgcatacctgtggccccagctacttgggaggctgaggtgggagaattgcttgaaccgaggagactaaagctgcagtgagctgtgttcatgccactgtgctccagtctgggtgacagagtgagaccctatttcaaaaaaagaaagaaatttcatcatttaattcaaacgttgaagtttgttgttgttgttgttgtttttgagagcgtctgctattggtgccatgtggcaaagatattgtgaagttatctttaatttctggctatkttaaactttttttgaatgaaaagaacatggtgaataatgccttgta

SEQ ID NO: 232933 - DNA, 623 bp, Homo sapiens
ggatgggtttgaaagtcaggatgtcagcattggctagagttgagctcagggtttctagaatgctgcatcttagctttcatcagcctggcttgagtcagggccattgggccttaggaatgtattgctggggtgctacttggatcctgtcaaaagatgttagaaggagtgagtgtcagatcccgggataagtcatttaggatagtgaccttctcagaagggccaataggaagtagaaagtggaaaggagagtcatgtcaaggatgctttgaacaaaggaatgagagaamgcgtagatcgtaaggctgtacagcaacttccactttgtcctggctttgctgttcttgtggatatacgtggcataaatcaagcagctaacttactttcagtgattctccgaaggtacctagtggtgaaactctcaagccttatactcagcagttcatttcctaccagcctaattacaagtgttttattataaagtttatggaaatgagatataagtcactctggagtttttgagaatagttatactggtagttaccatctaatgtggtctttggaaggttctacatcaaagcccagggtatcctggggttgttctagctctctgcaagacaaagctt

SEQ ID NO: 232934 - DNA, 597 bp, Homo sapiens
aggtgacctacttctctgtcacatacagttatttacttatttatttagagacagggtctcttctgtggcccaggctggagtgcagtagtgggatcacagctcactgcagccttgaactcctgggctctagtgatcctcctgcctcagcctcccaaatagctgggaccacaggtccgtacccccttgccaggctaattttatttattcttttatagagatgaggtcttgctatgttgcycaggctggccttgaactcctggtctcaagtgatcctcctgctttagcctcccaaagtgctgagatgatagttgtgagtcactgtgcctggtcacatatttctttttaaattaaattaaattttttttttttgagacggagtctcactctgttgcccaggctggagtgcagtggcgccatctcagctcactgcaagctccgcctcctgggttcacgccattctcctgcctcagcctcccgagtagctgggactacaggcgcccgccaccatgcctggctaattttttgtaattaaatttaattttttacaaccctttatacatgtaaaaaccattcttagttcacagccagatttggccc

SEQ ID NO: 232935 - DNA, 410 bp, Homo sapiens
gatggggtttcaccatgttggctaggctggtcttgaactcctggtctcaggccatccgcccacctcagcctcccaaagtgctgggattacaggcatgagccactgtacctggcctgcaaagagatattttaataaagacagaccaggaaagttgctccattatctcagttaagaaggaaagaaggaaaaggaacagttttcttcccatgggcacacaaagtatttctgctaggaagacttcagactacatctctccacttgtcctaagtagaatttgcaaggccttctctccacaactacttacccttgcaacwatctgattgtagagatggagtgatgagcttcgactgtctgtccccacccaaatctcatcttgagttgtaatctccaagtgtggaagcagggaagcg

SEQ ID NO: 232936 - DNA, 410 bp, Homo sapiens
gatggggtttcaccatgttggctaggctggtcttgaactcctggtctcaggccatccgcccacctcagcctcccaaagtgctgggattacaggcatgagccactgtacctggcctgcaaagagatattttaataaagacagaccaggaaagttgctccattatctcagttaagaaggaaagaaggaaaaggaacagttttcttcccatgggcacacaaagtatttctgctaggaagacttcagactacatctctccacttgtcctaagtagaatttgcaaggccttctctccacaactacttacccttgcaactmtctgattgtagagatggagtgatgagcttcgactgtctgtccccacccaaatctcatcttgagttgtaatctccaagtgtggaagcagggaagcg

SEQ ID NO: 232937 - DNA, 547 bp, Homo sapiens
ggtaaataagagttgatctggatttagagctaaggtccttttgagaattttctccctgaggccgcagttgaagattcattttggggttgccctgttcagcaaggaggctctgaggagtgcaagggtgtggggacttctaagaatgtgttttttgagtcaaaatagaaacttttccttacattctgactcacaggggattagaaggtagtgcatggattagacgaaaatgcctcagttaagaatttaatcctgttaggcaacagtaagtcactatttttaaagggttttgtgccaaaaagtagaaaggaaaaaaaaaagtggcatccacagtttgcaggagataattgtttctaaagagctgcttgcttgaggcctcttgaatgctacattttcttccaggttcttctaaagagaayaatgggtttaaattgggggtgtgagcgctaccttggctaggggttaccagtggggctgttttggcttcaggtgatgcccagggctggagctggaagagatgagaggagccaggagtgagggattctggctt

SEQ ID NO: 232938 - DNA, 579 bp, Homo sapiens
ttcattctgtatttaggggacaaatacatgagctgactaatttgaagagtttctaaaaagctaagtttgagcaagccatgcctggcgaagaagttgaaggtttccagcgatcacatgtggaatcagatggtctgactactgagctttctatctttgaaaaaaccctgtggatgtataaatgttctacaattttatgccagtcatttgcctgtttgctatcagattcattctctacccttcccttgctctggtctgtattgtaggaaaatcattttccagaatttccataattgccttctggctgggtttggccaatgggaggcactggcatgagattggagggtaagtggtaggaagagatcaaggcacattttgtcctctctttctggcatctccaatagtaatcatgtctcttctaggttcctgatcccagaagatgtccctgcggtggttccascttccaccagcttctgccagatcctggactccaggaacactgcccccttcaggccaactttttggacttcctcactgtcttctgagcccccaggtcttccaacacttttgcagccacttccc

SEQ ID NO: 232939 - DNA, 433 bp, Homo sapiens
gttggactgattcaccactttccctcccactcaaattcagtaagatctactatcttatgacagatatctacccactcattgcttcccgatgcagacataaacttggatcccaggccgtggaagagcaggtcaaggtttgctccttagaattgttgctttggtracatgtggagaaggatggtggttgctgagactagaggagacttgttgagagacaattgcaatgattcaagagggagaggacaaaggtgtaaagtcagactgtttcactgcagaggtagagtggggaaagggacacgagagatgcagaagaggcagaatcaggtccctgattggatggggcattttgggaagatgaaggaggctggaatgattcccaggttcctccagagtgaatggatggcacttgtgttcttgactgagcttgaggaca

SEQ ID NO: 232940 - DNA, 433 bp, Homo sapiens
gttggactgattcaccactttccctcccactcaaattcagtaagatctactatcttatgacagatatctacccactcattgcttcccgatgcagacataaacttggatcccaggccgtggaagagcaggtcaaggtttgctccttagaattgttgctttggtgacatgtggagaaggatggtggttgctgagactagaggagacttgttgagagacaattgcaatgattcargagggagaggacaaaggtgtaaagtcagactgtttcactgcagaggtagagtggggaaagggacacgagagatgcagaagaggcagaatcaggtccctgattggatggggcattttgggaagatgaaggaggctggaatgattcccaggttcctccagagtgaatggatggcacttgtgttcttgactgagcttgaggaca

SEQ ID NO: 232941 - DNA, 433 bp, Homo sapiens
gttggactgattcaccactttccctcccactcaaattcagtaagatctactatcttatgacagatatctacccactcattgcttcccgatgcagacataaacttggatcccaggccgtggaagagcaggtcaaggtttgctccttagaattgttgctttggtgacatgtggagaaggatggtggttgctgagactagaggagacttgttgagagacaattgcaatgattcaagagggagaggacaarggtgtaaagtcagactgtttcactgcagaggtagagtggggaaagggacacgagagatgcagaagaggcagaatcaggtccctgattggatggggcattttgggaagatgaaggaggctggaatgattcccaggttcctccagagtgaatggatggcacttgtgttcttgactgagcttgaggaca

SEQ ID NO: 232942 - DNA, 546 bp, Homo sapiens
tcttactatgttgcccaatctggtctttaactcctggcctcaagcaattccccagtctggcctcctaaagctctgggaatacaggcatgaatcaccaggcctggcctgaacacattattttaagtaacttgaatgatgtacgtgtaagaatccaaacatttgataaaagagggtttgaggctgggcacgatggctcacactggtaatcccagcattctgggggaccaaggcaggtggatcacgaggtcaggagttcgagaccagcctggtcaacatggtgaaaccccatctctactaaaaataaatacaaaagaaattagccgggcatggtggtgcgtgccggtagtcccacctactggggaggctgaggcaggagaatygcttgaacctgggaggcggaggttgcagtgaaccgagattgtgccactgcattccagcttgggcaacagagtgagactatgtctcaaaaaagaaaaaaaataaagagggtttgatggtttggagcataagctgcttctcttgctaccaggctatgtgatgtgcaga

SEQ ID NO: 232943 - DNA, 621 bp, Homo sapiens
gaaacaggaagccgacagagcatcgcaatcgctttattatgatttccactgtgcccagcctcagggcatcagcttcttctggagcgctgtgaaggctgggccacgcagaggagcatgcagctgtagagacagggagacagggcttggggacgttcccctcagcttgctgtcaagttaccttctgcagaaaagcacatgggaagggcatgagggacyagagcgcattggattcccaagtgttgctcaagtgttctcagagtccctctcacaaacttgggtttggctgggggacagatcacaggccaacccatgatggcaggaggctaatcttgagggcctttgtgtcaccatggctatgaaaaggcctggctacttataacttgatgttcttaactgtgggttgtgcctacccagtgctatagaaactggaatgtgattgggcttcttagtcactggcccagaccagagctgaccccctttccatgctctgggtcactggggcatgtggcccagaggaaaaagctttcccttagtgctagccgaaattctgtaacctgtttattttctttccaaggttgccaaaaatagtggtagcagaaaagtaacagcagagaaaatgcc

SEQ ID NO: 232944 - DNA, 609 bp, Homo sapiens
atgctatgtgtgatgtggccagtagacaatatgatcataggtcaactccacacttccttcactgggaagtgggtctcatgtctggatgctaatgctctgtgggattgtatgcttgtggagcaggcattccataagcccctgaatagtgatgctggctaaggcatgaatggtagcaaagacaaacccatacccagaataagtcatttgtccttctaaggatgaaccactggccstttgtctcagtctgttcaggctgctatagcaaaatatcataaaatgggtaccttataaacaacagaaatttatttcttacagttctggaggctgggaagaccaagatcaaggcactggcagattcagtgtctggtgaggaccctatttttccatagacagatgtcttctcactgtaaccttacatggtggacgccttccaccatgctctctgccaaacaagctcccttgggccccttttataaggacattaatcccattcatttctaccctcatgatctaatcacttcccaaaggcttcacctattaataccatcaccttgggggttaggatttcaaaattttgaagggacacaaacagtcagaccatagcaccct

SEQ ID NO: 232945 - DNA, 606 bp, Homo sapiens
ctgctttcattataatgctgcagagccacaatgattgcaatagaatttcttcaaggaactgttcatggctaccaattcatacgtacccatgagtcctatcgccttgtaaagaaacatgtgactgacatgccactggtgtgagacttgtccctccacacaagccttacgaaagagcttcgctgtgtctcatactcagaaaatactagtgaacatctcaaatataccaaggtgccggggacagaggtgcatagttgctgcaactcagtggcaacacttttatagatgagcacgttcattaatgcccaagagctagaatttccagggagttgggcaggaagccccagagtagtgtcaggcagcaaaaccaccagagctcacacagcggattactacccaatgcrggattgtggggagtaacagtagatggcagccagagacactagagggcagcacatgcccacccaatatgcctagtcctgtgacatctctaccctgacaggagctttcaaaggttatcttctccagtgggctctcaatcccagccttatatcagaatcactcgggagcttgttaaaaatatagattttctggtttcactccagacta

SEQ ID NO: 232946 - DNA, 534 bp, Homo sapiens
tggcctctgggattagtaggtgatctgtggaaggaaagaggaggtctgggacatcctcaggcatgcacagttttgtttaacgctacttcatggatcgcatgtgcacattttgggggagttagtttgaaacatggtagaaatttggcctatgacttcagcaagcctgttctggccaactccagttggccttattagttttaatccattttagccggttttttaatcttacaagcagagacawttttggtgttttagcaacttgttgtttaatctgctatcctgtaaactgataatttttgttagtcattggctttttaactctctggggcatggtttaactaataattcattatttaacatcttcaaaactaaaacgagtataaaataaacatatataattaaaacttcaaggttcttgggggtgaatttataacacttatttttctgaagttagtgaagtttaaactgttcaaagacctttggaacatgctctatacacaaacacacatacgcatcgacccaaaaagaagaatt

SEQ ID NO: 232947 - DNA, 534 bp, Homo sapiens
tggcctctgggattagtaggtgatctgtggaaggaaagaggaggtctgggacatcctcaggcatgcacagttttgtttaacgctacttcatggatcgcatgtgcacattttgggggagttagtttgaaacatggtagaaatttggcctatgacttcagcaagcctgttctggccaactccagttggccttattagttttaatccattttagccggttttttaatcttacaagcagagacatttttggtgttttagcaacttgttgtttaatctgctatcctgtaaactgataatttttgttagtcattggctttttaactctctggggcatggtttaactaataattcattatttaacatctwcaaaactaaaacgagtataaaataaacatatataattaaaacttcaaggttcttgggggtgaatttataacacttatttttctgaagttagtgaagtttaaactgttcaaagacctttggaacatgctctatacacaaacacacatacgcatcgacccaaaaagaagaatt

SEQ ID NO: 232948 - DNA, 551 bp, Homo sapiens
aaatcctaataaatctacaaaacaacttctaaaaatagtaagtgacttcagcaaggtcttaggatactagatgaacacacagaaatcagatacatttctagatattaggaatgataatgaggaaatcttaatttaaagtatttacattcactccaataaaatgaactccttagacatatacttaacaaaatgtgtacagtatatgtatgctgaaaacacaaaggcctgaaaaaaatcaatgtaaataaatggagagagrcatactgtgttcatgagttggatgactcaacatcataaagatgtcaattctctataaattgatctataggttaaatgaaaatcctattgaaattttaaggaagtgtagcaatatggcagaatagaaggctacaccattcatctccttcataagaacactaaattttaacaattatctacacacagaaaagtactgtcacaagaaccaaaaatcaggtgagcaatcacagtatgtggttttaatgtcatattgctgaaagaggcattgaagagggtggaagagacagtcttga

SEQ ID NO: 232949 - DNA, 380 bp, Homo sapiens
atcgctgggatacaaacttcagaaaggcagatatttttgtctattttgctctcttctgtattctaagcacctagaacagtgcttggyacatagtaggtactctataagtatttgtatttgaatgaagacttattctatttattcatgatgtctcttaaaatatctctccttgcctgtgtttctcttatccctgattaatgtctctccattttctggcacttaatctgagctttgagcatgcaaaggacttagccttcacctatgctgacaggccatggtatccctgtgccattttgtgctttattcattctggccttcacatatagcttggacgaagagttctaaatagctaaaaatgacagaatatgaagtttgtcatg

SEQ ID NO: 232950 - DNA, 498 bp, Homo sapiens
cagtatgtcgcatgtcctcttagtccacagtctcttggcctagttcagcactgtctcctcccacattctggacattctatacttattaacacagcttaaggtggtgttaatatttggggcaccccattattctctgtactcacaaggtcttgcaaacatctaacccttcctttaagcattttttcactttaggcactgagcttcatcttatgaaaatatgctgtggtaagatgaataaagacccccaagatgttcacatcctgattccctggacctgtgaacatgttaccttatgtggcaaaaagcactttataaatgtgattaatttaaggaycttaaaatgggaagattttcctggaatgtccgaatagcctcagtgtaatcacaatggtccttataagagggagataagaatgtcagagtgggagagagatttgaacattccatgctgctggctttgaagatgaaggaaaggggccatgagccaagaaatgtaga

SEQ ID NO: 232951 - DNA, 434 bp, Homo sapiens
ttggctgacaaatagggtgatctctcagttaccatccctcatgtccttaaatctggcaatctttctatggcgatatatatatatatattctcactctctgtcacatacatatatttatatgatatatatatatttatatgagagatatatatctcatatacatgagatgaaatgtttatatattatatatatctatatatctcatatacacctcatatatatcacaaaaataaatgtctattcctcatatatgagagggagaaagagagaragagagagaagaaatagacatgatcaggaagaacaaacgtcctttgatttatccatttccttatcaattaaccctgcttttcgtagctgaggactgatttagaactttaaaacttttactggcctccagaaagactgggcacagctgactaggcatttctgcc

SEQ ID NO: 232952 - DNA, 601 bp, Homo sapiens
acctacattccacccttttaaaatgcttctgtctctactgcttattttggttgttaatttagtcatttattaatacttactgatacttttctgagtcacactatatgttccttactgaagagaaattggtgataagtgaacaaaaagctaatmaaatccaggctgggcgcagtggctcacacctataatcccagcaatttaggaggcagaggcgggtggattgtttgagtccaggagtttgagaccagcctagataacatggcaaaaacctgtctctacaaaaaatacaaaaattatccgggcatggtggtgcatgtgcctgtagtcttagctactcagggtgctgaggtgggaggatcttttgagcccaggaagtcaaggctgcagtaagccatgcactgctgcactccagcctgggcaacagagtaagactctatctcagaaaaacaaaacaaataaacaaacaaacaaaaaagttaaaatcccagtcactgaccccaaggatctcatataatagaggatggacttgaataaagggaaagaccctataagcctggtgatttgagaaaaataagatagatgcctgtgggaaaccagtatt

SEQ ID NO: 232953 - DNA, 587 bp, Homo sapiens
gggttaaacattaaacatttctttacaaagaggttcctcagagccattaaaatgtgttggttgttctaagtctccacaggaggactagaaaaatcaggcttctccagacatatttgattgcagatccttctgttcatagaacaacttttgacactttccaaaatgccagtgttctactgagtgtgatttaggaaacatagttccaaataaatgccttcagatttgctgagggaaattctaccaggcttctccaagagaacaatctcactcgtctactagtgggcatgatgggagtgggcaggaaaaaaagtgccagaagcttcagaattagactagatcaataaatccaaagaakggtcaggtcaatcaggctcaaaaaccgatgaccatttgagaaactgaatcaccagagccaacaaagggtgatcaggaaataatgccaagtcaaaacaagtagggaatccaaaatccagggcagtcgtgggtagcagagcttaacaagagcaggccccaggatgcatcaggaatgtttctggagccaacacaagccagctttatgtaattgttttaattcagttttacagtca

SEQ ID NO: 232954 - DNA, 552 bp, Homo sapiens
agctccaggtattcacaatttgttgtgtctgtcacatgagatgtcatggggttgtagctaataggagaggaagaatgaaaggcagtgttaaagtttatttattctgttctctcatttgtaaacaaattacctgaactcaagagagcagaaggcacataggagtgacagagccagtgccaggctgtccagttttcaggcaagtcaactttctagctcatcatctttctgtatggccattatgatatttctttggaataaaaattgcttaccaggataaagggcaggtctttgtctctctcatttaccactgtatccccagtgtcacaataatgtctggtatgtagcggatgctcaatgaatgttggtgaaggaattaataaatgaatgctataaaggcttttatcaaaagtaagtacgacttagagaatatagtgaaaagtcaattaatccagctttgccaataacatacaaaatcaatatgcatgtggatttggaatttttcattggctttactgatctttacgrtgagtgtcttattagtcatctgaatcg

SEQ ID NO: 232955 - DNA, 569 bp, Homo sapiens
ccctactgttaaatggcgtatgactgtaaacgacatcccagaatggagaaggttgcttacgtaaagaagattgctgtttagctagaagatgcagttgataaatacaacagttatttgagaaaagagaaagggctcagtttctttgggacactatgctggcagttaaataatctgtttttaattttgtctctctaatctaatgacccaaaatgaattatttcttggcatatgcactgaagagaaaggttccagcttgtyctatgtaccacagactattccaagtttatttcaccaccattcacagtgtccaaagaatgtttggggttgtgaatggaatcagttaaagaatagcctattatttatgcacctaagttagctgaaagtagacaccataaaacatattttggaaatgaaatatgtttttccctatcaaagttatctaataaggtacaattatacccaaaggcagtaggatttgatttttataaatgataacatagcagggacccatgttcaagcagtttggacttgatgtaagtcagctgtctagataattaaatgatgcaagt

SEQ ID NO: 232956 - DNA, 572 bp, Homo sapiens
caccatctcaatatacgctgggtaaaaaattttcattttgagccacctagcactgaacatccttcctcattgcrtgagttgcgatgagaggcaagaccctaacatctctcactgtggaattggagggaccataccatcctcctcactctaggaggatttcaaaattctgatgtctggttcatcttgcaaaagcagaacatatgacaccactgagcctccagtcctatagggcaacaatccagtagaaatgagtagcagcccctgccttctgtggcaaagacatgatttacaggtcaccagaatctccatgcagatacttaccatttacatgatttgcctagcctggtaggcatgtgagtatgtggccccttgctctagccaaacaagactcctttcagttctttatatatatcatgcagtttcatgtcttcatggctttttatacaatgtatcttctgcctccttcacctcctgtgccttgaacacctcatcatccttcatgagtgtgaccaaacagcatgttccctttgaagctcgtgctgatttctgcaagcaacggtgatcatggcatc

SEQ ID NO: 232957 - DNA, 581 bp, Homo sapiens
ttaaatgtttttaaggtgtctgccacttatctaggcactgaggtttcaaataagtaatttcactttcaagttatagttttgcagcttcttcattaaaaaaattgttttctctctctgttttctaataaaaatggattaatttaacagacctgctccttcagcttactgttatgagaasactaagacttgggtgcagtggctcacacctgtaatcccaacactttgggaggccgaggcagacggattacccaaggtcaggagttcgagaccagcctggccaacatggagaaaccccatctctacctaaaatacaaaaattagctgggtttggtggcgggtgcctgtaatcccaactgctccagaggctaaggcaggaaaatcccttgaacccaggaggcagaggttgcagtgagtcgagatcaaaccactgcactccagcctgggtgacagagcgagactctgtctcaaaaaacaaacaaacaaacaaaaaacactaagactctgcggtgcctgtcatacatccttttagaccaaagcttcatggaaatgtaattatagggagatgagatgacaaggtgctt

SEQ ID NO: 232958 - DNA, 581 bp, Homo sapiens
ttaaatgtttttaaggtgtctgccacttatctaggcactgaggtttcaaataagtaatttcactttcaagttatagttttgcagcttcttcattaaaaaaattgttttctctctctgttttctaataaaaatggattaatttaacagacctgctccttcagcttactgttatgagaagactaagacttgggtgcagtggctcacacctgtaatcccaacactttgggaggccgaggcagacggattacccaaggtcaggagttcgagaccagcctggccaacatggagaaaccccatctctacctaaaatacaaaaattagctgggtttggtggcgggtgcctgtaatcccaactgctccagaggctaargcaggaaaatcccttgaacccaggaggcagaggttgcagtgagtcgagatcaaaccactgcactccagcctgggtgacagagcgagactctgtctcaaaaaacaaacaaacaaacaaaaaacactaagactctgcggtgcctgtcatacatccttttagaccaaagcttcatggaaatgtaattatagggagatgagatgacaaggtgctt

SEQ ID NO: 232959 - DNA, 451 bp, Homo sapiens
tctggaggcagaatctgattcctttcatttttcagcttctagggaatgtcttcatttcttggctagtggtcccttcctcaattttcaaagccaacaacaatacatctccctgatatttyttccattctcacatctctctctcacctcaaccaggacaagggattaggttgggcccaactgtacaattcaggaaaactttttcatctcagggaccttaacttacctggaaaaagagcctttgcagattaaggtaacatatccacaggtttcaggaattagaggacaatatttggggggaaaaggggcaatgttttgcctaccacacccttttttatccaatgtcctctagccttctctcttttctaatatcttcagattccttcttttttttttttttttttttttttttttttttttttggggggctgtggggaaaactacatatttgctg

SEQ ID NO: 232960 - DNA, 451 bp, Homo sapiens
tctggaggcagaatctgattcctttcatttttcagcttctagggaatgtcttcatttcttggctagtggtcccttcctcaattttcaaagccaacaacaatacatctccctgatatttcttccattytcacatctctctctcacctcaaccaggacaagggattaggttgggcccaactgtacaattcaggaaaactttttcatctcagggaccttaacttacctggaaaaagagcctttgcagattaaggtaacatatccacaggtttcaggaattagaggacaatatttggggggaaaaggggcaatgttttgcctaccacacccttttttatccaatgtcctctagccttctctcttttctaatatcttcagattccttcttttttttttttttttttttttttttttttttttttggggggctgtggggaaaactacatatttgctg

SEQ ID NO: 232961 - DNA, 570 bp, Homo sapiens
cacaaagacaagtatatgaatgttcttgaaacttattaacttccagccccaaagtagaaacaagtagtgcatcacaataaacaaattgtagtatattcacatgagagaaaactactcagaaacaaaaatcaagatccacgcaacaagtgggtctctaaaaacatcatactgtgcaaatgacccagaagagttgattgctatggttcaattcacatgaaattccaaaaaatgcaagtgacagatgtaggtaaatactttccctagggttaaggaggaatgaaggcccctcatgcaaaggggcacagataaactttttggttttatgaaaatgttctatacctttattatgaaggtggttacacagatgtatacagctgccaaaactcattgaactgtacacttaaaatagtgtagtttactgaaggagggtcatacttgtataagattgattatcaaaaagaatgtgtcttaccccattcttaacaccagctccatttagataaatataacatatacccagtgtgttaattagkaaataatgatcttaagaaagaacattctgtagaataa

SEQ ID NO: 232962 - DNA, 225 bp, Homo sapiens
cgggatttaatcatacagagcaactgacaagaagatggcattaaggacaaagcagcacttaagccatgtacctgaactcsgggggggaagttaggcagagcattattttaaaagacggtttgtaaacattttttttgtgtgtgttctaacaaaattttagttcatcaacctcaaagattttgcttcgggtttccacgtgcaatatcacatctccctagacctatc

SEQ ID NO: 232963 - DNA, 613 bp, Homo sapiens
gttgtcaaaatgtaggtctcagaacatgaataaaagtctaaaattatctaggctccaaagagttttgtttatacaagttatagttgtcgctattwactttattagaattaaaactaaaaaatgtaaacatatccacttatttaaaatgaacaatattacaaaaatattttataaaaataattatatttcccgaaagaaaaaatttgtgagaaaagtgatgatcttttccatttttgcaaatctctttaatgtctgacttaatagaaacagctgggttcacatatatggttctgtactcaatctgttgagacatgcttctcttcctgaagcatatgaacaaaatatgaattcacacagataaatatttgaggaaagaaggaggagtactttaatagcccttttcagataattctaggtattctttttttaaactacaccaaaactcattaagtcaaagttccctaaaatttagatacaatgtggaatcttaaatcataagtaaacatttttattctactacattaaaatccatttgtctaccttgtacatggaatcgtattttactacacatgaattcgtgatatcatgcattgatatgttagaaaatattggt

SEQ ID NO: 232964 - DNA, 503 bp, Homo sapiens
actggtctcaatggaccacttttgggaaccactgtccttaacaacaaaaaagatgtctgtggacaaggagtatgttyttatagatatttgttgaatgaataggaaagctctaagtgtgggattctttaactgctttaagaatgatgcaccaaccaaatttgctagaatgggtaatactttcctgcctagggcctgtatgggaggggcccaaattggactagagaagtgatggtgagagaagggagatataaggagccaagaagtcttttggcaaaagtgacagatttaaaaaaaagaaagaaaagaaagaaagaatgagaatcaaagaatccagggggaaccttgcgacatggagaagctaaagaaacagctacttctttcagggccttttatattatctaacgtgtactttaaagtattcctgcacagattgtgtgctatactcaggttagttttcatgtgtatcctaagggcaattagttaacatttggtgtattctaatt

SEQ ID NO: 232965 - DNA, 399 bp, Homo sapiens
atattcatgtctgtcagacacccactcygattcctagtaaatactagtgttgaactcaaaatcacctgaattctttattgataggtcctcatcaattactcctccattcatgccctgcagaaggctatactggagcgtatcccgttctcatacttcactgctactgggatcaagtctcagtgctgttaccaattctgacttgacatttaaggagcatatcaaccctgtttgttctacagccttttaccttctcatgaatatttcctgagcaacgcctctcacctaacatgcaaacaaagagacattaatatttttatctatcctgtctcagcatttagtgtttactatttcacttacacagatttcaagatgaatccacaaaaagcaacagccagatct

SEQ ID NO: 232966 - DNA, 399 bp, Homo sapiens
atattcatgtctgtcagacacccactctgattcctagtaaatactagtgttgaactcaaaatcacctgaattctttattgataggtcctcatcaattactcctccattcatgccctgcagaaggctatactggagcgtatcccgttctcatacttcaytgctactgggatcaagtctcagtgctgttaccaattctgacttgacatttaaggagcatatcaaccctgtttgttctacagccttttaccttctcatgaatatttcctgagcaacgcctctcacctaacatgcaaacaaagagacattaatatttttatctatcctgtctcagcatttagtgtttactatttcacttacacagatttcaagatgaatccacaaaaagcaacagccagatct

SEQ ID NO: 232967 - DNA, 399 bp, Homo sapiens
atattcatgtctgtcagacacccactctgattcctagtaaatactagtgttgaactcaaaatcacctgaattctttattgataggtcctcatcaattactcctccattcatgccctgcagaaggctatactggagcgtatcccgttctcatacttcactgctactrggatcaagtctcagtgctgttaccaattctgacttgacatttaaggagcatatcaaccctgtttgttctacagccttttaccttctcatgaatatttcctgagcaacgcctctcacctaacatgcaaacaaagagacattaatatttttatctatcctgtctcagcatttagtgtttactatttcacttacacagatttcaagatgaatccacaaaaagcaacagccagatct

SEQ ID NO: 232968 - DNA, 473 bp, Homo sapiens
ctgcaaccctggagaaaaagtactttgaagggcaccacaacaggttagtgttaacaagagccaacagacccgatgaagcacctaaaagtttaatcaggtctttgtggcagtaaaagatcccagcatcagaacttgaggcaaatagctttggtctgcccatcacgaaaagctagctctttcacagcgggcagaatgaggtcatcaaatacatggtgaccacagacaccttttcasttaccccagctgctgaaggatcaatgaatgaatttgaatgatggcacctgatcattactcaggtatgaaaggcaagctttgtctgagttggtcagtttacctagactcaccttactgtttggaccctgacatttactggggtttcccatcaggaaattgcaaacaaatgaagcaaaacagagaacaacagctagaccagggccttattacatatggagtaggctggaggcagaatcaca

SEQ ID NO: 232969 - DNA, 473 bp, Homo sapiens
ctgcaaccctggagaaaaagtactttgaagggcaccacaacaggttagtgttaacaagagccaacagacccgatgaagcacctaaaagtttaatcaggtctttgtggcagtaaaagatcccagcatcagaacttgaggcaaatagctttggtctgcccatcacgaaaagctagctctttcacagcgggcagaatgaggtcatcaaatacatggtgaccacagacaccttttcacttaccccagctgctgaaggatcaatgaatgaatttgaatgatggcacctgatcattactcaggtatgaaaggcaagctttgtctgagttggtcagtttacctagactcaccttactgtttggaccctgacatttactggggtttcccatcaggaaattgcaaayaaatgaagcaaaacagagaacaacagctagaccagggccttattacatatggagtaggctggaggcagaatcaca

SEQ ID NO: 232970 - DNA, 458 bp, Homo sapiens
gactttatacacacgaagtatacacaggacttagaatggtgcccagcatagagtaagcaattagcattagctgccactgtcttttatttttaccacttataaaaggaattgctattaattatcagaaattagaggaatagagatgagtaaagaaaasaagtaaaaccatgaccattcctaacatccaaatataatccattgtcagtatgttggtatatttacccttagtgtacatatacatatatttaaacaaaagtagtgcagtactatataatttttgttttctgcactttttgggtaatatcatgaatattttcttatgtttcttactcttcttcaaaaacatgattatgatgagtgtgttatatgccacaagatggctataatttattttactatttctcagctggctactgagcttctggcctacttctgtgctttgaatgacagtgtccctt

SEQ ID NO: 232971 - DNA, 613 bp, Homo sapiens
gctagtttttattacctcattttctttgtagacatcaaaagtaaaagacatcatttggatggtgtaatggaaagaacacagagattggagtaagcctccatagcttttaaatttatctcctttactttcattattttttttgcatgaaggggacagggtctcactctgtcaccctggctgaagtgcagaggtgcaatcacractcaccgcaacctccacctcctggctcaagccatcctcccacctcagcctcctaagtatctggaaccacaggcatatgcacacacacacaagtgtggtggcatatatgtataatatgtatatatttatatttatatagaatacatatttatttatttagtagacatgggatctcactattttgcccaggctggtctcaaacttctgggctcaagtgatcctcccccctcagcctctcaaaatgctagaattacaggcatcagccaccaagcctggccctcctttactatctaggaagtcatttataccagcggtacccaaccttattggcaccaggtaccaattttgtggaagacaaattttctatggaccaggagggaagatgcttttgagataattcaatcacattact

SEQ ID NO: 232972 - DNA, 651 bp, Homo sapiens
ttcaccaatctctggagatatttttggttctcataattgacaggatactagtagcatctcgtgggtagaggccagggatgctrctaaacatcttctaacactcagcatggtctcttccattacagagaattatctggacccaaatgtcagtaatgccactgaggttgaggaaacctactttagatccatggccaaaaccctcatcttctctaggaatatattctcctcacttttcctgcccaggttccatcctccttttttatgattgcatgtactcagtgtaaaggagaaagaaaaataatctacactttctctattccaaggggctgccctcatgcaactcctcccataattttcatgtgtgtttcatggctttctcccacagatggtacagactttatagcagtttccctgtgatgtttaaatgcctgtccctacatatctcccttcgctgtatgaatattagaattttggtaggcagcaaggagaggctgcctggctctttaaatattttactataacctttattattttatgtgccccagtcctctttctggttttaccaccagcctcccacaggtgtcttccaccatggcttctctttgtacattaatcactatgaaaattgataaaatgtacagccctaaaaag

SEQ ID NO: 232973 - DNA, 543 bp, Homo sapiens
ctctgtgcttcacatacctttactcaatttatattccctcaaatgtttttgtttattaatgtttctgaattttcaaaaactagacattagtgaatttatgaagattatttctagaaaaggaaacaaagctgaaaacctagtaaagactccagaccatatttaaaagtttcttggagaaatcgctgattctaggactaaggaaagaaacacacatgatgatattagaagttcttgtagtcccagtgtattaggccattcttgcactgctataaaaaatacctgagacagggtaatttataaagaaaagaagtttaattggctcacagctctgcagactttacaggaagcatggtgctagcacctggtcagcttctggtgaagcctsatagagctttgaatcatggcagaaggcaaagggggaacaggcaggtcacatggcaaaagcagaaacaggtgagagagagcatggagtggggaggtgccacacacttttaaacaactggatctcctgcaaactcagaacaaaagctcacttatcaccaa

SEQ ID NO: 232974 - DNA, 569 bp, Homo sapiens
gaattcttaccttcccagcattattcctccaacacaggtagctgtcattagataaggtgtcattagaggttcctaactcaatttaggkattaataaaacaaccacctaggctttcctcaggtatgatttagtgtctataaattattaaatagctagtataaaaatttagttgcagtcttctatctcaaatgtactctcaatgttgcccacaaagcctttcattttttttcgagtcagatacttcacagacgctcacaaattgttgatctctttgtcttaaacattcaatcctaccatctctgctgccagtctgagcagatgaactcaccctaccttacagtgatgatagacatcatcatcaaaaagccatgaaatgtctgctacataaattcccttcatccacacataacaactcctccatctgccttccatcaaagatattcactgaataatatagtttggatatttattcccccagatctcaagttgaaatgtaatccacagtattggaagtgaggcctggtgggaggtgtctgggtcatgggggtggatcccccatggcttggtgc

SEQ ID NO: 232975 - DNA, 423 bp, Homo sapiens
aagaattctcctataaaaggtatgttttatgtagttcccatatacggattaaattgggcatgtggaaagcaatgttgatccatttaatggactcccccaaaatatatatcagcatctttgtcacggagctagacggcttctttatcctttcaccaaaatgcagtaacaaaaataattaaacatctctcagacctgaactgcacagtcattagacaatagtcaatgactggaactgccgtgagagcctgaaccacactttaccttggctyttctagccatttctattcggaaagctttccatatctggatttcccctgagaactattttatgatgctataaagactgttaaccagaggcaggatctccccagcacctgagccacacacagaaatatcaaataacatttaattgctggatgacac

SEQ ID NO: 232976 - DNA, 445 bp, Homo sapiens
ctcacgggacacaggctcattgggcacacagtcacagggcacacaggctcacagggcacacaggttcacaggacacataggctcacagggcacagagtcacagggcacagactcacagggcacacaggctcacgggacacacaggcttakggggcacagactcatggagcacagactcacagagcacacagacttagggggcacagactcacagggcacacagactcggggcacagagtcacggggcacagactcacggggcacacaggctcacagggcgcagattcaaagagcacacaggctcatggagcaaagattcaaagagcacacaggctcatggggcacagactcaccgggcacacagactcagggggcacagagtcatggggcacacagactcacggggcacagagtcatgggacacacaggctcacggggcacacag

SEQ ID NO: 232977 - DNA, 445 bp, Homo sapiens
ctcacgggacacaggctcattgggcacacagtcacagggcacacaggctcacagggcacacaggttcacaggacacataggctcacagggcacagagtcacagggcacagactcacagggcacacaggctcacgggacacacaggcttatggggcacagactcatggagcacagactcacagagcacacagacttagggggcacagactcacrgggcacacagactcggggcacagagtcacggggcacagactcacggggcacacaggctcacagggcgcagattcaaagagcacacaggctcatggagcaaagattcaaagagcacacaggctcatggggcacagactcaccgggcacacagactcagggggcacagagtcatggggcacacagactcacggggcacagagtcatgggacacacaggctcacggggcacacag

SEQ ID NO: 232978 - DNA, 445 bp, Homo sapiens
ctcacgggacacaggctcattgggcacacagtcacagggcacacaggctcacagggcacacaggttcacaggacacataggctcacagggcacagagtcacagggcacagactcacagggcacacaggctcacgggacacacaggcttatggggcacagactcatggagcacagactcacagagcacacagacttagggggcacagactcacagggcacacagactcggggcacagastcacggggcacagactcacggggcacacaggctcacagggcgcagattcaaagagcacacaggctcatggagcaaagattcaaagagcacacaggctcatggggcacagactcaccgggcacacagactcagggggcacagagtcatggggcacacagactcacggggcacagagtcatgggacacacaggctcacggggcacacag

SEQ ID NO: 232979 - DNA, 560 bp, Homo sapiens
tcatcatggccccatgctggggtgagatggggcaagggagcccctcccccattctcagcaaggcaccccaggtgcaggcttgtagagcagcctggccccatggtaggacatttaagggagtggctgaagccccagggcttcagcgtccagccacgaccagcagcctgcctactgggtagcaggaagggagctgaaggtaggcaggcctcggcagagggcactcaagtcctaggaatctgcactcagccactgcacacgtctactccgtggtttcccagggaagcagagawcatgaatctcggtaactcgagcccagggcatcatcactcactgcgattgtggggggggttgagagccagagtggatcagtctaaacaaaacacgtgcacagggggctcctccaaagagcatgatcggccaccactgggtgccccgtccctcacccaaagtagctggggaggggtggggggacgaggccagggagggggctgggagtcttgggtttcttcctggaaatcctaccctcaccacccacctgtgagccagtgggagacatgaat

SEQ ID NO: 232980 - DNA, 570 bp, Homo sapiens
aagcttccttaaggggcaataaaaaagactgagaaatttcattctagagattactgaataaataccaggtgtaattaytgatctctttatagtaggctttttagtttaatcattaaaattggagtcggaagtgttttctgtttttgtttgtgattggaaaaataattcctacaaaaactacctcacaacagaatccttcaatagtcatggcccaggaagctgaggcggaaacaagaaacccaggtgttacctattggtaattgtccaggcagtagaaaccagagaatgagggaaaaccttgtatatgaagttcaccaagtcatgagatgaggggtagctgtcctttttccaggacacttggtggtgaggctactcgtattctcagcagtcatctggaataacatactagtgctaatgggtgggtcctttcattttaagttgtgccatctgtggttgtgacctaagggccctggcaatcaactatactgccactttcgaaaatcttacagtaaaaattgactgagaataattatacataatcagctgtcagaggcaaacaggagccctggg

SEQ ID NO: 232981 - DNA, 570 bp, Homo sapiens
aagcttccttaaggggcaataaaaaagactgagaaatttcattctagagattactgaataaataccaggtgtaattactgatctctttatagtaggctttttagtttaatcattaaaattggagtcggaagtgttttctgtttttgtttgtgattggaaaaataattcctacaaaaactacctcacaacagaatccttcaatagtcatggcccaggaagctgaggcggaaacaagaaacccaggtgttacctattggtaattgtccaggcagtagaaaccagagaatgagggaaaaccttgtatatgaagttcaccaagtcatgagatgaggggtagctgtcctttttccaggacacttggtggtgaggctactcgtattctcagcagtcatctggaataacatactagtgctaatgggtgggtcctttcattttaarttgtgccatctgtggttgtgacctaagggccctggcaatcaactatactgccactttcgaaaatcttacagtaaaaattgactgagaataattatacataatcagctgtcagaggcaaacaggagccctggg

SEQ ID NO: 232982 - DNA, 518 bp, Homo sapiens
cttcacagttccctgacctcaactttagcaatgatcttaactccatttcagtaatttatagccatggcgagacatggagcttgtcatcatctggaattgcttcayctcaaacatcttaattgaaatactctattctgaggtcttctcctctcctacccttttctcatcttcattctgctacacctgcctttaaaccatttccttaattcactcattctctcccagtttatcagccctctcctttattcatcagaatataacattatttaaaattctgtctcataatttagagtagtagttttcaaattgttggtcacatccgttagtaagttctgaaaacaattttgtaggttatgaccaagatacttaaacgtgaaataaaatttaaacaaaaagagctcactgaaaatatgaagggtaaacattgtttcagtaaatttttgtttcagctatatttacataaatttacacatatgtgtttactgggctacaatataaaaatgtatgtcctattgtag

SEQ ID NO: 232983 - DNA, 627 bp, Homo sapiens
tctcaaaaaaaaaaaaaataactgccctgggaattcacagaggaaacctcgtagagggcatttgaattccgcagaaaaggatataaaattcaatcttatctagaaaatattaacagtggctatctcagaatgacggtacggtacacacagaacaaaaagataaacatttttaaaattgaatcttttggcaggaatgcaagtgacttgggctctgcacatttagtcttggaatttatattagcaccttcatcatggtgatgttttaaaggcgtcctctctgcttctaagtgcctgtgcagtgctatgcctatctcagatcagattaaggtctgctctgagatagaccaggaagcttcatggtcagagtccagggattcaagccatcctgrgtttgaattctagatctgccacttacaagttaagttatttagcctctgtgcctcagattggtcatctgtaaaatgaagctggtggtacttatttctaagcatttccctgaggatgtatcaatgtatacatacatacgaaaaaaaattttcgtaaattttatggaggctgtattaacagtatgtggcaaatagtggaatattcaataaatgattacaaagacatgatgataaaggtgat

SEQ ID NO: 232984 - DNA, 467 bp, Homo sapiens
tgaactaatggcttctgtgggtgttctttatgctggtgtgttgcagctttgaattagctatgtttttgtctacctggaattamtacagttagtgagatagtgagaaatgaagacctaattaatatttgctaacttaagaatgttgaaagatttttgggtgggaattgaacaatgagaacacttggacacaggaagggggacatcacacaccggggcctgttttggggtggggggagggaggagggatagcattaggaggtatacctaatgtaaatgacgagttaatgggtgcagcacaccagcatggcacatgtatacatatgtaacaaacctgcacgttgtgcacatgtaccctagaacttaaagtataataatatatatatataaaagatttttgaaatgaaataatgatccataatacctttatctggattcccaaaatctaaaaagatattggcagcaaaacc

SEQ ID NO: 232985 - DNA, 553 bp, Homo sapiens
agcttgggtcgggggtagctagaggcccctgctgggaggtcctgcccagcggggaggaacgggattggccacccagttaaagcagcagtctgtccgtattttggtagagcagctgtgctgtgctgggggatccccttctgccccgggttggctcagacactccaaagcctgaaggctagaacagctaargtgcctgaacagcaaagatggtggcccacccctccccctggaaactccttcttaggggggtgcaatgctgctagtggcagctggctgcaattccaagccaacaggtcttatcttgtgaggtgccatgaaaatgaggcctgcggcctgccgctgctcagccccctggattcagcctctttcctaggggtatgtacaatagtctaacctccctctttgccagagctgcagctacttttgccagaaagctcaagtatctaagcctccagggtctccacacgtgccttagtggctgctctgccaaggttccatgtagctctgtctgtcagactgaagacagaaggccctggtggagtgggttcacaag

SEQ ID NO: 232986 - DNA, 553 bp, Homo sapiens
agcttgggtcgggggtagctagaggcccctgctgggaggtcctgcccagcggggaggaacgggattggccacccagttaaagcagcagtctgtccgtattttggtagagcagctgtgctgtgctgggggatccccttctgccccgggttggctcagacactccaaagcctgaaggctagaacagctaaagtgcctgaacagcaaagatggtggcccacccctccccctggaaactccttcttaggggggtgcaatgctgctagtggcagctggctgcaattccaagccaacaggtcttatcttgtgaggtgccatgaaaatgaggcctgcggcctgccgctgctcagccccctggattcagcctctttcctaggggtatgtacaatagtctaacctccctctttgccagagctgcagctacttttgccagaaagctcaagtatctaagcctccagggtctccacacgtgccttagtggctgctctgccaagrttccatgtagctctgtctgtcagactgaagacagaaggccctggtggagtgggttcacaag

SEQ ID NO: 232987 - DNA, 419 bp, Homo sapiens
gggaaatgataataaaaggaattaaggaatcaataccccaaactcaaaacctctctaaagcatttgatatacaacaacaaaaaaagatgaggggcctataaaattcttagacaggctaaaggagcaaatgaaacagtatgcaggcctaaatttggaagatccccttgggccgggtatgtttaagctccattttgtcactaagaattgactagatatttcaaaaaagttacaaaaattggaaaattgggaagaccgaccgctaagtaaacttctcaggaaagctcaaaaagtgtatgtaaggagagacgmagaaaagcaaaaacaaagagcaaaacttatgctatccacctttcaacaggtggctccaaacccatatgcttctcaacaagacttccagggagccaagaactataaaggat

SEQ ID NO: 232988 - DNA, 583 bp, Homo sapiens
tgtgataatgcctgtgaaatgcttagccagtgagaactctcttaataaatgaagcttggggcctggtgctgtggctcacacctgtaatacagcactttgggaggcccaggcaggtggatcatgaggtcaagagatcaagaccatcctagccaacatggtgaaaccccatctctactaaaatacaaaaattagcaaggtgtggtggtgtgtgcccgtagtcstagctactcgggaggcttagacaggaggattgcttaaacccaggaggcagaggttgcagtgagctgagatcacgccattgtactccagcctggtgacagagtgagactccgtctcaataaaataaaataaaataaataatgaagctagtataatcaaaagagaagtgttgctatgagaaccactgtgctagtcaagactgatctaatctgccccaggatgtaggagaaccacttaatattcatagatgctgtctctttctacaaaacctcagtataatcctgtctctcaaactttgtgctggccaattccaactgaataaacccaaacactttgccaactacccatctaccctcccctcact

SEQ ID NO: 232989 - DNA, 583 bp, Homo sapiens
tgtgataatgcctgtgaaatgcttagccagtgagaactctcttaataaatgaagcttggggcctggtgctgtggctcacacctgtaatacagcactttgggaggcccaggcaggtggatcatgaggtcaagagatcaagaccatcctagccaacatggtgaaaccccatctctactaaaatacaaaaattagcaaggtgtggtggtgtgtgcccgtagtcgtagctactcgggaggcttagacaggaggatygcttaaacccaggaggcagaggttgcagtgagctgagatcacgccattgtactccagcctggtgacagagtgagactccgtctcaataaaataaaataaaataaataatgaagctagtataatcaaaagagaagtgttgctatgagaaccactgtgctagtcaagactgatctaatctgccccaggatgtaggagaaccacttaatattcatagatgctgtctctttctacaaaacctcagtataatcctgtctctcaaactttgtgctggccaattccaactgaataaacccaaacactttgccaactacccatctaccctcccctcact

SEQ ID NO: 232990 - DNA, 585 bp, Homo sapiens
gtctacctctgcaactgagtggtgtggctcaggacaagttacttaattgaagtcatattttttcctcatgtgaaaaraaataaggatagagattttatcacacatatttggaaattaaatgaggcacttaactattaccaattacattatctgcttcacagtaaatgtttaacaactgattattgtaatttctttgagtaataggtgagataattttccgactcaattgtagaaatttttactatgcattcacatattatggagttttacacaaaatggaaaaataggtatgttctctcctgtattttaacaataacagcatctcaggctgatgaacaggttctgtttttcttgctgaccatccagtgggggaaatctggtttgaggaaagtgaaatcctttatgatgaatcaggaaaaacctccaaaactatgttttcatgtcactattaattcgttattaaaacatcatggaaactcagaaatgcctgcctagggacacagcaggataaaataaacatcaatatattcctgcttgctgctgactcgtacatctgtggaggaagtggaaaatccatttgagatg

SEQ ID NO: 232991 - DNA, 576 bp, Homo sapiens
agattttctgatctgaatttgatgtgagctcctgtcttttaacatacatttggcataatgtctgccaccttatcctatcttttccacaccatgattttctctggtcctttttttctcattttatgtcttttgtttccttatcttctctcttgccctcttgttgaggaaagttagatagactgtttctcttcctttagtggtgatccttatattgttaacattggcttaacttaaagcctaaagctaatgcctccttatgtcacagagtttggctttctgcagattatgatataagttaagggaattcagaaactcttgttgctggaagaaagttagaagattttattcccatatcttgtccaataagccaagggaatcagtcaatgttgcatggcaagcttgacacagtaacagaaattttcaatcaattggcttattttattttattttwtttttgagactgagtcttgctctgttgcccatgctggagtgcagtggcatgatcttggctcactgcaatctccgcctcccggattcaagcaattctcctacctcagcctcccgagtagctggaat

SEQ ID NO: 232992 - DNA, 629 bp, Homo sapiens
gcatggggcattctaaagcaattagaattatttggaacaacagcaacacaaaaggaccaggggaaaagccatttggtaaattttttttctctttcactttggggaaactcagatttcattcatgttttttttttyccactttaagaatacttgggattggagaaggatggcagattcatagttaatatagtttattgttagtatcaggacttagtttgataataggtacagtttgagtgttccaaatccaaaaatctgaaatctgagatgctccaagatccaaaaatatttgagagccaatttgatgctcaaaggaaatgttcattggagcattttggatttcagattttctgatttgggatccttagctggcataatgcaaatatttcaaaatggaaaaataaaatctgaaacacttctggtcctaagtatctgagataagggatattcattctgaactaatcaacacaaagtcctcatctccccaaccactgaatagaaaaattgtgtataggcatattgtttgtatatatttacactcttataaaggaagtgaccatccctttcatcagattcttagaaaggtacataatgttaagaaaggttaaaacgcattagccaccactgtt

SEQ ID NO: 232993 - DNA, 568 bp, Homo sapiens
cttgttttaatgagttaatgaagaaaacctaatgatacccaatagaagaagagagagagggagggaggaagacaggaaaagacagaggaaaaattaaatttagggctcaggtcaaaataaactattaaagactatggtcaaatctatttcttttccttatttaaataaaattaaactygatatatttttattagcaatagcacatagaacatgatctcgtcctcttaaaagtatccctctcttctcatttatcttttcttctatctctatatatgtacagatacagagatgtctagaatggtgagaaacttttggttttgtcttgttttaaaagttttctcttggtattttatgtatagcttgaatttaggaagttacatttcgccaaaacacaagtaattacaaaaatggggcattcactaagagtgtgacctgaaaaccatgattttctatatttggcagactcttcattccttgagcatttcaaaaatgttccaaagaatcagcactgttaaagcgacttgtttgattttgtttcttaaggtctaggtaatcctccaagagaacc

SEQ ID NO: 232994 - DNA, 568 bp, Homo sapiens
cttgttttaatgagttaatgaagaaaacctaatgatacccaatagaagaagagagagagggagggaggaagacaggaaaagacagaggaaaaattaaatttagggctcaggtcaaaataaactattaaagactatggtcaaatctatttcttttccttatttaaataaaattaaactcgatatatttttattagcaatagcacatagaacatgatctcgtcctcttaaaagtatccctctcttctcatttatcttttcttctatctctatatatgtrcagatacagagatgtctagaatggtgagaaacttttggttttgtcttgttttaaaagttttctcttggtattttatgtatagcttgaatttaggaagttacatttcgccaaaacacaagtaattacaaaaatggggcattcactaagagtgtgacctgaaaaccatgattttctatatttggcagactcttcattccttgagcatttcaaaaatgttccaaagaatcagcactgttaaagcgacttgtttgattttgtttcttaaggtctaggtaatcctccaagagaacc

SEQ ID NO: 232995 - DNA, 481 bp, Homo sapiens
tcttgtccttaatagtaactgtaccttacayttatgaggctatttacaatgtgcttccacatgcagacactctcttgacttgtataaccacacagtactgagattttttatgatccacattttagagatgagaaaactgagacttcaaaagtttaaggggtttgtacttgtcccagtaggcgaatagtagacataggctgtttcattccatacaccattgtttttccacatgaaagttactgcttataaacaatttagaacctttgagaagtatctcaaggtacatcctttctattttaaatttcttcttttcattatgttgactcccccttgttactctttaggggactgtggcaatttatgagaattaggtattggatttagaaccttccaaatctgattgttatgttctatgtctagcagatggtacagtatccaaaaatcacaattaatcaacagtatgtcttaactttctttacat

SEQ ID NO: 232996 - DNA, 481 bp, Homo sapiens
tcttgtccttaatagtaactgtaccttacatttatgaggctatttacaatgtgcttccacatgcagacactctcttgacttgtataaccacacagtactgagattttttatgatccacattttagagatgagaaaactgagacttcaaaagtttaaggggtttgtactygtcccagtaggcgaatagtagacataggctgtttcattccatacaccattgtttttccacatgaaagttactgcttataaacaatttagaacctttgagaagtatctcaaggtacatcctttctattttaaatttcttcttttcattatgttgactcccccttgttactctttaggggactgtggcaatttatgagaattaggtattggatttagaaccttccaaatctgattgttatgttctatgtctagcagatggtacagtatccaaaaatcacaattaatcaacagtatgtcttaactttctttacat

SEQ ID NO: 232997 - DNA, 481 bp, Homo sapiens
tcttgtccttaatagtaactgtaccttacatttatgaggctatttacaatgtgcttccacatgcagacactctcttgacttgtataaccacacagtactgagattttttatgatccacattttagagatgagaaaactgagacttcaaaagtttaaggggtttgtacttgtcccagtaggcgaakagtagacataggctgtttcattccatacaccattgtttttccacatgaaagttactgcttataaacaatttagaacctttgagaagtatctcaaggtacatcctttctattttaaatttcttcttttcattatgttgactcccccttgttactctttaggggactgtggcaatttatgagaattaggtattggatttagaaccttccaaatctgattgttatgttctatgtctagcagatggtacagtatccaaaaatcacaattaatcaacagtatgtcttaactttctttacat

SEQ ID NO: 232998 - DNA, 481 bp, Homo sapiens
tcttgtccttaatagtaactgtaccttacatttatgaggctatttacaatgtgcttccacatgcagacactctcttgacttgtataaccacacagtactgagattttttatgatccacattttagagatgagaaaactgagacttcaaaagtttaaggggtttgtacttgtcccagtaggcgaatagtagacataggctgtttcattccatacaccattgtttttccacatgaaagttactgcttataaacaawttagaacctttgagaagtatctcaaggtacatcctttctattttaaatttcttcttttcattatgttgactcccccttgttactctttaggggactgtggcaatttatgagaattaggtattggatttagaaccttccaaatctgattgttatgttctatgtctagcagatggtacagtatccaaaaatcacaattaatcaacagtatgtcttaactttctttacat

SEQ ID NO: 232999 - DNA, 620 bp, Homo sapiens
accaacattttcagattactatgatcamatagttaatatttgtatagttgtggctcaaaaaattcaacttcataaaccagtggtcttctaagcctgtcacaaaaagcagcagtgtcttttagaagcttgttagaaaaataatgaatataatttttgtgccaactaaaaatcataaatttgcatctaccaacttaccattttatgcctgaaaggagtcattcttagggatagctcaataaacctttgatttaaattcagcgggtctggacccagcaatctacattttagcaggttctctgggtgactctacaatagattctaaaatgctttaggaaacactaatcagaccttaaacaatttagaaacgggatatcactacttaaagaacctctagaagcatagttgctttgaagcagtgggtcgcccatccaaagagacaagtgcaagacatttgtagcatggtggggggaaaaatagaactaaaatgtggattagaatcctaatccccatgccgtactagttccataattttgggcaagtcacttaccctcctctgtgcctcaggttcctcatctgttaactgtgataatcattcttactctactttcctcaaaaagtca

SEQ ID NO: 233000 - DNA, 548 bp, Homo sapiens
cttgggagaggggaatagaaatrgatagggataacagttgcaggagatactgatacacctgtagtgggttattacataagtcaacaacaaatgctgaaagcaaatatgacaaaatgttaacagttgttaattctggatgggaggaatgtgattgttcgttgtgttactgttagcatgattctgcaccttggaaatttcacagaattaaacattatatatgaagaattcctaaacactgacaaaacaattcagactttcataagtcactgatgcaataaaagagtggccaaagaaacactgagccagcttccacacctgttcctgaggaagtggagaaccagctgcaaagacagcctcagactctgggaggtggcaagggaccacataatctcccatccaggcctgaccctgcttagcttccaggatcaatgagatccagtgtgttcagggtggtaaggccatagaccacatgatcctgacttcagtggtagttgtgtgtggccaagaaatagtttacctttccaagggttccaaatgcacacagttct

SEQ ID NO: 233001 - DNA, 567 bp, Homo sapiens
agaaaaagggattgtgtccttgatgcattatgtttttgtattgctgcttctagacagaaatgtatgcgaccactaaaatacctttggggtaatttccaggatagtaagcctttaaaaaattatatgcatgaaactagagtgaagaaattaagagtatgaactgtggagtcacacagccccaggtttgattttgtccctaacagctcataatcttgtgggtggccttgaccaaatgaagttacctttttgagtgtctctgtatttgcaaatgaagcataatttaggtacctcttagggttattgtgaagccttgttaaacacatacaatacttggagttgtgtcaggcacaacatatctggtagtgattatatttcacaagaaggttagcattgccgttgtgacttcctrttcattattgtagagaattatttggagaatccctattttgaggattactcacttaataagaagcccaggctatgctatataattaacatgaatgtcttttcacattcagggctgtgggcatttttcctgctataaattagtatttcaaaattcaaatt

SEQ ID NO: 233002 - DNA, 565 bp, Homo sapiens
tgtttcttcttgctatagactgaatgtttgtgttccccaacccaaattcatatgcccaatgtaatccccaatgtgagggcatttggattggaggtaaagcctttgggagataattagttcatgagggtggagtcctcatgtatggaattcgtgcccttatacaggagaccccagagagctcccttgcctcttccaccttctgaggacacaggaaccaggaagcaggctctcaacagacaccaaatctgccagctccttgaccttggacttaccagcctccagaactctgagaaataatttttgattttktataagccaccccagtttgtattagtctttcctacactgctattaagaactacctaagactgggtaatttataaagaaagaaaggtttaattgactcacagttccacaggctgtacaggaggcatgactagggaggcctcaggaaacttacagtcgtggcagaaggcaaaaagggaaagcaagcgtgttttcaggtggtggcagggagagagagaaagataaaggggggaagtgctgcacactttttaaataacca

SEQ ID NO: 233003 - DNA, 455 bp, Homo sapiens
aatgactgacactgcttaggttcagtgagtcagagcacacaactacagatgccagctgatgtggccctcaagcccacctaaaatgatcccaaacagtccagttgagggtcaactctagctaacacaatcagatcaccatcctatgttgtatttcttccaaaataayagtagatcacccacaggcagtacctgtaaagagaggacttcatttcctacctgggtactgcaacagccttcaggctggtctcctgcctatactctcatgctgcccaggcccacccagcagccaaagggtcttctcaaacaaatcagaacgtatcacccacctgctcagaaccctgtcgtggtttcccatggctttgcaaataaaacccaagctttaggcccctgttcttctgactttatcttcatcttattccactcttgccatgctaattttctttccatccttcaag

SEQ ID NO: 233004 - DNA, 455 bp, Homo sapiens
aatgactgacactgcttaggttcagtgagtcagagcacacaactacagatgccagctgatgtggccctcaagcccacctaaaatgatcccaaacagtccagttgagggtcaactctagctaacacaatcagatcaccatcctatgttgtatttcttccaaaataacagtagatcacccacaggcagtacctgtaaagagaggactycatttcctacctgggtactgcaacagccttcaggctggtctcctgcctatactctcatgctgcccaggcccacccagcagccaaagggtcttctcaaacaaatcagaacgtatcacccacctgctcagaaccctgtcgtggtttcccatggctttgcaaataaaacccaagctttaggcccctgttcttctgactttatcttcatcttattccactcttgccatgctaattttctttccatccttcaag

SEQ ID NO: 233005 - DNA, 388 bp, Homo sapiens
ttccttgggtagacagcactgagaaaggagatgcagtatcgtcatgtcaggtgggaatgagggcagatgaaaagggactctgcrttggggagactgactgagcagtgaggaggtcagcactccaagcagtcttatgtgccagtttctatagatggccactagacgtgttagggagctggaggggtgggaaatttgtcaccctgaaaacagggctgggcttcatgacagtcaccctgcaaacccaagaggcagtttgccataatggataaaaacacgagccacaggctcaggaagacccagattctcgtcccagttttgtcactggtgtgacctgggatgcattatttaatgtctctcaatctcattgaatttgagcaataaccaaggg

SEQ ID NO: 233006 - DNA, 609 bp, Homo sapiens
aagaaaataaagttttatcaatttggggagagtggacacagagaaaacctcaagtatgagaagatgaacatttgatgttttgattgaccacatcctggagggaagatatacaggatgtgtacatccttgaggcccaaagatacatttctgactttcagacagagaagatgggcaagatctgggattagaatggtgggattagaatggaatattgttttgttttgttttgttttgtttttcttgatggccatggatttgtacaaataaaggaacttggaagggcctgaagcaatggccatgccatttgatcaaaactagatgatctcaagtgctacaagagtcagctgaactcactaaaattgcaatgagaacaaaatatcatatttcaccattctggtttaggggcagctaatttttccttaactaagtttgagttttgagcctcttgagttaatagctttccttttgttatcatgcacactctcctagcctctgtacctggatgagataaatagcctaaattatgtttgcttcatggacagctttcttatgaactatctcagaatgtagtmaatttgatggtccctgcatttggcagagaaccaacaa

SEQ ID NO: 233007 - DNA, 356 bp, Homo sapiens
attgatgatactggctgcacagaatgttgtctatttctgaggtgtggtcccagtccagccagaaagggtactgggattgactgttcagcaatgtttgcwgtggaagcagaatgtgggcatgttggtggaattgccaacctagaacaccctattaaaagaaaaaattttcttgggaaaagcacagttggttgtcaacaccttggtttgaattaattttcagataatcaaatacatccttgctactgatgtgattctttagaaccttgggagttatctagtttaattattattttttatttttatttttgagacagagtcttgctctgtcgccaggctggagtccagtggcaagatct

SEQ ID NO: 233008 - DNA, 477 bp, Homo sapiens
tgagcttttactatgtactatgtattacagtagataytttaaaaggattatctcatttaatctttcaaataacctaataggtgggtcatattatccctcatttttcagattgttaaccttagatgcttcactgggatgcaggaatgaaaaaaatgacaacagaggcagtgctcttgccagtgcatgctaaggactccactgcctgttcctctcactgtttccccaggacagataacatgcctgtcccaagcccaaacaccagggctcatctctttttgcatccacaactacagaagtccatggcctctcaagcagagtcaccctccaatgtcggttgttaaaggaatgaagaaagagggtcctgaatcattctattagttcaaaacctggactgatggtcaataaactctgcatcttgccatctaactgtgccaaaattgataataaaactaacatcctgcacaaagcgtcaactac

SEQ ID NO: 233009 - DNA, 477 bp, Homo sapiens
tgagcttttactatgtactatgtattacagtagatattttaaaaggattatctcatttaatctttcaaataacctaataggtgggtcatattatccctcatttttcagattgttaaccttagatgcttcactgggatgcaggaatgaaaaaaatgacaacagaggcagtgctcttgccagtgcatgctaaggactccactgcctgttcctctcactgtttccccaggacagataacatgcctgtcccaagcccaaacaccagggctcatctctttttgcatccacaactacagaagtccatggcctctcaagcagagkcaccctccaatgtcggttgttaaaggaatgaagaaagagggtcctgaatcattctattagttcaaaacctggactgatggtcaataaactctgcatcttgccatctaactgtgccaaaattgataataaaactaacatcctgcacaaagcgtcaactac

SEQ ID NO: 233010 - DNA, 477 bp, Homo sapiens
tgagcttttactatgtactatgtattacagtagatattttaaaaggattatctcatttaatctttcaaataacctaataggtgggtcatattatccctcatttttcagattgttaaccttagatgcttcactgggatgcaggaatgaaaaaaatgacaacagaggcagtgctcttgccagtgcatgctaaggactccactgcctgttcctctcactgtttccccaggacagataacatgcctgtcccaagcccaaacaccagggctcatctctttttgcatccacaactacagaagtccatggcctctcaagcagagtcaccctccaatgtcggttgttaaaggaatgaagaaagagggtcctgaatcattctattagttcaaaacctggactgayggtcaataaactctgcatcttgccatctaactgtgccaaaattgataataaaactaacatcctgcacaaagcgtcaactac

SEQ ID NO: 233011 - DNA, 618 bp, Homo sapiens
gcctgtgctgtagtttttattgctttttggcaaaagtataaacgtaagagcaatgaatatagtgagtttttttataaagtccatgaacaacctttcacttagaaattgttcttaaaattttcattttgtgaggaaatgatggggaggggatttgtttgttttctttcttacatgctctcacttggtgaaatacaaagttgacagctttcataaatatattctgttccccctacccctgctaacttttagaaaatattactgctgaactgaagaccaaatttttcctgagagctgtgacctttgaaatgttttcttctaagggtaattctttctttcaacaggatttattgagaagcaaatgtgtatccagctttgggtctggtacaggggtgaggtgaaacagctgcagtacaagagtggactttgytgtcctcacttcccataggtttacagggacacatatcaagtcgggacatctggccttcctagccttggcacctattgtcttttttaggacatttttggccttctgaaggttataaaactcaagtttatagagagacaagagctgaattttcttattttcttacaaaatattagtatttgacaacctaagtg

SEQ ID NO: 233012 - DNA, 567 bp, Homo sapiens
aacatggcaccattgttctgtatatttgtgccaggagcgatgtcacttttgatcattttaacacagaagctggctcatgaaagtcagccttcctattgacttgatgacagcctctgctcatggcaagcagtatcctatgggaaggtggtgtgcagactttgagggcagattttcaaactttttgagaacatctatcaaattttcaaggctttattatcccaagagagtgagcagctttttccaggatgtttcatgctgtttgaacactaaaaataaaataaatagagaaacaaacctcctagacttagtctgctaacttcctttccaytcaaactttaccctttaaagtttgaactaaaaaaaaaaaaatcctggcagctctcagaccacatgagtacaactggttatttctaccttgggaggagaaggtgcgtttgattaaacattcatgccattcatttttgatagggtcacccagagttagcagataaaaacacaggatgcccagttaaatttgaatttcagatagataatgaatttatgtttagtaagtaatttacgtgagta

SEQ ID NO: 233013 - DNA, 391 bp, Homo sapiens
agaaattatgctggtgtggattattaagagctrtggttttgtacaaatactgcttccagtcttagtgggtctctcctaaaaaccccagagtccaaccaaacctaggaacagagaaaatctagagaaggtagagagagagttgaaagtcatttcttttaaggtgttttactttatgtttctattttcccacacaaggaacattacccagatttgtgaatgataataacacgtttatttctatttgttatttttcccttaaaacaacatatatattatcttacagtttcaatcggtcaggaatccaggcatatcttagcaggatcctctgctcagggtgtcacaaagctgtagtcaatgtgttggccaggtggcagttctcatctggaggatc

SEQ ID NO: 233014 - DNA, 420 bp, Homo sapiens
gtgtggattattaagagctatggttttgtacaaatactgcttccagtcttagtgggtctctcctaaaaaccccagagtycaaccaaacctaggaacagagaaaatctagagaaggtagagagagagttgaaagtcatttcttttaaggtgttttactttatgtttctattttcccacacaaggaacattacccagatttgtgaatgataataacacgtttatttctatttgttatttttcccttaaaacaacatatatattatcttacagtttcaatcggtcaggaatccaggcatatcttagcaggatcctctgctcagggtgtcacaaagctgtagtcaatgtgttggccaggtggcagttctcatctggaggatcaactggggatgaatctgcttcattcagcttgttaatagaatt

SEQ ID NO: 233015 - DNA, 391 bp, Homo sapiens
agaaattatgctggtgtggattattaagagctatggttttgtacaaatactgcttccagtcttagtgggtctctcctaaaaaccccagagtccaaccaaacctaggaacagagaaaatctagagaaggtagagagagagttgaaagtcatttcttttaaggtgttttactttatgtttctattttcccacacaaggaacattacccagatttgtgaatgataataacacgtttatttctatttgttatttttcccttaaaacaacatatatattaycttacagtttcaatcggtcaggaatccaggcatatcttagcaggatcctctgctcagggtgtcacaaagctgtagtcaatgtgttggccaggtggcagttctcatctggaggatc

SEQ ID NO: 233016 - DNA, 352 bp, Homo sapiens
tgtacaaatactgcttccagtcttagtgggtctctcctaaaaaccccagagtccaaccaaacctaggaacagagaaaatctagagaaggtagagagagagttgaaagtcatttcttttaaggtgttttactttatgtttctattttcccacacaaggaacattacccagatttgtgaatgataataacacgtttatttctatttgttatttttcccttaaaacaacatatatattatcttacagtttcaatcggtcaggaatccaggcayatcttagcaggatcctctgctcagggtgtcacaaagctgtagtcaatgtgttggccaggtggcagttctcatctggaggatc

SEQ ID NO: 233017 - DNA, 379 bp, Homo sapiens
aagagctatggttttgtacaaatactgcttccagtcttagtgggtctctcctaaaaaccccagagtccaaccaaacctaggaacagagaaaatctagagaaggtagagagagagttgaaagtcatttcttttaaggtgttttactttatgtttctattttcccacacaaggaacattacccagatttgtgaatgataataacacgtttatttctatttgttatttttcccttaaaacaacatatatattatcttacagtttcaatcggtcaggaatccaggcatatcttagcaggatcctctgctcagggtrtcacaaagctgtagtcaatgtgttggccaggtggcagttctcatctggaggatcaactggggatgaa

SEQ ID NO: 233018 - DNA, 667 bp, Homo sapiens
tagaattcatttccttgcagctgtagaacatacagtgctgtgcttcttcaaggccagcaggagggttgaccccagggaaatcttcagccctcttctttttttttttgagacagagtctcactcttgttgcccaggcttgagtgcaatagtgcaatcttggctcactgtaacctctgcctcccrggttcaagcaattctcctgcctcagcctcccaagtagctgggattacaggcgtgtgccaccatgcctggttaatttttgtatttttagtagagacagggtttcaccatgttggccaggctggactcgaactcctgacctctggtgatccccctgcctcagcctcccaaagtgctgggactacaggcttgagccaccgtgcccagttctcctcttccaaaggacttccaatgattaagtcaggcctgctcaggatattcttttggttaatttaaagtcacctggaaccttatccacagtgaagaatgaatgacttgcaaggtttacctattactttcttcactagctttatttgcatctgggccttatgccaaagggatgaaatgcaaagggcagaattgcattcatcagtgattctgatggaacatctgcaaaagtccttcatccttgctatataacctgaggataatactaggggacagagat

SEQ ID NO: 233019 - DNA, 667 bp, Homo sapiens
tagaattcatttccttgcagctgtagaacatacagtgctgtgcttcttcaaggccagcaggagggttgaccccagggaaatcttcagccctcttctttttttttttgagacagagtctcactcttgttgcccaggcttgagtgcaatagtgcaatcttggctcactgtaacctctgcctcccaggttcaagcaattctcctgcctcagcctcccaagtagctgggattacaggcgtgtgccaccatgcctggttaatttttgtatttttagtagagacagggtttcaccatgttggccaggctggactcgaactcctgacctctggtgatccccctgcctcagcctcccaaagtgctgggactacaggcttgagccaccgtgcccagttctcctcttccaaaggacttccaatgattaagtcaggccygctcaggatattcttttggttaatttaaagtcacctggaaccttatccacagtgaagaatgaatgacttgcaaggtttacctattactttcttcactagctttatttgcatctgggccttatgccaaagggatgaaatgcaaagggcagaattgcattcatcagtgattctgatggaacatctgcaaaagtccttcatccttgctatataacctgaggataatactaggggacagagat

SEQ ID NO: 233020 - DNA, 667 bp, Homo sapiens
tagaattcatttccttgcagctgtagaacatacagtgctgtgcttcttcaaggccagcaggagggttgaccccagggaaatcttcagccctcttctttttttttttgagacagagtctcactcttgttgcccaggcttgagtgcaatagtgcaatcttggctcactgtaacctctgcctcccaggttcaagcaattctcctgcctcagcctcccaagtagctgggattacaggcgtgtgccaccatgcctggttaatttttgtatttttagtagagacagggtttcaccatgttggccaggctggactcgaactcctgacctctggtgatccccctgcctcagcctcccaaagtgctgggactacaggcttgagccaccgtgcccagttctcctcttccaaaggacttccaatgattaagtcaggcctgctcaggatattcwtttggttaatttaaagtcacctggaaccttatccacagtgaagaatgaatgacttgcaaggtttacctattactttcttcactagctttatttgcatctgggccttatgccaaagggatgaaatgcaaagggcagaattgcattcatcagtgattctgatggaacatctgcaaaagtccttcatccttgctatataacctgaggataatactaggggacagagat

SEQ ID NO: 233021 - DNA, 569 bp, Homo sapiens
tttcattattatgccaactttatagataaatactgagagattagataatgtgctcaagtcttattctaggaagcagcagagctctgtctagaactctatctagttctgtctgactctaatgcatgctccgtcccctgccccacactgaasagttcattcttacaagtcatcacctgttcgagaggcaaggatggcatactaataatctgtccacacttaattcccatacacttgctaggagcctgatgtttgttgaatgttaaagtaagtgcttgaagggatgattagtattttttttttttttgatggagtcttgccctgtcgcccaggctggagtgcagtggtgtgatctcggctcactgcaaccctgcctccagggttcaggcaattctcctgcctcaccctcctgagtagctgggattacaggtgtgcaccaccacgccctgctaaatttctgtacttttagtaaagacagggtttcaccatgttggccaggctggtctcaaactcctaacctcaagtgatccacccacctcaacctcccaaagtgttgggattacaggcgtgag

SEQ ID NO: 233022 - DNA, 353 bp, Homo sapiens
gctaaaacttggtgattggcagaagagtaagctatagtctgtttacaatttcatttaggttatagtttatgatttacaaagaaacctttagattgaatttaaaatatgtaaggagggagactgactgagaaaatggtagataggaggcaagactaacttgcagctcccacttggatggacagagcagcatgtagagacacaccatgaattttcgctccaagaactaccaaagtaacataccargaaagctaagacaatccacaggccctttgaaggaagtggattgctgctgcaggctccaggagacagccaaaaaactgtgagtgccccaagtgtgaaagtgagaaagggag

SEQ ID NO: 233023 - DNA, 602 bp, Homo sapiens
tgatcacttgttgatctctttaaacagatggtttataaataacttgtctttttgggtgaaagacaacacagatatctagtttttgtttgtttgtttgtttgtttgttttctatttgcctattgtgagctcargtcaattaacaagttgtacttaatgggaaaagaaaagccccttgatataaactattgagttttgagttttgtatttctgtgtgtgtgcttggcccatggtagatatttataattgaagctgttatctccttatctgtgtctatgtatgcttgtgttttgagggtgtgtaatattttcctatctctggatgctgttaccaaatttgactacaaaatattctaaaatggctctgttctgtttggcttagagataaatgccagttacataatttgaatatatctaaaatacttttaaatttcccacacaataaagaaattgtcatgagacactgctaggagtaatactgacagcagtccaactttatgtgtgaagtacatggtatgcattttttgttaaggaaaaatatagtagttttgtaccaagtaaaaggtattggtggttgcaaatgagaaagaggaaaattcaggaca

SEQ ID NO: 233024 - DNA, 520 bp, Homo sapiens
attaaaataaatgtatgtttcatcagtatgcttattcaaagggcagccagtgtcttaacagccttaggctaaaaattattaaattaaggtctgttaaagcatcaagctgtaaaatgtatatatgtamatttcaaatggttgcaggcacatctgctattgactttagtattataggagcttattttgaaaatactgaatctttcaatttttagcagaaaatagatgaaagaaattgatatattaaatgtatgcaaaattttatttttgattaacaaaatattaatgttccaaacaataaagatacatgtttgtaagttaatatttcttgcattttcaacttctctgttatttttgttgcatttttttcacatgaggcgaatttctactttccccccacccacaaaacccatggcagtttctctagtgtacctaatgcataccttcagtgcatctaaattaggctgacttaggtataactgtatcttaaaaattatatatatttgatttaagtatgagtttt

SEQ ID NO: 233025 - DNA, 520 bp, Homo sapiens
attaaaataaatgtatgtttcatcagtatgcttattcaaagggcagccagtgtcttaacagccttaggctaaaaattattaaattaaggtctgttaaagcatcaagctgtaaaatgtatatatgtacatttcaaatggttgcaggcacatctgctattgactttagtattataggagcttattttgaaaatactgaatctttcaatttttagcagaaaatagatgaaagaaattgatatattaaatgtatgcawaattttatttttgattaacaaaatattaatgttccaaacaataaagatacatgtttgtaagttaatatttcttgcattttcaacttctctgttatttttgttgcatttttttcacatgaggcgaatttctactttccccccacccacaaaacccatggcagtttctctagtgtacctaatgcataccttcagtgcatctaaattaggctgacttaggtataactgtatcttaaaaattatatatatttgatttaagtatgagtttt

SEQ ID NO: 233026 - DNA, 598 bp, Homo sapiens
ggtatcttatctgggggcttctatttttttaatgttgcttgaagcaagataatcatcaaagactatgtaatggcataagcagaaggagagttagcaatgtctgaaatacttagcttggagttttagaaatgaaaatcagggaaatgtaatagcatcattagacacttttgagaacccatttgatatatatatataatcgtgtattgatataaatctattgatacaggttgtgtttgtgattagatattaacttactgttcttgtctccttcccttgacttgacaactgatgaatggcttctagatctctggacttggcagatgtttgtagactaactctttatctcgttatttttttcttgagtttctamaatttgatctgaccagatttatctttatttaagtagtcctttgagactcctgttgtgtcctttcaaaatctgccatgtacctctagattcttgcatccgaggtcttttgtcctgtttcacagattccaagatgaccctagaatgactctaattcttctggggacaaatgagtacaagtaaaacattcaaatattcatggttctcttaaagtttgaatatacaggctga

SEQ ID NO: 233027 - DNA, 589 bp, Homo sapiens
gagaatggcttcgcataaaagaagcactcaaaaaaaaacattattkttcagtgatatttgtgattccacttcatattatttattatttaaaatgccttccttagtattttttagttgataagatttgaggcccgttttcaacgtttttaatagattttcttctataaaatgaaacatggagatttttagttttctattaatggtatattagtttatataagacaaaaattgtacattaactatgactctcattgtttaaaaaatatgggtgaaatgggagcacaaaataataagacatcatacttttattgaccttaaatatatttaacatagctcaaatattttaagattattttattgtactatttcaggaactaatacagtaaaaccataacagactgaaaatatgttgaaggccccttggcaactttaccatttaatatgcaggctgtggaatggccccagccataattaatggtcacctccaaactccttctaaagtaggttatactatctgatggacaataaatcatataacacaagagaatattgacatctataacttcagtcactcgctacttcaattagt

SEQ ID NO: 233028 - DNA, 589 bp, Homo sapiens
gagaatggcttcgcataaaagaagcactcaaaaaaaaacattattgttcagtgatatttgtgattccacttcatattatttattatttaaaatgccttccttagtattttttagttgataagatttgaggcccgttttcaacgtttttaatagattttcttctataaaatgaaacatggagatttttagttttctattaatggtatattagtttatataagacaaaaattgtacattaactaygactctcattgtttaaaaaatatgggtgaaatgggagcacaaaataataagacatcatacttttattgaccttaaatatatttaacatagctcaaatattttaagattattttattgtactatttcaggaactaatacagtaaaaccataacagactgaaaatatgttgaaggccccttggcaactttaccatttaatatgcaggctgtggaatggccccagccataattaatggtcacctccaaactccttctaaagtaggttatactatctgatggacaataaatcatataacacaagagaatattgacatctataacttcagtcactcgctacttcaattagt

SEQ ID NO: 233029 - DNA, 563 bp, Homo sapiens
agggcctgtcagaggatggggggctaggggagggatagcattaggagaaatacctaatgtagatgataggttgatgggtacagcaaaccaccatggcacgtgtatacctatgtaacaaacctgcgtgttctgcacatgtatcccatgacttaaagtataataaaagacaaaataataataaataaataaaaattaaaaacggtgaatacgaatgagacaggagaatttccttgaccccttcatgggaacccttgtgaagggggtggctcatttacttggccaccatgcatacaggagggggtgcatgcaggtaaaacaggaagggagcttttttttttgagggggggctccagccctacggcagtgtccatgggtgttacaatgctcttttagctttgcatcattgatggctaagtggtaaccagctcagtggcgagtcaggatgacagccttttacacccctcactctttgtacccaggtccttgtccggagtmcaggaaaaatcaagtcacatggacttgaaggatggtgaatgcagggattttattaagtgatggaggtg

SEQ ID NO: 233030 - DNA, 569 bp, Homo sapiens
  misc_feature (1)...(569): n = A,T,C or G
tgttggtattacacagaaactctcaatttttagggtaattggaggcaagaatagcaatgagggcaaaagtttgtaaccactttgatatagtagagaaactggaggttgaaacacttgggaagatgccagtataaagggtatcattagagggctgagaaaattgataaactattcacatttaatcacatcaaatataaaatattaataatcaagctagtttcattattactcttcatattaggtaattcaattcttaaatttaagtccaataaacattgttacaactttcagtccttatttaaggatgtggcattaactttcttgatggagacctagatcgaggcaaagaggaaatgaaatgaatgtgcartatttgttaggatgctagatgatgtgatagcagatgaaaattaattaaacatgattatattatcatgcaaatagaatgatgctgggaattataactagtaacatgaactgatatttttacatattataaatatgtaatgtcttcttgacacatttaattaannnnnnnnnnnnnnnnnnnnnnnnnnnnnnnnnnnnnn

SEQ ID NO: 233031 - DNA, 595 bp, Homo sapiens
ttcacaataaacatttgcctaggtttatcctactttacctgtttattttaccacaaggctacctcttgcttcccccttgattttctcaattcagacattttgatttattaagggtaaggaaagtaagccttcattcactgcacatgtcaaaatttgttaaattaatcacttcaaagttgtttttatttttttttaaacactaagacaattcagttgttcagagtattagcttctgagctgcaacaagttgtttaatcctgaattttctaaatgctaagagcttcarcagggaaaacaagcattgtatgcaaatgctgtgatcttgccagctcacagtacagctagttcaatttgtctcttggttccctgtgatggacagaagatatttggtttggtaacaagatggcctctgtgatacaaaaggtggcaatgtcccacctctcaagtggcccaactacatggtccatcataagattcctaaagtttattgaaattttttctgttttagaaatatatatgtaaatataatcacaccattctcccacgtggcctaaaaatccaaaaatgattttttataactttgcttagcataata

SEQ ID NO: 233032 - DNA, 595 bp, Homo sapiens
ttcacaataaacatttgcctaggtttatcctactttacctgtttattttaccacaaggctacctcttgcttcccccttgattttctcaattcagacattttgatttattaagggtaaggaaagtaagccttcattcactgcacatgtcaaaatttgttaaattaatcacttcaaagttgtttttatttttttttaaacactaagacaattcagttgttcagagtattagcttctgagctgcaacaagttgtttaatcctgaattttctaaatgctaagagcttcagcagggaaaacaagcattgtatgcaaatgctgtgatcttgccagctcacagtacagctagttcaatttgtctcttggttccctgtgatggacagaagatatttggtttggtaacaagatggcctctgtgayacaaaaggtggcaatgtcccacctctcaagtggcccaactacatggtccatcataagattcctaaagtttattgaaattttttctgttttagaaatatatatgtaaatataatcacaccattctcccacgtggcctaaaaatccaaaaatgattttttataactttgcttagcataata

SEQ ID NO: 233033 - DNA, 351 bp, Homo sapiens
cccatgttttcctgcaaagtccttccagaagacttatttttttgtgtgtgaagacagacatgtatggtacatatttttcttttttgccacaaatcctatatcctgaygttgaaagactcgaaagacagttcctgctggaccctccctagaaattcaggtgcagaatactcttgtcctttggaggactgaaagggagaagcaggaaaagtggagttagggcatttgttgcttactcagaagttggatggtatcttggtcctgaggagagaaggtttcacttagtgtgttactccctttaacagagtatctgggagagattccacactgtggtggagcttggaaattccttgg

SEQ ID NO: 233034 - DNA, 351 bp, Homo sapiens
cccatgttttcctgcaaagtccttccagaagacttatttttttgtgtgtgaagacagacatgtatggtacatatttttcttttttgccacaaatcctatatcctgacgttgaaagactcgaaagacagttcctgctggaccctccctagaaattcaggtgcagaatactcttgtcctttggaggactgaaagggagaagcaggaaaagtggagttagggcattkgttgcttactcagaagttggatggtatcttggtcctgaggagagaaggtttcacttagtgtgttactccctttaacagagtatctgggagagattccacactgtggtggagcttggaaattccttgg

SEQ ID NO: 233035 - DNA, 445 bp, Homo sapiens
gctgcattgaatacaaaagtaaaaaggatatgaaaactctttcaaaaaaacagctgtaggaacacaggatcttcccacacatgggcaagcggttggcccctagaaacaaggcctctaacaagagaggtgtggaggagaaagtgaggccaacattytaggtaaggaaggtgagagggacagaagagttggcatgctttgggggatggtaaaaaatctagatccgcaacccccaggaggtgtggatatctagtgcagcgatcccaggaatttgaacagaagggacatggagcagtgatggagacctgattagctgtggcttccagttttgggagatacttgagctgcaagattgggaaagctgctattgtaggagtagaacatccaaacctcacaaaagtgagcatgagatcatttgacacctacctcacctcagtactaccacggc

SEQ ID NO: 233036 - DNA, 501 bp, Homo sapiens
actttgaaatgcagcaaaataactttatgtgtgtttcccatttgataacaaataatttctaaagggtgaagatttttttaatgacttttattcaaacaggaagattgaacagggcaagtgatctgcacagtgagggtctctatggttctcagattcaatatttttttgaagctgccatgcctatttgaggatatgagcttttttgtaaatatcagatttctgcattcaaaaatgacagacaaataaccggttcttaatatctgtgaggacagggcatgcaagtagataataagatgaacttttttctctttgtaatttggtcttatttctcaaatcctcagtagtcattttagycctccttccaactaatccttctctagagtaatacagcctggcaggatactttattgagacagtaattgtatagtttctaggtgttccccatctcaagattttgtatgttaccttgcctcagggtccagtgtggctgggccaacaatg

SEQ ID NO: 233037 - DNA, 504 bp, Homo sapiens
gcagcaaaataactttatgtgtgtttcccatttgataacaaataatttctaaagggtgaagatttttttaatgacttttattcaaacaggaagattgaacagggcaagtgatctgcacagtgagggtctctatggttctcagattcaatatttttttgaagctgccatgcctatttgaggatatgagcttttttgtaaatatcagatttctgcattcaaaaatgacagacaaataaccggttcttaatatctgtgaggacagggcatgcaagtagataataagatgaacttttttctctttgtaatttggtcttatttctcaaatcctcagtagtcattttagccctccttccaactaatccttctmtagagtaatacagcctggcaggatactttattgagacagtaattgtatagtttctaggtgttccccatctcaagattttgtatgttaccttgcctcagggtccagtgtggctgggccaacaatgggaattggcttca

SEQ ID NO: 233038 - DNA, 451 bp, Homo sapiens
attgcacaaaagtagattttttcttatggggaaaatatgctgatgcttgtggartgtataactgtttaatgtaaaaattcgcctttctgtcacattttgagaaaaatcctggttttgtgtgccaccatcataatggcctcactttagaacaatgatgttttttgccctcaaatatattccattactgtcatttggaatcagcccagagctagaatgagttgccaaaagcacatctgaaaggtaagctccctgagagaagggatctttttattcttaataatgacttcacttccccccttacttcccaaggtcaagtaccgaaatggaataaagttttatgcaacaaatatttcttgattcaataaacaactacaataatatcatctctaaaactgaattagtttatgattaaaaggtgcattttaaaaaatataactgttttatcctcttc

SEQ ID NO: 233039 - DNA, 451 bp, Homo sapiens
attgcacaaaagtagattttttcttatggggaaaatatgctgatgcttgtggaatgtataactgtttaatgtaaaaattcgcctttctgtcacattttgagaaaaatcctggttttgtgtgccaccatcataatggcctcactttagaacaatgatgttttttgccctcaaatatattccattactgtcatttggaatcagcccagagctagaatgagttgccaaaagcacatctgaaaggtaagctccctgagagaagggatctttttattcttaataatgacttcactkccccccttacttcccaaggtcaagtaccgaaatggaataaagttttatgcaacaaatatttcttgattcaataaacaactacaataatatcatctctaaaactgaattagtttatgattaaaaggtgcattttaaaaaatataactgttttatcctcttc

SEQ ID NO: 233040 - DNA, 451 bp, Homo sapiens
attgcacaaaagtagattttttcttatggggaaaatatgctgatgcttgtggaatgtataactgtttaatgtaaaaattcgcctttctgtcacattttgagaaaaatcctggttttgtgtgccaccatcataatggcctcactttagaacaatgatgttttttgccctcaaatatattccattactgtcatttggaatcagcccagagctagaatgagttgccaaaagcacatctgaaaggtaagctccctgagagaagggatctttttattcttaataatgacttcacttcyccccttacttcccaaggtcaagtaccgaaatggaataaagttttatgcaacaaatatttcttgattcaataaacaactacaataatatcatctctaaaactgaattagtttatgattaaaaggtgcattttaaaaaatataactgttttatcctcttc

SEQ ID NO: 233041 - DNA, 451 bp, Homo sapiens
attgcacaaaagtagattttttcttatggggaaaatatgctgatgcttgtggaatgtataactgtttaatgtaaaaattcgcctttctgtcacattttgagaaaaatcctggttttgtgtgccaccatcataatggcctcactttagaacaatgatgttttttgccctcaaatatattccattactgtcatttggaatcagcccagagctagaatgagttgccaaaagcacatctgaaaggtaagctccctgagagaagggatctttttattcttaataatgacttcacttccccccttacytcccaaggtcaagtaccgaaatggaataaagttttatgcaacaaatatttcttgattcaataaacaactacaataatatcatctctaaaactgaattagtttatgattaaaaggtgcattttaaaaaatataactgttttatcctcttc

SEQ ID NO: 233042 - DNA, 374 bp, Homo sapiens
tgagctgtgattacaccactatattctagcctgagagacatggcaacattgtgtctctttaaacagagagagacacctacacgcatatgtttatgcagaactattcacaatagcaaagtcaagaaatcaacctaaatatccatcagcagatgattggattaaagaaaatgtsacttatatacaccatggaatactacacagccataagaagaatgaaatcatgccttttgcagcaacatggatggagttagatgccattatcctaagtgaaataactcagaaacagaaattcaaatacttcatgttctcacttgtaagtggcaacctaacatagggtacacatggacatacagagggaaataatagacaataga

SEQ ID NO: 233043 - DNA, 465 bp, Homo sapiens
atcagtgccacttacatgacatagaaaataataccccacttttattgagattactatttccataatgtcaaatatttagaacatttaaatacatgaaagcaataaacttaagccacttaatcattttctaaaagtatacaatttccttaaagaaaagtccttcaggctgcctttcagagcttgtgcctgctaattttagrcatcatttggacaagatgtttttagttgctattaaaattcacaaattagaagtctctctgtgcacgtgtattagtgtgtatatggttgtgagtgtttcaaaggcaagatgtgctgaagccttgtcaagggcagaagaaactgaagaagtagataatacagctagtgcaaagggaacatgactcatgtcttcaaagagagtagtaggaaatgagatgagagcagtaatggggaaccaagtcatataaggctttgtaggctatggta

SEQ ID NO: 233044 - DNA, 465 bp, Homo sapiens
atcagtgccacttacatgacatagaaaataataccccacttttattgagattactatttccataatgtcaaatatttagaacatttaaatacatgaaagcaataaacttaagccacttaatcattttctaaaagtatacaatttccttaaagaaaagtccttcaggctgcctttcagagcttgtgcctgctaattttagacatcatttggacaagatgtttttagttgctattaaaattcacaaattagaagtctctctgtgcacrtgtattagtgtgtatatggttgtgagtgtttcaaaggcaagatgtgctgaagccttgtcaagggcagaagaaactgaagaagtagataatacagctagtgcaaagggaacatgactcatgtcttcaaagagagtagtaggaaatgagatgagagcagtaatggggaaccaagtcatataaggctttgtaggctatggta

SEQ ID NO: 233045 - DNA, 620 bp, Homo sapiens
gacattgtagataaaattcaagtaacaaaccttaaaacagggaaattagcctagactatcctggtgagtccaaaataggatcataagcaaataacctctggttaccagcagaagaaagacagagcagaaggaaaagattccaagctcttttgctggcattcagatgaagggttcacatgcaagaacagaagaaagacctcttagagctaaaagcagccaaaagcagagagccgggtgggaaacagagacagattctgcaactgtaaggaacgaaattcttcccacaactgagtgagcctaggagtggactctcctccaaagcctccagtagtaactacagccttgctaactaacaatgcggttttagcgcatgagacayctgttgagcttctaacctccagaactgcgaaattatacatctgtgttgttctaagccactcacagtgtgtaggaagttgctaaggcagtgacaaaatctaatgaaataggtaagtttcacaaggaaaggagtcatagtttttaaatgtgcattctcacttatttatacatgtaaaaagggccagagttttttggcacactctcatttatttatgcaatcaacaagttttaatgaaagccac

SEQ ID NO: 233046 - DNA, 620 bp, Homo sapiens
gacattgtagataaaattcaagtaacaaaccttaaaacagggaaattagcctagactatcctggtgagtccaaaataggatcataagcaaataacctctggttaccagcagaagaaagacagagcagaaggaaaagattccaagctcttttgctggcattcagatgaagggttcacatgcaagaacagaagaaagacctcttagagctaaaagcagccaaaagcagagagccgggtgggaaacagagacagattctgcaactgtaaggaacgaaattcttcccacaactgagtgagcctaggagtggactctcctccaaagcctccagtagtaactacagccttgctaactaacaatgcggttttagcgcatgagacacctgttgarcttctaacctccagaactgcgaaattatacatctgtgttgttctaagccactcacagtgtgtaggaagttgctaaggcagtgacaaaatctaatgaaataggtaagtttcacaaggaaaggagtcatagtttttaaatgtgcattctcacttatttatacatgtaaaaagggccagagttttttggcacactctcatttatttatgcaatcaacaagttttaatgaaagccac

SEQ ID NO: 233047 - DNA, 562 bp, Homo sapiens
cttaaaataattggcacacttgaaatatatcaatcaattattgctgggaaaattaaataaggtcgtaacatttcaaatgaaggtttctgccacttgagtaagactggggctttctctactcctgacttcttccacctgtcacacaatgaaatcacagattctctgcttataaaccaccaatattgaattcagggtcctgcagaatgtggaacagagggtgaaaataaggactgtaagctacaggagcaaaaggccatataaaccatggccatctgccaatgcaacactcttctcccaataattgaaaccatgatttctgtcacccacccttttycttccatctgagaagaaaactgagaattgtgcctactgtaacttccatttttaataccaattaaatgtgactgaagtcttctctttattctactaagaagaaaaatgtcacctcacaccttgttagccacatgtgaatgcatataaagtatttttaggtaaactgatgaattaaccaaactgtaaatacaatttggaaacagatagacattgaacattatcgtttgtt

SEQ ID NO: 233048 - DNA, 440 bp, Homo sapiens
atgtataattttggtcattttatcttgaggactaatgggaatttctccatggcttcttttaagacattttattttgtgttgtgaattttgttaaaagagcaggttctgaaaagctctgacagcctcttccgcaaaagatccaagattgtcagccattgatgcaaagacctgaatctgctttgacacctcagartaggcttctggcaaagttatgtctttctttcagatgtttgggtaaatcacacaacccagaaactgcatcatacattatgcctaagtcataaacaaatgctgctgaggtaagggtattcctcagtccactgtactttgttcaatgttttgaaactataggtgtcacttgaatacatcagtaaacatttcttcagggtttgaatatgcattcaaagtggcttctatagctcttttatttgagtcacttg

SEQ ID NO: 233049 - DNA, 470 bp, Homo sapiens
cttacaaaattttttaaattatatcctcttcaaataatttcttatctctgcactctaagaaaaaagtgtgstagttctcagatgagcaactaaacctgagaagaaaagattaagattataccgcctatatgaagatctccaatacaaacttgcaagcaaaatatagaggtacacatgtaagtctattgaaatggaccctctataatagctatcataatattttcataataaatatattttagagacataaaacggtctagaaaaccacacctacaacttcaaagcctaactattcaagttaaacaataaatttattggtggagaataaaaatataagggatttatatgtgatctaaacatttctaataccttaggggaatatttcttaggcatgaatttttcttaaaagggttccacgctgtctatttgagctcaagtgaactccttcagttgccttgcctctcaacaga

SEQ ID NO: 233050 - DNA, 499 bp, Homo sapiens
atattttcagccaaatctgattagagtaccattttttttttctgtccatctacccaacttagtttgctctggtctttccagagattctttgagctatccagtttccttttacaaaatgtcctttctgactgaataaatcagaaaatctggctgacttaaaatgtgaatagggtgactctgcatgcctgttttcccaaaaaagttttrgtttatgctggttgttgtagtagtaaatattgataacacacaattttactttataaagtttccacattcatacaataaattaattatattgtatacctaacaatgaggacatatctcccttttgtaacatgtaaatgaagatgatataaatagtgtactagctagtatattctaggtaatttaaaaataggattaaaaaacctaaattttaaattcacagactctgatcatgcctgtttctataacatatttggacatgaatcattaatgtttgaagctgtataattaacag

SEQ ID NO: 233051 - DNA, 507 bp, Homo sapiens
cctatgacctattttctttaactgtttagtaaccagaaaaagccaaagcacaatataacacaacccaaccaacacaataaatgcattactatttaatactgggttgcagtgaatctagtgattgacatgaaaactataataatamtaggaataataaattaacttataaattaaattcaaacttcaagttctttaaatcagcatagtcccagtcctcacacatccctaatatgttttgagtcctgttgaactcatttatatggcctgcctgtcctattgacttatgctcttaggcattaccttactaagcaacaaccgtgtaacagaggtaataccagtgatgccaatttatcaaacaaaaatgaaaaactttcagaagttcagaaaattgtttaagatcataccttttgtaagtgaagattttggattagaatttagaagtcatgtttctaacttctcaatattgccccagttttgataatagaattttagatgcctgtttgaata

SEQ ID NO: 233052 - DNA, 574 bp, Homo sapiens
atatattatcgttattaatatgttaccttccttcctagtgggattggaacgtacattgttttatgcctttattcattcctcatcctaaccaattccttatatttatgtcatggaaccatctccctggtacctcagagtaaaactcttctctcagcagaaatgataagttccctagttggttatttcagttgctggagcagtagctagtgagggtctctgccccctgcgattaatccagacgatcgctatcaactttctcacctttgctctaaaaaccccagcttccyttagctttataacaataatggtgatgcctattgccagtgatttgaagaagcgacccagggaagaagggagtgaatgctttttacaaatgactggttctccatttggttttattgcttattctcttacaacttataacccccaaaaggcaaaagaaaagttcattagttcagtgtctgacagctcagaaacgagtaacccaacacatttgtgtcccctccattgatttaacccttgtcgtaagttgaattttcaaataatgtccacagctatatttctagtctcacat

SEQ ID NO: 233053 - DNA, 422 bp, Homo sapiens
gaattctcacctaccctgccacctcatccaaaatttgttaattctatgtgcaaaacatctttcaaatccacccctctctcttcatcctcactgcccccatcctagtccacatcaatgccagtcttctgattttcctgtccctagtctgatcttctcccaatgcactctgcagagtgacctttatgaaatgtagatctgattatgccacgttcccactttaaaagcctctagaggtgtgaacctctagagtcttctagaatctgacttccattctctgtccagctttatttcttgctggactaytctatgctccagccatattggtcaaaaattgttttagtttctggaacctatggtgatcctctcaccgaggcctgctattttctcttactggaactctgtcccctcccctgggcaccctc

SEQ ID NO: 233054 - DNA, 461 bp, Homo sapiens
cgcccgaggagagaggatccaggagaccactccgggcgggatccgcggagcctggggccgggcggttggcccacattataagagggcctgcgttgctcctacctcaaaggctttagggtgtttgttaattccccgccccccaacctgatgatgctccaggtatttacaggcaggtgccccatagrctgtttactgggaagcagaattggtggactccgttcggggatatgaggaaagatccataagcagagagaataaagcctttgcacttacattttacttctcttatccctcacctctaccacctttccccttgacccccaatgggctgcaggtcacatcatcttgtccttgatatattcagaaaatagaagcccctcaaacaacttagaagcagtccccgcatgtcaccaaataatagaccacagctggcatgtgaatgctaccagttagagatgtgt

SEQ ID NO: 233055 - DNA, 471 bp, Homo sapiens
tgtttcagcaataggaggaatgagcaaaggctaccttaaggaaacacaagcaygtggcatgggcccaatatttcctttgaaatgtatgccatgcctgtaactccctttctacttgtactgggatgcctaattcagacccttggtgctttatagatgtgtcttgcaatagagatgtaatgactggttcccatgattctggtctatgtgtccttcaatttgtcctgcatgccagaacaactacattaatgccacttctttgcttaaaatgtctctgtggcttctatttatgatcctctttctgggttgccaggaactatatcatccagccttattcctttgtactccacacctaattctattccagcttagccatctcatcatgaaaatgctctgctcattcccatggctctgccctcactcctcatatttctttctcttggcataaggacccccttcatcagctctatccta

SEQ ID NO: 233056 - DNA, 471 bp, Homo sapiens
tgtttcagcaataggaggaatgagcaaaggctaccttaaggaaacacaagcacgtggcatgggcccaatatttcctttgaaatgtatgccatgcctgtaactccctttctacttgtactgggatgcctaattcagacccttggtgctttatagatgtgtcttgcaatagagatgtaatgactggttcccatgattctggtctatgtgtccttcaatttgtcctgcatgccagaacaactacattaatgccacttctttgcttaaaatgtctctgtggcttctatttatgatcctctttctgggttgccaggaactatatcatccagccttattcctttgtactccacacctaattctattccagcttagccatctcatcatgaaaatgctctgctcattcccatggctctgccctcactcctcatatttctttctcttggyataaggacccccttcatcagctctatccta

SEQ ID NO: 233057 - DNA, 596 bp, Homo sapiens
ttacccacaatccctagaggcagcttcagaaagcaagatttattaggaatctctttttgccaacagggaaatgaaaaacrtgtatattgcaatctcctgtagtcagtgttcagcctgaaaaacaaaaactggtgagcaggtagttcttaccaccagaggactgttaatactgttgctattaactataaatatgatttgtaataaaagcccacatgagacatagtgccattaggaaacaagaattcccagaggccacacattaggaatcaggctgtgtgatataaaaaacactgaactggagtcaggtagtctgggatctcctggacctgcaactccatcgctgtatgactttggtcaagtccgttaatttctctaaaccctacttcccaatttggaaacagagcacatcaaactagtgacctctgaggtttgttctagcattaaaattctggtgactgttgctatgcctgggataatttctcactaagttagaaggaaacattgggatatcttacaaaatgacttggcctattatctatttcagaatgctgctgaccttctgttctcggttattggtatcctatctggctaaagaa

SEQ ID NO: 233058 - DNA, 552 bp, Homo sapiens
ctggcctctttggtcccaactgtgtgcctcctctcctctctctagcttcttgctcttctctatgccctttgcctgaccctgcctctctggttctgaccttggctcccctcctgttttgcagtgagcatttacccttcagatcatatctgcagctgccactctgggcaaactccctctccctcaaacttggcctccatgtccattggccataggctgattttcccactgtgcttggtcaggcttcatgggtggaattcagacaccaggactgggcatcctggtcaaaaccaggggcaaacgctctcacctgcattcttgggcgggaggcaggggtcccaggyggccaagaaactcaccccataactgaacagaggtggcatgcccacactccgtccctggacaagggaagctcaaattcaaatagtatacaacattgtgcttctcacatagtaaaaccaatctttcagaaatgtgtcctgaattcctaaggggaggaagggagaaagatcctccagaaaataaaaaaaaaaattccaataaaacgaagttggt

SEQ ID NO: 233059 - DNA, 565 bp, Homo sapiens
attatggctctggctatgatgaataatgaattttggacttactttccaaatgaataactctaaaaatgtataaatacataaagcatcaatttttaggtgttggataagaggtagcacaaggcagtaatccttaagaagaaaacacaggaggtgagctcaatattcaccacaggttctgcttgagggcaacacaaaaggcagtggtcatgctggatggagaaaacacagactagaggttagtaatgctggggtagctcagatttgtggtactaatgaggcaggagctctgtaaacaagcagccccagaaacatgtgtagaagtctccttggttttttgggtgaaaactaagttgcacaaacatgtaggaagactctayaaggacatggcatggaatcgctgctggggttgtggggggcagtgctctagccagaagaaaatgcaagagcttgcacaaaactgggagatgttgggattcctaccagccaaagtggaaaggctttgctgaacactcaatgtaaacaattgaatgctagaaaggccactctttaggactgaagaccatag

SEQ ID NO: 233060 - DNA, 606 bp, Homo sapiens
caggcacattatgtcaaactactgaagaccaaagccttttttgaaacaaacaaaagtctttaaaataacctgaaaaatatagtcacaatacataaaaaggaacattgagaagaatggcagttgatttttcatcagaatcactggaggacctggccaggcatggtggctcacacccgtaatcccagcattttgggagaccgaggcaggtggattgctcgggtccaggagttcaatrtcagcctgggcaacatggtgaaacctcatctacaaaaaatacaaaaattagctggacatggtggtacacacctgtagtcccagcgacttgggaggctcaagtgggagaatcgcttgagcccaggaggccaaggttgtagggagtgaagatcatgccactgcactccagccttggcaagagtgagaccccgtgtcatacacacaaataccaagacaataacaaaggcacaatgcaaacaagtaatgatggaggactcaagacaaaggaacaacatgtgtaaagtgctgaaaaaactccaaagaacttcctaaaatttcacatgcagggagaatatccttcaaaagtgaatgcaaagtagagaaacccatgaa

SEQ ID NO: 233061 - DNA, 586 bp, Homo sapiens
tgtagtatttgttttcacgggaaattctaatgtttcatttgctactcaattcttggttgcctcaacatatgctttttttctatactagactaagaataaattattggattgtttttatttatttattgagacagaatctcagtcacccaggctggagtgcagtggtgcgatctcggctcactgcaacctctgcctcccagsttcaagcgattcttctgcctcagcctcccaagtagctgggactacaggtgcacgccaccatgccctgctaatttttgtttttagtaaagacagggtttcaccatattggtcaggctggtctcaaactcctgacctcgtgattcacccaccttggcctttcaaagtgctgtgattacaggcatgagccaccatgccaggctggattccttcatttttacataaacaaccactgtactgttaagttcaattacagtttcagactacaggaaatatctgacagtcttttcttgggttttttagataaagttcaattctctaaagggtacaaaaggaaggatacagaatttagcattattttttagagcaaacatgcaggggcaagctt

SEQ ID NO: 233062 - DNA, 586 bp, Homo sapiens
tgtagtatttgttttcacgggaaattctaatgtttcatttgctactcaattcttggttgcctcaacatatgctttttttctatactagactaagaataaattattggattgtttttatttatttattgagacagaatctcagtcacccaggctggagtgcagtggtgcgatctcggctcactgcaacctctgcctcccagcttcaagcgattcttctgcctcagcctcccaagtagctgggactacaggtgcacgccaccaygccctgctaatttttgtttttagtaaagacagggtttcaccatattggtcaggctggtctcaaactcctgacctcgtgattcacccaccttggcctttcaaagtgctgtgattacaggcatgagccaccatgccaggctggattccttcatttttacataaacaaccactgtactgttaagttcaattacagtttcagactacaggaaatatctgacagtcttttcttgggttttttagataaagttcaattctctaaagggtacaaaaggaaggatacagaatttagcattattttttagagcaaacatgcaggggcaagctt

SEQ ID NO: 233063 - DNA, 586 bp, Homo sapiens
tgtagtatttgttttcacgggaaattctaatgtttcatttgctactcaattcttggttgcctcaacatatgctttttttctatactagactaagaataaattattggattgtttttatttatttattgagacagaatctcagtcacccaggctggagtgcagtggtgcgatctcggctcactgcaacctctgcctcccagcttcaagcgattcttctgcctcagcctcccaagtagctgggactacaggtgcacgccaccatgccctgctaatttttgtttttagtaaagacagggtttcaccatattggtcaggctggtctcaaactcctgacctcgtgattcacccaccttggcctttcaaagtgctgtgattacaggcatgagccaccrtgccaggctggattccttcatttttacataaacaaccactgtactgttaagttcaattacagtttcagactacaggaaatatctgacagtcttttcttgggttttttagataaagttcaattctctaaagggtacaaaaggaaggatacagaatttagcattattttttagagcaaacatgcaggggcaagctt

SEQ ID NO: 233064 - DNA, 579 bp, Homo sapiens
aggctgtccaggctgaatgaggaataggtgatgagactgtgcaggcacttagtgggaaccatctctctgggcagcaaggctgagggagaagaatgccttctgggggaatgactatagtgaccacagatacacaggtcacatagccttggggaggagggactaagactttccaggaggaaataagggtagagtcaagcaaaggccaagcatgcaggctctgagggacagtgtttgggaatctaatgtggtagtggttaagagtgcagactctgataccttggctcaaattgcagctccactatgtaggaactgtgtggctgtggcccttaagctgcctatggctctgtatcctccatctgtaaatgcaggtaacactagtagtagctgcttcgttaggatgtgatgaagattaattggggcattgtgtgtggcatgctagcatagtgttagcamtagtaactgctcaataaatgtaccattgctgtgaggctgggaatgggagggacatacacacacacactcatcccagctccaactttcatctccacaggctccttcacaatcagtgaagaattaggt

SEQ ID NO: 233065 - DNA, 584 bp, Homo sapiens
tcccattggaaccagtagtcacagatcactggaccagacagtggtacacaagtagaaggcaacagtacatggagtggacaaaagagaagccaaccagctgtgaggtggcttgggacaaattctgcccagtagagtctgtccattcagagtaggggtagttgagtcacatctttggaraagaatcaatgcttgaagacaggttattctgtcttgcatttgtgccccaaattatgccgagctactttctggttttctgttaacctactgtacatcacagcagacaatcttatttctctattatgtaattaaaaatcagggtaaagccaggtgtggtggctcattcctgtaatcccagcactttgggaggccaaggtgggaggattgcttgatcccaggagtttgagactagcctgggcaacatagtgacacccccatccctttaaaaaaaaatttaaaaatgagccaggttggccaggtgcggtggctcatgcctataatcccagcactttgggaggctgaggtgggtgaatcacctgaggtcaggaattcgagaccagactggccaacatggtaaaaccccatct

SEQ ID NO: 233066 - DNA, 584 bp, Homo sapiens
tcccattggaaccagtagtcacagatcactggaccagacagtggtacacaagtagaaggcaacagtacatggagtggacaaaagagaagccaaccagctgtgaggtggcttgggacaaattctgcccagtagagtctgtccattcagagtaggggtagttgagtcacatctttggaaaagaatcaatgcttgaagacaggttattctgtcttgcatttgtgccccaaattatgccgagctactttctggttttctgttaacctactgtacatcacagcagacaaycttatttctctattatgtaattaaaaatcagggtaaagccaggtgtggtggctcattcctgtaatcccagcactttgggaggccaaggtgggaggattgcttgatcccaggagtttgagactagcctgggcaacatagtgacacccccatccctttaaaaaaaaatttaaaaatgagccaggttggccaggtgcggtggctcatgcctataatcccagcactttgggaggctgaggtgggtgaatcacctgaggtcaggaattcgagaccagactggccaacatggtaaaaccccatct

SEQ ID NO: 233067 - DNA, 584 bp, Homo sapiens
tcccattggaaccagtagtcacagatcactggaccagacagtggtacacaagtagaaggcaacagtacatggagtggacaaaagagaagccaaccagctgtgaggtggcttgggacaaattctgcccagtagagtctgtccattcagagtaggggtagttgagtcacatctttggaaaagaatcaatgcttgaagacaggttattctgtcttgcatttgtgccccaaattatgccgagctactttctggttttctgttaacctactgtacatcacagcagacaatcttatttctctattatgtaattaaaaatcagggtaaagccaggtgtggtggctcattcctgtaatcccagcactttgggaggccaaggtgggaggattgcttgatcccaggwgtttgagactagcctgggcaacatagtgacacccccatccctttaaaaaaaaatttaaaaatgagccaggttggccaggtgcggtggctcatgcctataatcccagcactttgggaggctgaggtgggtgaatcacctgaggtcaggaattcgagaccagactggccaacatggtaaaaccccatct

SEQ ID NO: 233068 - DNA, 546 bp, Homo sapiens
ctggagtcctctccccacactgacccagagaactgtctactaggggaggcatcttccctgcctcctgcttccttgggttgcattgctttgtctctcaaacccaggcctccctcttgtttttcaccatagatctggagggcccctaaaccctaatgattagcaactgaaaaacttgtttttcctttctcttaaccttttaaacctgcccagaaattgagggaaaaaaaggtttgtagtctgtcctcttgggggcagcaaagaggtgcattaaaaatgtagcaattaagtttctatttaaaaggccagcaattcacatcttgctcatccttttacctggaatcttctccatttttcaactggttaatgctggcttatccttcaggactcagctcagacatcaccgcagatagaagtgactcatattcatgaatcacccccacttctcactcccttctgcaaaagtggggctttgctttattgtcctcygtattgccagccccctcatatcaagtgctccacaaacacatgctgacttgcactgaattc

SEQ ID NO: 233069 - DNA, 513 bp, Homo sapiens
ataaatacaaggcctgacacataacaagcatkaggtaagttatatttacttgaaaaagttaaaagaaaaccacataaaataacaacaatagccaatatttattgtatacttgctgggggtcaggcaccattctaaatgttttaaattctttttcctctttgatccttacgacatctccatcaggcaggttttgtgtttatcccattttacagatgagtaagctaagcagcagagaggtcacacagctagtaagtgactgagccagcatgcgaacccagagggtggaagtgggaatttttcagggcacataaactggttaatttctgtgaggggcaaagggagaaagctcagtccttgaaacacacaagacaccaaatggacactgaggtcctggtaaagcttcggccacccaggtgactttggttctcccctaccctgcctctccatcctgggctgactcaagcttacagaccctgcctaccctgagtttccaaagaaaactcccaaacccaa

SEQ ID NO: 233070 - DNA, 601 bp, Homo sapiens
gccttttagaatttaaattaagtgagataacatgggcaaattatcttacacaggtctcagcatttcagcatttagtaataacccgatgaatgttaacatgttattttactgaagatcaaaaagcattttttaaaacatgtcatggtatttctatgaaaatcgaaggttattgcaacaaatttattttatctgttcattagagcagagccagttgtctgtctagctaaaaacacactatttcaaagttactatatgcagctgaaagtaataaaactgtatttgctttttaaacatccataattttggctcactttttgtttgtgttttattttggcctctacatgtctaatattttctatgtaatttcatgttgtttgttgctgctgtattttactgtgtactttcctgagtatttattgttcagaattgatgaagtttctggaattagaatggaaactctctgaggtcttctgttcacttggttggtatcttattcatgagtcactggatgaattgaggcagggtaataattctggcagtggctgtcaatgtcaaaatagaatgctgagctgaactttayggtttaaaatgtgtatcctga

SEQ ID NO: 233071 - DNA, 457 bp, Homo sapiens
ttaggaattttgtagtatgtcacttaagaaataaaaataaaattctaagccaccaaatgattgaacagatctgctcttggccaaggggaccccagaaaaaatcttgaaaatggacttcatggcaatgagrtagatgggaggttgagcacacctcattataccccttcactcactaactactttgatgatttcttccctaaggactaaacagaaacaagcccttgcaagactccacacctggcttcaaccaaacctcattgctgcccctcccttttgcaatttttgacagaactgaccagcatttcttcctgataagagactaccaactgactacagagtggttctggtcagtctacagaggatgaacagtgagaatttttgtgtcctttgcttcacctttgaaatcagaggaccaaaaactccaccccaggattatgctaacactgccatcttttat

SEQ ID NO: 233072 - DNA, 576 bp, Homo sapiens
tcaattggctcctgtgtccctataatattactttttggagctctcttttactttctggcactacaagatgctccaggctcatttgacatattccctgcctcagtcctcaaatcagccatttttctaagtagcactggttcatttaactggcaaatggtattagaaactgagatttgcatgctagtaatcaggtcatcttatagattacataactgaagctcagagatgttaagggatttgttcaaggtccaaaggtgactactagcaaagctaacactggaatacaagtatcttgatgcctggatcactaaccctgccttacgccaccttgacttctcacattccagggcatgtaaatgagaaactatgtcctttgttcctgtagtckggacattccaagtatcctgcacttatgcatttgtatttacgcaggacttggaagccctgccatgaaagagaagatgaaagcaagagaaacacagttatcttaataacaacaaaagaaacaatgaggagccatttcctcaagcaagggtgaggcttaggttatacagaaaatatcaggtgtgttctttt

SEQ ID NO: 233073 - DNA, 316 bp, Homo sapiens
tcataaaacaatacccaatgtaagggtctcaaaagcaaaagttttctctgatttttctcctgccttcctgtctctcagtcctgtctctctccctcaaggctagccataaaagctagaatttgtattcctcaaggaaggtcatagaaaccagaaccccttttccctaaagctagccatcaaacctagaaatattagtctaatttccccctacctttctgtgtataaactggccataaacaaatgwtctgacttactttgtttgactgtaggtcataagacctccatttcagagagggtcctgccccatacccagagc

SEQ ID NO: 233074 - DNA, 618 bp, Homo sapiens
gattctgagtctttcaaccgctaatacatgtcttgactcaaagaaggtagggcttgctttctaaaactcttttgactattgggaactttttctactgagcatcttgcttcactgttgttcgacaaagaataatggcaaccaaaatgagtgactgaggcaaaggtctgaatcattgaattttgttaagccagcattaaagcatgtccaggaaaaataggaaccacagagacatctatggctgtatttcttttttcttttcttcctttctttttattgttgctattgtttaagaagggtcttgctctgtcacccaggctggcatgatgatggcttactacacttttaaacttctgggctcaagggatcctcctacctcagccttctgagtagttgggactacaggtgcatgccaccttgcccagctgatttttgtatttattgttgagatgaagttttaccacattgcccaggctggtctcaaactcctgggctcaagggatcctctcactccggtctcccaaagtgctgggattacaggtgtacaggtgtgagccaccatgccsagccctgtggttgtttttctgaagaagttttcaggaggtttagtacgtatacgtt

SEQ ID NO: 233075 - DNA, 488 bp, Homo sapiens
tggagaaataaattataaagttatgtatgagtactcaaggcttcataaaatattaaatcagcctaagaggtgaccagtgagtcaagcaactgatatttacatgctttatgtacacttaaaaaatcttagcataacatttaatcttgagctaatggaaaaggtattttgcaatgtcctctaaattattcccagaaccttgtttcttagtttataatacaagaatgttttatttgtccacaatttggagaatttggttcatatggtgctggcaagcccacccgtaaagaaaaagtaccatacaaatatatgctttacaatacctcaggcactgcaatccacaccttgagattcaccaccactaaatacttttaacacttaaaggtttaaacaagaaccctattagggggtttacaatttttagagcaagttctactaatgaattccacattgtgtaagcrcacacacacacacacacatacacacacaca

SEQ ID NO: 233076 - DNA, 551 bp, Homo sapiens
agcgtcttaattttgattttctgacagcccagtgaaatcaaccagggcttctgacatatagaactgtgagctaataagtgagtgttgttttaagctgctaaatttgtggtaatttatcacacagcaatacaaaactaatacacctccattcttccgagattgtcccttggcacttttttttttaaatagaaggtggttatcatatgaaattaatggttgatttaagtagactctttaaagrcagcttttctgtgtttacatctacaaacagtattcctctacgaaataatttatgacaaggctgaatagttttatgagcaataacatttatagtcatgttaaataaagatgcattaaaatataagaaccctgtagtgttctaaaatatattctaagtttcactcatgtagagcccatgttttatgtaggatattacaaaacttaagagaaatgttataatattctgcctctctgagaaagcctcagagagagagagagggcaatttggtggagagccatctatcctgtcaattttacctttgtttttcaat

SEQ ID NO: 233077 - DNA, 594 bp, Homo sapiens
caggctcgttctgtctgttgtgaagtgtgccaattactgagaagatgagttttgtacagagaaagggttatttacaaggcagccaagcaaggagataggagaaaagatctcaaatcaacctccctgaagatggagttttagggatatttatgggatacagaagcaaggtggtccaaggcatagtgaaaggtgtttgggggtaaggaaaaatgagtcaattggtgatctgcacaagcacagtcaagtttcatggctctccatgggatgcatgttcacaaaatggcatcattagcatgatctaagggtggagatttttrccctctgacatcaaagggtcacccatcagagattaatgcaggctagtcaaaaggtctcagccagctcgagctaaacaaaaatggactctaagttcccacaaaacaacttaagcaactgttactgtggtgacctatacaccagagatattacctataaggaagccagtgcaaggttagttatatattgcttagcttcatgacttttaggtctatgggttttaaaataaactaaaagcaagtgactaaaaaacaagggagaaaagttaacattggcggg

SEQ ID NO: 233078 - DNA, 594 bp, Homo sapiens
caggctcgttctgtctgttgtgaagtgtgccaattactgagaagatgagttttgtacagagaaagggttatttacaaggcagccaagcaaggagataggagaaaagatctcaaatcaacctccctgaagatggagttttagggatatttatgggatacagaagcaaggtggtccaaggcatagtgaaaggtgtttgggggtaaggaaaaatgagtcaattggtgatctgcacaagcacagtcaagtttcatggctctccatgggatgcatgttcacaaaatggcatcattagcatgatctaagggtggagatttttgccctctgacatcaaagggtcacccatcagagattaatgcaggcyagtcaaaaggtctcagccagctcgagctaaacaaaaatggactctaagttcccacaaaacaacttaagcaactgttactgtggtgacctatacaccagagatattacctataaggaagccagtgcaaggttagttatatattgcttagcttcatgacttttaggtctatgggttttaaaataaactaaaagcaagtgactaaaaaacaagggagaaaagttaacattggcggg

SEQ ID NO: 233079 - DNA, 564 bp, Homo sapiens
ggtggaagagaaactattcaagaattaaaacatttatttaattcagtcagatgtactcatgacttaagaaaactgacattaaccatgacattcaaaaacattggaacaatttttccaaagtggggaaaaacattctactgaaagatgacagaatgagagtaaatttaaatcccaatgcctttcagggtgcataggaggaaagataacatttctaaaagtgtgctttcaaagccttccataggagcatccatgagcaggaccagtgctcactgaagtcacatatatctaatcgtttatatctaaatgatttgggaccaggtcttccattattaatagacagaggccttatcagggaaagtagcaacagataaaacagaattcaaaacagacaggaaattattttttttaattaacaaagctacttccctcatcatgttycttctgtccagatctaccctaaggtctcatttgtaaggcagatcatgactgctcacaggtgagctgatcaggaagtttttttctacttcattaaagatggatgtgattagactcttaaagtagctt

SEQ ID NO: 233080 - DNA, 564 bp, Homo sapiens
tctgttatggaattatgactttattccacatgtttaccttttttttctagactaatgttgacaaaaagagtcaaactctgtaaaatattctttaaatatttctttaatattttctttaatattttctttaagatttattctgagccaaatgtgagtgaccatggcctgtgacacaaccctcaggaggtcctgagaacatgtatcaaaggtggctggggtacagcttggttttatacatttttaaggaggcatgagacatcaatsaaatacatttgagaaatgcattgatttggtccagaaaggtgggacaattcaaagcagggggcttccaggctgtaggtgaatttaaacattttctggtttacaattggttgagtttgtctaaagacctgttattaaaagaaaggaaacattcacattaagataaaaaactgtggttcttttgaagtctcatagtggctgcccttagagacaatagatgacaagtgtttcctattcagacctttaaaaggtgctagactcttagttaatctcttcaggattgggagggcctggaagaaaaag

SEQ ID NO: 233081 - DNA, 547 bp, Homo sapiens
catactggttctcaaaatataagtgtttggcaatctcacttctcttcatarttggcaacattttacctagtgctactaagaatttcctgaagctccatcaaagcaacactgaattgatagattttcctaaatacgttagattttattaattcagcaaacagcccaaatgctactttttatttattttatcaatttttaattgcagtgtgcttagcaatccctctcattaataatgtctccctaaaatctgggagacatgtttgcattttattttatatttttcataaaagcccactgagtccatggaagggtgtacatatatacaacatggctcagtcatgattttctgctttgtcagtattcttggccatgattaaataacaagtaaatgttattttaggagatattttggagattcagaaagtatccaaatgtgtacaaaggaacttaattttattcaatgcgttgtaagactcaaggtttataatactgaagagtctggaaatattcatgtagactggctttgcttgttctggacacctaaagt

SEQ ID NO: 233082 - DNA, 560 bp, Homo sapiens
gatctgtctagggctgtcaatggagtgttgaagtcccccastattttttattattattattattattattttactttaagttctgggatacacgtgcagaacgtgcaggtttgttatgtaggtatacgtgtgccatgctggcttgctgcatctattgacccattctctatgttccctcctcttgccctcacctaccaacaggccaaggtgtgtgttgttcccctccctgtgacgatgcgttctcattggtcaactcctacttatgagtgagaacatgtagtgtttggttttctgttcctgtgttagtttgctgaggatgatggctttcaccttcatccatgtccctgcaaaggacatgatctcattcctttctgtggctgcatagtattccatggtgtatatgtaccacattttctttatccaatttatcattgatgggcatttgggttggttccatgtctttgctattgtaaatagtgatgcaataaacattcgtctttacagtagaatgatttatatttctttaggtatatatcttgtaatgggattgctgggtcaaa

SEQ ID NO: 233083 - DNA, 559 bp, Homo sapiens
ctttgcatgcattatcaattctcttactaagtcagaattttgctttgacttacagaaagctcacatctgcttttagttgctttaattctgcttttgtctctgcccgaactaagtcttagagaacttcctactgcaattggaagagctaaactttaggacaagtttgtgtgtgtctgccttcttgctgttatagctgaaaaggtcttggttgccttactgaggtgtcagaaactgaagatccaatttctacttaatttccccagaatggtctgaccagaaatggttatggcctcaaagaaccacagaggggcggcaattatccattttggtgacacagaagctccaattytcttaatataaaggaggtggagtggaatgtgaggtgggttacaatggtatttagcacagtggaggctggctaattgctcaccaaacccattttctcttcttcatgggaacatatcaatccacatttcccagccatctttgtaggtaagtgtggccatataactgagttctagccaacaaaatctaaactgacttgatatggactattacc

SEQ ID NO: 233084 - DNA, 559 bp, Homo sapiens
ctttgcatgcattatcaattctcttactaagtcagaattttgctttgacttacagaaagctcacatctgcttttagttgctttaattctgcttttgtctctgcccgaactaagtcttagagaacttcctactgcaattggaagagctaaactttaggacaagtttgtgtgtgtctgccttcttgctgttatagctgaaaaggtcttggttgccttactgaggtgtcagaaactgaagatccaatttctacttaatttccccagaatggtctgaccagaaatggttatggcctcaaagaaccacagaggggcggcaattatccattttggtgacacagaagctccaattctyttaatataaaggaggtggagtggaatgtgaggtgggttacaatggtatttagcacagtggaggctggctaattgctcaccaaacccattttctcttcttcatgggaacatatcaatccacatttcccagccatctttgtaggtaagtgtggccatataactgagttctagccaacaaaatctaaactgacttgatatggactattacc

SEQ ID NO: 233085 - DNA, 546 bp, Homo sapiens
ataaatgacgattaatgggcagaaaccaatgcttcttcttttttttcgtttttctttttttttttttttttgagacrgagtctcactcttgtcgcccaggctggagtgcagtggcttgacctcaggccactgcaacctctgcctcccaggttcaagagattctcctgcctcagcctcccaagcagctgggattacaggcaccccccaacatgcccggctaattttttgtattttcaatagagacagagtttcgccatgttgggcaggctgttctcaaactgccgacctcaggtgatccacctgcctcggcctcccaaagtgctggtattacaggtgtgagccatcatgcccggtcaatgcttctaattaatagcaggaaaggtgtcataaaattctgtccaaatgacatacttatagaaaggaaactaatatagctaataaggtagtattgtttaaattttggatttgttttatgatgtcatgcttcagcacaataaaccagcaattgtcttgataagaatgaatatggacaaatttctacacttc

SEQ ID NO: 233086 - DNA, 546 bp, Homo sapiens
ataaatgacgattaatgggcagaaaccaatgcttcttcttttttttcgtttttctttttttttttttttttgagacagagtctcactcttgtcgcccaggctggagtgcagtggcttgacctcaggccactgcaacctctgcctcccaggttcaagagattctcctgcctcagcctcccaagyagctgggattacaggcaccccccaacatgcccggctaattttttgtattttcaatagagacagagtttcgccatgttgggcaggctgttctcaaactgccgacctcaggtgatccacctgcctcggcctcccaaagtgctggtattacaggtgtgagccatcatgcccggtcaatgcttctaattaatagcaggaaaggtgtcataaaattctgtccaaatgacatacttatagaaaggaaactaatatagctaataaggtagtattgtttaaattttggatttgttttatgatgtcatgcttcagcacaataaaccagcaattgtcttgataagaatgaatatggacaaatttctacacttc

SEQ ID NO: 233087 - DNA, 621 bp, Homo sapiens
tcctactcaccaaactacaggagcaaaagagctgtaacactggtactaaagaaaataataacataaacctctgagccatcaaaatcttcctgaactcaggattacaaatctagtagatttgtaatttactgtaagactgtgggattgagatggtattacatgttgtgattttacatatggtgaagtggaatcactgaaagtgtgctacagaaactgagttaatgcgtatatattgcctgtcttgaatcttttaagaagaaaaaaaatagttgatggatagtttgatacacagttcttatcacttgatatacagttttttaaattgttgagatatactttacrtacataatttatttagtataaaatgggaaacattacacaaccttccacttaattttattcatgtttaaacaacaaaggaagatctaaatatcttggaagaatggaagcaactagtggattcagtggagtgtatttagcatgagaaaatagaaaatgatggtataggaataaaatactttttaagagacttcaacattgggattttttttaaagaagagttggttgataacacaataatttttgtcttttttgttgtaaaaatttaagtataacactgtt

SEQ ID NO: 233088 - DNA, 551 bp, Homo sapiens
aagaatggaagcaactagtggattcagtggagtgtatttagcrtgagaaaatagaaaatgatggtataggaataaaatactttttaagagacttcaacattgggattttttttaaagaagagttggttgataacacaataatttttgtcttttttgttgtaaaaatttaagtataacactgttaattagaataaggagaaacatactttctttagtttttatgtaactatctttttaaattaagaaaacaaaatatttcattaggtgcacaccagttgccaggtaagcatttaattgtttttttcctggggaatcaaaaataaatcaaacatggttcttattttaaaatctcttttaaatacatgatggattttagttctaaaagttttatcagtagtcataaaaatgtgtaacatattgatatagtttggctgtgttcccacctaaatctctcctggaatttaggctcccaccattcccactgttgtgggaaggacccagtgggaggtaattgaatcatacgggcaggtctttcccatgctattctcatg

SEQ ID NO: 233089 - DNA, 543 bp, Homo sapiens
catgtgtttatccttagaccaatagagcactatttgttttagtagcttcacaataagtctgtgaatcagaaggcagaaatcctctaattctgcctttgtgtttttaaatgtcaagattgattcttttggatcctttgtatttctgtatcaatattagaatgaacttatcaattttgtctttaaaagcctcctgggaytttggctatgaatgcattgaatttatgcatcaatgtaaggagaaagaatatgtaaaaatattgagccctgcaatccatgaacatgacatatctctcctgtctttatatcttatttcatttatgttagaaaacgttttgtacttttcagaatagagatattgaacactctttagatatattcttagtgattttatgtttttggtactataatagtgttattttagttttatataccaaatgtttattgattaaatattgaaataaaattaattttatgttaatcttgtatcttaaagatttcctaattttattgttattttgtatatcccaaatggttttccaatac

SEQ ID NO: 233090 - DNA, 534 bp, Homo sapiens
ctcggctatagtgaataatgcttctatgaacatagctgttcaaatatctcttgagatcctgctttcactttttgatatatacccagtagtggcatactagatcatatggtaattctwcttttagttttttgaagaatgttcataatttttcccacaatgattgtgacactttacaatctcaccaacaacgcacaaaaattccaatttctacccatcttcgacaaaacttgtgagaaaagagtttctatatttacttgcttatttgtttacagtagccatccaaatggctaggaggtgatatctcattgtgggtttgatttgcaattctttgatgaatagtgatgttgagcatttttttcatatgcttgttgaccatttttatatcacttttgaagaaatgtctattcaagtcatttgcttatttttaaattatttgattttttgtttgtttttgtgttatgaggtctttatatgttctgaatactaacctcttatcagataaatgatttgaaaatattttcttacattctgtag

SEQ ID NO: 233091 - DNA, 380 bp, Homo sapiens
aatttgctttattgcttattgcataaaaatgttttcagagtaacaatattaatactattttttataattattgaaaataaatagaaattattatttgactatacaaataattgtaaatgtttgccccaggtttgggattttgttgttgagcttctctgatagtttttatgtgggggtttgggaagatctaaagagtatactgtcaccttcattgccrttgacacagaatgctataattttttttgatcttctatagcttcttgaattcaaagattagtatatttccttgtttacaacatacatatttaagaatctaaaatttcctccatgtactgctttagctgtattatattccttttgatatttaatacttttataat

SEQ ID NO: 233092 - DNA, 642 bp, Homo sapiens
tctgatagtttttatgtgggggtttgggaagatctaaagagtatactgtcaccttcattgccattgacacagaatgctataattttttttgatcttctatagcttcttgaattcaaagattagtatatttccttgtttacaacatacatatttaagaatctaaaatttcctccatgtactgctttagctgtattatattccttttgatatttaatacttttataattgctgtcttctagatatcacattgtttaggcctgttttctttgatcctagtattatgtatttatacattttacttacaaattataggatgctttaaaacttatytattttccacacatggtagtgtcttatagttttattgcattgtaatcagagtatgttatctgtaatatttctatctctgagaaggttgtattttttcatttgtgtggtatattatggttagttattaaatatgtcacacgttttaaatgtcaccattgtcagggtacagtgtttgatgtaatttgttggagctactttactgattattttacttaagggtattttgttttctagtaatattgtacataggtgactaaaacaaatcattttctattcaataaaagtaagcaaatgtaaaatacaaaaatgaat

SEQ ID NO: 233093 - DNA, 594 bp, Homo sapiens
aattatttattaaatgaacaaaacacttgcatttttgaatatgcatctcaatctaagtagctctccaatattagactaaacagaatcaaactactgatcccatatacttacaggttgaactatgaaatttgtsaaggcttcaaaattgtgagctttatttaaagtttgaataaataataaaagtgaacttcacttaattggtgttattattattcatgttccttattatttgattttggtaaattaattgcctactatgttttattcacatggttaggtgttggaatatacagatgaataagacacagtctctgccacagtgtggtgagcattgtcactacttatggctatggaatatctgaatctcttttgtagagttggctatattttactatatggattttattggtagtaagagaccattccctgtcataggaggttaatataccagattcttgctttttgagacttcttataacagactcaggcatatgatctactttctgcccttcagtgacattggtactggctttgccacaaaagctcacaccagaaaaatggaagcgtggatctctgacaaacaggagtaggatt

SEQ ID NO: 233094 - DNA, 476 bp, Homo sapiens
ctgacaatctgtaattcaatattggactacatttcaaggataaaggaggaggcattatttatttgctatcaagcaaactggatgtaaatggaaaactgtcgagtatcttttatttcctgcaagttgcgtggcagctcaactatcctaagttttgcccataggaaacctctgtagatgattgtttgtgagtggagtaagtcctgaatatgtaggaaaaaaatcactgtgatatttcacgtagaagatgtttagttaatattatatgaaactgttgaataagtgrgctcaaaaaattcattttcttttctatatttttaaagacagcttcttcatccttaatgaccaaatagctgaggaaaatactgttgcaaattttcaatgattgtaagcctaacccaagcaggtttcaaacctattttgacataattcagatatttgttaggaatggatgttacagactcagaattttatcattg

SEQ ID NO: 233095 - DNA, 462 bp, Homo sapiens
tactaaaaacacaaaaaattagctgggcatggtgccaggcrccagtaatcccagctactcaggaggctgaggcaggagaatcacttgaacctgggaggtggaggttgcagtgaactgagatcacaccattgcactctagcccaggcaacagtgcaagacttcgtctcaaaaaaataaataaataaaataaataaataaataaaatagaaatcataccaagcatcttctctgaccacaatggaataaaactttacaactaaataacaaaaggaaacttggaaaatacataaacacatggaaattaaacaaccaatgagtcaatgaagaaattaggaaggaaatttaaaaatttcttgaaacaaattaaaatggaaatatacaaaaacatatgggatacagcaaaagaagtactaagaggaaagtttatagcaataaacacctatatcgaaaaagtagaaagac

SEQ ID NO: 233096 - DNA, 462 bp, Homo sapiens
tactaaaaacacaaaaaattagctgggcatggtgccaggcaccagtaatcccagctactcaggaggctgaggcaggagaatcacttgaacctgggaggtggaggttgcagtgaactgagatcacrccattgcactctagcccaggcaacagtgcaagacttcgtctcaaaaaaataaataaataaaataaataaataaataaaatagaaatcataccaagcatcttctctgaccacaatggaataaaactttacaactaaataacaaaaggaaacttggaaaatacataaacacatggaaattaaacaaccaatgagtcaatgaagaaattaggaaggaaatttaaaaatttcttgaaacaaattaaaatggaaatatacaaaaacatatgggatacagcaaaagaagtactaagaggaaagtttatagcaataaacacctatatcgaaaaagtagaaagac

SEQ ID NO: 233097 - DNA, 462 bp, Homo sapiens
tactaaaaacacaaaaaattagctgggcatggtgccaggcaccagtaatcccagctactcaggaggctgaggcaggagaatcacttgaacctgggaggtggaggttgcagtgaactgagatcacaccattgcactctagcccaggcaacagtgcaagacttcgtctcaaaaaaataaataaataaaataaataaataaataaaatagaaatcataccaagcatcttctctgaccacaatggaataaaactttacaactaaataacaaaaggaamcttggaaaatacataaacacatggaaattaaacaaccaatgagtcaatgaagaaattaggaaggaaatttaaaaatttcttgaaacaaattaaaatggaaatatacaaaaacatatgggatacagcaaaagaagtactaagaggaaagtttatagcaataaacacctatatcgaaaaagtagaaagac

SEQ ID NO: 233098 - DNA, 565 bp, Homo sapiens
ggtttgctgagttacttggatctgcagcaatagtttttaaccagggacaatgttggttctctaggaaacgtttggcaatgtttggaggtatttttggttgtctttgcttagagttcagataggagaggatattacttgaaattagttaatagaggctagggatgctgcyaaaagttctacaatgtccacgacaggcccccacaacaaagaattatccaatttacaattcaatagtgctaagtgccgaggttgagacatttgcattttgagttgaatttttttccaccaaatattggaaataaaatagtttttctgctccattttcttcctgcgtcccttcttagactctgcttacatgatggtaaactgcttgcatgatgttgtctcacaggtcactgagactctgtttttaatttctgtcgacctgccttcaagttcataacattttcttttgcagtttcgaatctcctgttaagatcatttagcaaaattttcatttcagatattatactttttaattctgctattttcttcttctttttaaaaatattctttgctggtagct

SEQ ID NO: 233099 - DNA, 433 bp, Homo sapiens
agttgtagttggatgttggttggggctttatttatcttgtctgtgctaaggtaaataaagatgcatggttggcagttgatgccagctgtcatctgctgtacacagcctctccagcaggggtagtctgggggtagtcagacttcttacatgacatatggcttcatttcaagagaaccaggcagaagtctcatgrccttttctgatctagcttcagaagtcatacaacatctcctctactgtactcaattagttgaagcagtctcaagtggtccagattcaaggtggggtgggaggaattagactccacttcttgatgagggcaatggccagttgacagtatagaagaacatgtgggatgggaacacgtgttgtggccatctttggaaaaaacaatcaacatagctcccaaattgacttattttatatacacaat

SEQ ID NO: 233100 - DNA, 462 bp, Homo sapiens
gttagttcagctacgcatgggaatgaacaaggacagcttggaagttagaagcaggatggatggagttggttaggtcagatctctgtcactgtaataattttctcagttataactgcaacagcagttccaagatcaggaaattgaagtttagagaggtaaaaagttgcttaaaataggggtactggaactgagatttgaacccagattagactgactctagacctggcactcttttactgccctcagtagcatctgttaaagacagctaattccagttacctttgtgggagaaaagtgtttgtccaaagaggaataattattcctgtcagttcttagattagttttgatttaactctgctgctgagctgagtaccttccttcactagwtatataaataggttgaccataaaatgtatcatccaaattgagacactcaagagtgaaaaggggtgcttaattttg

SEQ ID NO: 233101 - DNA, 580 bp, Homo sapiens
gggctggtgcagtctctttcacagagtaggtgctccatacatagttattggatgaagctgagctcagacttcagtttcgttgtcctcgctgttttattttttgttttctggtgtacagagccatgcaaagaagtctcatggacaactggtgcatgccctttctccttacccactctgcccttcatgaacctagagtcagagactccaaagctggggccagcatgttctcccccatctctggactgccctcttgggacccacttcccacagcctcctccatccccctccacatctgattcatggatgctcctgctctgyagggctttggttgtggctgcttctccactgctctgctgcttgctcagccagagccctgccaagcctcctcctccacacctgatggcgtacctggctgggttctcagcctcacttgggattgctttctttcgttccaagttgggaccaacttgtcctttgaaagaacctccatggtgccaggtctatcatcagtttgcctcccaactccttctctgtcccttggtctgctccctgggtgaattctcctagagcaacgttgatg

SEQ ID NO: 233102 - DNA, 580 bp, Homo sapiens
gggctggtgcagtctctttcacagagtaggtgctccatacatagttattggatgaagctgagctcagacttcagtttcgttgtcctcgctgttttattttttgttttctggtgtacagagccatgcaaagaagtctcatggacaactggtgcatgccctttctccttacccactctgcccttcatgaacctagagtcagagactccaaagctggggccagcatgttctcccccatctctggactgccctcttgggacccacttcccacagcctcctccatccccctccacatctgattcatggatgctcctgctctgcagggctttggttgtggctgcttctccactgctctgctgcttgctcagccagagccctgccaagcctcctcctccacacctgatggcgtacctggctgggttctcagcctcacttgggattgctttctttcgttccaagttgggaccaacttgtcctttgaaagaaccyccatggtgccaggtctatcatcagtttgcctcccaactccttctctgtcccttggtctgctccctgggtgaattctcctagagcaacgttgatg

SEQ ID NO: 233103 - DNA, 501 bp, Homo sapiens
tgtgatccttctgggcaactgtcccatcacgcaaatctcccaggctcacaatggatggtaagactagcattgccattgtccccattgaacagatgagggaaggcagagaggtcactggaatggcaagtcaggagatatgcatttgagattctgctccatcatctactagatgtgggatatctgtctctgaaatgagaatatctatctcccaacrgtactgatgggatgaaatgaagatgtgtattagaggactgcataagacccatcactccatgacatatttattggacccatgctatgtagctgtctataaagaatagctactgtttgctgagtctgtagggtatatagggtatcatacacaattcttggctctttctgtatgaaatttaatgtaatccttacaataacctcatggagttggttattataatccccattttatagatgaggagactgtgatttgaggagatttgcccaagtttgtatccttatactgat

SEQ ID NO: 233104 - DNA, 571 bp, Homo sapiens
tctcattcggtcatccaggctggagggtagtgatgcgatcayagctcacagcagcctcgacctcctgggctcaggtgatccttctgcctcagcctgccaaataactgggactataggcatatgccactacacccggctattttttgtatttttgtagagatggggtttcgccagttgcgcaggctgctctcaaactccggggctcaagcaatcttgcctcagtttcccaaggtgctgggattacaggcattagccagtgtgcctggcctatgagccaccatgcccagcccaagaattcttctaataacaccccacacaaaaagaaagggtcttataaatctgcacctagtgagatcatacaacttttgcacagctatataaaaccttttagagttagcctacatttaattggaggagggctctgcttctgtcccctctcctgggggtactgggtctggggccttttatgatgttacttcccactccgaccttcctggaatctggtttagaacagcgtgtaccaggttttggagatagaagcactgtcactctcagctcccatggcagtgcc

SEQ ID NO: 233105 - DNA, 571 bp, Homo sapiens
tctcattcggtcatccaggctggagggtagtgatgcgatcatagctcacagcagcctcgacctcctgggctcaggtgatccttctgcctcagcctgccaaataactgggactataggcatatgccactacacccggmtattttttgtatttttgtagagatggggtttcgccagttgcgcaggctgctctcaaactccggggctcaagcaatcttgcctcagtttcccaaggtgctgggattacaggcattagccagtgtgcctggcctatgagccaccatgcccagcccaagaattcttctaataacaccccacacaaaaagaaagggtcttataaatctgcacctagtgagatcatacaacttttgcacagctatataaaaccttttagagttagcctacatttaattggaggagggctctgcttctgtcccctctcctgggggtactgggtctggggccttttatgatgttacttcccactccgaccttcctggaatctggtttagaacagcgtgtaccaggttttggagatagaagcactgtcactctcagctcccatggcagtgcc

SEQ ID NO: 233106 - DNA, 537 bp, Homo sapiens
cggtcatccaggctggagggtagtgatgcgatcatagctcacagcagcctcgacctcctgggctcaggtgatccttctgcctcagcctgccaaataactgggactataggcatatgccactacacccggctattttttgtatttttgtagagatggggtttcgccagttgcgcaggctgctctcaaactccggggctcaagcaatcttgcctcagtttcccaaggtgctgggattacaggcattagccagtgtgcctggcctatgagccaccatgcccagcccaagaattcttctaataacaccccacacaaaaagaaagggtcttataaatctrcacctagtgagatcatacaacttttgcacagctatataaaaccttttagagttagcctacatttaattggaggagggctctgcttctgtcccctctcctgggggtactgggtctggggccttttatgatgttacttcccactccgaccttcctggaatctggtttagaacagcgtgtaccaggttttggagatagaagcact

SEQ ID NO: 233107 - DNA, 537 bp, Homo sapiens
cggtcatccaggctggagggtagtgatgcgatcatagctcacagcagcctcgacctcctgggctcaggtgatccttctgcctcagcctgccaaataactgggactataggcatatgccactacacccggctattttttgtatttttgtagagatggggtttcgccagttgcgcaggctgctctcaaactccggggctcaagcaatcttgcctcagtttcccaaggtgctgggattacaggcattagccagtgtgcctggcctatgagccaccatgcccagcccaagaattcttctaataacaccccacacaaaaagaaagggtcttataaatctgcacctagtgagatcatacaacttttgcacagctatataaaaccttttagagttagcctacatttaattggaggagggctctgctyctgtcccctctcctgggggtactgggtctggggccttttatgatgttacttcccactccgaccttcctggaatctggtttagaacagcgtgtaccaggttttggagatagaagcact

SEQ ID NO: 233108 - DNA, 537 bp, Homo sapiens
cggtcatccaggctggagggtagtgatgcgatcatagctcacagcagcctcgacctcctgggctcaggtgatccttctgcctcagcctgccaaataactgggactataggcatatgccactacacccggctattttttgtatttttgtagagatggggtttcgccagttgcgcaggctgctctcaaactccggggctcaagcaatcttgcctcagtttcccaaggtgctgggattacaggcattagccagtgtgcctggcctatgagccaccatgcccagcccaagaattcttctaataacaccccacacaaaaagaaagggtcttataaatctgcacctagtgagatcatacaacttttgcacagctatataaaaccttttagagttagcctacatttaattggaggagggctctgcttctgtcccctctcctgggggtactgggtctggggccttytatgatgttacttcccactccgaccttcctggaatctggtttagaacagcgtgtaccaggttttggagatagaagcact

SEQ ID NO: 233109 - DNA, 543 bp, Homo sapiens
ggaattctgatgaactctgaaatgcctcacttcctgaatatctacctcgagattggatacatacatgtagagagtgatttatctattcatttatggatggatgctgagatggagtctcgccctgtcacccaggctggagtgcagtggcgtgatctcggctcactgcaacctctgcctcctgggttcaaaccattctgcctctgcctcccaagtagctgggattacaggcgcccacaccacgcccagctaatttctgtatttttagtagcaacagggtttcaccatgttggtcaggccggtctcaaactcctgacctcgtgatccacccacctcrgcctcccaaagtgctgggatttcaggcatgagccaccacaccgggcctacctgagatttattatgcatgccactgagctactcaactgcaaactccttgaggatgggcacttcatcttaactgtttcatacacccccacacacgaacctgcacttaggatgatgcctttgcccttggtagactccctgagtccccaagtgtcagagctg

SEQ ID NO: 233110 - DNA, 291 bp, Homo sapiens
ctaactttaatagcctgaattttgtggggtttttttgtttctttttaaagtttctttgttttctaagtgatgtggtcttcctttccaragtaacaaaattatgaggtagttcattgaccctaaagaggtccccagtgtcttcacatccctttacctactgagacttcatctttcttttccttacatctaaatagttaaattatattatttgttcctaaacctacctacacataagaatcagctagagaaatttttgaaatatagagttccagatttaaccccaagatattt

SEQ ID NO: 233111 - DNA, 610 bp, Homo sapiens
cataaattaagtaactggttaggtttttgtgtttacctcgatsttcagcaagaacagaatcaaatctgtggtctatgagtaattacctaagttcccattattttgtagctcagtaccttgtccactttggtcaccatcagaaaatttttatttctgtgttttcttgtagtgtcttcgtaagttccatgaaggcaaggaccgtttctgtcttttatactttttatactgtctcccctagcacaaggaagtcagtaaataattgctacaagaattaataaattaaagcaggtatgaataagtgaatgaacaaaattcagtctaggtttagattttggaagaagggtacttctggtgataattccaggaggtggcagtagcagcagcttgatggagaggaggcaacagtcagtgagactgaaaccagggagtgcgcaggccaagatttggtattggttttcctcctggggtttcaggtttttcaagatgatgatgggacataggatgaaagtgatagtgagtcaatgtcaaaatcgtcagtgacaatgggtccatagaaaacagcaaccaggaaagacagagggttacatcagcctcatagaaaaggagatct

SEQ ID NO: 233112 - DNA, 610 bp, Homo sapiens
cataaattaagtaactggttaggtttttgtgtttacctcgatgttcagcaagaacagaatcaaatctgtggtctatgagtaattayctaagttcccattattttgtagctcagtaccttgtccactttggtcaccatcagaaaatttttatttctgtgttttcttgtagtgtcttcgtaagttccatgaaggcaaggaccgtttctgtcttttatactttttatactgtctcccctagcacaaggaagtcagtaaataattgctacaagaattaataaattaaagcaggtatgaataagtgaatgaacaaaattcagtctaggtttagattttggaagaagggtacttctggtgataattccaggaggtggcagtagcagcagcttgatggagaggaggcaacagtcagtgagactgaaaccagggagtgcgcaggccaagatttggtattggttttcctcctggggtttcaggtttttcaagatgatgatgggacataggatgaaagtgatagtgagtcaatgtcaaaatcgtcagtgacaatgggtccatagaaaacagcaaccaggaaagacagagggttacatcagcctcatagaaaaggagatct

SEQ ID NO: 233113 - DNA, 610 bp, Homo sapiens
cataaattaagtaactggttaggtttttgtgtttacctcgatgttcagcaagaacagaatcaaatctgtggtctatgagtaattacctaagttcccattattttgtagctcagtaccttgtccactttggtcaccatcagaaaatttttatttctgtgttttcttgtagtgtcttcgtaagttccatgaaggcaaggaccgtttctgtcttttatactttttatactgtctcccctagcacaaggaagtcagtaaataattgctacaagaattaataaattaaagcaggtatgaataagtgaatgaacaaaattcagtctaggtttagattttggaagaagggtacttctggtgataattccaggaggtggcagtagcagcagcttgatggagaggaggcracagtcagtgagactgaaaccagggagtgcgcaggccaagatttggtattggttttcctcctggggtttcaggtttttcaagatgatgatgggacataggatgaaagtgatagtgagtcaatgtcaaaatcgtcagtgacaatgggtccatagaaaacagcaaccaggaaagacagagggttacatcagcctcatagaaaaggagatct

SEQ ID NO: 233114 - DNA, 489 bp, Homo sapiens
tggactacagaaaatcagactgtaaagttagacaacaaaatgaatgatataaacatgaaaacaaaaagatagaggacatctgtttccagccatgatgagataattggaagagagcttgtcctgttattgttaataactgggcaagactgggtgtggtggctcatgtctgtaatcccaccactttgggaaactgagcccaggagttcaagaccagcctgggcaaaatgaagaaaccccatctctacaaaaattagccgagtgtggtggcatgcgcctggagtcccagctactctggaggctgaggcgggaggattgctcgagcctgggaggttgaggctgcagtgagtcatgattgtgctactgcacttaagcctgggcaacagagtgagaccttgtctcaaaaaaaaaaaaaaaaaaaaaagaactggacaaartgtgtcaaacaatgattttgaggcaccggacaagagacagtgaagaattatgatc

SEQ ID NO: 233115 - DNA, 497 bp, Homo sapiens
ccatggccatagcttgaaagagcccaccaaagcattacaattccaggcttctgctgccacatccttgtggaaaagcagactgacaggttcgtgccccacccctaccccttccaggaggcccaggtgtttcctacccatcagatatgaattgggctgaggtggtgtagtgacgtagcctstctgtccctctcctgaggctgccacttctgaggacaccccttgcccttgctgcttaacccagaccttttggcctcagttgtccagtgtaggaagagagatcatgtcctgtacaaacttaacatgcctgataacactgcccacttgactggaaggatcagatgtccctactgcctctagagggaccctagcacccttgtattccttggttttgtcgcccacccttgtgggatcacatagaggggaagggaggcaccaaagggaagcattgcctccagattagagtcagagggccccctgtctgggggtactgtggcagc

SEQ ID NO: 233116 - DNA, 577 bp, Homo sapiens
atctgatactacatcaaaactgtacaacttgtaagattcataaaagtcaattacaatgtggaaactgaaagtgtatcagtgaacttttcatactgttacattaaaatctgttggtctaactttgaatgaattgtttattcacacatgatcttgtaacatcttgcattggtcactgagaaaatattcattcttagttatacagatcttccaaatgtggacacatttcattgtatatttaaaaccacattcattaatacccaccaatctcatcagaaaagtcttcggaagctgtcaagcccacagtggcaaataagcccacagtggcaaataggagttctcctaaactataatttttacttgaaaacttaatggcaaaaaacattgtcagttgtttttccttgaartgacagacttactccattcattctcagaaaaacacctgccaaatactgaatcaagtctgcataatcagatttgccctttcaagtaaaaatggtatctcatgaaataaatgcagttagttcagatctcaactaaaacaagagcacaagtacttttccttgagacaaccatcata

SEQ ID NO: 233117 - DNA, 547 bp, Homo sapiens
ccactcccattacatgcagccaggcagctgcccctccctgctccaagcggaacactggcctcttctctggcaaggctgtgccatatacatgytcaacttggtgaccttggcaaccccagactcagctgaggatggagggaggtaacagcctggaaagagcatgggtgagtggatgctgacttccaggaaaattcctctctggggaaatggaccagctcaagaggaaaaagccacagagacttccattctggggcttcccaataacctttcttttcttttttctttttttattaatagagacaggttctcgctgtgttgcctagactggccttgaactcctgggctcaagcgatccccctgcctttgcctcctaaagtgctgggatcacaggtgtgagccaccttgcccagcccccaataacctttcatatgacaagttgctaagcctcacctagaatcaaggacatagaaatcaaagcaacagtgagatataatgtcccataaaattggaaaaagttaatggattttctaaaaccaaatggtggtaa

SEQ ID NO: 233118 - DNA, 615 bp, Homo sapiens
  misc_feature (1)...(615): n = A,T,C or G
caggacggaggtggggagccaggacaacttgccttcacratactccctgatggcatggttccatggaaatctgatgaatagacatcctttcattcaaccttttgatgaagtggaaaaaaatggcaaatacaggccaagctgaaaataataaaacaaaaggatgtaagaaagctaaagaaacatgcatggtgagccatttggaataaacactctgctgctgacacaccctgggattctggaaaaagacagttaacacagggaggcggacacaagcttcttgtcaggctaaggttaaaaggtctgccaaggtaacagaagctggctgataagggaaactgcatcttctatcaaaggcctctgcaaaaagaaagaacttcaggagtgttaataaagttncaaacgagcaaactcatgggcgcaccatttcgtgatctgagtttattttgggagagcaagagatgaaaaaggggctacatatggttgaccagagcagagggaggggtgctggcctgtttttaagccatgaaagccttggttaatagcagagagaggagactggggagaatcttatcaaggagttcctgcctaccatgcccacatgcccacccttccata

SEQ ID NO: 233119 - DNA, 615 bp, Homo sapiens
  misc_feature (1)...(615): n = A,T,C or G
caggacggaggtggggagccaggacaacttgccttcacgatactccctratggcatggttccatggaaatctgatgaatagacatcctttcattcaaccttttgatgaagtggaaaaaaatggcaaatacaggccaagctgaaaataataaaacaaaaggatgtaagaaagctaaagaaacatgcatggtgagccatttggaataaacactctgctgctgacacaccctgggattctggaaaaagacagttaacacagggaggcggacacaagcttcttgtcaggctaaggttaaaaggtctgccaaggtaacagaagctggctgataagggaaactgcatcttctatcaaaggcctctgcaaaaagaaagaacttcaggagtgttaataaagttncaaacgagcaaactcatgggcgcaccatttcgtgatctgagtttattttgggagagcaagagatgaaaaaggggctacatatggttgaccagagcagagggaggggtgctggcctgtttttaagccatgaaagccttggttaatagcagagagaggagactggggagaatcttatcaaggagttcctgcctaccatgcccacatgcccacccttccata

SEQ ID NO: 233120 - DNA, 615 bp, Homo sapiens
  misc_feature (1)...(615): n = A,T,C or G
caggacggaggtggggagccaggacaacttgccttcacgatactccctgatggcatggttccatggaaatctgatgaatagacatcctttcattcaaccttttgatgaagtggaaaaaaatggcaaatacaggccaagctgaaaataataaaacaaaaggatgtaagaaagctaaagaaacatgcatggtgagccatttggaataaacactctgctgctgacacaccctgggattctggaaaaagacagttaacacagggaggcggacacaagcttcttgtcaggytaaggttaaaaggtctgccaaggtaacagaagctggctgataagggaaactgcatcttctatcaaaggcctctgcaaaaagaaagaacttcaggagtgttaataaagttncaaacgagcaaactcatgggcgcaccatttcgtgatctgagtttattttgggagagcaagagatgaaaaaggggctacatatggttgaccagagcagagggaggggtgctggcctgtttttaagccatgaaagccttggttaatagcagagagaggagactggggagaatcttatcaaggagttcctgcctaccatgcccacatgcccacccttccata

SEQ ID NO: 233121 - DNA, 592 bp, Homo sapiens
gacttaaaaaccaggagaaaactggggggttcttgataaagcatcttagtaggatggtgagggtagaagccagggaagtgttggtgaggaagtgaagtcactgattacggactatgcttaaaagaatgtgggaatgaagggtggaagagagaaattagactgtagctagggagacataagcgatcagaggtagattctttctctcctgtgggagaatcttgcacgtatacacagcatgacgacagtgatggaagggctggcgaagcctcagggagactcttgraggtaaaccccatgaagggaggactttgtttcattcactgccgtgtccccagcacctggcacaatagcagacactcaatacatatttgtcaaatgtgggattttatcatttagaaactgcacctggctgtgagtaacaaaagtcagagaaaccgtgggtttcatttttctccccaggcagagtctggagctgggtcctccaagaggggtttggagcaccacaggtttcctcaagacccccaggctgccctgtgtttccctccttcatccccagcatatgcctgtcatctggtgacctccaaacacctgt

SEQ ID NO: 233122 - DNA, 406 bp, Homo sapiens
ttctacatagccaaagtgattgattcattggttaatgtgaaagttactgagtactgccagcaggttctaggaaatatatttgtgtgatattcatggatggggaggatcaatccacttccaagtgatttggattaattactggtattttcacctgtgtgggtagcaaayctcagaaaatcaagtatagatgacggcataggacaggccaggccccaggcaaaatgttgaagctcctctggagttccctcccatctccctcttttgttttccatatacctggtttatccagggccctggagatgctccaagaccccctacccaggtcttcctcccttgtcccagctatatttctccatattaccactcttctcaccgaggatttgcttacttaacacataataaatac

SEQ ID NO: 233123 - DNA, 374 bp, Homo sapiens
gcagatctcaatgctgcttatcaacaagccaggcaaaatctcatggctgttgctagtcagatgtttacacatttttactcctttaattctgaggacacaaacatgttggtactgggaaaaggagcagactgagggatgggaaagaacaagggaaacytagataaggacaaggggctcagctcctcccctcatcccttagaactttggtgccctttgcaaatgtaagcccacatccaggtggggtcaggttgtttgagcagaatgacctctaccttagcatttgtcttgttaggactctagcacagagcataaccaaggccacagatcactggatcatggagcaacattaaaaagacaaaaccttcagatttagt

SEQ ID NO: 233124 - DNA, 463 bp, Homo sapiens
tagtgcgaggttcaaggtcaggtggataaaaagatttttcttctctctgactgttgcaayaacacagttaaatccttcagttccctgcggaagaaaataaatgtcacacgggcctggaaagcacagaatccagtactgaaaaaggtggtggacatgctcacagagcaactgctggacattcagctggagaatgacacacccagggataagtttaaaatggtccaggacaggagggagcagacagtagtaggttggaggcaattattgatttcctgtagcaatataaatccgagagggccagaggcaaggacaggatatggcagcgagagcaagagcaggaggttggaagtgggacagggtggtggcacaggatttgtcaagaccagagctgatctctttccaagggggcagaacccctcaccctgcaggccaggatgtctcgtgagcgggaaggtgatggaca

SEQ ID NO: 233125 - DNA, 533 bp, Homo sapiens
aatggcaatgaacaagcttttcaaacactcagctattggttttgttgagttctccaatgtttttctcttctctacttcatttatttacacttttaatttctattctttgtttattttgagtagatggcttcttttttgagtttcttcaagtgaaatattaggttctcaatttgagattactcctttgtttcttttatctttctcaatatattcacactgacagcaatacatttccctctaaggactgctttagctacttctcataagttataatatgctgtgtttttgttttaattcaccttaaagtattttctgattttccttgtcattttcttcttgatcatttcatttttaaagagtgttttggaaaatatttttgtcttaaagaccatattgcctgatrttattaatttcaggccgggcactgtggctcacacctgtaatcccagcactttgagaggccgagattggaggattgcttgagcccaggagcaaggccagcctgggcaacaaatcaagaccctgtctctaga

SEQ ID NO: 233126 - DNA, 620 bp, Homo sapiens
  misc_feature (1)...(620): n = A,T,C or G
ttgaattactcctactgacattgctgttggttttccttgcagtagatgtttaggtttccatttcttnctccccttatcatttactaacttactgtaggttgaccatacctcaaaggctgtatggcaactgcatggaatcttaagcaagtttatggaaaattattgagcccactcttttcatgatcactgttctctgtgtgtcccgagggcactaactcagagtgtcctttgacccnttcatcagtgtgtcacccggccaattcgctgagctcactttctcctctgtctctctctccctctccctctccctgtctttctctttcattcttttctacctggccctggtctatcccaacataaaggcaataattcattacctcattaatggatctgtcctttttctgtttaaacagttccttatgttagccatgaaatgtagctggggytgtgtggtttctgattccccctggcttattctttactttttcctacttttccaggctcagcagggagctgctggatgagaaagagcctgaagtcttgcaggactcactggatagatgttattcgactccttcaggttatcttgaactgcctgacttangccagccctacagaag

SEQ ID NO: 233127 - DNA, 583 bp, Homo sapiens
aacaatcaaattgaatagcaaaaagttcacagtccattaggagtttctaacgtgtagcataattcatgaggattttaattgtgttgtagtggtgaattcgaaaaactggtttttctactgttgatctacagctcaacactagcagtagaattatacatttaaagattattcacagaacacggagtatgtcagataggggtcaaataattacagctcaaggaaataagccattaatggcattaatgatctttttttgcagtaccagaaggctggttacataatttatgaagttttggtatataaataaacaaggtgcataactttgycccactaacttgctacattcttgtatcttcaaaaaagaaagaaaggaagaaagaaagaaaattagtagtatatgttgaatatttccaaaagatttgtgaaaatacaaaatattttccactttgaagaatgaataaacaaagtgtgtattagtctgagagaaatagaacaatcctacaaggtaactcatcattgaatcagaaatatcaaagtttagtggggaatgttgttactgtgttacaccttccctatcccagaa

SEQ ID NO: 233128 - DNA, 565 bp, Homo sapiens
ttccaaatagactctaaatcacttgagatgcaactgacacagagtaggcattcaataatatttctagaatgagtgaatgaaggttaatgaatagtaatcattggggcaaaatattagagggacagaggagtgttgaaagagaatggggctgggtgcrgtggctcatgcctgtaatcctagcactttgggaggctgaggcaggtggatcatttgaggtcaggagttcgaggccagcctggccaacatagtgaaaccttgtctccactaaaaatacaaaagttagctggacattgtggctcacgcctgtaatcccagctacttgggggactgaggcacgagaatcacttgaaccctggaggcagaggttgtagtgagctgagattatgccactgcactccagcctggacaacagagtgataccctgtctcaacaacaacagcaacaacaacaaaaaaaaaaaaaaaaagaaagaaagaagatgggttttagaatggtgcaaaggtagctgggcatggtttcatgcacctgtggtcccagctacttgggaggctgaggcaggagccca

SEQ ID NO: 233129 - DNA, 556 bp, Homo sapiens
tcagggcacaatattttctccattgtataagaatattttgaaagctgattttttaaaatatagagcattttgaaagaaagtgatctttatactgataaacctctgagacatttaatggccaatatcagtttatcaattmtgctctccatgacgttaaaatgcaccctaacctcttcttcattgatataagcgttttctactaaacaaatttgatgacaatgtagcaggttacccaacatgacagaccacaggattaaactacacacctatcagcaaaattttaaaacaaaaaaaataaaaactagaagctgactaaaataactaaattgaaaattcactagagaagttcaaaagcagacctgaccaggcataataaagaatcaccaagcttgaagacaaatcacttgaaattgctgagtctgagaaacagaaagaaaaaagaatgaagaaagggaacagagccaaaaggacttatgggacaccatcaagaggacgagtatgaaagttcagaaggagaaaagagagagagaaaagcagaaatcatttggagaagcga

SEQ ID NO: 233130 - DNA, 429 bp, Homo sapiens
tgacctgtagcctgacttttgtatggcccgtgagctaagaatcgttttacctttttagatggtggtaaaaagataaatacaaaaggaagagagagagagagcgagaggagatgggatagggagaaaaagaaaatgtgtcagagactatatgaatctcaaagcctatctggcttattacagaaaacgtttgccaactcccatcctaggggactattgtcaggaagayagaaagaacctgggtctctgaatcaccatgtggagcagagcagttgtatcattcttgaaccactgaactctggactagtgtgacaggtgaaaatagattcccatcttatttaatctatcatattcaggctctccttgttacaagaaccatttatctaattaatcaactaactaaccttattagtttggacagtttttcagttg

SEQ ID NO: 233131 - DNA, 516 bp, Homo sapiens
gccaggatggtctcaatctcctgacctctttatccacctgcctcagcctcccaaagtgctgggattacaggcatgagccactgtgcccagcccatctttttcttaattctacatatttgttactgaaatatagtttcctagtcaattttaacaaacaaaattccaatcacagagtgcaatgaaatacctatgaggatccaggagcactctcaggtttatggactaactatgaatatgtcaagtactcattartggtatcctaaaaagtttgtagagaggcactgggaggtgaagaggagagggaagagaccatagtatgagtgttttacttcctttatacttagtgaaatatacttcatacaaatcatcctttggaactcatggaataccctgaaaattctactatctggaaagacatacatggttaattttctttgctctgacaatcaaaactgtgcctacctgaggtcaacagtatactaggagtgtgaaaagggaaattttggaatatggaac

SEQ ID NO: 233132 - DNA, 633 bp, Homo sapiens
taaatgaaacagagaatagaaaacagtagagagaaccaatgaaaccaaaagttgattttttaaaatgatcaacaaaattgacaagccttagactgattaagacaaaggagaatcacacttttaccactattaacattgcactggatgtcctagctagagcaattatgcaagaaaaagaaatataaggcatccaaattggggaagtaaaactatcattatttgcagatgatacaatttttttaatctacaaaatctcaaatgatcaacaaaaaactattcgagctaataaacgaattcagcaaatttgcagaagatttagaagccttaggtctctgaggcacaagaatcayttgagaccaggaattcaagactagcctaggcaacaaagcaagagtctgtctctacgaaaaatttaaaagttagctgggtgtggtggtatgcacttagagtcctagttactcggcaggctgaggtggccagattgctttagcctaggagttcaagggcatagtaagctatgatcttgtcactgcatttcagcctgggtaacaaagcgagaacttgtctctctttaattaaaaaaaaaaaaagatcaacacacatcaattataaactatcaatgaagcaatgaac

SEQ ID NO: 233133 - DNA, 398 bp, Homo sapiens
ttctgtttttggacttcagcttgatctagtccagtcacatgttctcaccatttaaaaaaagtataactacattataaatgagtcagaakgatagaatctaagccactatgggtgtcactgttaattcagatattgttaattaagggtaaggctaatttgaagagcaaagtttcaaaatacaaaacagaatagtctttttcttagagtcttcaaagtatataatacttgcaattttgttaatttttaaaaaatttctttttctaaggatttggaagaacaacataacaaagataaactaaacctggaagaggataaaaatcagcttcaacaagagctagaaaacctaaaggaagtactggaagacaagttgaatacagccaatcaagaggcaagaattc

SEQ ID NO: 233134 - DNA, 473 bp, Homo sapiens
actgctcagccatcttggactcctgtcttgtacaccagacaactagttcatcagcagtccccactgctctaccttcaaaatagatcctgcttctccctactacctctaccaccatctgattccaggacacttgtagttctttcctgtactgcaactgttaccttgtttctactctttaccacctacagattattttctaaccagccaaagtgatgctcttaaaatattaagttggattatattactatcctgtttcaagatgcctggtgactacctaccacaattagaatacagtccacactcatgccatagcctctastacgctcatgatctggtctctggctgcattgccaacatcatctcctgtcactctctccctttcttttttacagccatgctggatccttgcagttcttggaacacacacaacaagctgaacccatcttggggactttgcacctaccagtccctcc

SEQ ID NO: 233135 - DNA, 601 bp, Homo sapiens
gcaatcttagacttcttccttattcttttttcaaaggtttgtttgccatgtatggagggcactcatacttttatttatttatttattttttggagagggtcttgctctattgcccaggctggaatgcagtggtgtgatcacggctccccrcagcttcaacctcctgggctcaagcgatccccctaccacagcctcctgactagctgggcacacaggtatgtgccactatgctagactaatttaaaaaaatttttttttgtagatactgggttattgcccaggctagtctcaaattcctggactcaagccatccccccacccagccccccaaagtattgggattacaggcatgagccactgtgcccagccttatacacttttataacctaacctactataacataaaataaaatcctgtattgtgttttgtgctatagatacattttaatacaggaagacagtggagtattggaagatgtggtaaggagagttatagggataaagctattctttaatttattctcaaactaacatttggaaaagaggttatatgagagagaacagtatagtttttaatactcaaatcttccaaggaaagctt

SEQ ID NO: 233136 - DNA, 597 bp, Homo sapiens
ttgaagatgtggcaagattatgaatgtgtggttggctgagacatttcaggcaagactgtgaaagctgtgagcagaatttcaagcactcagatactgatccaccattcttttatatttcacaattaaagtactccttgttagttaaacccacacaaatgcttccagcatttcttatgttgaacataggcgacctggggaaaaatgaaaaaaccattctaaagaggcaaaatttaacgcagtaaaaaacagctatggttttgccagacattgggtctagttcatgaatatttgctgccacctgcagtttaaacttgatattcactctggtcaccacctgtaactgaagtgtggcccagcaaatgaaaaggttgcgatgagtatcctcgtcattgctgcagccttatgcttacttaaaattgaagyttctatttgtacatccccattcatagcaacattatttataaaagtcaaagcatggaagcaacccaagtgtcccttgatggtgaatggataaacaaaatatgttatatacaaacaatataatattattcagcctcaaaaaggaagttttgacacgttatcacatagatgagcctt

SEQ ID NO: 233137 - DNA, 396 bp, Homo sapiens
gcactcattctccaagcccacgtgtgatccaattcttccagtacaccaaggcaagaaccccaggatatagaaagccctctgtccttgtgataaggcaggggtctaattgaactggctaacacaagccacctacagacagctaagctaaaagagcaccctgtaacacatgcccactgtggcttcrgctataaacattcacccctagacactgctttggggtctgagcctcacagcttgcccatctctgtgctcccctagaggtttgagcagcggggcactaaagaagtgagtcacactcccattgcacgccctgcgaaggggacaagggaacttttcctgtttcaattggatcatgggggtggcttcccccatgctgttcttgtcatggtgagtgag

SEQ ID NO: 233138 - DNA, 362 bp, Homo sapiens
caattcttccagtacaccaaggcaagaaccccaggatatagaaagccctctgtccttgtgataaggcaggggtctaattgaactggctaacacaagccacctacagacagctaagctaaaagagcaccctgtaacacatgcccactgtggcttcggctataaacattcacccctagacactgctttggggtctgagcctcacagcytgcccatctctgtgctcccctagaggtttgagcagcggggcactaaagaagtgagtcacactcccattgcacgccctgcgaaggggacaagggaacttttcctgtttcaattggatcatgggggtggcttcccccatgctgttcttgtcatggtga

SEQ ID NO: 233139 - DNA, 409 bp, Homo sapiens
tcccctcaataaaaccttgcactcattctccaagcccacgtgtgatccaattcttccagtacaccaaggcaagaaccccaggatatagaaagccctctgtccttgtgataaggcaggggtctaattgaactggctaacacaagccacctacagacagctaagctaaaagagcaccctgtaacacatgcccactgtggcttcggctataaacattcacccctagacactgctttggggtctgagcctcacagcttgcccatctctgtgctcccctagaggtttgagcagyggggcactaaagaagtgagtcacactcccattgcacgccctgcgaaggggacaagggaacttttcctgtttcaattggatcatgggggtggcttcccccatgctgttcttgtcatggtga

SEQ ID NO: 233140 - DNA, 535 bp, Homo sapiens
tgtttttccatgttggaaccatgttttacttaccatctgaatcaaatttttgataagggtgaaaccaacctgtgtctcctctgtatacttactgtggaactttctgggtttataggttgtatattttgtatactatgacttggtcactttgtaacagaggtttattgtgtgtgctgtcagctaaatgtcataatattttcatgtttttattaacaggtttagtcattccaaactgaaacgtatttaaaataacattaacttagagactgccatacttggtgtgaaaattactactgtggttattttaaatgtctttcttttgactgctttcattcttgattagattgttgcttagaccccattcctaaacacagtaaattgcaagttttccagtttttattgattcactatctgtttagtttatgaaaatcctttgctagcctctaatcaccrgtcttaaaaagtgttatgaaagataaagattcagcaggaatatgtgactggagtaatttcttcattttaattaataagttcc

SEQ ID NO: 233141 - DNA, 425 bp, Homo sapiens
atcttccaagtgtctcctgttgcccaggctaacctagagctatctaaagatggcaaatctgggaaatgtgcattcagcttggcaaaactgatacattacaaatccaccacagtccacttcttctcaaagtggcatcaatgtrcatcttcctcctcttctttttttcctcctcttcctcttcttttgcttcttcctcctcctttttcctccttgtaaaatcatacttaaggttcaaataaagacaatatgaaaatcatactttttctcattcagtgaaaatatgccaaccctttccccaacaggataaagtctttgtctttgaatgatgttcactccttttttagctagatagatcacattccatatttgctttcctgtaacctaaatattgagatttctaaaagttaattattaatgaatgtgct

SEQ ID NO: 233142 - DNA, 425 bp, Homo sapiens
atcttccaagtgtctcctgttgcccaggctaacctagagctatctaaagatggcaaatctgggaaatgtgcattcagcttggcaaaactgatacattacaaatccaccacagtccacttcttctcaaagtggcatcaatgtacaycttcctcctcttctttttttcctcctcttcctcttcttttgcttcttcctcctcctttttcctccttgtaaaatcatacttaaggttcaaataaagacaatatgaaaatcatactttttctcattcagtgaaaatatgccaaccctttccccaacaggataaagtctttgtctttgaatgatgttcactccttttttagctagatagatcacattccatatttgctttcctgtaacctaaatattgagatttctaaaagttaattattaatgaatgtgct

SEQ ID NO: 233143 - DNA, 425 bp, Homo sapiens
atcttccaagtgtctcctgttgcccaggctaacctagagctatctaaagatggcaaatctgggaaatgtgcattcagcttggcaaaactgatacattacaaatccaccacagtccacttcttctcaaagtggcatcaatgtacatcttcctcctcytctttttttcctcctcttcctcttcttttgcttcttcctcctcctttttcctccttgtaaaatcatacttaaggttcaaataaagacaatatgaaaatcatactttttctcattcagtgaaaatatgccaaccctttccccaacaggataaagtctttgtctttgaatgatgttcactccttttttagctagatagatcacattccatatttgctttcctgtaacctaaatattgagatttctaaaagttaattattaatgaatgtgct

SEQ ID NO: 233144 - DNA, 463 bp, Homo sapiens
agtgggggcgggtggggtaaccagggtgactccaccagatgccaggctgggtctgtgcccacacatggggccagccagacaacataggagcctgttcagcttcccccagaacaaaacgcaggattgttccagggctgcccracagataggcaatagttacactggatgctactaaaggaaatcctgcctttagatcaggaatgctgtaaaaagatcaatcatgcctcatgcctgggaagtaccttcttaaaaagaacagcatcacctctgtcttatcatttattcccccacaatgatccaataaagttggtgggggtgtggaagctatccagaagacagagtaactcatgtctgggccaccaggccagtatttgccaggagctcaactaatgcttggatgaagaaagaaaggatggaaggaaggcgggggagggaagtgagggtacaggtggcatctctcttt

SEQ ID NO: 233145 - DNA, 463 bp, Homo sapiens
agtgggggcgggtggggtaaccagggtgactccaccagatgccaggctgggtctgtgcccacacatggggccagccagacaacataggagcctgttcagcttcccccagaacaaaacgcaggattgttccagggctgcccaacagataggcaatagttacactggatgctactaaaggaaatcmtgcctttagatcaggaatgctgtaaaaagatcaatcatgcctcatgcctgggaagtaccttcttaaaaagaacagcatcacctctgtcttatcatttattcccccacaatgatccaataaagttggtgggggtgtggaagctatccagaagacagagtaactcatgtctgggccaccaggccagtatttgccaggagctcaactaatgcttggatgaagaaagaaaggatggaaggaaggcgggggagggaagtgagggtacaggtggcatctctcttt

SEQ ID NO: 233146 - DNA, 463 bp, Homo sapiens
agtgggggcgggtggggtaaccagggtgactccaccagatgccaggctgggtctgtgcccacacatggggccagccagacaacataggagcctgttcagcttcccccagaacaaaacgcaggattgttccagggctgcccaacagataggcaatagttacactggatgctactaaaggaaatcctgcctttagatcaggaatgctgtaaaaagatcaatcatgcctcatgcctgggaagtaccttcttaaaaagaacagcatcacctctgtcttatcatttattccccmacaatgatccaataaagttggtgggggtgtggaagctatccagaagacagagtaactcatgtctgggccaccaggccagtatttgccaggagctcaactaatgcttggatgaagaaagaaaggatggaaggaaggcgggggagggaagtgagggtacaggtggcatctctcttt

SEQ ID NO: 233147 - DNA, 529 bp, Homo sapiens
gtctttctgtgtctggcttatttcacttcacatgatgtccccaagttcatccacgttgtctcaaatgacaggatatccttcctttttaaggctggatagtattcaattgtgtatatatactacattttatttatccatttatttgttgayggacaccggttgatcccatatcttggctactgtgaatagtggtacaatgaacatgggaatgtaggtatctcttcaacatactcatttcatttcctttggatatatacccagtagtggaattgctggatcataagttatttgtaatccatactgttatccataataggtgtacaatttacattcccaccaaatgtggaagggttcccttttctttacatccttgccaacacttgttatctttcacctttttggtaaaagccatctaacaggtgtgagttgatgcctcattgtgattttaatttgcattttcctgatgattagtgatgtagagcgtttttcatataccagttggtcatttgtgtgccttcttttatgcaat

SEQ ID NO: 233148 - DNA, 529 bp, Homo sapiens
gtctttctgtgtctggcttatttcacttcacatgatgtccccaagttcatccacgttgtctcaaatgacaggatatccttcctttttaaggctggatagtattcaattgtgtatatatactacattttatttatccatttatttgttgacggacaccggttgatcccatatcttggctactgtgaatagtggtacaatgaacatgggaatgtaggtatctcttcaacatactmatttcatttcctttggatatatacccagtagtggaattgctggatcataagttatttgtaatccatactgttatccataataggtgtacaatttacattcccaccaaatgtggaagggttcccttttctttacatccttgccaacacttgttatctttcacctttttggtaaaagccatctaacaggtgtgagttgatgcctcattgtgattttaatttgcattttcctgatgattagtgatgtagagcgtttttcatataccagttggtcatttgtgtgccttcttttatgcaat

SEQ ID NO: 233149 - DNA, 529 bp, Homo sapiens
gtctttctgtgtctggcttatttcacttcacatgatgtccccaagttcatccacgttgtctcaaatgacaggatatccttcctttttaaggctggatagtattcaattgtgtatatatactacattttatttatccatttatttgttgacggacaccggttgatcccatatcttggctactgtgaatagtggtacaatgaacatgggaatgtaggtatctcttcaacatactcatttcatttcctttggatatatacccagtagtggaattgctggatcataagttatttgtaatccatactgttatccataataggtgtacaatttacattcccaccaaatgtggaagggttcccttttctttacatccttgccaacacttgttatctttcacctttttggtaaaagccatctaacaggtgtgagttgatgyctcattgtgattttaatttgcattttcctgatgattagtgatgtagagcgtttttcatataccagttggtcatttgtgtgccttcttttatgcaat

SEQ ID NO: 233150 - DNA, 285 bp, Homo sapiens
ctcccttaaaacaattattttgaaatcgttgtcaagctgttaatatatctctatttctttgggaccaggtactgggagattattctgttcttttactggtgttacatcttcttggtttttcatgtttcttgttgccttrcactgatgtttgcacatttaaaacagagacttattttagccttggcagactaaaaaaagtgtcctacacaaatcagcctgcccagagattctaggcaggctccctggtatagtttgtaagaaactttactgctggaatcttcaggc

SEQ ID NO: 233151 - DNA, 285 bp, Homo sapiens
ctcccttaaaacaattattttgaaatcgttgtcaagctgttaatatatctctatttctttgggaccaggtactgggagattattctgttcttttactggtgttacatcttcttggtttttcatgtttcttgttgccttayactgatgtttgcacatttaaaacagagacttattttagccttggcagactaaaaaaagtgtcctacacaaatcagcctgcccagagattctaggcaggctccctggtatagtttgtaagaaactttactgctggaatcttcaggc

SEQ ID NO: 233152 - DNA, 285 bp, Homo sapiens
ctcccttaaaacaattattttgaaatcgttgtcaagctgttaatatatctctatttctttgggaccaggtactgggagattattctgttcttttactggtgttacatcttcttggtttttcatgtttcttgttgccttacactgatgtttgcacatttaaaacagagacttattttagccttggcagactaaaaaaastgtcctacacaaatcagcctgcccagagattctaggcaggctccctggtatagtttgtaagaaactttactgctggaatcttcaggc

SEQ ID NO: 233153 - DNA, 570 bp, Homo sapiens
tttttgacttagttattaatattttgtttagaatttttgcatctattttcaaaaggaacattggtctatagttttcttttcttgtaatatcattgtatgattttggtgttaaagcaatgttagtcgcttagaatagtttgggaagtactccttcctcttcaagttcctggaaaggtttatgcagaattgaaattatttmtttttaaaataattggtagaattcatcaaatgaagacatgtgaacctcggattttcctgttgaagaggttttaactacaaattcaatttaatagatacaaggttattcaggttatctgtttcttcttaagtgagttttggttgcatgtgtcttttagaaaatttatccatttcatttaagttgttgaatttataggcaggaagttgttcatatcttcttcttatctttttattatctgtagactcttgtgatatcacttctctcattgctgatattggtaatttgtgcattctcaattttttttcctgatcgttcttgctacaggtttatcaattttattgatcttctttaagaaacagtttttgtgtttt

SEQ ID NO: 233154 - DNA, 570 bp, Homo sapiens
tttttgacttagttattaatattttgtttagaatttttgcatctattttcaaaaggaacattggtctatagttttcttttcttgtaatatcattgtatgattttggtgttaaagcaatgttagtcgcttagaatagtttgggaagtactccttcctcttcaagttcctggaaaggtttatgcagaattgaaattatttctttttaaaataattggtagaattcatcaaatgaagacatgtgaacctcggattttcctgttgaagaggttttaactacaaattcaatttaatagatacaaggttattcaggttatctgtttcttcttaagtgagttttggttgcatgtgtcttttagaaaatttatccatttcatttaagttgttgaatttataggcaggaagttgttcatatcttcttcttatctttttattatctgtagactcttgtgatatcacttctctcattgctgatattggtaatttgtgcattctcaattttttttcctgatygttcttgctacaggtttatcaattttattgatcttctttaagaaacagtttttgtgtttt

SEQ ID NO: 233155 - DNA, 512 bp, Homo sapiens
aaagaaattctctgacctaccttgtttgatgataggttataagactcccattctggaaaggttcctgccccatacccagagggaaggaatgctgctcagagaagccaagaggaatctagatggacacgccttgctgggttcccccacgcagactattagcattagatcacacactttttgtccartcatatttctacatggctgtccatacttggttgaaccaaagcaaaaaatagaccatttcccctgtgtctttgggtcttcattctgagggctcctgggtacacatgttaaataaatttgtatgccttttcttctattaatctgccttttgtgaatttatttttcagcaaaccttcagagggccaggaggaaagctctcctgtagcccttgcaaagggaaaaatggtgataaggagtaaattttactgaatactcctgttttattttgtttggcacctatcagatgatttgcagggggcaagtagagttttcatgataatagtatgatt

SEQ ID NO: 233156 - DNA, 565 bp, Homo sapiens
aaggaaccatagatgtaagtgaagaaatcaatcagtagaaaacaaacataatgcggaaaatcctcagaaccaattgttttttaaaataaattataaamatagataaaccctagtgaaagaaacttaatttaaaaagagagaaagcgtaaataacatgaggaattaaaaacaagacatcactacagattccaaagatattgtaatgataagagcatttgagggaaaatggacaaatttcttaacaaaacacaacgaatcaaaatgactggaagaattaagaaatctgaagactcctaaataagtcaaattagttactgaaaaccttcccctaaagaaaactcctaagacattacgttaagtgaaaaaagccagacacagaaagatgaataatacacgatctcacctatatatggaatctaaaaaagttgaattcatagaaagagaatagaatggtggttagtaggggctgggagtgggagaaatggggagaagttggtcaacaggtacaaatattcagttataagatgataagttctgaaatttaatgtacagccttgtgactata

SEQ ID NO: 233157 - DNA, 531 bp, Homo sapiens
cattaagtttaaaaataccacttccactgagccccaaaaataattctaagcttcctggtagcaaaagcaaagagggaataccctatataattagagtcatctattaaatgatagcctaatagttcttgacaagaaaaacttttcctttcttggcacataaatgcccaataaatatgtcttgaataaataagaagcaacttgttatgtagacttagaatcacctgtgctttcaataacaccaacaaaaaattgttcatcattattttttatatcaacctttaagaaaaggcaagaattgaattgtagttctgtaaaggtttycccatggaagtctaagggaataaactccaagtgactttctaatactctaattgatataatgatagagattttggaatttaaaagaatgacgagttaacatgtcacatgattttctctttgaatgttcattttcttagctggatttttagcaaagaataagaagcagaaaggtgactggagtataagtattttgtgctactgatcaaaata

SEQ ID NO: 233158 - DNA, 627 bp, Homo sapiens
ttctgatagacatgcaatgtgtaatctgtcaatttctccttgtaattctgccaactttgtgtactagatgctttctaccagaatataagatccacaagggcagggagttgtctctcttttgattatttctatattcccagcccggcacatagcagcatataaatatttgttaaacaagtaatttttataacttttcagtgatttgagcttttctataattagatattttaccttccctttatttycaatcttcctgggtagttttttttttctttattgtaagactgtctcttgtaaacagcatatacctgtattttattttctccaatcgcataatctaaatcattttactcatattggtgtttttgatataatttatactttctttgtcagtttatagtcatcttcttctatttttctcctttactgcttttatattccattataatttcttatcagattatgaattttgccctttacaaatcacagtaaataatatatcttatagaaaaatagtaaactataatctcttgtttaccacaggtttcatttggactattcttcctcttgaactaatctttcatatcttaaaatagaaaagtttttctcactgtcaaatgagttgtt

SEQ ID NO: 233159 - DNA, 660 bp, Homo sapiens
ctgctgcagctgtcaaaggaaatgccctagttgctattctggggccgtctttggtgtttctcttcaatccttattatctggaaaatctctaaataagttctataaatgtaactttcagctgcttttaccaaaagtgacttggattataaggtctaaaggtcacaaatttttatttggagctaactcacgctacaactcatatgacttaagcatcatatatcacctatttaaaaagcaaaggagagagctcaacggtctatcttctraatattacaatgtatcataatgtgcagaaggtagaatgttgaggtttcttcctatttcttcctttcttccatatatatatataaatttatagatgaatatatacacacatacacaaatgtgtgggtttatatgcaggtatatatagctatgtatatatgtatatatgtgtgtgtacatatattctttttgtgcatttatctctcccagtcttatatattcatattcatttctgttgagtaggtatttagagcagactaaaaaaaagactaataacctcctcgctcctcttattttttgttccccttagaacattattgtttttaatctattaatttggaagaaacacagagtcgttagagaagttttattttagttgatgataacaacaacaac

SEQ ID NO: 233160 - DNA, 330 bp, Homo sapiens
ctcatgtgtacagatccaggaatttggtgttgcacacagcgctgtggtatactgcaactagtttggtaattacatctttctccttggttcctctagcaggtttcagccaaggagatcaaattcctttactttcacagcaaacatgcattgtacagttatgcrtcaccttttgatgaataagtgaagttggcagcttcctcatgaatagagtgactttgttaagcatcactttttccgggagggcttggagaggacatttgtccccctcttttgtctgctagtcacaacatagactaagttggataggcaagcctgcttataactgaattc

SEQ ID NO: 233161 - DNA, 656 bp, Homo sapiens
agagaccattatgtgcttggtactgtgtttggtgcaaaagatttacaatgaacaatgcagacagcctcttatttcatagaatccacagtctaacctgtgcctccactaccctaactaggaatctgcaccctactaggaaagtccatggaatgccttctcctttattaaacctgctctgactcccctaggccacagtggtcattttaaacttctgaaggtgtgatagtccaagtcctctgagaagcagtcacaaagacaggaataaatatgcaaggattttactaggggaaatgtctatgtgagggggaaaaaaaaaaaaggagagggaaccaaaaagaatgggagccatcaggcctccacaaaagtctgactccaagtgaagaacagaggaagaaaaggttgggtgaaagcatcctagaccgtcatgcagtttaaagaagctttggcaaagctgttgaggagtcctcaggcaaggccagctgtcagaggagttggttgtctcccaggaaggggcctgccckagtaaccctgctatgctcagtcactggctgggagcagcctatgggaaatgtggcctcagcatcgatggatttcagaacacagcaggtgaggcccatagttaattacacttcctatagctgaaggcctgtgaggct

SEQ ID NO: 233162 - DNA, 615 bp, Homo sapiens
ttagccatgaaaccagcattctcatagcagagtccaggaaccacatgctgaggatctccccataatgcttgataaaaacgcagcatcctggctgggcttacggaatcagaacatcagggaatggggccaggaggctgccattggcaatctttccagatggttctgatgcacggaatgtttgaaatccctcacactgtgctgtactgtccactaagtkgggagaaggggacattgcgtggggggtaggcggggagggagcatcaggtgagaaggccccaaacagcatacggtactgcatgatgcactaaggatttggaattacttccgttaaaagagcatcccttggaaagctgccccagtgcctggcggctgtcctcacactctgcctgcattagctgaggcctaaccagtgagctacccagccccaggcctgagctgtccaggcccacacaagagtcctcacagggacaatgttcctattgccaggactgtcgctaactcatcctgaggataactctgcttccaaccctccctaattcctccattgagcagctgccctcagaagtctcctctctttccccttgctgcagacctcatctctacctgccggaattc

SEQ ID NO: 233163 - DNA, 565 bp, Homo sapiens
cctgccttactcaacgctgactatgccttagatcactgcatcgtggcttcagcactttgtctatgttccggaaaagcctttgctctgtcatagcttccctgacctcccaaggccagtgcatcaaaacagtcaccatcctgagaataacgtttctgctcccaggtgagcggcaggcatcacacatcagggtgtctggggctgtcaggaaaatggtaaggaaatatgcacgtggaaagaaacagctggcactttttacagaatctagcactgggtgtttattgcggcagagctccatacattcttgttgaatgaattgatgaatacccagggttcctaaggatatgagctgctaaactggggggactctgcacacagtctctggcrtggattgcccagcatcgaaccttggctctgccccttgctagctgtgtgagctccagcatacttcttgatctctctgtgtgcctacttcctcacctctaaaatggggatgataataataataattaataattaagcattgttatgtgtaaagcacttaaaatacttcctggcacacaatgag

SEQ ID NO: 233164 - DNA, 509 bp, Homo sapiens
  misc_feature (1)...(509): n = A,T,C or G
ctcaaatctacaattagtcttgtagtcttggacaagttactcaaccacgaatgggtcacaggtgtactgaggtcttgccatcttcagcaccactgctaggtggcaccttgggcagttggagaccaaggccagttacctgccgtgagtgtctctctcagttaacctcaggatgaagtttaaatatgaccatcattcatgtgtgcctagaagtgaaaaaatagaagcattngataacctctctgtaaccccagttccccatctatgaagtggaaactcttatgccccaaatccagggtgkggtcatgaggatgagatgagatagcctagcatagtagagtcaaggataagacaaaagtaaaccccaatcaatggagttatcattagtgctacctcccagggggatacccaggaggcatcactgtgcaggcaaagtctgaactgatgtgggctactgggttttcatccaaatgctcatttcttttttcttccttcttgatcaagggaagcaa

SEQ ID NO: 233165 - DNA, 523 bp, Homo sapiens
aatttcttagtggaatagttaaattgtcttagtggggacatctatggggtcatccaaaaacccatcctcatgcagcaattgaatatttgagataaattaaatattaaaaataaattcctttgaattgcttgagagcaaaattcaatagatattcaaaatactttgccaaggcattcgaagggcaagccacaagtacaaggtcacatgctgtcaggttctcwtccgtctctcctaacaccggtagctcttctttaggtaactgaccagccctttcggggattactttgaaatctctcccctcattgtccctcttgtcttccaggcccaccctcctccccctctgcctttgcttcagtctccagcacccagaagcaagtccactgtcagtactggcgaacaagtcattcccatgcactcagcctgggggttgggggcttttctcttattcatttccccatgcctggctctgcctgtcggatctggactccagctgtctgcccccacctgtctgagatgcagaact

SEQ ID NO: 233166 - DNA, 523 bp, Homo sapiens
aatttcttagtggaatagttaaattgtcttagtggggacatctatggggtcatccaaaaacccatcctcatgcagcaattgaatatttgagataaattaaatattaaaaataaattcctttgaattgcttgagagcaaaattcaatagatattcaaaatactttgccaaggcattcgaagggcaagccacaagtacaaggtcacatgctgtcaggttctcttccgtctctcctaacaccggtagctcttctttaggtaactgaccagccctttcggggattactttgaaatctctcccctcrttgtccctcttgtcttccaggcccaccctcctccccctctgcctttgcttcagtctccagcacccagaagcaagtccactgtcagtactggcgaacaagtcattcccatgcactcagcctgggggttgggggcttttctcttattcatttccccatgcctggctctgcctgtcggatctggactccagctgtctgcccccacctgtctgagatgcagaact

SEQ ID NO: 233167 - DNA, 245 bp, Homo sapiens
aaattcacaaagaaagaaagacagatgggcaaggcaggaacggccagaggacaattggaggagaaagcagcrcgcggggaaagctcagcacatacctggggaaaagttgcaggcgggtccctcctcctcgctgggctttcttccccagcaggcttcggcccccactgaggtgtttaggatgtggatagttatttacttatttatttattttccagagctggcagtgttggttagcatttctatgc

SEQ ID NO: 233168 - DNA, 560 bp, Homo sapiens
ggctcactgcaccctcaacttcctgggcccaagtgatcatcctgcctcagccttccatgtagctgggtccacaggccaccatcatgcctggctaattaaattttttttttttttttctagagatgagggtcttacttttttggcccaggctggtctcaaactcctggtctaaagctttctagttagaatctctcccacctyggccacccaaagtgctgggattacagatgtgagccactgtgtctggctagtgttcccttttatttaaaataaaatatgacagctattcgggaggctgaggcaggagaatggcaagaacccgggaggcggagcttgcagtgagctgagatagtgccactgctctccagcctgggtgacagagcgaaattctgtctcaaaaaataaaaaataaaaaataaaaataaataaataataaaataaaataaaatgtgaaaaaagctttgctatgacctcctccataaactgcatacaccctgctggcttctgtcatgtcagcccctgccaccacccacaaactcttctccagccacacaggcctc

SEQ ID NO: 233169 - DNA, 413 bp, Homo sapiens
gcagtggtaccagaaggaagaatttgccatttgttgagcrttggcaataagtcagaagttgtgctaggtatagcagtgggtgcaaaagtggcgctttctgctctgaggcttctaggctggggatatgtcaatatgttggtgaaaatttcaaaatataaagtgtacagctgggcacggtggctcatgcctgtaatctcagcactttgggaggctgaggcaggcggattgcttgagtccaggagtttaaggccagcctgggcaacatggcgagaccctgtctttattaaaaaaaaaattaagtatgattatataccaaatgagggcacacacagagatataggaatccagggaggaccatgaggatgtcaggtgctactgatggggtacagctatgaagaacagttctaggagtt

SEQ ID NO: 233170 - DNA, 413 bp, Homo sapiens
gcagtggtaccagaaggaagaatttgccatttgttgagcattggcaataagtcagaagttgtgctaggtatagcagtgggtgcaaaagtggcgytttctgctctgaggcttctaggctggggatatgtcaatatgttggtgaaaatttcaaaatataaagtgtacagctgggcacggtggctcatgcctgtaatctcagcactttgggaggctgaggcaggcggattgcttgagtccaggagtttaaggccagcctgggcaacatggcgagaccctgtctttattaaaaaaaaaattaagtatgattatataccaaatgagggcacacacagagatataggaatccagggaggaccatgaggatgtcaggtgctactgatggggtacagctatgaagaacagttctaggagtt

SEQ ID NO: 233171 - DNA, 505 bp, Homo sapiens
ctctactttaagaacccctgtctcataacctcccatctttcccaggttctggtctaaggaaaccatacagtacctagcttgtgtgtaagcacagatgtctcatagctgcaaatctcatgtcatcaatctatcctctcaactctgctttcmtacgatggactaataacaaaagttgaagcctttatcattgcagttttcaaatcatggagccatacaaccgtcaaaaagagagggactgtctactctctgaagaaataatttacaggagaaaagacatggagaaacaatgggatcactttgaaagacagaaaactagctgaacagaagcagagctggagttataaaggacgaggctaggcaagaagggcagccccacatgcggaggccttgatgtaaaactgaaaagtccaagctatcctataataattttacttaggaaaacctttgaggagagcaatggcttagaaagatggatgtggttttgaggagcaagatggacagcaag

SEQ ID NO: 233172 - DNA, 548 bp, Homo sapiens
gtataaagcacataactatttttaaaggtgacagaaaaaatgtctacatccaacctttccagacagggagagcatctttaaaagataataaatagacatgtactatacatctatcatttatgttttgcacaatactaagaactacaacttaataaatttaagtggagatggaccaaaaatttatagatatagatatacacacaaaattacacatatggattatacaacacacatatacwtgcaccttatatataagctatatatgtatgtataaataattgaaatataatgcaataaataaaatagaagcaattacaacactcagactgatgagaaataatagagctcagagctggaggcattctttgccaagactcaatggtatgaaggaaagaaactatgccatctactacatttttcctctgttgtggagaaaattaacttagagtgcacaccttttagaatgtctgcccagcccacacccctcttctttgagaacaggccccccagcatccctgtgtgtactacacgagcctgtccaaccattg

SEQ ID NO: 233173 - DNA, 591 bp, Homo sapiens
  misc_feature (1)...(591): n = A,T,C or G
nnnnnnnnnnnnnnnnngtaggcattttgcccggatgaagaccatctgtgcagctcctttgagtgactaattttctttttttactattggtttttgatgtttcctccacctagtgcacaccaggctgttttcatctgatggaaccagatcacaaaactgtttggacatctgtgaaaaacaaacccaatctgtatggtcaaaagaacattgaacagccattattcatgtgaagtgtttgatagaaaggcattctgtgtctggtgacttccaaacaacgtgtagtgcctttatcgcctgagtagatggggcttgcctttaacacatcctctttactagtctcaaagcactgagataatgactgaaagctgtgttagagaccaagccatgcaagaaagaaaatgtgtcatatcacatcaacttaaaacaactgcaaaccatcaacagtgtttccccaatccctacattaaaatctayaatcaagcagataatatgagcatgtcaatttctcctttgagtaataactactaacctcatggaaaccaagcctcttccttaggtgagttgatcattagtcttttactgaaacactga

SEQ ID NO: 233174 - DNA, 528 bp, Homo sapiens
tgtgttggaagagagggttctttaaagcagattgcataattatctcctcatgaggataaatgggaaacagaaaagtcggtttaaggagattcastcagattagacattatcatttaaggagtgggaatgagtggaggagaaaggccagtctgggaaatgggatgttaggtggagaccttcagggtacagtcttgtaatttggcattaagatacaggttcttggaagaccaagcactccctcatactctccaaatgtaagtatcaaagtagattccagggacaattgaagtgcttctggggttgtcacatagcttctcatgtgagtgtgttatgagaaaaccttgggacggtagtgccccctgcctcgaactgggaagatatggagagatcaaagaatgacttggacaagtccagcttagcgagtggatgagtttattaagacttactatggggcgccctagggccacagcaggacagatctagagatccgctctgcctcccatctctaagctgctcttaagcgaattt

SEQ ID NO: 233175 - DNA, 291 bp, Homo sapiens
tgagtacatcggcttctgtatcttggaagtgtggtttcataagtgtaattcctgtttataatacttttttctattaagagaacaataattcctgatattttggttgaaaactctaagtacctgagacccacttattggccttctatgaagaaagaactgaaaattattttggggtggatgaaaatgcagctattcttagtttycccagaggaaaattcaagaggaaatgggtttacacagcagtaggggggggtttatgtggggcataaaggagcgtgttcaggacaaggt

SEQ ID NO: 233176 - DNA, 462 bp, Homo sapiens
tctcacgcaatcaatcaagtcctttctaaaggagtcagaagctatataaaatatggtcccatacccttaagaaactcaccctttagttggaaagagaaattaggaataaaaaaataaaaagcaacagtgaacartgcaatacagactctggtatgaactcagtatgcttggcacaggcccaaggtgctgtcagagttcagcagaggagaaacttggacttgcctttgaggtaagatttaaataggaaaagagaaaaaaagcttgggtgagagcatttcagagcattcactaagagggtctggcgcttagtatacattcataaagaaaatatttattaagccccattttgggccaggtactgtttagaccctagagatacaagagagggtataacaggaaaatccttgcccgtttggaccctacattctagccccattggcctcaacttacaaaggactcact

SEQ ID NO: 233177 - DNA, 671 bp, Homo sapiens
taattcagataattcagagattatccaatgggcctaaactaattacatgaaccttttaaaagcagagttttctttggccagggccagaggggatcaaagacatactctagctggcccacaagcaaacaccacacatgttgtgagccgtctatggtagccacagggcaagacacaaaatagcctccatgagcttagtgcaacccccagatgacagctaggagggaaactgagacctctgccctacgacagcaaggacatgaatcttatctacaaccagtgagcctggaagaagactccaagcccacaagggaactgaagtaccagctgccatcttgatttcagtccagtgagaccctgagcagagaacctagcccagagttctaccctaaagaaactgggatagaataaatttgtggtgttttaagccactgagtttgtggtaagttgttatgcagcaataggactaataggaaagccttacctgcagagataaacctacctgtagagataaacctaggtttagataaagattcccactgcaygtctcagttttctcatctatgaaatggagccaagtctctatttcacacagttgattagagggggagtagagacaatgtacagaaaggactgcacacatgctacgtgctcagtaaatggtaactaatatg

SEQ ID NO: 233178 - DNA, 421 bp, Homo sapiens
aactaaatcatccatccatcttattgccttcattgaacacagaataatttttctgagattggatcaatagaagtataatcacaaatacaagcagatggatatagcacattgaagaggtattacattttttatgcacawgaaacagtatcaaaatgagttaaatttacatttaaatctttaattcatcttgagtcaattttttgtatatgatgtaaagaaggggtcagttttaattttctatgtggctagcctcttatcccagcatcgattatttaatagggagaactttccccattacttgatttcatctggtttgtcaaagatcagatgtttgtagatgtatggtcttatttccgagttctctattctgttccactggtttatgtgtctgttcttgtacaaataccatgctgtctggctt

SEQ ID NO: 233179 - DNA, 257 bp, Homo sapiens
tccccacttcaggccaggctgggcccggtgggctccacagcattcccactcccacttctcggatcccagacttgctgctgcygccaccactaatgccaacaccaacatgagcaccgctgctgttgccctcaatgcaccggcccaccctacaagcctcctaccacctccaggaggcccccgcagacactctcctaccactccaccactctggtcaagctgcagtctctgtctctgccaccaactgcagcgaggtgagc

SEQ ID NO: 233180 - DNA, 257 bp, Homo sapiens
tccccacttcaggccaggctgggcccggtgggctccacagcattcccactcccacttctcggatcccagacttgctgctgccgccaccactaatgccaacaccaacatgascaccgctgctgttgccctcaatgcaccggcccaccctacaagcctcctaccacctccaggaggcccccgcagacactctcctaccactccaccactctggtcaagctgcagtctctgtctctgccaccaactgcagcgaggtgagc

SEQ ID NO: 233181 - DNA, 257 bp, Homo sapiens
tccccacttcaggccaggctgggcccggtgggctccacagcattcccactcccacttctcggatcccagacttgctgctgccgccaccactaatgccaacaccaacatgagcaccgctgctgttgccctcaatgcacsggcccaccctacaagcctcctaccacctccaggaggcccccgcagacactctcctaccactccaccactctggtcaagctgcagtctctgtctctgccaccaactgcagcgaggtgagc

SEQ ID NO: 233182 - DNA, 574 bp, Homo sapiens
cttaacctttccagagtagcaaggtgtccttacagcataaatttagcataaaattagacatgttccattataaaataaaatgaataaaataaaatgaaaccccgtctctactaaaaatacaaaaactaatcgggtgtggtcgtgggcttttgtaattccagctacttggaaggaaggctgaggtccagagaatcacttgaactcaggaggcagaggtggcggtgagctgagattaagctactgcagtccagcttgggcaacagagtgagactcagtctgaaaacaaaaaaaaaaaaagtggrcctattaggtcaaagtgtatgtgtgttttaaatttggatatactcaaggtgccctttagataggatgtctatttgaaattcccatcaacagcatattagtattcaattccatatattcttactagtgatttgtcatctttagcttgttgttgggattcaaaatagtttgaaacagtttttcttctgtttctttttcagcatcaggacttacttccgtagcttaacttgtgggagggagctgataaaaatgaaagttcagtgacaaatgagta

SEQ ID NO: 233183 - DNA, 612 bp, Homo sapiens
gaacttcatcaaagaattcctctaataaagtccctgggcccagaattcatagctcagaaaggaaaagaaagaatgcataatttccttaatgtataaatggattcaaaaccaaaacatgaaaaaactagaaattactcatacaaagctagcataaactaaaaaataagtgtacctgagtatgcttatgcacacgtatgagggcatatgtgtacgtgtgcacacctcacatgtgtatgcactacacacggtgaattctatttamaaacataaatgcagtttatctagtaatagaaaatagcagaaattaaatcaacaagtaattatctcagggatgtaggattttcactattatatacatatcatagatgtatgtgatctgtgatctgtgatcatttgactgggggcacaaaaacaaatgcttaaatatttcagcataatacagcatttacatctgtgtggtataaataatattgaataatatcattgatttgaaagaccaaatttggccgggcacagtggctcatgcctgtaatcccagcactttgggaggctgagacgggtggatcacgaggtcaggagttcgagaccatcctggctaacaccgtgaaaccc

SEQ ID NO: 233184 - DNA, 612 bp, Homo sapiens
gaacttcatcaaagaattcctctaataaagtccctgggcccagaattcatagctcagaaaggaaaagaaagaatgcataatttccttaatgtataaatggattcaaaaccaaaacatgaaaaaactagaaattactcatacaaagctagcataaactaaaaaataagtgtacctgagtatgcttatgcacacgtatgagggcatatgtgtacgtgtgcacacctcacatgtgtatgcactacacacggtgaattctatttaaaaacataaatgcagtttatctagtaatagaaaatagcagaaattaaatcaacaagtaattatctcagggatgtaggattttcactattatatacatatcatagatgtatgtgatctgtgatctgtgatcatttgactgggggcacaaaaacaaatgcttaaatatttcagcataatacagcatttacatctgtgtggtataaataatattgaataatatcattgatttgaaagaccaaatttggccgggcacagtggctcatgcctgtaatcccagcactttgggaggctgagaygggtggatcacgaggtcaggagttcgagaccatcctggctaacaccgtgaaaccc

SEQ ID NO: 233185 - DNA, 612 bp, Homo sapiens
gaacttcatcaaagaattcctctaataaagtccctgggcccagaattcatagctcagaaaggaaaagaaagaatgcataatttccttaatgtataaatggattcaaaaccaaaacatgaaaaaactagaaattactcatacaaagctagcataaactaaaaaataagtgtacctgagtatgcttatgcacacgtatgagggcatatgtgtacgtgtgcacacctcacatgtgtatgcactacacacggtgaattctatttaaaaacataaatgcagtttatctagtaatagaaaatagcagaaattaaatcaacaagtaattatctcagggatgtaggattttcactattatatacatatcatagatgtatgtgatctgtgatctgtgatcatttgactgggggcacaaaaacaaatgcttaaatatttcagcataatacagcatttacatctgtgtggtataaataatattgaataatatcattgatttgaaagaccaaatttggccgggcacagtggctcatgcctgtaatcccagcactttgggaggctgagacgggtggatcacgaggtcaggagktcgagaccatcctggctaacaccgtgaaaccc

SEQ ID NO: 233186 - DNA, 407 bp, Homo sapiens
tgccttttgctttttttaaatctggtgtgaggcaatagcttcctcaagggtgtctctgcttcctctttcacccattcctgtcattattgcactggcaactacagtgacttttcaagctttcatttgcctcctaaatcctatcaggggattctgactgtcagaatgaataggctccttgccatctgyggcccttcattggctccatctcctaccctcggcttccacactatgttgtagccaggctcagtgattttctttctgttttctaaacatgtgaggctcttctccttctttgggactagaggaggattatagagaaaatgtggcacaaattaattaatttttacatgtatgattcgttatctgaatcagattacaagctccttgagagcagacccaatttaatg

SEQ ID NO: 233187 - DNA, 466 bp, Homo sapiens
tttaaacccaactactgcaaagtgttaagtgtgaggtcatctctgttcaggtgttaaacttagatgtggagaatatactgtttatctttgtttcaaggctttgtcccccaccaaaaacaaaacaaaacaaaaaacaccatttaaagcaagtcttgataggtcatcaccaaaagcttccttgctaatgcgagtggaattagctaccagatacaaacattgcatagaagcttggctctcagagtttagtaagcaagctttaagcatttcctgtaaattttaagtgattaattataaaagagcagagcaacttggcatcttaggtggagagaagatactgtattctggttaaaaattgtaaggggcttatggaaatgagtgacatggtgttagttattttgraaagtaaaagtatatgttctcattttctgcgaaaaaatataatcagaggagaaaaatattcaacaaa

SEQ ID NO: 233188 - DNA, 493 bp, Homo sapiens
acagtagctgtaccattttacattcccactaaccatgcagaagccttccagtttctccacatccttgccaacacttgttattttctatttttattttattttatagatgccatcctaatgggtgtggagtggtatctcaatgcagttttgatwtacatttccctaatgactagtgataatgagtatcttctcgtgcttattggccattttctatcttctctgaagaaatgttcctttaagacttttgcttatttttgtattaaattgttgtttgttgttgagttttagaagttctttatatattctggatattaatcactttatttgcaaatattttctcccattctgtgggttgcatttttactttgttgataatgtatttagatgcacaaaatttgtaattttcgtgaagtccagtttgtctattttaaaaattttgttgcctgtgtttttggtgtcatattcaagaaatcattgccaaatgcaatgttgt

SEQ ID NO: 233189 - DNA, 493 bp, Homo sapiens
acagtagctgtaccattttacattcccactaaccatgcagaagccttccagtttctccacatccttgccaacacttgttattttctatttttattttattttatagatgccatcctaatgggtgtggagtggtatctcaatgcagttttgatatacatttccctaatgactagtgataatgagtatcttctcgtgcttattggccaytttctatcttctctgaagaaatgttcctttaagacttttgcttatttttgtattaaattgttgtttgttgttgagttttagaagttctttatatattctggatattaatcactttatttgcaaatattttctcccattctgtgggttgcatttttactttgttgataatgtatttagatgcacaaaatttgtaattttcgtgaagtccagtttgtctattttaaaaattttgttgcctgtgtttttggtgtcatattcaagaaatcattgccaaatgcaatgttgt

SEQ ID NO: 233190 - DNA, 395 bp, Homo sapiens
aaccccaagtttctatcaggtgggtcaattttaaattatagggaaaaaacagaaaagaaaattggataactactttgtagcaagctggattttattcatagttagatttatcttttctttgtatttgcttgtgtttgtgaattctgtttcggtggaaaggacctgtattaagttttgacctagtatcttagtaattgacctartgagatttggatttggctgctccactaaatatgatgaacaaataaaggtaacttttctccttctgaattttctaaaaacactttcctcactcaataattttttcagttttcatgtttcgttcaccatgtgaaaggctgtggccccagtgttatgaggagccccttgtctgaagcagctgctgctcatggaac

SEQ ID NO: 233191 - DNA, 426 bp, Homo sapiens
aaggacctgtattaagttttgacctagtatcttagtaattgacctaatgagatttggatttggctgctmcactaaatatgatgaacaaataaaggtaacttttctccttctgaattttctaaaaacactttcctcactcaataattttttcagttttcatgtttcgttcaccatgtgaaaggctgtggccccagtgttatgaggagccccttgtctgaagcagctgctgctcatggaacaggcagatctctgtacaggagcactcatttctagagagcagtcttgtcattgctgtgaaggaaaatgcctaatgctcaaatcaggggctactaggctttcccagaattgccctttcttagattttgtaattaaattgaagaggcagttactctgggcttaaactaggaaatcacatcctctgaattc

SEQ ID NO: 233192 - DNA, 551 bp, Homo sapiens
caataacaaacataagagaatataaagtactctcaaattggcctgacttataaccgctttttgtacttactaatgtatcatgaaaccctttctaagtctctaaatgttttcttttttttttcagtggctgcatagtattccactgcacagatgtaccataactcatttaaagaatctctcctttttgggaatttaatttgcttctattttttcaatattatgaccaacacttaaacgaatatcctttcacctaaatataggcatatattctttttttccattayctgttatttttgtttttgttttgttttgaagacagggtctctgttgctcaggctggagtgtactggtgtgatcagctcactgtaacctcaaacccctgtgctcaagggatcctcctgtctctgcctcccaaggagctgagactacaggcatgcaccagtgcgcctggctaattttttaaatttttcttcttgtagagatggggtctcactttgttgcccaggctgcactacgtactttgtagtagaattcttctttataaatatact

SEQ ID NO: 233193 - DNA, 561 bp, Homo sapiens
atataaatatcaattatattaacttatttttattttatttcattttgagatggagcctcactctgtcacccaggctggagtgcagtgatgcragcttggctcactgcaacctccacctcccaggttaaagtgatcttcccaccttagcctccagagtagctgggattacagttgtgtgccaccacacccagcttatttttgtattttttgtagcaaaggggtttcatcatgttggtcaggctcatctcgaactcttggtctcaggtggtccgcctaccttggcatcccaaagtgctgggattactggcataagccgccgtgcctgacctgcctcctattttagttaagcgtcttctatgattgcattttgtctcagctcttggcatatctcatcacctcataagacatgatctcatcacttcttttaaaaacttgtgggggttttcctagaattgattatatgcattttaggtctaatttaaataaattagaattgattatatgtattttaggtctatcttcaaataaaactgttacttcacatgtggtgtggtaatacta

SEQ ID NO: 233194 - DNA, 671 bp, Homo sapiens
tatacttgaactttgctaacagggtaggtcttacgtattcccatacaaacacacacagacacacacagagaaagtgcaactttgtaagttgatgaaaatgttgacagtggctattacttcacaatgtatacatacatcacatcatattatataccttaaatatgtgcaatttttatttatcaatcatacttcaatgaagctagaaagaaaaatcagggaaaaacatttgtacagcgtaagtaattcattatgaaagggatacattttctaaaaattatgatatctttttctatgcttattttagaatattgtattgtcattgtgattattgccacyattttcctctctgcacctgtattcctatcttagtcatagtgaccaaatctcctctgataacactttgtatttttgcccatctgaaattatatcttaaattctaaaaagtaaatattttctgatttttagggaaaaagaagtattttttagatttcctaggtgatgtctagaaaaatcatgacaatttttgacttataaaatgagtgatgctaaaagaaactaggctctggccaggcatgatggctcatgcctgtaatcccagcactttgggaggcctaggtgggcagatcacctgaggtcgggaatttgagaccagccttaccaatgtggagaaa

SEQ ID NO: 233195 - DNA, 612 bp, Homo sapiens
tcaggagtaagtaaaataaattttgacagaggtttattttgtatttgtatgagagttgtattataaagcttattattaagttttattattaagcagagaaaattatactctagccatgtaaatatccacagtgtattacttttmgaatgtcctgatttcttttcttgctataaagaaaactcagggaatttatggtaacatatctgaatggctgagtcaggcagccattgtcaattggtcggtcaggactgtacatagattttgaaacaaacaacagctacaatgacaatttcttaaagacagagaatgtaaacccatgctttctttgctcttctcccaaggaacataaccaggcccgttttttattctgagacttctctacaggggtctttcatgtgttctatgacagataacttgatggatctcaagtgggttaaaactaaaataatacagtgtgagacacccagttgtgtccttgtaagcattatatgccgacatttgcagtaggcgttcatgaaatgatttaaggctttgagatcctggaacaaacttagaaccactgtattaatagtggctacacactagtattagccagagggtttttgaaagatt

SEQ ID NO: 233196 - DNA, 396 bp, Homo sapiens
atgctgatcaaaatgcatatctctgggctctacctgaacctattaaattggaacctgtgtgtgtaggaagatgggggtaggrgcaggacagggagcaatgctgcaaaatctgcatttttcaaccagcaccttagaacaagagtccccaccttgtgggccatggactagtgccagtcagtgtcctgttaggaaccaggtgacacagcaggacatgagccatgggagagccagtgttattgcctgagctccacttcttcttgaatcagtggtggcattcgattctcaccggagcttgaaccctattgtgaactgtgcatgcgaaggatctaggttgcatgctccttatgagaatctaatggctgatgatctgaacggttttatcctgaaaccatgccc

SEQ ID NO: 233197 - DNA, 540 bp, Homo sapiens
gagttttctcttagttagcatttgtggagtgcttactgagggttaggttgtgtgagaacattctctgctgttagycaaacattaaaatagctctttcaggataagtgcttttaatgctctttaatactttgaagataattgtaatttggggttaggaaaccctttagccatttaaatttataagttgttcaaattgagtttgcattttatttttacaggctagcaacataactaatttgaatttgtgctttgctatttcattttttcaagcacaggcctcactccttggtagctagggaggaacacattcttaggtgccccgatgtagaatatttgcctaatggtgtcagagaaaagaagtcatagctgaacctatttactgagtatttcctctgtactaggcactttcttcatattatctcatttaatccttacaacaacccttgtgtgcagggattcatttacataaaaggaaactgaggctctgtgcatgccattcaatggagagatccctctccagcaaagggtgttcatcaagag

SEQ ID NO: 233198 - DNA, 622 bp, Homo sapiens
gttaattgagtcagatattaagctaattttcagggggcaaaatagattaataaatagaaaaatgataattctattcatctacccattgagccagcatgttttgattgcctgcactctgggtactattccttgaattaacccrtagaacacactcaaaattttccaaagatttcctctgttatcacaaaagataggattccagactagaaagaccccttagatactatctagccttggagtaataaatcgttacgtcttaagcacaccaagtctactcaattggtagcagctgcctatagcatttaattatggcttgtaattccaagtcaagcctaaatgggaaagaaatcagtggtggtggattagctatgtctgccacggatgtgggattggaagagacagcatgtgtgcagtataggctttatctagttcaactctcttgttttataagtgaggaaactggataccagaaaatggagataactaattttaacagacatcactcactaaggacagaaactggactagaatccaaaattttggatgtatagagaacttctatttctacttcctgatgctcatattcatatacacagttatgcctgatgacattgacaattag

SEQ ID NO: 233199 - DNA, 604 bp, Homo sapiens
ttttggcttccctgggccacactggaataagaagaattgtcttgggccatacataagatacactaacactaacgatagctgatgagctaaaaaaaaaaaaatcacaaaataaactcacaatattttaagaaagtttatgaatttacgttgggctacattcaaagccgtccttggcagcatgcaacctgtgggcagagggttgaacaagtttgatttagatctcttttgccatccactccccccaccaaaacactctctagtctccaccttctcaatatagttacattgttattagtttggttatatcaaaatcatttcacattattgagattgtttatattctattaatagctgagctaggttgtatgctctgtttttttcttttctgtacagytttttgtttctgttagatgttgtattttctttttacttgcttgaatatatgtgttctaatcaaaattcatccccaaactctccttctccagtaagtaaacctcttctaaataacactcagatgcattgtttttctttttctgagcaatctcttctgaagatccagcctggatctgccctgtaactgctgtctgggaaattccctttatcc

SEQ ID NO: 233200 - DNA, 533 bp, Homo sapiens
ctttcagtaagtggcaggtcattttgtgagatggcagaaaatatcaagagggtggatttttaaaactttgaccagaaagaacttgaaaaagttatttagctctcccttatacacatttgtatgcacaaatgcactggtagagctaaattatgttttcctttttagttgactgctatagtaggmacaataatgcccttcccgtccccagatatagccatgccctaatccccagaatctgtgaatatatgaccttatgtggccaaagtttacagatgtagttaaagccactagtcaattgaccttaaaaataaaagattatcctggattacctggttgtgtctaatctaatgacgtaaaccctcagaagcagagaagtttgttcagctagaagcagaagagatatgtggcaaaacaggaagcaagagagatgcaacagaaggggaggtgaaagagatatgaagcctgagagagagaccgacacacagttgcaggctctgaagtgcaggggcacctgtgcaaggaccgtagtgagg

SEQ ID NO: 233201 - DNA, 584 bp, Homo sapiens
tgaaccctcataaatggcattagtgccttacaaaagaagtccaagaaagatcccttgcctcttcctgatgtgaggtcacagcaagaagatgctgtgagccagaaagcacccttaccagacacagaatttgccttgatcttggacttctcagtttccasaactgtgggaaataaatttctgtttatacgctacttagtttacggtattttgttatagcagctgaatggactagaacagggcgtaaaatgaagaccctcacctgtttagttttcctggatgcccccaacgtggtctcttatggaaacctccaccatctcaggggtcctcagaggacagtttgtaaacacggtattagggaatgattgatgtccattccagtttcaagattctattctagctcagaagaaagctctgccagtactgcatgttgacaatttgacagtgaaatgtttacccatgtcaaaaaaccagaggagcctccagtctttggactgcacttttgggtgtgccctgttctgtttctggacacttccagcctgcagggcccatggagttagcagaagcatcgttaggatttagtcagc

SEQ ID NO: 233202 - DNA, 550 bp, Homo sapiens
catttccttcccatcggtggtctcctgttttactccatttcttcacccttaacaactatagggcacaggctgggaagagggatgcaaaactgtcttgcaaacctgcctgacagaaacttgatcccgggttccaccatggcctctgattataagctgcttagctttcagccatcgcggcccacaattccctcactgcttgggcttctttcctaattagatcccctgctatatcggcaaccaacagcctccatccagcagcttaggacagggcctgagccaacccaccaccttcttgagccgtcttccttggactgcatctcagcctccccgtattacaacctaatcctttcccacgccaagcaaacaggtgctgcctcctccctccggatttagcccgactgtctcctgtcaggcaagctccacccccacctctaatcgccgccgytcccgctccaattagcctcgccccccagcccacattcccttatcagccgtgggttctgccctctcttctcagtcccaactcttcattctccttagccagcccact

SEQ ID NO: 233203 - DNA, 602 bp, Homo sapiens
taaattgcaagaaatctttcagtggcaataacagaacaccagctcaaattactacagggaaaaagggggatttgctggttcattcactgaaaaatcacagaggcagttagcttcaggctcagctggatccaggtgcttaaacaaagagttggtaaatgacagcctgtgagccaaatctagcctgccacctgttttgtaaataactttctattggaatgcagccgtgcttatttgtttacatattgtctatggctgcttgtaccctacaaccacagagctgagtagttgcaacagagaccacatggcccacaaagctgaacatatttactattggctctttatagaaaaagtttgccaacccctggcttgaacaatatcatcaggaatgtgcctttatctctcattgcctaaaggctgttgttagtgcccttgcccttccccctaaactgcaaagactgagagtggctgagatgtgactccccaagtaaagaccggggrgaaggataaatggctttggagcaggccaaaacaacagatgtctgctctacaggctctgaacttgttttctgtgcagtgacaagccgtaaaccacttggagttta

SEQ ID NO: 233204 - DNA, 587 bp, Homo sapiens
gtgctctgcaaaacaaaagcacagtcattagctaaacagctcaactaaccaaaacattgttccccaagtgtgccctggtggtcctcagtttatcctaccactccatgttcaaaagcccaaatatatctatgttaagccttgtcctatttttaaaaataaaatttctactcctctccccaagccgtctttctgtccctgttctcaatgtgtgaggttatgaaagtagatttaaaagctctgccctggccaaagttgagacagcatcactctttcaccaccatttgcaactccaaacttttatgtgtttttactaaactgccctccaaaccagcatgtccaacagaactttctgcattgagggaaatgttcyctacaggcactgtccagtatggaagccactagcccatgtaagcattgagatcttggaactgactagggtgactgaggaaccaaatttccaattttatttaattttagtttaaatagccccatgtcgctagtgtctaccgtattggatagcacaactctagcttaattcctctaatgacaataagaagcattatatgaaactgtcaaaaaatatttaa

SEQ ID NO: 233205 - DNA, 588 bp, Homo sapiens
attgtatttaagaactctgcctaacccaaagtcatggagaactattactatgttttcttctaggagttatataattttatgtcttacatttaggtctatgacccatttccagttaatttttacacatggcatgagacaagagtctaaattcatattttttgcatgtggatattcaattgtgtcagagccatttgttgaaaagactatccttttcccattgaatttccttggcacttttgtggaaaatcaattgaccgtaagtgtaagggtttatttctggactctcatttctgttccattgatttgatgtctatcccatgccagtatcacactgtcttgattcctgttcttgttgtcattttttctctctcttcatatatttatctttaattttatgtaactgggagaatasgtcctcccctttccctttccccaaattgatatcagcccttggcaaggatgtaattgaggctccctaaaatcaaaccatcaaagcctctcttgcgaaaattattgagaaatcattaaagggactatgaccatattcttattcgaacaaaccccgaaggggatcaagaaaggaacaga

SEQ ID NO: 233206 - DNA, 596 bp, Homo sapiens
catgctgttctcatgatagtgagtgagttctcatgagatctgatggttttataagggactttttcacctttgcttggcacttctctctcctgccaccttgtgaagaagaacgtgtttgcttccccttctgccatgattgtaagtttcctgaggcctccccagccatgtggaactgtgagtcaattaaacctatttcccttataagttacccagtctctggtatttctttatagtatcgtgagaatagcctaatacaacttctatactgaagactacaaaacattgttgaaagaaattaagggagatttaaataaatagaaaaacttctgttttcttaagttggaagacttaatattgttgagatggcaatattctccaaattgatatacagatttaatgcaatttatatcaaaatttcaaatayctcttttgcagaaattgacaagatgatcctaaaagtcatatgaaaatgcaaaggatccagaagggccaatataatcctgaaaaggaacaaagttggaggactcccactttctgattttcaaaacttactgtaaaactacagtaattaagacagtgtagtactggcaaaagga

SEQ ID NO: 233207 - DNA, 586 bp, Homo sapiens
aataaataaataaataaataagccaggcatggtggcacatgcctatagtcccagctacttgtgaggctgaggtgggaggaccacttgatcctaggagttcaggctgctgtaagctatgatcacactactgcattccagcctgggtgacagagtgagaccttgtctcaaaaaaaaaggaaagaaaaaagataaacacagagctatgatctagtaattctattctaggtatatttccaagagaaataaaaacatatgtccacataaaacttatacattagtgtcaacagcagcattattcatagtagcttaaaggtggaaacaacgcaaatgtccatcaactaaataatggataagcaaattgtgatacatccatacaatagaatattatttatgcataaatggaatgaagtgctgattcatactacaatatgatgaactttgaaraattatgatatgtgaaagaagccagacatgaaatgtcaaatattttatgatttcatttaaatgaaatgcccaaaataggcaaatccatagagaccgagagtagattagttgcccagggatcgtggaaagggggaataaaaag

SEQ ID NO: 233208 - DNA, 543 bp, Homo sapiens
ttagaataatccagtccagcactctcattatacaaatgagaaaacamaaactggcagtgacttacccaaggtcacataacaaaggtagtggtagaaccaggtgttcttaattccatgctctttcccttatatgttcattaatgtactaattagtatagtaattcttatggtctagcagattatccctttgaatttaagagatccacatttatagaataaaataagtaaaaagttaatgtttacataaaacaaataatgaataacagaaaaagttatctgcccttaatttttgtgttaaagaaagtttcactggggataggtacaccatgttttcattaaaacaaaatgtgtttaagaggacttttgacatactaaatccctaatatgaggtttaattctgtagcattcgtgggtttttttttttgtactaatgctaagtgtataataaaacatagaattggtatgtttcattttgtataaacattttcttagaaaagtttgtcagtgtttaaaaatgtgaatagtgatttctgctagaattgg

SEQ ID NO: 233209 - DNA, 416 bp, Homo sapiens
gaattcaaagccccagcctccttcccatatcaaaggcataattcacgaaattacatttcaagatgagagcattttcattggatttagttaacagattctttgttttcttcagtttctcttagcatgcctaatagaactacttcaggtagccaaaattttatgaagtctatctatactaatggttttttgcgggggaggggtgagtatgtaaattgtagctgtggccagctttattgtagatatggctttttttcacattgacctaatgtctgtgtctgagttcagcaagtgtaacrgtgttacttgactaaacatttggtgaagaaacaattacttcagaaagtgaaaaagttattttgagtgttagaatctcaaggaaaagctgaataatgcttaaatatagttaggctcttgag

SEQ ID NO: 233210 - DNA, 592 bp, Homo sapiens
tcaccagtgacttcctggttgaaacatttwatagatgtttctcaagccccatcttaattgtgtgagggttggtgtcaattatttctcctccttgaaattctccacaagtagcaccagtctttcttggtttcccttctacatttctggcttttattagctgctcttactctacctttgtctcttaaatgtattcttgagaggtctcagtccacttcttttctttctttcttttttttatttttatttttcagagacagggtctcactctgtcatccaggctggtgtgcagtggcatgatcagctcactgcagcttcaaacttctggactcaagcgatcctcccaccttagcctctgcagtagctgagactacaggtgtgcaccaccaagcacagctaattttaaaattttttttgtagagacaggatctcgccatgttgcccaggctgatctcaaactcctggcctcaagcagtcttcctgcttcagcctcccaaagtgctgggattacaggtgtgagccactgggctcagccagtccacttcttttcttactctatataatcggagtggtctcattcaggttttttctgtat

SEQ ID NO: 233211 - DNA, 579 bp, Homo sapiens
agtgacttcctggttgaaacattttatagatgtttctcaagccccatcttaattgtgtgagggttggtgtcaattatttctcctccttgaaattctccacaagtagcaccagtctttcttggtttcccttctacatttctggcttttattagctgctcttactctacctttgtctcttaaatgtattcttgagaggtctcagtccacttcttttctttctttcttttttttatttttatttttcagagacagggtctcactctgtcatccaggctggtgtgcagtggcatgatcagctcactgcagcttcaaacttctggactcaagcratcctcccaccttagcctctgcagtagctgagactacaggtgtgcaccaccaagcacagctaattttaaaattttttttgtagagacaggatctcgccatgttgcccaggctgatctcaaactcctggcctcaagcagtcttcctgcttcagcctcccaaagtgctgggattacaggtgtgagccactgggctcagccagtccacttcttttcttactctatataatcggagtggtctcattcaggtttt

SEQ ID NO: 233212 - DNA, 564 bp, Homo sapiens
aagagcagagccaccctggtatgattcagccccaagaggatgagacagtacccctagaagagtggtcgagggtctgactcagcttctcccctgtccctccttcatttgcgctctccacttcwttttcatctctgaaagcttcttctcagccatttcccaggaaggactgactcatggctcccaaactctctcagtggggaaaaatggtggagtgcccatcgactattacaggcgacggctgtgtctctgtccatatgggcccagccattccggaactcaaacataaagctctcaggagaacctctctaactggccataaaaagtttcattatacctgaagaggaagcagagaggctatagattcatggatgccctcgattttctggtgaaacttaatgaccccatctcaggaaaaaaataataataataaataaatgtttttaaaagcataaaataaaacaatgggatcaaaatagttattaacatattaacaaaacaaatttgcgatatattaatttatgtgcttcttaactcattaaataagacctagcagtaggtctcata

SEQ ID NO: 233213 - DNA, 564 bp, Homo sapiens
aagagcagagccaccctggtatgattcagccccaagaggatgagacagtacccctagaagagtggtcgagggtctgactcagcttctcccctgtccctccttcatttgcgctctccacttcattttcatctctgaaagcttcttctcagccatttcccaggaaggactgactcatggctcccaaactctctcagtggggaaaaatggtggagtgcccatcgactattacaggcgacggctgtgtctctgtccatatgggcccagccattccggaactcaaacataaagctctcaggagaacctctctaactggccataaaaagtttcattatacctgaagaggaagcagagaggctatagattcatggatgccctcgattttctggtgaaacttaatgaccccatctcaggaaaaaaataataataataaataaatgtttttaaaagcataaaataaaacaatgggatcaaaatagttattaacatattaacaaaacaaatttgygatatattaatttatgtgcttcttaactcattaaataagacctagcagtaggtctcata

SEQ ID NO: 233214 - DNA, 545 bp, Homo sapiens
attctggtcatgagggtggagccctcttgattggcattagtgccgttgtaaaatgaacatgacagaggctctgtgccctttctgtggtgtgaggatactggaaaagtcagctgtctgcaacccagaagagggttctcaccagaacccgcccatgccggcaccttgatcttagacttccggcctccagaactgtgagaaatcactttctgttgtttataaaccacccaatctatggcattttgttatagcagcctgaactgaccaagacacctggctttgtggttgcatcactccagtctctgtctctgtctattctccctttcataaggacacttgtgattaattttatggcccatctaaataatccaggataatctccccatctcaaaatcctaaaattaatcacattttgtgccrtataaggtaatgttcacaggttctggggattaggggctgatatcttttgggaaacattttccagcctaccacgcaggggctgccgctagtcttccagggggacaagatgaagaatggcttccaagcag

SEQ ID NO: 233215 - DNA, 535 bp, Homo sapiens
aatagccaccaatgtgatccccatgaccttataaacattcattaaaatgcatttcaaggcatgtgatggcctccccaccccctagataatgagaaaacaaaggtttctcttctgatagagacaagttcagctctgaagtcaacattatttctggttctgtctgaacaatgacatatggcaactcttccctttctatagttctagtccagaatgacaaaaaaggggaaaaatttcttagagaaggtagagattatacgaatacagtccatgaaatgagcataaggagartaaagaatataacttatccaaagaagtctggcaggctgttataaatgcttgattttggacactgtagttggaggtttaacatggacaccaataaaaaggtcagcaaagggtatgcactgttcctattgggcaagaagataggaggtcaaaggtaaccaggaaagataaactcagggagacttattttccctccagagggcactgggcttgtaggccctgggcaaaattgtcaaaaaggtgaaaatcg

SEQ ID NO: 233216 - DNA, 356 bp, Homo sapiens
cttcttcctccatccacgagggcttctttccctgggggtgagagtaggctgaggagagccacttgcacacactcttaaagaaagtattacctgcaccagctcagtgagaggcacagatcagactgttacttgaatcaaattatgagcctccccaaatatatctatgacatttaaataggggattacttgaacatagactktgggatccggtgtggagtgcgggagactagcaaagtgaatcctgagagtagcaggtctgcacctgttggatcgagaaaggcggcctacaattctggtcaaatgagctgtgcttattgacatattctattagagagtactaccaggtcaccagtcac

SEQ ID NO: 233217 - DNA, 482 bp, Homo sapiens
gcacagtcatcacattctccaagatcgaaatgaaaaaaaaaaaaatcatgttaaaggcagataaagaaaaggggcaggtcacctacaaaggaaaccccatcaggctaacagcagaccattcggcagaaaccctacatgctagaaaagattgggggcctatattcrgcattcttaaagaaaataatttacaacccaataattttatttatagccaaactaagcttcataagtgaaggagaaataagatccttttcagactagcaaatgtgaagggaattcattaacagcagacttgccttacaagagatcctgaagggagtgctaaatatggaaaggaaaggttgttaccacccattacaaaagcactcttaagtacatagaccagtgacactataaagcaaccacacaaaaaatcctgtataataaccagtaaacaacatgatgacaggatcaaatgcacacatatcaatactagccttgaa

SEQ ID NO: 233218 - DNA, 621 bp, Homo sapiens
cgctttttatgcactttaatttgttttaaaattctgtaaaggatttatgtggcacctgttattgactgaaggtttgtgtccccctaaaatttctttgctgacaccctaacctccaacatgatgatattaggaggtgagaccttcgataggtgatgaggtcatgaggctggagccctcatgaacgagattagtgtttgtatgaaagaagccccagagagctcatttgctcttctgccaggttaggacactgggaagtaaacagtctatgacccagaagagaagcctcaccacaaatcaaccatgctggcatcctgatctcagacttccctgactccagaacaatgagaaatatatttctgtttttataagccacccaatctatagtactttgttatagcagccagaatggactaagacacgtccaaagtcagttgttgggaatgtggcctctctgtggtggcagccacagccccgtaatgcagcctggctcttttggtttaccataattacctgttaactcagcagtctcccccactacrttatcagctccatgaagtagaggcagcagatgtcttgtccacctctgtaccccactatctagcacgtaatacataaagtggt

SEQ ID NO: 233219 - DNA, 501 bp, Homo sapiens
ttaaaattccattgtcttgggtgacagatcttgtgaaaggtaattcggttatggggttgtttcccccatgctgttctcatgatagtgagtgagttctcatgagatctgatggttttataagaggtttttccccctttgttctgaactgctccttcctgacatcatgtgaagaaggacatgttttcttccccttccaccatgattgtaagtttcctgaggcctcctcagccctgtggaactgtgaatcaattaaacctctttcctttatcaattatgtgctcttgagcagttctttatagcagcataagaatgaagtaagrcataagcattctcaatacaaataagataagtatataaaataaagcataagttaattagctgaattcaaacaatccacaatgtatacatgtttcagaacattatgttgtacatgataaacacatacaataaaagaaaaaacaggaaaaaaaaaacccttaaaatcaatgagctaaccctgcc

SEQ ID NO: 233220 - DNA, 512 bp, Homo sapiens
tcacttcccaaaagtcctgaccacaggacttagcttccatcttggcctgcccagaagatccgtgcaagccctaaggcccaccaggttgagtgctgacccagggtgaagtacaacttcctgttctccagggctctccctgtggagcaggttacagagtcttatttgaaaacctgggtttatgaaccaggytttaaccatgtttagataaataaattttaaacatttaggcttatgatatgtgggtatttttactctttacttggcttcactctgaaaatgttactttctaatcttgggagggtggaggaggagcttatgatattttcttttgtttacaccttctggaaatccttttttcaaactgtactatgaaataagaaatacatataactagaatttaaactagcacgcatagttgagctgacatatccctttccagctgaagaggataatgtctgttagaggcataattgtgactttaatgagtacaaaataattaaagtactgttata

SEQ ID NO: 233221 - DNA, 517 bp, Homo sapiens
tagggctaataatattggcttccacttgcctttcccatcataagtgccttcacaaatcagattaaagaagaaatgtgggaattctgccacatgctaagcaggtatattccaattatggattttggaaatgagtaataatcacagaatatgttgggttattagaagagctgaatttttagtttgagtccaaatgtgaggaaagatcaatgtgccatctcaggcagtcaggcaaggggagtttccttttactygaccttcttgttctatttaagtccttgagtgattggatgaggatgaggcttgcatccattagagagggctatctgcttcactcagtttaccaattaaaactttagtgtcatccagaaaccttttcataagcacactcagaataatgtttgacaaacatctgggcactccatggcccagtcaagttgatacataaaattaagtatttcaaaccttgatcttaggaatctaattattcacagttgctctttcctgttgctgtgtattt

SEQ ID NO: 233222 - DNA, 517 bp, Homo sapiens
tagggctaataatattggcttccacttgcctttcccatcataagtgccttcacaaatcagattaaagaagaaatgtgggaattctgccacatgctaagcaggtatattccaattatggattttggaaatgagtaataatcacagaatatgttgggttattagaagagctgaatttttagtttgagtccaaatgtgaggaaagatcaatgtgccatctcaggcagtcaggcaaggggagtttccttttactcgaccttcttgttctatttaagtccttgagtgattggatgasgatgaggcttgcatccattagagagggctatctgcttcactcagtttaccaattaaaactttagtgtcatccagaaaccttttcataagcacactcagaataatgtttgacaaacatctgggcactccatggcccagtcaagttgatacataaaattaagtatttcaaaccttgatcttaggaatctaattattcacagttgctctttcctgttgctgtgtattt

SEQ ID NO: 233223 - DNA, 509 bp, Homo sapiens
  misc_feature (1)...(509): n = A,T,C or G
atgattgcctttcattctgaaaatgactttatgagtcatatcaggaggataayagattgaaagaggttaagttattggaattacttggcatacttgcgggcagctttctaattagagcagaacctggtggtagaacacaaatcttttaacttctatttctgagtactctttattatgtagttacattaatgtattatgcaaggatccatcaatgtgcatcttctgtctttttaaaggactcctcagttttatcctacagatttgattcacctgggggtgaggagccaagggatacatngtttaaaaatctctcagataattttgatttagagcaagtttggtaactattgctgcaatagtcaatggccccttttcctgagggaagcacaatttacagactgttctaagtgttcatacattcttcttactctcttaactctgaatttttttctgcccttcattgaaaagtcaccatgatgttcttctttatagctaatatttaatagaag

SEQ ID NO: 233224 - DNA, 623 bp, Homo sapiens
tatagaatgtgcacgcacgcacacacacacacgcacacaaaaatagatacatacatacacacaaacatacgttagtatgtgttgtatgtgtttatataaagtcttcttagaaagacgttaaaaatatatacaaatgtacaaacgcttaaagaaagttttaattaraaaccctcatcctttgcaagattacgtaggaaaagaatgataaaataattttaataatattagtaatatttaattaatatgcgttataatttttttttgagatggagtcttgctgtgtcactcaggctggagtgcagtggcgcgatctgggctcactgcaagctccgccctcccgggttcacgtcattctcctacctcagcctccccagtagctgggactacaggcgcccaccaccacgcccggctaattttttgtatttttagtagagacagggtttcaccgtgttagccaggattgtctcgatctcctgacctcgtgatctgcccgcctgggcatcccaaagtactgggattacaggcgtgagccactgcactcagccccgcattttaaatcttgtatcctcagacagtaaacattgttcatctacagaatttttacattgtttatctaccaaacc

SEQ ID NO: 233225 - DNA, 623 bp, Homo sapiens
tatagaatgtgcacgcacgcacacacacacacgcacacaaaaatagatacatacatacacacaaacatacgttagtatgtgttgtatgtgtttatataaagtcttcttagaaagacgttaaaaatatatacaaatgtacaaacgcttaaagaaagttttaattaaaaaccctcatcctttgcaagattacgtaggaaaagaatgataaaataattttaataatattagtaatatttaattaatatgcgttataatttttttttgagatggagtcttgctgtgtcactcaggctggagtgcagtggcgcgatctgggctcactgcaagctccgccctcccgggttcacgycattctcctacctcagcctccccagtagctgggactacaggcgcccaccaccacgcccggctaattttttgtatttttagtagagacagggtttcaccgtgttagccaggattgtctcgatctcctgacctcgtgatctgcccgcctgggcatcccaaagtactgggattacaggcgtgagccactgcactcagccccgcattttaaatcttgtatcctcagacagtaaacattgttcatctacagaatttttacattgtttatctaccaaacc

SEQ ID NO: 233226 - DNA, 623 bp, Homo sapiens
tatagaatgtgcacgcacgcacacacacacacgcacacaaaaatagatacatacatacacacaaacatacgttagtatgtgttgtatgtgtttatataaagtcttcttagaaagacgttaaaaatatatacaaatgtacaaacgcttaaagaaagttttaattaaaaaccctcatcctttgcaagattacgtaggaaaagaatgataaaataattttaataatattagtaatatttaattaatatgcgttataatttttttttgagatggagtcttgctgtgtcactcaggctggagtgcagtggcgcgatctgggctcactgcaagctccgccctcccgggttcacgtcattctcctacctcagcctccccagtagctgggactacaggcgcccaccaccacgcccggctaattttttgtatttttagtagagacagggtttcaccrtgttagccaggattgtctcgatctcctgacctcgtgatctgcccgcctgggcatcccaaagtactgggattacaggcgtgagccactgcactcagccccgcattttaaatcttgtatcctcagacagtaaacattgttcatctacagaatttttacattgtttatctaccaaacc

SEQ ID NO: 233227 - DNA, 590 bp, Homo sapiens
taagtattttgtaaggtctaaattttaattaatcttatttgggaagagggttccaagccactaaggacactttttgtgtgtgtgtgaacatactgtgaattagggaccatcattattttggaagttattattaagaaaaatgttcttctattatgcctcagaggttttgtggtttaattatgaaaatatggggagtcaatgtcttctaaattttaactctcaactaaaaactattatcrtctggtaaaaaaatgatcttgtggcctcatttcatatctttgctaaacctcaagcaccagtgcgctacaaacaatagaaatccatacaaatatggtagcagtacaatgaaatgattgctgtaagacaaggaaacagcaacaataacaatgaactataagtgatctcccatgcagtaggattccttcaaccattgttgggtgtcagaaatttcttcaaccgttgttgggtgtcttgcttggtaaaaattttctaagcagatatctccaccatactgctaaccattatctcttctcaatgtaacccacagggtgtgtcacaggactttgcttactactcttttcttgtcagat

SEQ ID NO: 233228 - DNA, 590 bp, Homo sapiens
taagtattttgtaaggtctaaattttaattaatcttatttgggaagagggttccaagccactaaggacactttttgtgtgtgtgtgaacatactgtgaattagggaccatcattattttggaagttattattaagaaaaatgttcttctattatgcctcagaggttttgtggtttaattatgaaaatatggggagtcaatgtcttctaaattttaactctcaactaaaaactattatcgtctggtaaaaaaatgatcttgtggcctcatttcatatctttgctaaacctcaagcaycagtgcgctacaaacaatagaaatccatacaaatatggtagcagtacaatgaaatgattgctgtaagacaaggaaacagcaacaataacaatgaactataagtgatctcccatgcagtaggattccttcaaccattgttgggtgtcagaaatttcttcaaccgttgttgggtgtcttgcttggtaaaaattttctaagcagatatctccaccatactgctaaccattatctcttctcaatgtaacccacagggtgtgtcacaggactttgcttactactcttttcttgtcagat

SEQ ID NO: 233229 - DNA, 462 bp, Homo sapiens
gagttcagagatataggatacttcatttgaagttgctggcttcttctgtaactggtacactttggagtgtgaagamaatttagacaggctctttgtattgattcttttctctgtccttgtaaagaaatataatgagttacattgtcacccaagataattagaatacccctttggcactcaaatagcaaaatatacttgtctgcgtatccagagtacatcaagtgtcctcttctaaaactgtctggtaatattacccatatgatagattatataatgctgctattaaatttggagaacattaacagaggaggatgaaggactgatgagtcattcccaagtaaagccatctgattctatttgtgcaacagactaatcaaaatcagatgtagctaagtctcaattcagatataattttacaggtggaaaataatagtgtattttcataataccaaagagaataca

SEQ ID NO: 233230 - DNA, 492 bp, Homo sapiens
tcatttagttctgctattattttagttacttcatttctcctgctaactttggggttagtttgttctttttttttctagtttctgtaggtataatgttagattgttagtttgagatctttctaccttcttgatgamggcaattagcgctataaactttccttttaacacggctttcactcagtttcagagattttggtgtgttgcgtctctattcatttcaaagaattttcttatttctgctttaatttcattgtttatccaaaagtcattcagaagtaagttatttgatatccatgtaactgtgtagttttgcaagatcttcttggtatggatttctattttttattgcactgtggaccaagagtatggttggtatgattctgattttttgaatctattgagacttgcttaatggccaaacacatggttaatcttagagtattttccatgtagagatgagaagaatgtatattctatggttgttgggtggag

SEQ ID NO: 233231 - DNA, 394 bp, Homo sapiens
tgaagacacaatagtactttaaaatggctagaataaaaggtagaaggagagtattgagagatgagggtagrcaagttgacacgatgaagatgagagagttgaaatgagttttggctgtatcctggttttggagagttacggaaggattttaacaagggaatgatacaaacagatttggtttccaaaagacactcttaggcattgtggactgctaaacccagatattaaacttttaattctaaaggcaaaatagcaataatagtaatagcaccaaaaagagtagcagaggtgagagagttgagagctaattaggagatagccattaatgaccaaatctggcaagaaaaggaagggagttgcaaggatctagataactgctaatgtttagtttgca

SEQ ID NO: 233232 - DNA, 559 bp, Homo sapiens
ggattgaaatcctgaaaaagactgatattgagctctgaaatcgagtaagtaataaaaagcataccaaccaaaaaaagccttggaccagatggttttatagccaaattctaccaggcttacaaagaagaactggtaccaatcctaccaaaactatttccaaaaatcaaagaggagggacttctccctaactcattctatgaagccaacatcagcttgatacctaaatctggcagagacacaataaagaaagaaatcttcaggccaatatccctgatgaacatagatgcaaaaatcctcaacaaaatactagtaaattgaattctgcagcacataaaaaaattaatatatctcgataaratatatgttatttctgggatgtaaggctggttcaacatacgcaaattaataaatgtgattcaccacttaaacagaattaaaagcaaaaaccatatgatcatctcagtagatgcggaaaaagcttttgataaaatccaacatcccttcatgataaaaaccctcaacagactgcaggcattgagcagatataccatgaaagaac

SEQ ID NO: 233233 - DNA, 577 bp, Homo sapiens
cagctaccaattagactatttttccctgattctggaaacataacccacaaagtgtactttataatggcactaccttagagggtaatgaggtgtgacaayggggtgatgctagtgtaggcatgatagtctgtagagtaaattggtctttttttcccctaggaaatctccctttgtatagaacctgtgtctcatttatgtttgaattctcaatacttactgaggtccctagagaactgaatatctttggattgtaggggtcaataaacctgagaaattattttggagccagagtgttgaggatcctcactactaaggcaaagaatttagctctttttcaattgtcttctgcatttaagtttatttgcatttggctagtcattgacatgattttagctgttttttttttttatttctattgttccttcttctttcattttttttctcttttttttttattatacttttaagttttagggtacatgtgcacattgtgcaggttagttacagatgtatacatgtgccatgctggtgcgctgcacccactaactcgtcatctagcattaggtatatctcccga

SEQ ID NO: 233234 - DNA, 577 bp, Homo sapiens
cagctaccaattagactatttttccctgattctggaaacataacccacaaagtgtactttataatggcactaccttagagggtaatgaggtgtgacaacggggtgatgctagtgtaggcatgatagtctgtagagtaaattggtctttttttcccctaggaaatctccctttgtatagaacctgtgtctcatttatgtttgaattctcaatacttactgaggtccctagagaactgaatatctttggattgtaggggtcaataaacctgagaaattattttggagccagagtgttgaggatcctcactactaaggcaaagaatttagctctttttcaattgycttctgcatttaagtttatttgcatttggctagtcattgacatgattttagctgttttttttttttatttctattgttccttcttctttcattttttttctcttttttttttattatacttttaagttttagggtacatgtgcacattgtgcaggttagttacagatgtatacatgtgccatgctggtgcgctgcacccactaactcgtcatctagcattaggtatatctcccga

SEQ ID NO: 233235 - DNA, 577 bp, Homo sapiens
cagctaccaattagactatttttccctgattctggaaacataacccacaaagtgtactttataatggcactaccttagagggtaatgaggtgtgacaacggggtgatgctagtgtaggcatgatagtctgtagagtaaattggtctttttttcccctaggaaatctccctttgtatagaacctgtgtctcatttatgtttgaattctcaatacttactgaggtccctagagaactgaatatctttggattgtaggggtcaataaacctgagaaattattttggagccagagtgttgaggatcctcactactaaggcaaagaatttagctctttttcaattgtcytctgcatttaagtttatttgcatttggctagtcattgacatgattttagctgttttttttttttatttctattgttccttcttctttcattttttttctcttttttttttattatacttttaagttttagggtacatgtgcacattgtgcaggttagttacagatgtatacatgtgccatgctggtgcgctgcacccactaactcgtcatctagcattaggtatatctcccga

SEQ ID NO: 233236 - DNA, 514 bp, Homo sapiens
aaactacaaataactatttttctctcagtactaagacactgtgttattatctagtgacatattttgaatatgggggaaaagggcattttaaaggggacttagaaaatactaacagcttgcattgcggacacatgggtaaccttatgggagatgccacagtatattaataacrttcttctctgagactgtaaaaggttattaaatgcaaaggtttactatccataagatagtaatgatttagaatatgaccttagacaccttacttctctttgccttagttgtaaaatggaaatcataatagtacttacagaactgttgtgaaggttaaatgcattggcacatgaaatgtgcttagaatagttcctggcatagactacatgctcaattgatgtccctatcactgtgcagctcacatcttacttgaagaagcaagcgtcaaacagaaattcttatttttgagttcctttcttgagccagacactcacaaaatgctttatttttatattctctaatc

SEQ ID NO: 233237 - DNA, 674 bp, Homo sapiens
tgctattactttactcttatttcaaagataaagatgctaaaatacagaaagataaagagatttgctaattctytcatgatcatcccttactcatctttttgggattcagctaatacatcatttattcaaagaggatttttgagacatctatttccctattccatgttatctctcacagcagagagctgttattgcaagctgtaactctgtatttattaatatgtttatttgttcaatgtctgtatcacacactagactacaaagtacataagaatagaaatacagaaatcaagtcatttttccccaaagaaggatctcaaacatttgttaaatgaatgaacatcaaaataattaactaattaattttaatgtatttactcataccaatgtttaaaaaggattagaagtggataaagggcaatgtataattaattaactcattcatttattatgaagattatttttattgaaacaattaaccattagaaagctttcgcatctgcatcacttcttggccttttggctaagatcaagtgtaaaattttcacatgtggctaattgttttattccactacatctatcattattttggcaacttcgatatcagtgaaaatggtcagttcaacactctggcctctgaggtccgtgacttccttagttcttttgttctatcc

SEQ ID NO: 233238 - DNA, 674 bp, Homo sapiens
tgctattactttactcttatttcaaagataaagatgctaaaatacagaaagataaagagatttgctaattctctcatgrtcatcccttactcatctttttgggattcagctaatacatcatttattcaaagaggatttttgagacatctatttccctattccatgttatctctcacagcagagagctgttattgcaagctgtaactctgtatttattaatatgtttatttgttcaatgtctgtatcacacactagactacaaagtacataagaatagaaatacagaaatcaagtcatttttccccaaagaaggatctcaaacatttgttaaatgaatgaacatcaaaataattaactaattaattttaatgtatttactcataccaatgtttaaaaaggattagaagtggataaagggcaatgtataattaattaactcattcatttattatgaagattatttttattgaaacaattaaccattagaaagctttcgcatctgcatcacttcttggccttttggctaagatcaagtgtaaaattttcacatgtggctaattgttttattccactacatctatcattattttggcaacttcgatatcagtgaaaatggtcagttcaacactctggcctctgaggtccgtgacttccttagttcttttgttctatcc

SEQ ID NO: 233239 - DNA, 405 bp, Homo sapiens
agatctaactatcctaaatatatgagcacccaatacaggagtacccagattcataaagcaagtttttagagacctgcaaagaaacttagattcccacacaataatagtgagagacttaaacaccccactaacaatattagacagatcactgagacagaaaattaacaaacgtatttaggaccttaactcagcacaggctcaaatgggyctgatagatatctacagaactctccacctaaaaacaacagaatatagattcttctcctcatcatatggcacatactctaaaattgatcacatacttggaagtaaaaaactcctcaacaaatgcaaaagaaatgaaattataacaaacattctcttggactgcagcacaatcaaattagaaatcaagactaagaaatc

SEQ ID NO: 233240 - DNA, 540 bp, Homo sapiens
acaggagtacccagattcataaagcaagtttttagagacctgcaaagaaacttagattcccacacaataatagtgagagacttaaacaccccactaacaatattagacagatcactgagacagaaaattaacaaacgtatttaggaccttaactcagcacaggctcaaatgggtctgatagatatctacagaactctccacctaaaaacaacagaatatagattcttctcctcatcrtatggcacatactctaaaattgatcacatacttggaagtaaaaaactcctcaacaaatgcaaaagaaatgaaattataacaaacattctcttggactgcagcacaatcaaattagaaatcaagactaagaaatccactcaaaatcgtatgattacatggaagtggaatagcctgcacctgaaagacttttgggtaaataatgaaattaaggcagaaatcaagaagttctttgaaaaatgagaacagagagacagtgtaccaaaatctctgggatgtaactaaagcagtgttaagatggaaatt

SEQ ID NO: 233241 - DNA, 605 bp, Homo sapiens
aggagtggtttgctttattatacttggccagataatttgtttaaagtgcaacaagaataattatttttcacataagctttttaaattggctttgatgaaactttgttccatagaaggaatctcaaataagactttttttttttttttttttgagacggagtctcactctgttgctcaggctggagtgcagtggcacgatctcgsctcactgcaagttcctcctcctgggttcacaccattctcctgcctcagcctcccaagtagctgggactacaggtgctaccatgcccagctaattttttgtatttttagtagagacggggtttcaccatgttagccaggatagtctcaatctcctgacttcatgatctgcctgcctcggcctcccaaagtgctgggattacaggcgtgaactactgtgcccagcccagataagactttttttaaagctgagtccagctatggaattgtaccatcaaatactacaagttgggtgaattcctctcctcttgaggttccaagataacttggggctcctgggcctgtcagaaagtggcattctttacttaccacaggtcaggaaccctgtgcagggactgtgtaga

SEQ ID NO: 233242 - DNA, 605 bp, Homo sapiens
aggagtggtttgctttattatacttggccagataatttgtttaaagtgcaacaagaataattatttttcacataagctttttaaattggctttgatgaaactttgttccatagaaggaatctcaaataagactttttttttttttttttttgagacggagtctcactctgttgctcaggctggagtgcagtggcacgatctcggctcactgcaagttcytcctcctgggttcacaccattctcctgcctcagcctcccaagtagctgggactacaggtgctaccatgcccagctaattttttgtatttttagtagagacggggtttcaccatgttagccaggatagtctcaatctcctgacttcatgatctgcctgcctcggcctcccaaagtgctgggattacaggcgtgaactactgtgcccagcccagataagactttttttaaagctgagtccagctatggaattgtaccatcaaatactacaagttgggtgaattcctctcctcttgaggttccaagataacttggggctcctgggcctgtcagaaagtggcattctttacttaccacaggtcaggaaccctgtgcagggactgtgtaga

SEQ ID NO: 233243 - DNA, 605 bp, Homo sapiens
aggagtggtttgctttattatacttggccagataatttgtttaaagtgcaacaagaataattatttttcacataagctttttaaattggctttgatgaaactttgttccatagaaggaatctcaaataagactttttttttttttttttttgagacggagtctcactctgttgctcaggctggagtgcagtggcacgatctcggctcactgcaagttcctcctcctgggttcacaccattctcctgcctcagcctcccaagtagctgggactacaggtgctaccatgcccagctaattttttgtatttttagtagagacggggtttcacyatgttagccaggatagtctcaatctcctgacttcatgatctgcctgcctcggcctcccaaagtgctgggattacaggcgtgaactactgtgcccagcccagataagactttttttaaagctgagtccagctatggaattgtaccatcaaatactacaagttgggtgaattcctctcctcttgaggttccaagataacttggggctcctgggcctgtcagaaagtggcattctttacttaccacaggtcaggaaccctgtgcagggactgtgtaga

SEQ ID NO: 233244 - DNA, 605 bp, Homo sapiens
aggagtggtttgctttattatacttggccagataatttgtttaaagtgcaacaagaataattatttttcacataagctttttaaattggctttgatgaaactttgttccatagaaggaatctcaaataagactttttttttttttttttttgagacggagtctcactctgttgctcaggctggagtgcagtggcacgatctcggctcactgcaagttcctcctcctgggttcacaccattctcctgcctcagcctcccaagtagctgggactacaggtgctaccatgcccagctaattttttgtatttttagtagagacggggtttcaccrtgttagccaggatagtctcaatctcctgacttcatgatctgcctgcctcggcctcccaaagtgctgggattacaggcgtgaactactgtgcccagcccagataagactttttttaaagctgagtccagctatggaattgtaccatcaaatactacaagttgggtgaattcctctcctcttgaggttccaagataacttggggctcctgggcctgtcagaaagtggcattctttacttaccacaggtcaggaaccctgtgcagggactgtgtaga

SEQ ID NO: 233245 - DNA, 609 bp, Homo sapiens
gcttctctccaaaattcagctgtagaccctgaagtccagctgcttcttctctctgctggctgagtctgagctctttataggtgcaagatggggtggagtgggccatggatggtttagaaaaagacaacatttgaggggaaaacagggatagaagttctcacattggcccackggctgcaggattttctgcttgagggtggagtttgttgggaacctgcccttttctgcctagaatttctctgccccctgtcactatcaatatcacaaaataggatcacaagtcattgtcaaataagtcatttatttaaccaaagcgataactcaaggatttcaaaaaaaagatgaaaaccttcattctttgagagagaagacttaattttccaaacaataagccctaataaaaacagtgtgaagccaattaaatttgtttttgaaaattttataaactatctattaaattttaaattgaccataagatataacttccacaagccttttattacctttataatctttattaaggagccagttaatgcttcaagaaaaccttgttaatctgacatacaggcccagatgctggttttgcatctgtgtgcctttgatattaat

SEQ ID NO: 233246 - DNA, 609 bp, Homo sapiens
gcttctctccaaaattcagctgtagaccctgaagtccagctgcttcttctctctgctggctgagtctgagctctttataggtgcaagatggggtggagtgggccatggatggtttagaaaaagacaacatttgaggggaaaacagggatagaagttctcacattggcccactggctgcaggattttctgcttgagggtggagtttgttgggaacctgcccttttctgcctagaatttctctgccccctgtcactatcaatatcacaaaataggatcacaagtcattgtcaaataagtcatttatttaaccaaagcgataactcaaggatttcaaaaaaaagatgaaaaccttcattctttgagagagaagacttaattttccaaacaataagccctaataaaaacagtgtgaagccaattaaatttgtttttgaaaattttataaacwatctattaaattttaaattgaccataagatataacttccacaagccttttattacctttataatctttattaaggagccagttaatgcttcaagaaaaccttgttaatctgacatacaggcccagatgctggttttgcatctgtgtgcctttgatattaat

SEQ ID NO: 233247 - DNA, 609 bp, Homo sapiens
gcttctctccaaaattcagctgtagaccctgaagtccagctgcttcttctctctgctggctgagtctgagctctttataggtgcaagatggggtggagtgggccatggatggtttagaaaaagacaacatttgaggggaaaacagggatagaagttctcacattggcccactggctgcaggattttctgcttgagggtggagtttgttgggaacctgcccttttctgcctagaatttctctgccccctgtcactatcaatatcacaaaataggatcacaagtcattgtcaaataagtcatttatttaaccaaagcgataactcaaggatttcaaaaaaaagatgaaaaccttcattctttgagagagaagacttaattttccaaacaataagccctaataaaaacagtgtgaagccaattaaatttgtttttgaaaattttataaactatctaytaaattttaaattgaccataagatataacttccacaagccttttattacctttataatctttattaaggagccagttaatgcttcaagaaaaccttgttaatctgacatacaggcccagatgctggttttgcatctgtgtgcctttgatattaat

SEQ ID NO: 233248 - DNA, 609 bp, Homo sapiens
gcttctctccaaaattcagctgtagaccctgaagtccagctgcttcttctctctgctggctgagtctgagctctttataggtgcaagatggggtggagtgggccatggatggtttagaaaaagacaacatttgaggggaaaacagggatagaagttctcacattggcccactggctgcaggattttctgcttgagggtggagtttgttgggaacctgcccttttctgcctagaatttctctgccccctgtcactatcaatatcacaaaataggatcacaagtcattgtcaaataagtcatttatttaaccaaagcgataactcaaggatttcaaaaaaaagatgaaaaccttcattctttgagagagaagacttaattttccaaacaataagccctaataaaaacagtgtgaagccaattaaatttgtttttgaaaattttataaactatctattaaattttaaattgaccataagatataacttccacaagccttttattacctttataatctttattaaggagccagttaatgcttcaagaaaaccttgttaatctgacatacaggcccagatgctgrttttgcatctgtgtgcctttgatattaat

SEQ ID NO: 233249 - DNA, 644 bp, Homo sapiens
taaccacatttatttcagaagctattccaatatcagacagtaaacttcaacaatgcagtaggcacaattacttttgcaccaatctaataacttagggaggaacttagtttatagtttagctttgaaacaaagacaataacagtcctttccctaaacaaacatccttcgtacaagtgcactagactgcctaaagtcacaagattagaagtcatggtaattttagtaaataattcaagatgtagctattttcattaaaccaatatcgatgtcttatttattagacaagcaaagatcattctgtttttggccgggtttacagttgacccctatgccaaattttgacaccttatagtatttgtcagggataartataaaattgcttaatcaataaatgcaaacaaaaatgtatgctggcaattcttaagacatttataatattactttagcaataattttaaagctagctcatttattaaagattttacttaagtcatgtaaactcgaaaaagcatttgactagtctttccttttttctgataaagtatttgatttaagtgcttttagttttctttaagttaattaattagggctcttttatatattttcagtagtgaaacattgtgtacacaacacataaatacata

SEQ ID NO: 233250 - DNA, 644 bp, Homo sapiens
taaccacatttatttcagaagctattccaatatcagacagtaaacttcaacaatgcagtaggcacaattacttttgcaccaatctaataacttagggaggaacttagtttatagtttagctttgaaacaaagacaataacagtcctttccctaaacaaacatccttcgtacaagtgcactagactgcctaaagtcacaagattagaagtcatggtaattttagtaaataattcaagatgtagctattttcattaaaccaatatcgatgtcttatttattagacaagcaaagatcattctgtttttggccgggtttacagttgacccctatgccaaattttgacaccttatagtatttgtcagggataaatataaaattgcttaatcaataaatgcaaacaaaaatgtatgctggcaattcttaagacatttataatattaytttagcaataattttaaagctagctcatttattaaagattttacttaagtcatgtaaactcgaaaaagcatttgactagtctttccttttttctgataaagtatttgatttaagtgcttttagttttctttaagttaattaattagggctcttttatatattttcagtagtgaaacattgtgtacacaacacataaatacata

SEQ ID NO: 233251 - DNA, 402 bp, Homo sapiens
gaattcaaagaggaaagatgagatacttacatgattcaataccgtgtaaactagaccgcatcaggttccagcacagatcatkccactgacagcttacaataccacaatttaatttcaagacaaacactccagatttcaaatttgagatgaatatatgtgatctgagaattacttccagagctttcaaagtggaatcgtatctctgcttaaacaccaaaacatggctaaaaactgatgcgaagatgagaaaatctctcacactgtggggagatcagagtaagggcaacatactgctaatcattcgattcaggtcataccaatcagcatcttatccttgagatcaggtattccgtctcaaagcaaaattaatgaataaaccagaaatcttttatcgccttctgt

SEQ ID NO: 233252 - DNA, 402 bp, Homo sapiens
gaattcaaagaggaaagatgagatacttacatgattcaataccgtgtaaactagaccgcatcaggttccagcacagatcatgccactgacagcttacaataccacaatttaatttcaagacaaacactccagatttcaaatttgagatgaatatatgtgatctgagaattacttccagagctttcaaagtggaatcgtatctctgcttaaacaccaaaacatggctaaaaactgatgcgaagatragaaaatctctcacactgtggggagatcagagtaagggcaacatactgctaatcattcgattcaggtcataccaatcagcatcttatccttgagatcaggtattccgtctcaaagcaaaattaatgaataaaccagaaatcttttatcgccttctgt

SEQ ID NO: 233253 - DNA, 546 bp, Homo sapiens
tatgcagctgtgaaccttgtgcttgggtgtagtaggtggtcggctcttttcttttctcctgttcacagcacgcttatagccagagcagactctatggtttgcctggagagagcttgcacacacatcgtcaccctgtctctggtggttgtggctgcagcctcccagacgcctctccctgtccccacccttgacacgcctggaatccgtgttctccctcgtttctccgacttcatcccaggacttggccctcacggctccaggagctgctgaggcagcttcatctcaaagccaggtcctctccctcctggtgacctggccaccaccttctgctccttaatgctctgtgctgcttccagcgccagtgcctttgcctgtgcgcacctgcctgcctcagtctctcctctcctcctcctctccacccagaaaactacaacactatcccttctctctcagcacctcctccaggaagccttcctggactcsccaggacatccaaccccttgatacaggctctcattaatcctggagttctccttctgaattcct

SEQ ID NO: 233254 - DNA, 493 bp, Homo sapiens
tttattgttattaagattattcttttttaaaaactggttaggttaattatatgaagctatatttttgcacagtctatctttttctaccctttagctttcagcctttgttcttatatttaaaatatgtgtaaagtaatatagttttaaaaatatccagtttggtagtctttattttttaattatttagtccagtcacattaaaataattatagttgagcttacttttaccatcttgctatctgtcttctatttgtcccatctttatttgttcctgtatttctaatttattttgctttctttatgattaatagtttttaaawccatttttctcccctttctggttatacagatttgtatgtttcatttagtgattagcctagagattataatatacaccctggacttactatagttcacctaaattgctactttgccacttcctgaatagtaaaatactttacaaaatgttagtcatttccctttctcccagctt

SEQ ID NO: 233255 - DNA, 600 bp, Homo sapiens
tgccaccaccatgtaaaaagtgcttttcactttcctctgtgattgtgaggcctccctaaccacawagagctgtgaggccattaagcctatttttcttcacagtctcaggtatatctttatcagcagcatgaaaatgggctcatacagaggaataccattgaaagaccttaattttatagaagtataagaaattcatgagcaaaaatgataaggatacaaaaagagtaatttcatctttaaaaatatatcaatccataacattttaatcaccaaatggtgtcagataaaagtgaaccaatctttctgatacctaataatcttttcacattgtgtatctgttcaatcagtaccttgctgaaaattttctagtggtgctctcgagctatcagataaaatactaactcctaacaatgtcatgcaatccctttcttttacctatcttaagattcctgtattagtctattttcatgctgctgataaagacatacccaagacgggataaaaagaggtttaattggacttacatttccacatgattggggaggcctccgatttatggcgggaggtgaaagaattattacatgctggcagcaagagaaa

SEQ ID NO: 233256 - DNA, 600 bp, Homo sapiens
tgccaccaccatgtaaaaagtgcttttcactttcctctgtgattgtgaggcctccctaaccacatagagctgtgaggccattaagcctatttttcttcacagtctcaggtatatctttatcagcagcatgaaaatgggctcatacagaggaataccattgaaagaccttaattttatagaagtataagaaattcatgagcaaaaatgataaggatacaaaaagagtaatttcatctttaaaaatatatcaatccataacattttaatcaccaaatggtgtcagataaaagtgaaccaatctttctgatacctaataatcttttcacattgtgtatctgttcaatcagtaccttgctgaaaattttctagtggtgctctcgagctatcagataaaatactaactcctaacaatgtcatgcaatccctttcttttacctatcttaagattcctgtattagtctrttttcatgctgctgataaagacatacccaagacgggataaaaagaggtttaattggacttacatttccacatgattggggaggcctccgatttatggcgggaggtgaaagaattattacatgctggcagcaagagaaa

SEQ ID NO: 233257 - DNA, 600 bp, Homo sapiens
tgccaccaccatgtaaaaagtgcttttcactttcctctgtgattgtgaggcctccctaaccacatagagctgtgaggccattaagcctatttttcttcacagtctcaggtatatctttatcagcagcatgaaaatgggctcatacagaggaataccattgaaagaccttaattttatagaagtataagaaattcatgagcaaaaatgataaggatacaaaaagagtaatttcatctttaaaaatatatcaatccataacattttaatcaccaaatggtgtcagataaaagtgaaccaatctttctgatacctaataatcttttcacattgtgtatctgttcaatcagtaccttgctgaaaattttctagtggtgctctcgagctatcagataaaatactaactcctaacaatgtcatgcaatccctttcttttacctatcttaagattcctgtattagtctatyttcatgctgctgataaagacatacccaagacgggataaaaagaggtttaattggacttacatttccacatgattggggaggcctccgatttatggcgggaggtgaaagaattattacatgctggcagcaagagaaa

SEQ ID NO: 233258 - DNA, 622 bp, Homo sapiens
agtgcttaaatcatctggagataaatatcatttggtgtccttgttttctaacaaatggctttttctattgtttccattaatttcacccatattcgtttttttaaaaacaaggcccttatcctcatcagcaaaacacagatgtatgatttagcatataaaatcggtaattacatactaatttacgaaagatttttttttctccttttcgtcagttttcaagaagtcttcccgtgattaactgtaaacaggaatggtttacatctcaaattagaagccattaattagcatgacgaagtcaactgcaagatacacagattatttaaattatttaatcactattcaccttggctaaactgtagtatactctttcaatatccttmggcaggttatcgatctgtcactaaattacctccagatcagttagacatgaatattagcgtcctttcctttccctcaggtttacattctcccttctcgtaaacacttaaaaaagctttaaggttctttaattccaaatacctaattagccatcactagcctttttgtaataaggaaaaagagtatctgaagtacaaatcaagagttcgctttgcccgtttaacaataaaaaactttaaaaaac

SEQ ID NO: 233259 - DNA, 550 bp, Homo sapiens
gatgaatttcacataaacttttatatttcaagaaaagtttctatatctcctagagagactayattatgtaaaaacgttaggtcttggctttccaaacttttactattatttgttaaccttgttatttaaactgcatggagatctttttaaagtgatattttatttttggaaacccataaaaatgttaaaataaacaaacaggaaaggatatagatggaatctgaactatccttatatgcaaaagagttggctgaacaaaaaattgcaaggatcattgctttgggaactaaaatctagaacttccaaataagacttttctttctatttgatatttacagactttgtacataaacaagtacaataaacaacttaataaatcttacagttaactgtcaatgctataattcacaaatgttttttatgtttaagaaaattaaaagggctatttggagtatttgttacatttaaaggacttagtaaaattcaattcaatatccactgttaaatacaaatagtttatttggctgaagggaagttttaatttttagca

SEQ ID NO: 233260 - DNA, 550 bp, Homo sapiens
gatgaatttcacataaacttttatatttcaagaaaagtttctatatctcctagagagactatattatgtaaaaacgttaggtcttggctttccaaacttttactattatttgttaaccttgytatttaaactgcatggagatctttttaaagtgatattttatttttggaaacccataaaaatgttaaaataaacaaacaggaaaggatatagatggaatctgaactatccttatatgcaaaagagttggctgaacaaaaaattgcaaggatcattgctttgggaactaaaatctagaacttccaaataagacttttctttctatttgatatttacagactttgtacataaacaagtacaataaacaacttaataaatcttacagttaactgtcaatgctataattcacaaatgttttttatgtttaagaaaattaaaagggctatttggagtatttgttacatttaaaggacttagtaaaattcaattcaatatccactgttaaatacaaatagtttatttggctgaagggaagttttaatttttagca

SEQ ID NO: 233261 - DNA, 427 bp, Homo sapiens
  misc_feature (1)...(427): n = A,T,C or G
nnnnnnatctttcaactatctgttaccactttctagacactgccaatagtaaaatcaattgttgragtaaatggaatggcttttggtataatgcacaaatgggtttaaattgaggattcaatatatgcgtgttttgtttaaatatttttgctttaagtgtaggttcatatgcagctgtaagaaataatacagagacattccatgtagactgatatggtttagctgtgttcccatccaaatctcatcttgaattgtagctctcataatccccacgtgtcatgggagggaaccagtggcccagtggcaagtaattgaatcatgtgggcagatttttcccatgctgttctggtgatagtgaataagtctcatgagatctgatgattttataaagagtagttcccctgcacatactttcttgcctgctgcc

SEQ ID NO: 233262 - DNA, 427 bp, Homo sapiens
  misc_feature (1)...(427): n = A,T,C or G
nnnnnnatctttcaactatctgttaccactttctagacactgccaatagtaaaatcaattgttggagtaaatggaatggcttttggtataatkcacaaatgggtttaaattgaggattcaatatatgcgtgttttgtttaaatatttttgctttaagtgtaggttcatatgcagctgtaagaaataatacagagacattccatgtagactgatatggtttagctgtgttcccatccaaatctcatcttgaattgtagctctcataatccccacgtgtcatgggagggaaccagtggcccagtggcaagtaattgaatcatgtgggcagatttttcccatgctgttctggtgatagtgaataagtctcatgagatctgatgattttataaagagtagttcccctgcacatactttcttgcctgctgcc

SEQ ID NO: 233263 - DNA, 427 bp, Homo sapiens
  misc_feature (1)...(427): n = A,T,C or G
nnnnnnatctttcaactatctgttaccactttctagacactgccaatagtaaaatcaattgttggagtaaatggaatggcttttggtataatgcacaaatgggtttaaattgaggattcaatatatgcgtgttttgtttaaatatttttgctttaagtgtaggttcatatgcagctgtaagaaataatacagagacattccaygtagactgatatggtttagctgtgttcccatccaaatctcatcttgaattgtagctctcataatccccacgtgtcatgggagggaaccagtggcccagtggcaagtaattgaatcatgtgggcagatttttcccatgctgttctggtgatagtgaataagtctcatgagatctgatgattttataaagagtagttcccctgcacatactttcttgcctgctgcc

SEQ ID NO: 233264 - DNA, 560 bp, Homo sapiens
aacatacacacacataaagaaatttaatttaaaggattggctcacacaattatagggacttcggaaagtctcaatctgtaagcaagccagcaggctggcaactccggcaggggaatgctacagtattgaggaagaatttcttttctgagaaatcttagattttgctctcaatgcctttcaactgattggtygaagctcatccacatcatcaaggacaatctcctttacttaaagtcagttgattgtagatgttagccacacatacaaaatagcttcaagcatcacctagatttgtgtttgattaaatagctgggtactaacctagccagattgatacataaaactaactatcacagcaatatataagggggcatatataaaacagttaatcaatcaaactgggaagctcaagataggttttatttaaaaatcgaattgaatttaactgagacttgaaataaaaatagagttaggtaaaaattaagggtaaattatagggtaaggtaggatcaagaagacaaaaaatcttatatagaaatattcaaacatgaaaagaatag

SEQ ID NO: 233265 - DNA, 565 bp, Homo sapiens
atagggtaaggtaggatcaagaagacaaaaaatcttatatagaaatattcaaacatgaaaagaatagtgctgattattttgtttctttcttttatataggaagcacaaaaaaaggaaggagtcaaggatgattttttgattccacagagtgagttatagaaccacaaaaagraaaatagtagagaaaaatcgtagtttcagtttggggtctgttaactttgaaatacctatgagccctccacacagagatatctagtaagaatataagaatatgggcctagagagattaggtttggtgttgttaactcaagtaatctaaatcttgggaatagatgaaatcacctggggaagtgtagggtgaagagacaggtatttagtcagtgacctgtggcacttaattcaccaagatttaataggaaaatacccaaaaaaggagattgagagagcagccaaatacataggtaatgtggagtgtgatatcagggaaaccaagaaaagggcttgttgtaagaaaagtgttgtggtcaagaatgttacgtcctgctgagatgtcaagcaagacaag

SEQ ID NO: 233266 - DNA, 561 bp, Homo sapiens
aggagttctagtctttttttttttcttttttaaaatcctctcagcgatcttttggcgcagaattttgcagatgaggaagctgctgattgagagagcaaataatagtcaaaatgcaaatatatgggaagaaaagatttgactccaaacagtatatacagayagtgactgcctcaaatgtctgtgtcctagatgctatattcagcgtgtcaccaacattacttttttttgttgttgttaaatatcaacgggcaggtattgctagccctattttaggaatgagtaaactgaggcacacaatttaagcaacttgcctaaagtcacaaagctaaataagtgatggaagtggaatgtaattcccacattcatgttgttacagggtatcatcagcccttgaaacaaaggaccacatgggacactgtgtgcagggcactggggcagtattagggcgcagactttagacttgggccttttctggagatttaatggtcggtctagttggaaaaaacaacctggatatatatgtgcgtgtagtcaacatttaaataaaaatttgcagattat

SEQ ID NO: 233267 - DNA, 176 bp, Homo sapiens
agaaaataggcatagggttagttttcttgccacgccccccccctcccccgccccctcaccactccagcctttttggaacacatttcggtgttctgatttggacctatgctccaaaataccttactggagggctgagggaaraaagtgacaagctgaaaaggtaattcaacagaatt

SEQ ID NO: 233268 - DNA, 433 bp, Homo sapiens
attttgaaacagtgaagcaaaccagttttttgtttcattggttttctttcttgcttttctgtttttaatgttatgctgttattttattatttcaatcttctgcttgctttgagtttattgtgttccttttttcctagatttttttttctggattcttgacatgggaacttagattattgatttgataatgcaattactgtttgttttaggccagtaaatattgaagttctttattacacgacaagagaaagctggaacagttatgaggtacccaacygaaattgagtcatgaacagcactgatgtaaactgcactgagcctttgcatttatgagtgtggagcaggataatatatcaagaattaggccagacacaatggcatatgtctgtaatcccagcactttgacaggccaaggcccaggagtttgagacca

SEQ ID NO: 233269 - DNA, 470 bp, Homo sapiens
cactgggtgatccagggctgtcccttaaccgccctgcgcctctgttgatgcagctgtgatatggggacacagatgtgtgtgtgtgtggcgccgatgtgcagcctttggtgagaggtccaaagctaaatgtggggtccattcagctagtcatgggctgtttctatgtgaaattgctgtctgcrgtgcaggaattgggaggtgacctggtaggtcttggatcaatgactagtaaatagatgcacagaagaaaaaaaaatgtccagggaaggggagtatgtccctgatggctgggaattatattgccatggcaaccacagctacgaaagagctcatcccagtatcaggcatttcttatcagtaagctatggtgcagaattttcctctgcaatagtaatatgtttttgtggtgtattttaagaataaagacaaaaaagaatgagcatgcctcagttccactgggcagcatctga

SEQ ID NO: 233270 - DNA, 472 bp, Homo sapiens
ggctcactgggtgatccagggctgtcccttaaccgccctgcgcctctgttgatgcagctgtgatatggggacacagatgtgtgtgtgtgtggcgccgatgtgcagcctttggtgagaggtccaaagctaaatgtggggtccattcagctagtcatgggctgtttctatgtgaaattgctgtctgcggtgcaggaattgggaggtgacctggtaggtcttggatcaatgactagtaaatagatgcacagaagaaaaaaaaatgtccagggaaggggagtatgtccctgatggctgggaattatattgccatggcaaccacagctacgaaagagctcatcccartatcaggcatttcttatcagtaagctatggtgcagaattttcctctgcaatagtaatatgtttttgtggtgtattttaagaataaagacaaaaaagaatgagcatgcctcagttccactgggcagcatct

SEQ ID NO: 233271 - DNA, 591 bp, Homo sapiens
gtcaaccattttcctctggatcccgatggctgtggctcaaaacattccgcacagctacwtttgcttccctcccctcacatctcttcagaaaacccacacatctgtatacacacttgaaaataaataagcataaatgcagaatccacactgaaggtggggggcaggacaggcctcgggggctcctctctgcacggaccctgcctgaagctgctctcctgccccaggacagcccaccccgggcaggctccaactgcagcattttctagaagtgtgagaactcttaccaacgtgctacctggctctgtggctccccagtcaacacaaacacaattttgaggtctgcagttcaaatttgcttcccctacaagcttctgagctgggttcatagggcaaaaaggcccgagtttcttttcaagtcaattggaaaccctccagccaagacccgtccccatacaccaactttaccaaggttttccttctcactaacacaacaaaagataaagcctctgctctgctctttttgagcttattcttgtccatttttcaaactcggcctcgttgttttgatcctcttggatcctggggattgaa

SEQ ID NO: 233272 - DNA, 506 bp, Homo sapiens
ttgctctggattaggctttggcttaaatgaacattatagctagtttgaccttctatccagaccactcaaactttctccaggtcagcaaaaggggtattttgctatgttatcattcgtgtgttcactggagtagcactttcaatttcttttacaaactcttcctttacattcacaatttggctaactgtttggctcaaaaggcttagcttttggcctrtctcagctttcaacatgccttcctcattcagcttaatcatgtctagcttaatcatttaatgtcagagatatgcaactcctccttactggaacacttactagccattagggttattaactggcctacttttaatattgttttgtctcagggaggcccaaggcaagggatatagacaaggaatgggcactcagaacacacacagcatttattgattaagttcgccatcttttattggaatggttcatggtgccccaaaacaattaaaataggccagaagcagtggctcaca

SEQ ID NO: 233273 - DNA, 506 bp, Homo sapiens
ttgctctggattaggctttggcttaaatgaacattatagctagtttgaccttctatccagaccactcaaactttctccaggtcagcaaaaggggtattttgctatgttatcattcgtgtgttcactggagtagcactttcaatttcttttacaaactcttcctttacattcacaatttggctaactgtttggctcaaaaggcttagcttttggcctgtctcagctttcaacatgccttcctcattcagcttaatcatgtctagcktaatcatttaatgtcagagatatgcaactcctccttactggaacacttactagccattagggttattaactggcctacttttaatattgttttgtctcagggaggcccaaggcaagggatatagacaaggaatgggcactcagaacacacacagcatttattgattaagttcgccatcttttattggaatggttcatggtgccccaaaacaattaaaataggccagaagcagtggctcaca

SEQ ID NO: 233274 - DNA, 558 bp, Homo sapiens
gttaatgttttcttcaaatctccataatgtacttaataaataagacttcaaaatattgcagtggtaaacaatttgtatggcacagggccctaccagacagagctaccataggagcctgtttaatgctgtgccaggaattaaacctttggttatggggagatgggacactagaagttgggaggtgcacagtgcttacgacaatggctatttactgactagtgcagaaatatttaaacattgtaactcactgaatgtccttacaggtacatactggcttatggaagtcctgatctcagtgtgagatcagttggtaataggcagccaaagaaacacaccactttgcatttatcattttatgatcctatctttgcattgccatttgagagcctagttctgtgacatctctagccatagtttgtaagggagagcccccaatgcactcttcatgatatgaatggtcttttgtcactcatgtattctttactgctttggtaaatggaatatctcagaacattggcattaggtgagttkttaggctttacaaaatatacccactcc

SEQ ID NO: 233275 - DNA, 462 bp, Homo sapiens
ttcatgatatgaatggtcttttgtcactcatgtattctttactgctttggtaaatggaatatctcagaacattggcattaggtgagttgttaggctttacaaaatatacccactcytgcatgctgcttctccgagcccttgtttccttctgctaccatagcaattttgacgtttctacttcatttatggtaggctgttgcttcctccaagcacactaacacttttcccaagggtccttgacaggatattacattctgtattccaggacaatgatcccacatcaacatatttttcctcattcaactttatgttctgtcccttttgatccagcacccctagaatctactacgactcctagttttttctggtccatgttgactagatcctacacctcctttggtgtcctttatcccccttgtcaggtctaacacttctccagccaggttatgttgtgattttaac

SEQ ID NO: 233276 - DNA, 562 bp, Homo sapiens
agaagaattaatgctaatgcccctcaaatgtttcaaaaaaatagaagaagagagatcacttccaaactcattttaggaggccagcattactgataccaaagccagacaaggacactacaagaaaagacaaaggccaatatctctgatgatcatgcaaaacctcaacaaaatactaacaaactaaattcgacagcacattcaaagaagaattcaccatgatcaagtgtggtttatctcctgggtgcaaggatggttcaacayaaagcaataaatgtgatacatcacattaacagaatgaaggacaaaaaccacatgataatctcaatagatgcagaaaaaacatccagtaaaattccaaatcatttcaaaataaaaattttaaaccagttaggtataggaggattgtacctcaccacaataaaagccatatacaacaaacaagccacagctaacattatacttaatggtagtaagttgagagcgtttcttctaagataagaaacaagacaaggatgcttattcttaccacttctattctacagaacactggcagccccaggca

SEQ ID NO: 233277 - DNA, 414 bp, Homo sapiens
tccatgccagacaaaagaacctactgccaagacaccagtatttcattagcagtcagagtgatgtaaaaatgtaactgggcactcactcctggaccatttgtttaagtcccttctcaaagacatctatggctctagttgctcaacaataaggtctcaaggaagagattgaggggctctccattagatgcttatcatcatttaatagtcatgggggcacaacacagagccccactacagtccaaatagtgaggwctcctgtagctaataaaagcgctatcctggatacccaaagtggtggagcaagatggtcaaatagaaggttacaccaattatccctcttgcaggaacaacaaatttaaaactatctatacaggaaaaagcaccttagtaggaaccaaaaatctgctgaacact

SEQ ID NO: 233278 - DNA, 400 bp, Homo sapiens
atgggctaaaagttccctggaacttaacttcaaaggcaatataggccacaaggactgcaactcctaggcaagtcctagtgctgagccggattcagagccagtggacttagggggcatctactgagacaccagccaggacagctaaaggagtgctgtgccacccctactccaaacccaggcagtgcaactcacagctccaaaaaagaccttcttcttgaggagaagagagggatgaataaaaaagatttcatcttgtatcttggataccagctcagccacagtaggatagggcactgggcagaattttgaggcctccgttccaggcctyagttcctggatgacacttctagacacatcctgggccaaaagggaacttgccaccttcaagagaagaattcag

SEQ ID NO: 233279 - DNA, 477 bp, Homo sapiens
attttagctatacaaaaaagaaaattcaaataaatacaattataaatgagagatgagacattacaactgaccacagaaatacaaaaaattatgactattatgaacaattatacaccaaaaattgaataatctagaacaaatgtataaattcatagaaatatgtaacttaccaagactgcaatatatgtctttatgggcctggattatttcacttagcataatatcctccaggttcatcaatgccgttgcaactgacagaacttctttatttaaggccacataatatttcgttgtgtatatatacagcacatttttatctattcatttgtcaaaggacactgatatggtttgtgtgtgtccccacccaaayctcatattgaattgtagtttccataatccccatgtgtcatgggagggacccagcaggaggtaattgaatgatgagggcgccaacctccatgctattctcatgatagt

SEQ ID NO: 233280 - DNA, 561 bp, Homo sapiens
gttgtggccaatttctcctatttggaatgggtgtatttacccagtgcatgttcccccattgtatctggaaagtaagcctttgatttcacagggtgataggcagaagggacttgccttgtctcacaagtacttagacttttgagttaatgctggaataagttaagactttgggggactgttggaagggcatgattgtgttttgaaatgtgaggacatgagatttgggaggggccgggtggaatgatatggtttggctcgccgcacccaaatctcatcttgaattgtagctcccataatccccacatgacatgggagggacccagtgggaggtgactgaatcacgggggcagttacccccatgctattctcatgattgtgagttatcacaagatctgatggttttctgaggkgctttccccctttgattggcacttctctctcctgctgccttgtgaagaaggatgtgtttgcttccccttctgccatgattgtaagtttcctgaggccacccagccatgcagaactgtgagtcaagtaaatctcttttctttataaattacc

SEQ ID NO: 233281 - DNA, 616 bp, Homo sapiens
gtgaaagcaaaaaccccttataaaaccatcagagctcatgagacttattcactagcagcagtatgggggaaatcgccctcgtgattcattatctcccactgggtccctcccacaacatgyggaaattataggagtacaattcaagaagagatttgggtgggaacataggcaaaccatatcaccagccataaaacagaaatggtgccctgtcatttgcaacaacatggatgaacctagaggaatattatgtcaagtaaaacaagccaggcaagaaagacaaactccatatgatctcactcatatgtggaatctaaaaaagttgattttatggaaatagtagaatagtgcttatcagaggctgtggaggggttgggggaggaggaacagcaagtggcttattaatgcgtacacagatacagttagacatgaagaagaagttttagtgttctgttccacagtagggtactacagcaaataacattgtagtgtataattcaagatagctagacaagaagattttgaatgttattaccataaaaatgaccagttcttctagcgatatatatggtaatttccctgattcaatcattatactatgtatacatggactaaaaca

SEQ ID NO: 233282 - DNA, 616 bp, Homo sapiens
gtgaaagcaaaaaccccttataaaaccatcagagctcatgagacttattcactagcagcagtatgggggaaatcgccctcgtgattcattatctcccactgggtccctcccacaacatgcggaaattataggagtacaattcaagaagagatttgggtgggaacatagscaaaccatatcaccagccataaaacagaaatggtgccctgtcatttgcaacaacatggatgaacctagaggaatattatgtcaagtaaaacaagccaggcaagaaagacaaactccatatgatctcactcatatgtggaatctaaaaaagttgattttatggaaatagtagaatagtgcttatcagaggctgtggaggggttgggggaggaggaacagcaagtggcttattaatgcgtacacagatacagttagacatgaagaagaagttttagtgttctgttccacagtagggtactacagcaaataacattgtagtgtataattcaagatagctagacaagaagattttgaatgttattaccataaaaatgaccagttcttctagcgatatatatggtaatttccctgattcaatcattatactatgtatacatggactaaaaca

SEQ ID NO: 233283 - DNA, 478 bp, Homo sapiens
cgagaactcactatcacaaggacagtactaagaggatggtgctaaaccatttataggaaatttgccccattatacagtcacctcccaccatgccccacctccaacactggggattacaattcaacatgagattttggtggggacacagatccaaaccatattagcccttgtgtatcaatagtaaccttgaatataaatgagttccccacttaaaagctatagaccaactgaatggattttttaaaaaatgactcaagtatatgtagcctatggaaattcaaagtaaaaggatagaatttaaaaattccatgcaaacaaaaaccaaaagcaagcaagaacagctatatctatatcagataaaaaagactctaagtcaaaacagtaaaaagtgacaaagaagatcattacataataataacaggatcaactcagccagaggatataacarttctaaatatatatgcaaacaacatcaaag

SEQ ID NO: 233284 - DNA, 498 bp, Homo sapiens
atcatgtatttaccccattttacagattagaaaaatgaaactgacccaggcacagtggctcacatctgtaatcccagcactttgggaggccgaggtgggcggatcacctgaggtcagaagttcgagaccatcctggccaacatggtgaaaccccatctytaaaaaattagccaggtgtggtggcgagcaccggtaatcccagctactctggaggctgaggctggagaatcgcttgaacccgggagatggaggttgcagtgagccgagatcacgccattgcactccagcctgggggacaagagcaaaactctgtctcaaaaaaaaaaacaaaaatgaaactgataaagttcagcaatttgcccaatgcccctaactagtgttttggaaaggggagtttatatccaggtctgaccccaaaatctatgctctttccactgggcaagcctgcctcccttcccccaggtaccatttattagactcctactatgtgccaagtaa

SEQ ID NO: 233285 - DNA, 527 bp, Homo sapiens
ggggaaaacttgaatgccatctttggggaaggaagatgaagaaatgagaaaaaaaatagagaaggaaatagagagatagttatctttacaaaaagaagcagaggagagatataagaaacaatgttattggttacctacaaaatgagggagaggactggggaagaaaatatactcctctaagtataactttttgcatatatattgttttactttcaaaagtagtttcatgtcctacaatttcaaaaacaaaattaaatcaacaaggaaaagaaggtggggtgaaaattaaaaggaaataatgaaatgaaatcattgaagaaaaaataaaagcagtaactcatcaatatagtatttgacataaaccctcacwattggacatgagaggtggaggtggagtgtaaacaaatcatgaaatctttttagttgttgttctagtatgtgttaagcaatctgaactcaatttgagaggaattagaatagggagcaaatagctaaaggtattcatgtggttcagagctccagctaac

SEQ ID NO: 233286 - DNA, 527 bp, Homo sapiens
ggggaaaacttgaatgccatctttggggaaggaagatgaagaaatgagaaaaaaaatagagaaggaaatagagagatagttatctttacaaaaagaagcagaggagagatataagaaacaatgttattggttacctacaaaatgagggagaggactggggaagaaaatatactcctctaagtataactttttgcatatatattgttttactttcaaaagtagtttcatgtcctacaatttcaaaaacaaaattaaatcaacaaggaaaagaaggtggggtgaaaattaaaaggaaataatgaaatgaaatcattgaagaaaaaataaaagcagtaactcatcaatatagtatttgacataaaccctcactrttggacatgagaggtggaggtggagtgtaaacaaatcatgaaatctttttagttgttgttctagtatgtgttaagcaatctgaactcaatttgagaggaattagaatagggagcaaatagctaaaggtattcatgtggttcagagctccagctaac

SEQ ID NO: 233287 - DNA, 629 bp, Homo sapiens
tgtacagactgctgatggtttattttggatctgtagcagccttggaaatagaactgagttttatatagatctttccgagtcagggtagccctaagctctttatagagcagtaattttggctgtgtctaaataagacccatccttacagctgaaagataaaaaaaattcagataatgaaccatttaattttttctgtataatgtcacataaatggtttgatttggggcttccaaaactgcwcggctattttggctttatggatgcatcttttgcaagtctcaatgccctgtaaaagtgggaaggctgtcagaaatatctttaagtaggccgggtgtggtggctcatgcttgtaatcccagcactttgagaggcgagggtgggaggatcactggagtccaggagtttgagaccagcccgggcaacatagcaagacctcacctttaaaataaaaacaaaattaaccatgtgtggtggtgcacacctgtagtcccaactattcaggagactgaggtgggaggatcacttgagccaaggacttcaaggctgcagtgagctatccagcctcggtgacagagcaagttcttatctcaaaaaacaaaaaaacaaaaagaatgtcctaggtagcctac

SEQ ID NO: 233288 - DNA, 629 bp, Homo sapiens
tgtacagactgctgatggtttattttggatctgtagcagccttggaaatagaactgagttttatatagatctttccgagtcagggtagccctaagctctttatagagcagtaattttggctgtgtctaaataagacccatccttacagctgaaagataaaaaaaattcagataatgaaccatttaattttttctgtataatgtcacataaatggtttgatttggggcttccaaaactgcayggctattttggctttatggatgcatcttttgcaagtctcaatgccctgtaaaagtgggaaggctgtcagaaatatctttaagtaggccgggtgtggtggctcatgcttgtaatcccagcactttgagaggcgagggtgggaggatcactggagtccaggagtttgagaccagcccgggcaacatagcaagacctcacctttaaaataaaaacaaaattaaccatgtgtggtggtgcacacctgtagtcccaactattcaggagactgaggtgggaggatcacttgagccaaggacttcaaggctgcagtgagctatccagcctcggtgacagagcaagttcttatctcaaaaaacaaaaaaacaaaaagaatgtcctaggtagcctac

SEQ ID NO: 233289 - DNA, 229 bp, Homo sapiens
tatatgtaaagtccacatttcacagtctttgacagttaatagatatccaatgtttatttactgtcataagtgattytaaaatgtctccaaggattaaaaaactgtatgaatgtgttcctgtatacaaactaatttagcagtacatagctatattgtatacattatatcctctcagtgtatagagattatttataattccttgattatatgttttcaatgagacattttc

SEQ ID NO: 233290 - DNA, 390 bp, Homo sapiens
tagacggtcagctgagaagctgagaccctagagaacatggctggacagaatgtgagttggactccatttgcagctagccaaactttccattatttaagytgactttgtggtggttctgcatctcatgtggactgccttgtacctctttgaagatgatttgtgtatctttggttaagtcagaaccttaagccttggttaaggcttatgtatttcgcttgggagagtacctttggtgaaaaaaaaaagattcgaaagccagaaatatcagctccttgtcacagctaaaatttgaataacaagagatttgaaagatttttattttaagaagctatatggccagaagtcagccgaattaaaggctgatatccaatctgtattgtcaaaaagaaa

SEQ ID NO: 233291 - DNA, 390 bp, Homo sapiens
tagacggtcagctgagaagctgagaccctagagaacatggctggacagaatgtgagttggactccatttgcagctagccaaactttccattatttaagttgactttgtggtggttctgcatctcatgtggactgccttgtacctctttgaagatgatttgtgtatctttggttaagtcagaaccttaagccttggttaaggcttatgtatttcgcttgggagagtacctttrgtgaaaaaaaaaagattcgaaagccagaaatatcagctccttgtcacagctaaaatttgaataacaagagatttgaaagatttttattttaagaagctatatggccagaagtcagccgaattaaaggctgatatccaatctgtattgtcaaaaagaaa

SEQ ID NO: 233292 - DNA, 390 bp, Homo sapiens
tagacggtcagctgagaagctgagaccctagagaacatggctggacagaatgtgagttggactccatttgcagctagccaaactttccattatttaagttgactttgtggtggttctgcatctcatgtggactgccttgtacctctttgaagatgatttgtgtatctttggttaagtcagaaccttaagccttggttaaggcttatgtatttcgcttgggagagtacctttggtgaaaaaaaaaagattcraaagccagaaatatcagctccttgtcacagctaaaatttgaataacaagagatttgaaagatttttattttaagaagctatatggccagaagtcagccgaattaaaggctgatatccaatctgtattgtcaaaaagaaa

SEQ ID NO: 233293 - DNA, 390 bp, Homo sapiens
tagacggtcagctgagaagctgagaccctagagaacatggctggacagaatgtgagttggactccatttgcagctagccaaactttccattatttaagttgactttgtggtggttctgcatctcatgtggactgccttgtacctctttgaagatgatttgtgtatctttggttaagtcagaaccttaagccttggttaaggcttatgtatttcgcttgggagagtacctttggtgaaaaaaaaaagattcgaaagccagaaatatcagctccttgtcacagctaaaatttgaataacaagagatttgaaagatttttmttttaagaagctatatggccagaagtcagccgaattaaaggctgatatccaatctgtattgtcaaaaagaaa

SEQ ID NO: 233294 - DNA, 493 bp, Homo sapiens
ttaagttacaacccttaaatgctaagtttatgtgattttagtaatctttgattaatcattaaggtttgaagattattggtaaaataaaatagacatatattcaaaatttaatgtagacattttttttttccccggggtctacttgtcagactggtttatactgtctgctacatccygtaaggtcataaaactgttgttttctgatatttttgacacttgcttaatttgtctgttatcttataaagaagtgaaaatgtgtttttttgttaaagggaaagaaatttggctagtttagaggttttgaaagttataaattgacagaaaaggaattatagataaaactaaatagatataaaaagctgggaaagaaaatgggaaaattattaagggttataaaaagtttgtagaaatcatattattttgtgtggtcaaagataattgggattgaatagatctacctaaaattttattaaaattagctttagtattgata

SEQ ID NO: 233295 - DNA, 493 bp, Homo sapiens
ttaagttacaacccttaaatgctaagtttatgtgattttagtaatctttgattaatcattaaggtttgaagattattggtaaaataaaatagacatatattcaaaatttaatgtagacattttttttttccccggggtctacttgtcagactggtttatactgtctgctacatcccgtaaggtcataaaactgttgttttctgatatttttgacmcttgcttaatttgtctgttatcttataaagaagtgaaaatgtgtttttttgttaaagggaaagaaatttggctagtttagaggttttgaaagttataaattgacagaaaaggaattatagataaaactaaatagatataaaaagctgggaaagaaaatgggaaaattattaagggttataaaaagtttgtagaaatcatattattttgtgtggtcaaagataattgggattgaatagatctacctaaaattttattaaaattagctttagtattgata

SEQ ID NO: 233296 - DNA, 607 bp, Homo sapiens
gcaaatttgataaccttatctctaaactactttagcttattcttaggaatcctgattctaattgtagccaaatacaaaggactacatatattttcaaacctccctgaaggcgcatctttttatgagatgagattgctacacattttgtttttaaaaagtccttagtaaatgaaggtatataccatgttcatgaactggaagacctaatattataaagatgtgcattctccccaaatagatctctagattctatgcaattttaatacaaatgtgaatagaaattttgttttgggtagaactaaacaaactcactctaaaatttgttaatagattccaagacaatcttaagaaagaacaaaataagaaggctttccataccagatgccatgacttattataaagcaatagagatgagraaagtgtggtattgtcactcaataatatgtttattaaatatagaacctaattgagaggcccaacacagacatgacatgtagaaacttgatttagaaaaaggtttgatgctgagggtcagtggaaaaaaaaatggtatttttaatcaataaatctgggaccacttagtatgcatgtttttataaaagaattt

SEQ ID NO: 233297 - DNA, 522 bp, Homo sapiens
tgttcatcccctgtctcacttcytcccttcctctttttcttcttttctttcttcctctaaaaagtacatatagtatctagaaaattgacaggcataggaagaggctttagatgcttgatttgatttggatttgtatctaagcccaaatctcatgtcaaattgtagttctcagtgttggaagagaggcctggtgggaggtgattggatcatgagggaagatttcccccttgctgcttgtgcgatactgagtgagttcttagaagatctgattgtttaaaagtgtgtagcacctccccttttcttctcctccttctgctccagccatggaagacatgccttcttccccttccccttctgccataattgtaagtttctttagtcctccccagccgtgcttcctgcactgcatgtggagccatgagccaactaaacctcttttctctataagttacccagtttcaggtatttctttaaaaatgtgcaaacagactaatacatgcttaactactttttatcaagtaa

SEQ ID NO: 233298 - DNA, 522 bp, Homo sapiens
tgttcatcccctgtctcacttcttcccttcctctttttcttcttttctttcttcctctaaaaagtacatatagtrtctagaaaattgacaggcataggaagaggctttagatgcttgatttgatttggatttgtatctaagcccaaatctcatgtcaaattgtagttctcagtgttggaagagaggcctggtgggaggtgattggatcatgagggaagatttcccccttgctgcttgtgcgatactgagtgagttcttagaagatctgattgtttaaaagtgtgtagcacctccccttttcttctcctccttctgctccagccatggaagacatgccttcttccccttccccttctgccataattgtaagtttctttagtcctccccagccgtgcttcctgcactgcatgtggagccatgagccaactaaacctcttttctctataagttacccagtttcaggtatttctttaaaaatgtgcaaacagactaatacatgcttaactactttttatcaagtaa

SEQ ID NO: 233299 - DNA, 522 bp, Homo sapiens
tgttcatcccctgtctcacttcttcccttcctctttttcttcttttctttcttcctctaaaaagtacatatagtatctagaaaattgacaggcataggaagaggctttagatgcttgatttgatttggatttgtatctaagcccaaatctcatgtcaaattgtagttctcagtgttggaagagaggcctggtgggaggtgattggatcatgagggaagatttcccccttgctgcttgtgcgatactgagtgagttcttagaagatctgattgtttaaaagtgtgtagcacctccccttttcttctcctccttctgctccagccmtggaagacatgccttcttccccttccccttctgccataattgtaagtttctttagtcctccccagccgtgcttcctgcactgcatgtggagccatgagccaactaaacctcttttctctataagttacccagtttcaggtatttctttaaaaatgtgcaaacagactaatacatgcttaactactttttatcaagtaa

SEQ ID NO: 233300 - DNA, 522 bp, Homo sapiens
tgttcatcccctgtctcacttcttcccttcctctttttcttcttttctttcttcctctaaaaagtacatatagtatctagaaaattgacaggcataggaagaggctttagatgcttgatttgatttggatttgtatctaagcccaaatctcatgtcaaattgtagttctcagtgttggaagagaggcctggtgggaggtgattggatcatgagggaagatttcccccttgctgcttgtgcgatactgagtgagttcttagaagatctgattgtttaaaagtgtgtagcacctccccttttcttctcctccttctgctccagccatggaagacatgccttcttccccttccccttctgccataattgtaagtttctttagtcctccccagccrtgcttcctgcactgcatgtggagccatgagccaactaaacctcttttctctataagttacccagtttcaggtatttctttaaaaatgtgcaaacagactaatacatgcttaactactttttatcaagtaa

SEQ ID NO: 233301 - DNA, 481 bp, Homo sapiens
gccactttatatctgacctccctgtctgctgtttacttgatctcaattcattccacataatgacagactgatcttgctgaaacattccctaaacatacaaagcctttcttcaaaatccctaagtgtggctccagataaagttcaacatttcatcctgccatccaagaaattccaggattgaatcccaacatacttaatagtcacagccaccaacccctrctttcacatctgtcctaagcagccttgctggttgagcctttacaaatcttttctatctctgtccaaatgtcaggactatataaattttttacttgtcaactaaaagtgttacttgctctccaaataattaaattcatttaaaaaggacagctttgaaaatggaagagaataaaaatggccctgtaaacataatgataaatgtgtaaatactgatttaaaaaaaaaaaaacagtgcatgcaggacagaaacaacagcagcctc

SEQ ID NO: 233302 - DNA, 535 bp, Homo sapiens
aattcacccagaagttttttttctgtcttgtgctttgtatccaaaacttttattataaaaaaagaatgccatatattacaagtttgagacatactatgcattatttttaatacctgtgacattactttctaactaatggcctaatttgacaaagtaagcctctagtctcatcactccatatcaatatgaatgtcttcttctctttacaaggctatcttacagataaaatttatcttggaaagtattctttacatacatacatacatacayacacacacacacacacacacacacacacacacaccacacacatatatacacacagataaaaagcgttgggaattttaaaaattctgacgaggctctttgcttaataaatgtggtgttcctatatgtattttaagcatatctatctagaaatttgttgtttcctatgcagaaaataaaacactgtatagaaataatgagaaactcaaactccctcaccctttgttgcataataatcaatgtaagatattataaggaagtatttatt

SEQ ID NO: 233303 - DNA, 535 bp, Homo sapiens
aattcacccagaagttttttttctgtcttgtgctttgtatccaaaacttttattataaaaaaagaatgccatatattacaagtttgagacatactatgcattatttttaatacctgtgacattactttctaactaatggcctaatttgacaaagtaagcctctagtctcatcactccatatcaatatgaatgtcttcttctctttacaaggctatcttacagataaaatttatcttggaaagtattctttacatacatacatacatacatacacacacacacacacacacacacacacacacaccacacacatatatacacacagataaaaagcgttgggaattttaaaaattctgacgaggctctttscttaataaatgtggtgttcctatatgtattttaagcatatctatctagaaatttgttgtttcctatgcagaaaataaaacactgtatagaaataatgagaaactcaaactccctcaccctttgttgcataataatcaatgtaagatattataaggaagtatttatt

SEQ ID NO: 233304 - DNA, 629 bp, Homo sapiens
ctgaactttaaaaatacatgaaaatgtcaaaattatatggccatggattgttttatgcagattcttttgagaaattttgttggtgactctatcaaatgttttaacaagagacttttttttaagtagccatagagggtctctagtaaatgtttgcttacaaacagaatattgaagactcccttagattgtattttaaaaaatacaatagaggattagtcagaggagtgaagttattcttaggagaataacttgagctagcagggtgagaaacagatcaaggaatttatttgctttgttttacattcttagaagacctacatttcaacatcccttttagactgtggyattttcagcatccaggcttgcagcagtgaccagaatagtatgtttatctgtgaggctataataccttttcttctaaaacctacatacctaccactaagacatttacctagaaaaagccaacattaaattaaatagcttttgaacaaaagctatagaatagaaagtgaaattatttatcatggatccatgataaatagacagtcaattgagataagaagaaaataaaaagttcatttgactctgaatttttgaaaataattctgcatggcctgaacttctagata

SEQ ID NO: 233305 - DNA, 597 bp, Homo sapiens
agatttacagttcaatgaatttttacatttgtaaactaccatacaaatcagcatggagtacattttctaccaccccagagataagtactgtactgtcatggggttcataatctggagaagaagttaagctataagggaggttctgaagctctatgagagcatctaacaaggaacttaatttcattaaggagtcaagtatcccaaggaagagrcatttaaatagagacttgagagattagaagttaacctggcaaaggatcattttgtttgggacttttttgcaaggttggtatagcatgtgcaagtcccaccattcaaaaggtaagagacagcatgtaatgtttaagaaacagaaacaactatgaaggaaaacatggaataagaattcaggtaagtaagtaccatacaagtttagtgttccctttagctgatcctgaatagcttctgacacttccacataatattgatgagaaataaactacttgattggaacaaaccaaagaatatagtaatttttctccttatgtctgagttttccagaaccttctctctaggccaaagcctccctttcctaactctgctcttacaactccttcc

SEQ ID NO: 233306 - DNA, 543 bp, Homo sapiens
acaggcaaacactgacacattagcattcagtgatctcttcccagaaggaaaaacctaacagacaaagaagtatgcagaaagaagataaaagaaagacagcatgcattgaaagaagaaaatagtttttaaatcacttgaagatttttctctcaattcttgctttctttaataaagtgaaggagcttctgtaacttactgcaaaggagcaaggagcaaaagttacattgtttcaaatttcatttgccttcagcaaggttttgaaaactatgaaaactattttatgaaacataaaaaagtggttttcctgtcattaataaatgttattcttacagcctcaccaatgaaatctcgtcttctcaggaaaaaattcaagtttatcctattgaaatttgacttacacctttctgatgtcaggacatagtaccaaaatgtatatattaagcataattatttaattaaacatattttaattaaatccagacttwtttgacaggcatttcaaattgtcttattttaatcatgcctcatttatctgttatctca

SEQ ID NO: 233307 - DNA, 462 bp, Homo sapiens
tttatcagtggatttttctgtggttatattgtagttactattttttcttatactggaaatctaaatagtcataatcctaaaaaagatgactttataaagtagtttatgcagatgtcccaattctaacaatgattaaaaatattttttcaaaaaataaactatgatttagcaagcattattttattacaatcatactcttaaaacactttaattagacattttagctatgtgtagactacatcattacaagcatcaataagtaaatttatttaagagcaatgttttgcyttatgtgaattagagcttctgagcatcagtataacaaattatttttaataaatgcttaagactgtgttacttgttttaaataatgatgtcaatttattttattgtcatgatgatgtaacatatacaattttaatgaatgctgagtattatgtttactgttgttatagttattac

SEQ ID NO: 233308 - DNA, 572 bp, Homo sapiens
gagtccgaatacattctcttgattttcattttataatttaatttatctgtacttatataggttaatgattgtcagaagaagaggagaaggagctgccttgagggttaaagagttgtaatgatttttcacttgtcccaagtctagtaaattaaatgaacaatatttttgagtctctgtgacaacaaaaacttctactatcttacttaatcctgtgtgactgggttattcattattttgtgtcaaattttcatgaatggattcaaacattttcctcatttagactgcagcctcccattttgtcaaattggcagactcttctgacacaccctatcaaagatttaaaacaacttttgttttaatccrctttgtctattggtgccttcatcacttggtcttttaatatcattaaaatattaatgtgttatgtagttttaactgtttccaagggccttacaaaaaattttgtgaacggattctttacttgtgactgataaaacacaactatatgctcttctctcatatgttcacagctaattaaactttgtttcattaatactataatatttcttaat

SEQ ID NO: 233309 - DNA, 598 bp, Homo sapiens
ggtaactcattttgcctacatacttcaaatgctgagaaaatacaaggtggtttctgagaacatgaaaaaaaaagacttttcttagggaataaacaaaaaagcaagcattcttttaaggtacatcaccatataactatccccaaaacagtggtctcttggggaactagagctactgtgcaaatrtagggatctctagcagagagtttacagctccttccattccacccttccaagatggctgcttccaaagtacagtgaataaggtcaggtataccacaatataactcagcataggagctcaactagaatcaataagattctcgtgaatgtagaagttacagtattaggacagcaactgagcaatattttattattttattattaaacttttgtctctaaaatcacagctagcttatatttacattacataccaaaatgctatggatattgaacatagattagtacttgtgattactagtcattagctatatcatcattaatccacagctagtttactaaatataagctctgagtcaacggccataccctcttgtcccagcatactgtttcatctctctttctgctcccagatgtcctc

SEQ ID NO: 233310 - DNA, 598 bp, Homo sapiens
ggtaactcattttgcctacatacttcaaatgctgagaaaatacaaggtggtttctgagaacatgaaaaaaaaagacttttcttagggaataaacaaaaaagcaagcattcttttaaggtacatcaccatataactatccccaaaacagtggtctcttggggaactagagctactgtgcaaatatagggatctctagcagagagtttacagctccttccattccacccttccaagatggctgcttccaaagtacagtgaataaggtcaggtataccacaatataactcagcataggagctcaactagaatcaataagattctcgtgaatgtagaagttacagtattaggacagcaactgagcaatattttattattttattattaaacttttgtctctaaaatcacagctagcttatatttacattacataccaaaatgctatggatattgaacatagattagtacttgtgattactagtcattagctatatcatcattaatccacagctagtttactaaatataagctctgagtcaackgccataccctcttgtcccagcatactgtttcatctctctttctgctcccagatgtcctc

SEQ ID NO: 233311 - DNA, 335 bp, Homo sapiens
ataaccttaaggcactcacctgtattcggttcctgaagtcagatactgctatagagtgctctctgagagattgtatttccctctaagtgcactcttttcttcttgaatatgcttgtgctcaattttgtcctatttgcttgcaccaacttcaattattaaacagtaaatctaaagcagtaattaattcagtttgtgtagtcttggatttttgctctagcagagtttgtttctttgttttctttttaataktaggagagtccctatatttgacagaagctcagtttttgtgggggagggttggtatggcacctaccctactgataatacatagatct

SEQ ID NO: 233312 - DNA, 491 bp, Homo sapiens
agttatctaattctgaatagaagcagaatgttgtgttttctcaggagaaaaacacaaaattctaatgaatctgtgaagtacttgcattatatttctaatagtaatataacatcccatatccactttagcattaaccattgatttaaaggcacatacrctgtcttttgattcaatgccagattgcctgggacaggccttggcaattagatcactgcaaatagaacactgacaataaagattatataggagcttcaatttcaattgtgaggaagtgctcaatctcacagaatttcaaatccatgttcattactgaatctcctactaagtttctactctgaggtaggcaataagttttcaacatatttccacagtagatataatggtcaggtaatagataccaatatttcttacatctcaaatctatttctgtgggtctcaccctctgtaatttttttctgggtttcaatttaaccactgagaaatatttactc

SEQ ID NO: 233313 - DNA, 603 bp, Homo sapiens
cactctcctgctagaacctccaaacaagctctcaatttagttcaacaaacatttattggatgttttgtgtatgtcaggcactgttttagatagctcatttgaaatagtggtcttcaaatgtattcatcttgtactcttagcaatagcatacaaacaaataaataataaataatattttaaatgatcatgatagagatcagagacaggtatattatttctataaatttcatattaatatgttagcctcaacagaaaattattagggaatatatgaaagtatatatatatatatatatatatatatatatatatatatatatawaatttataatgttttcttatcaaaactcaatagatggttcttttcgacaccccagtgtaagtctctgctgttaaatgaatatacgaacttaatgttattgcttttaaaatgaagacatttttcacatttccaataggtattaggttggtgcaaaagtaattgtgatatttgcattaataaaactatttatagggcaaataaatgaggaaaaaagactgggctcatcacccatgacaaagggcagaataggccatacacagatatttaaaatagcaaatttg

SEQ ID NO: 233314 - DNA, 603 bp, Homo sapiens
cactctcctgctagaacctccaaacaagctctcaatttagttcaacaaacatttattggatgttttgtgtatgtcaggcactgttttagatagctcatttgaaatagtggtcttcaaatgtattcatcttgtactcttagcaatagcatacaaacaaataaataataaataatattttaaatgatcatgatagagatcagagacaggtatattatttctataaatttcatattaatatgttagcctcaacagaaaattattagggaatatatgaaagtatatatatatatatatatatatatatatatatatatatatatataatttataatgttttcttatcaaaactcaatagatkgttcttttcgacaccccagtgtaagtctctgctgttaaatgaatatacgaacttaatgttattgcttttaaaatgaagacatttttcacatttccaataggtattaggttggtgcaaaagtaattgtgatatttgcattaataaaactatttatagggcaaataaatgaggaaaaaagactgggctcatcacccatgacaaagggcagaataggccatacacagatatttaaaatagcaaatttg

SEQ ID NO: 233315 - DNA, 403 bp, Homo sapiens
tatatatttcaataatttgctccttttttattgctgagtagtattttaaagtgtttgtatgccacaatttgtttatccatttgtctattgaacgacacgacactaaagttgtttcaatgctttggctattgagaataagttactgaaaacatttttgcaaaggtttttggatgaacctgtcttcattgctcttagatgtgtgcttkttgggcaatattgtagctgcatcccaaacttttccaaggtggttatttgtagttttttacatttctactagcaatatacaagtggcctagtttctttgcatccttgaggtatatggtgcaattatgttttaaatttttgtcctatttttataactatgtagcaatatctcattatagcattaatttagtttcctcag

SEQ ID NO: 233316 - DNA, 562 bp, Homo sapiens
ataaaccatcttattaggataacaaggaaaaaacaaacaaaacacaattatcccaacagttacatcaaaaaagcattagacaaaatctaacaccttttcataacaaaacactcaataaccgtgatcagaaaaaactttttcaatcagctaaagggtgtataagaatacccatatctaacatcaaacttcaataaaaagagactgaaagtcctgtactggagattccagtcagcacaatagggcaaawaaataaataaataaaatgtatccagacagaaatagaaagagaactctttccaattttaaaagccatctgtgtgtataaaaacattcaaagaaacaaaataaaaacaattatttaagcttgtaaacaagtacagcgacattaaagacacaaggaaggttatatatgagtaataaaaattttaaaaaatccctttacagtaatgtaaaaaaaagcataataattgggaacaaatttaacaaacagtgcaaccctcataaactaaaacctacaaaatactgtttaaaaaatataagaaagcctgaataaatacaaaaa

SEQ ID NO: 233317 - DNA, 621 bp, Homo sapiens
ttatccccacagtaaattcagatacaaccacttttaaatggtaccatacatctattaaataatttgaaaaataggcaaacacctttccaacccaatatgcttttatgaagagctgccaagctactagcaacactgatcaacagtgacctcatttatgcatcaaaatcttaagccaagccatcagcacagacagtatgacaacaaattaaaacttaaagaatacagtatgtacagtaaaagatacaattctctgaattagtttaaatcctaatcacaatgttacaacaaaacctactttgagctcagttgaaggatggaagaacactagtctacaaaacacacaaagaaacactaaattaacagatgtactaaaaacccacagtaaagtaaagatatttgcagtaatctttaaattacagatataccttggggtgccttcagaatcacttgaatagcacctctctraccgcattttcatgaacatgacacaaacagaccctttacttttcagtgcatttaatcaagaatgaataaataggtcaatttagatgcaaaacctgtcaaatataattaaaatatatatattttaatatagcagtgataaataggggattcttccca

SEQ ID NO: 233318 - DNA, 560 bp, Homo sapiens
gttctgaaacatgtatacattgtgaaatggtagaatcaagctaattagcatatgcrttatttcacattcatatcatttatttgtggtgagtatgctaaaatctacttttagcagttttcacgtatataataaattatccttagcaatagtcactatgtggtacaatagatgtcttgaactcattcctcctgtttaactgaaattttgtatccttttaaccagcatttccctaatcccgcaacccgctccccctacctttctcctatcctctggtaactaccgttcttctctttgctactatgagtttgactatttttaggttccacatgtaagatcatgtggtatttgtctttctgtgtctggcttatttcacttaacgtaatatcctaaaggttcatctgtattgttgcaaatgacagaatttctttcttctttaaggctgagtggtatcctagtgtgtatgtgtaccacattttctttatccattcatctgttaatggactcttaccttgatcccatatcttggccattgtgaataatgctgtagtgaacatgggagt

SEQ ID NO: 233319 - DNA, 425 bp, Homo sapiens
atttattagatagagataatatttgagaatatttttgtgagaaactaatatgataagcacaatgcccagagcacagtaagcactccacaaagattaaagccaatgtttttcatatcaaacagggggagccaacactcaggtagatatttacaaggtatttcatacatctctaactgcctcattgtggtatgccaaatatcctcatccccaggacctgtgaatatttcccacacacaagaaaagagactttacaaatacgattacattaaggattttaaggtgaagtggttattctggrttatccaggtgggtccaatgcaatcacaggggctcatataagaaggaggcagacgggttaagagtgggaagagctgatagatgtaagcggaggccagagcaatgcaggatcatgagctgaggaatat

SEQ ID NO: 233320 - DNA, 426 bp, Homo sapiens
tttattagatagagataatatttgagaatatttttgtgagaaactaatatgataagcacaatgcccagagcacagtaagcactccacaaagattaaagccaatgtttttcatatcaaacagggggagccaacactcaggtagatatttacaaggtatttcatacatctctaactgcctcattgtggtatgccaaatatcctcatccccaggacctgtgaatatttcccacacacaagaaaagagactttacaaatacgattacattaaggattttaaggtgaagtggttattctggattatccaggtgggtccaatrcaatcacaggggctcatataagaaggaggcagacgggttaagagtgggaagagctgatagatgtaagcggaggccagagcaatgcaggatcatgagctgaggaatatga

SEQ ID NO: 233321 - DNA, 425 bp, Homo sapiens
atttattagatagagataatatttgagaatatttttgtgagaaactaatatgataagcacaatgcccagagcacagtaagcactccacaaagattaaagccaatgtttttcatatcaaacagggggagccaacactcaggtagatatttacaaggtatttcatacatctctaactgcctcattgtggtatgccaaatatcctcatccccaggacctgtgaatatttcccacacacaagaaaagagactttacaaatacgattacattaaggattttaaggtgaagtggttattctggattatccaggtgggtccaatgcaatcayaggggctcatataagaaggaggcagacgggttaagagtgggaagagctgatagatgtaagcggaggccagagcaatgcaggatcatgagctgaggaatat

SEQ ID NO: 233322 - DNA, 649 bp, Homo sapiens
caccagcattctaacctcatccgttctctcgaccttttattctcctttaggagaggggtgggggccacatgagaaaggaagcttcatttgtttaacaacaaattctagtgggtgacaggtctggggcaagatgaactgatacaacgagagaatacataaacaaaaacaaaaacaaaaacaaaaaaactcggtcctggccctaaagcagggagatcgagtaagtgcacaagtacttacaacacaaggtcttagcatgtcttgtaacacttggttcgttagtaggttattgcgtatctcaagttctgtgtacttttaatgagattataacatacttagcattgtccctcgttatactcaacggactagttccaggccctcytcccctccgcccccccatactaaaatcatcccatattcaagtccaagtccagctgtgggccctggggaacccgcgtataggaaaagtctgccctctgtttaagcatttctgcctgaaaatactgttttctatccgcttttgggtgaaaaaaaaaatctgtgtataagtggacctgtgcagttcaaatatgtgtccaagggccaactatatatacaatttcattgctgttttctcatttagcattgttaacataagcatttacccatatat

SEQ ID NO: 233323 - DNA, 645 bp, Homo sapiens
cattttctctcaaaatgaagaaatttgtatattttgttgcatttattatgaagttgaatgaccattgtcttagccaaaaatctggaagttctccttttattatcttcatattcaaacctgtgactaattttttaaattgcattttcttactaattccctaatcaattcaatacaaagtatttctagatcgtcctcagttcaagtgactgtcgttatttgtaagaattgctttatcatactctgagttagttttctcaaattttctgatatctggtctattttggacactgctgcaatagtaatctgcctaataatcaagtttgatcatgccrtcaaggctacatataatttttcaatgcttctccacagtaccttgaacagttaacatatttttaattactctgttcctctattaaaggatgagctctttgaaggcaaatctttaatctcccatcctagtgcttgataataatacaaaaaatttaaaaagtctattaaggcaagtaaaaaaatgaagaggatatgtgaattaaaactcttcaatataaacagtatagcaattgaaagcatcagtctggcttatttttttactatatttttattgtattttgacagtatctgaagaaaaatacaaaataaaatgaa

SEQ ID NO: 233324 - DNA, 552 bp, Homo sapiens
gaattcaaatatgatttatctcaccctccttcattttaaagacaaagcttcccctttcaaattacagacattctatttaaattgtatgctagcttcttttgtgataaacattagttttgtgtttctcaggctaatattttgtaaaagaaactgctaaactttaggttaagctatttcattgtagaacagtgtgtcagactttgtgaagaaatatgtagagaacaaataaggtcatttgcagagcaagmtgtgacatagagaatggccaatcattatgatctttaacttctaatcacattatatcaaataaaatattatctacaataaataatctttaaggaaaactatgcagtctatttttcctatatattcaaaaatctactcaggattaagctatgcaatcagagagctatataaataggaagtattcaatttgttcctcagagcattgtttcagtatgatgtcattactcacaataagtaacaatctaattgttctaaattcacctgtgtgtagactgtaatactatctgttaaaatgttatcttaatt

SEQ ID NO: 233325 - DNA, 563 bp, Homo sapiens
aatagacactggggactactagagaggagagggaggggacaagggttgaaaaattacctattggctactatgctcactatctgcatgacaagatcaattgtactcctaatctccgctcacacattacacacatgaaacaaacctgcaatgtacctcttgaatctaaaataaaagctgaaatttttttaaaaccttcaaaattataaaagggaattaaatatggcatttcagaaacattttgccctgtaattatctaattcttatagaagtattgttgcttggatgcatggtaagacaatgatatccatgttaggaaatatactcttaacccattgttattaatttttaaaagrcaagcaagactaatgttacaacccccatctcagtggaggttaagcctttaacatgggaattggggaagtggcacaattcagtccagaccacttgcttatccattttaatgttacgtattgtttgaattcataacttaccaaaaaagcatatataagtactataatctttcaactcatattaataggactaaatctgaactatattgaaat

SEQ ID NO: 233326 - DNA, 486 bp, Homo sapiens
tcatggtaagtgcatttcattatgctctgatattttataatattacattataaaatataataaaattatattttataattttacattccacctatggtatataaatatatatacatatatgtatggcacatacatatatgtattttatattccacctatagtatatacatatatatacatataggtatggcatatacatatatgtatggtatataaatatatatacacaccataggtggaatataaaatacatatatgtatgttatatacatatgtatactatatatgaaatataaatatatatatttcttatctgaattcactctctgtttatattcatatgtgtttgtgtgtgtataaaaactatgccatccatctgcactactgkctatgagaatgaagttatacagctttctgacatgtgaaaagtagtatatgtaagccaaatgcaccaaaattaatctttttgaaatcaaacataatacc

SEQ ID NO: 233327 - DNA, 502 bp, Homo sapiens
aacttctaagcaataaactgtcactatgtttttaaactttaggttggaattcctaagggtctgatggggatgggtcctccatgtcatctaacaaacttggggctawaaatgaatgtagccgtatcacctgatggaaaaagtagctcaccagatctacacccatgtaactttaccctatcagaatgggagtgggccaaggcagaggtagttgccagactagtattgctgcgtgcaatctggaccagcacagtagcaattctaatgtcccttccaaaggcgaaaaagtctgggtgttgatggagagtagaaatagtagcggaggataaagaaatgaatgaatgggttataaattcaaggaaatccaacattacattaacatcttgatagaggctcacagcaagagatggcattgtctgttagctcaattattccagatgcctgaaagtaaaagggtctatgtttgctgagaccactcctgcttttgaaacctgacaagattaaa

SEQ ID NO: 233328 - DNA, 459 bp, Homo sapiens
tgtgtgtctttaattcctctagtgccgctgggttagggtctccctgacctagctgctctcggcaattaacaagtttaccaaagtttctttaatgatattctcacaaaataactatactctatatccagaagttccattctcttataaaatataagaagcaaatatatatcctgtgaccaaaaatgcatttatgtcatctctaggtttatgtgttttaatacatttatttctcaaatctttaagattttgcatatactaaactgttcttttttaatccaattgtgaarcttaaatgttggtgatgtccatatgcaaaatcatttttaatgacagtgtcatcataaacatgctgggggatgggttaaatttttagataggactatagagatcataaaaaagctatgttttatgcagtatcaataatttaattttaaagtactgaaaactagatgaaatatg

SEQ ID NO: 233329 - DNA, 278 bp, Homo sapiens
aatttgcaaaaggtttactctttctccatggaaaaactttatcttattccccaattctttaattgattcaacctatttatatataacttagagccttatgtgccaattgttgtgccattcacygaatataaagcagtccagaatacacacacagttcctatcacccaaagtgtatactgtagttggtatgccactgggaaacataatttaaaaattgtctcatttagggaataaattttttaaaaattctgacttcaagactataaaagaaacatgcg

SEQ ID NO: 233330 - DNA, 548 bp, Homo sapiens
gtgatgggtcacaactgatttgattaaataaaattgaattccactagattgtgtccctaatagaagacctgtagatttcacccctagccagtgttagtggcacctgggaacttacatagttatcaccgaatgaagacataccctctgcccttgttatgcagtataagggtcccagggaacaagtaatcatcaagaaatagtgatgcttgatkaaatatgtaatctatattattttggtaagattaaatcccatctcttggtaggggattacacatttctctagctttgcgtgttcttaggagtgaaaagtgaattgagtgaggatttattactgacagggcctcctccttattggaaagtccagatagatattttatgggaactccagtcactgtaacccagtgaattagcatcatttaaaatattcctatctgggtgacagatacacattagttacaggagagcaatatcaatacagctcaaaaaacagatctggagtgcctaaggaagcagagtattcattaattaatggctcctgctatggttag

SEQ ID NO: 233331 - DNA, 526 bp, Homo sapiens
ggccccataaaatgtagcccagggaagccaaaagattggacacacctgataattgaaactcataatgtatttgaagtagaggagttaatatgatctgatttaggctttaatagtttgtgtcagctgccgtgaagagacagcaatacggaaaacagtgagaaaactaatgtaattgtctacaagggtaataatggagcttgagatagggtgttggtagtgacagtggcaaaaaggggacaaattaggatacattttagagatagactcaacaggattttctgatgaatgaaagaaaatgggatggaaatatgagaatcacagataactacaagatttggtttgacccactgagtgtttgctcatgcctgtgttgagatgagacctgaaaagaaacagkttttttgtggggggagctggttaacaagggttcggttttgatcaagctgtaagtgaaacatcagttagatattcacatggagaggtcaagtatgcaatggaatatacatgcctgcagttccagagaaaa

SEQ ID NO: 233332 - DNA, 477 bp, Homo sapiens
gtggtcctttgcggagcccagacctagggactccctgagtcagggctgtgacactcactttgggctctgcggtttctggcatctctaggcttcctggcaccaccttgctcccctcttccagatatgggtgtctgcagcagaagctgcatgcagtacatctggtccagctgtagcctcatatggagctggcacctgtgccagtgcctgcagctgcctgcccygctgcagcagccaaatgtgcctggcagtgtgcagtggttggaccctgcgctggctcgaccatacacccctcgctgctgtaggcctggcttgcccttggcagttgtgggatctgggctgatagtgtaagcggagcgcagcctactgggctgagtgggcggaatgagcccagcaggcacaagcaatactcaagcagaaggcaccgctggccacagaagtttctggccggtgaagcaacaccccaaagatcctgcgaca

SEQ ID NO: 233333 - DNA, 558 bp, Homo sapiens
  misc_feature (1)...(558): n = A,T,C or G
acacataacagtaaattatgtgatggtatggaagctgtgacaatactgattttttacaggtcatgacagctcagttgagaagctcctaggtgaatctagtgggaagtgagaaggaattaaagaaaaaattttacaaagaagaaatcttaaatgcactacaaaaacatagttaaaatagactggcatgttccataacagtaaaatgacattccaagccaagggatccaagaagcaaaagtaaccaggtgagggaactcacagtgcatatgtagacacagaagcagtttagtgttgaggcacataaagtrtgaattaaagagtaagtatagaagagncagaggtagcctgggatcaggtcatacacagaaagctttcaatgtcctattaatcagcttagtttnattgaatgggtagtttggtgatactgaagagtttgaaacaaggtaatgtaattgtgaagttgaattttaggcaacctattctggcaacacatttgaagatgatttgaagtctactaaagagaaactagggggcactggcaattgtccaagttagaaa

SEQ ID NO: 233334 - DNA, 445 bp, Homo sapiens
atggacaattttcttgtaagtataataaattttgacaagtatcctctgtttctctggaacacataattcactttttatttctctcattgkctacttttataattattatcaacgaacttctttagtccacaaaatatggctatgtcaaataagagcaaagattatagaaccaaaattctaattaatattttaaaagtcacattttgcatgaaatatttgtgtaggttaaataacttgaacatatcattctacataaaaacgtacgtttctctaaatagtcattgaataataccacttggagggatgataaataattttcagcaattatgttcataatatgtcactaatttctggattatctaaacactcttgggatgggcaggattctaacatggactcaagaatcctgccctctggtgtactactcactgtgtataattacttc

SEQ ID NO: 233335 - DNA, 539 bp, Homo sapiens
ttttgtaaccaagagatttttcaaagttttgataatttttctttgactttctaaaagtaaacagaataaaatctgtcttaacagtctcattactaaaatgtcttaatagcctcataagccatgtgatgttccacataagctgtctccagtttattccctttcatcctgccctgcattcactaacctcagaaatgcttgacataaacgaaattcaacccctactaagagtttttgcagccccatttccttcattttccaccctatccctccaattttaaggctgtccccaaattttaatattaccttctcatggagatcttttgcaatcaccttggtaaaagcaatacacccagggatttcctataacacyatactatttgacttacacaacattaattaagatgtaaagtaatcttaattcacgtatctatcatctgtattgacaataaaggataactgagtaatttttttaagaatggtctctttatattttgttcattattctatcccaagtctctaaaataaggtctaccacttaa

SEQ ID NO: 233336 - DNA, 539 bp, Homo sapiens
ttttgtaaccaagagatttttcaaagttttgataatttttctttgactttctaaaagtaaacagaataaaatctgtcttaacagtctcattactaaaatgtcttaatagcctcataagccatgtgatgttccacataagctgtctccagtttattccctttcatcctgccctgcattcactaacctcagaaatgcttgacataaacgaaattcaacccctactaagagtttttgcagccccatttccttcattttccaccctatccctccaattttaaggctgtccccaaattttaatattaccttctcatggagatcttttgcaatcaccttggtaaaagcaatacacccagggatttcctataacactatactatttgacttacacaacattaattaagatgtaaagtaatcttaattcacgtatctatcatctgtattgacaataaaggataaytgagtaatttttttaagaatggtctctttatattttgttcattattctatcccaagtctctaaaataaggtctaccacttaa

SEQ ID NO: 233337 - DNA, 570 bp, Homo sapiens
gttagttcacttaggataatggcctccagctgcmttcatgttgctgcaaaggacgtaatttcattctttttatgttacatagtattctatgatctatatgaccagtgggtaaatttttttttcaatagcttttgggtacaagtttgtttgtttgttttttgttatggataaactttacagtggtgaattctgagcttttagtgcacctgtcatccaagtagtagacattgtatctaatgtgtggttttttcatccctagccccccctgccatccttttccttctgagtctcttaagtccattatattactctgtatgccttcacttgctcatagctttgcttccacttataagtgtcaatgtacggtttttggttttctactcctatgttacttcactcagaataatggcctccagctccatcctagcttctgcaaaagactttatttcattccttttaatggctgagtagtaatccatggtgtgtatacactatattttctttatccactcattagtcgatggacacttaggttggttccacatctttgtaattccaaattgtgcaagt

SEQ ID NO: 233338 - DNA, 570 bp, Homo sapiens
gttagttcacttaggataatggcctccagctgccttcatgttgctgcaaaggacgtaatttcattctttttatgttacatagtattctatgatctatatgaccagtgggtaaatttttttttcaatagcttttgggtacaagtttgtttgtttgttttttgttatggataaactttacagtggtgaattctgagcttttagtgcacctgtcatccaagtagtagacattgtatctaatgtgtggttttttcatccctagccccccctgccatccttttccttctgagtctcttaagtccattatattactctgtatgccttcacttgctcatagctttgcttccacttataagtgtcaatgyacggtttttggttttctactcctatgttacttcactcagaataatggcctccagctccatcctagcttctgcaaaagactttatttcattccttttaatggctgagtagtaatccatggtgtgtatacactatattttctttatccactcattagtcgatggacacttaggttggttccacatctttgtaattccaaattgtgcaagt

SEQ ID NO: 233339 - DNA, 569 bp, Homo sapiens
ctgggtatctatccaaaggacaataaatcattatatcaaagagacatctgcacttatgtgattattgcagcaccattcacagtagtaattactgaatcaacctaagtgtccatcgatggatggctgaataaaaacaatgtagtgtgtttgataccaataytactgaagccattatcccaactgaaataactcagaaacaggaaatcaaatattgcctgttatcacttataagtaggagataaacaatggatacacatagacatacagaggatgactaataaacactgcgtactccaaaaggtgggaggttgggagacggtgaagtttgaaaaattgcctactggggacaatgttcactattcagttgatgagtacactaaaagcccagacttcactgttatgcagtatatccatataataaaactgcatttgtacaccttgaatctgttaaaataaaatttaaagatataaaaaaagcatggaaaaaaaaatatatatacacacacacacacataaacatatatgatggaatactactcagccataaaaagaaatgaattaatggcatt

SEQ ID NO: 233340 - DNA, 569 bp, Homo sapiens
ctgggtatctatccaaaggacaataaatcattatatcaaagagacatctgcacttatgtgattattgcagcaccattcacagtagtaattactgaatcaacctaagtgtccatcgatggatggctgaataaaaacaatgtagtgtgtttgataccaatattactgaagccattatcccaactgaaataactcagaaacaggaaatcaaatattgcctgttatcacttataagtaggagataaacaatggatacacatagacatacagaggatgactaataaacactgcgtactccaaaaggtgggaggttgggagacggtgaagtttgaaaaattgcctactggggacaatgttcactattcagttgatgagtacactaaaagcccagacttcactgttatgcagtatatccatataataaaactgcatttgtacaccttgaatctgttaaaataaaatttaaagatataaaaaaagcatggaaaaaaawatatatatacacacacacacacataaacatatatgatggaatactactcagccataaaaagaaatgaattaatggcatt

SEQ ID NO: 233341 - DNA, 493 bp, Homo sapiens
ttggcaaggtagtcagatgctggatcatggatatttccccaggtaatggtaagcatcttatattttaagtagggaataagatgattagattttctttgaaaatatctctgtaagtaaagtatgaataaaaggctaagtgtaagactgaaggtaattagaatattaaaatagtatattatgggagaatgatgatagtgacttggactaggcttatagcagtcatatttgagaaatatttttcatgcaaagaaaacatgatttactgatgaactgtatgtgaggtgggaaataaagaaaaggaacaagggtaattctatgagacattcaagtagaggtgtttaaaagggagttgaataratggatttggagctcagttgagaagggtcccaaatctagaatttggctatatagtcttgatatttaaaatctcatactttgatgaaatcattgggtaaatattacagatagaaaaaataagaagataggtatttcc

SEQ ID NO: 233342 - DNA, 549 bp, Homo sapiens
caatcctgggataaaatattttacttagattacaatgagagattcttcacctggctagctagggtggtttaattgttattttaatcagtataatacatgcacacttaaaaaatcatgccactacttttacaagcctaaactaagttcagcaagctttaaaccttccagtctgccctgctgcccagaggcaatccctaaaataattttagtgattacttttactagttttctccatattttaataygtatataactacatttttaaccagttttagacattacattttatcttgtagtgcgtgaaaattttaacattcttagatctgttgttcttgcattttcttttctcttttcctcctcaaattaatcagacagacacaagtgacgttttcatacctctgggttaaaatctcagtgggaagattaagtgggaaacagcagggattgagaaaacttcaggggaaggaaggactattgctttcttttccatgaacaactcttaaaggatcaaggtagtctctcaatatttgttgaattcgtcacagtaaa

SEQ ID NO: 233343 - DNA, 465 bp, Homo sapiens
tgagctacatctgaaaggatggttaagagtgctatgaggggaaagccaacttacttagtattatttaattaactttgggtygtttttttatatagggtgaaataagcatacaatttcattcttttgcatgtggttatgcagttttctcaacaccattggttgaagagattgtcttttcactattgtgtgctcttgattactttgttgaagaacaatcaacagcaaatatgcagatttatttctattctctctattaggttccattggtctataattatgtttttatgccagtaccatactgttttgacaaatatagcttggtagcttatcttgaaatcaaactgtgtgatacctctaactttgttcttttttctcaagattgttttggctatttggagtcttttgtatttccatatgaattctagaattttttttatttttgtgaaaaatgccattggaattttg

SEQ ID NO: 233344 - DNA, 559 bp, Homo sapiens
ttttgtgagtgtaaaaaccaacctgactgatgttgaagtttttatgagttaattgtaacatatttaaaatgcaaatatggaaattattgcttataatgtaaattttataacttttatatttataaaatattgctgggtttataataggaattgtatcaaagctatttatttgtgataaatttacatctttaatatatttttgaatctttaatacacaaacatgttatakctcttcatttcttaatagattttttgacttctttcatctgtgttttgtagttttcatcaaacaagttctgtgcatgttttgttagatttctacctaacaatttattattgagcaattgtaattaatattctatttttaaattatgtctgcatatgtgtatttctgtaatatagaaattaattacttatgtttatcttgtagcttgcaaactttgtgaacttacaagctttcatggttttttttttttggtaggttcttgggattttatgtatatacaattatgttatctgcaaatgggaagaattttattctttttaaattgtatcattt

SEQ ID NO: 233345 - DNA, 559 bp, Homo sapiens
ttttgtgagtgtaaaaaccaacctgactgatgttgaagtttttatgagttaattgtaacatatttaaaatgcaaatatggaaattattgcttataatgtaaattttataacttttatatttataaaatattgctgggtttataataggaattgtatcaaagctatttatttgtgataaatttacatctttaatatatttttgaatctttaatacacaaacatgttatagytcttcatttcttaatagattttttgacttctttcatctgtgttttgtagttttcatcaaacaagttctgtgcatgttttgttagatttctacctaacaatttattattgagcaattgtaattaatattctatttttaaattatgtctgcatatgtgtatttctgtaatatagaaattaattacttatgtttatcttgtagcttgcaaactttgtgaacttacaagctttcatggttttttttttttggtaggttcttgggattttatgtatatacaattatgttatctgcaaatgggaagaattttattctttttaaattgtatcattt

SEQ ID NO: 233346 - DNA, 560 bp, Homo sapiens
tgtttgggaggagattgtaaagggctayacaggtccagggagccaactctcctcacagagaaaagaagtccttgcagtcacaggcattgaacttcaaggttgctgtcagtggacaggcccaacatcatctcctaccatcccaggaaactagagatgctcagccacaaggcatagcagaggcaaaaagaaagcagatgtggctgatggaaaagctcctcaatcttgcaggacactatcaagtgagttgatttccatttaatgttggtgaggaaaatccttgggagtaatacagtgtgattttctttcccagagatgtgtagagggaaggggtctctagaggtgtttcagagattacttatagcaacagtgcttcaatccagaacggctgggcatatgccctggggaaaagctggttatcctcattggcttgtcctctcccacaaccagttcagtggggtgagtgtccatcagttttggtgggaatgaatcagggagagaatagataagaaagaaatgtgaggagacaaaatagcaatgaccacaaatgggaatggatccac

SEQ ID NO: 233347 - DNA, 574 bp, Homo sapiens
gagttgcccagctccagatcaacaggtatgtttgggaggagattgtaaagggctacacaggtccagggagccaactctcctcacagagaaaagaagtccttgcagtcacaggcattgaacttcaaggtygctgtcagtggacaggcccaacatcatctcctaccatcccaggaaactagagatgctcagccacaaggcatagcagaggcaaaaagaaagcagatgtggctgatggaaaagctcctcaatcttgcaggacactatcaagtgagttgatttccatttaatgttggtgaggaaaatccttgggagtaatacagtgtgattttctttcccagagatgtgtagagggaaggggtctctagaggtgtttcagagattacttatagcaacagtgcttcaatccagaacggctgggcatatgccctggggaaaagctggttatcctcattggcttgtcctctcccacaaccagttcagtggggtgagtgtccatcagttttggtgggaatgaatcagggagagaatagataagaaagaaatgtgaggagacaaaatagcaatgaccacaaat

SEQ ID NO: 233348 - DNA, 574 bp, Homo sapiens
gagttgcccagctccagatcaacaggtatgtttgggaggagattgtaaagggctacacaggtccagggagccaactctcctcacagagaaaagaagtccttgcagtcacaggcattgaacttcaaggttrctgtcagtggacaggcccaacatcatctcctaccatcccaggaaactagagatgctcagccacaaggcatagcagaggcaaaaagaaagcagatgtggctgatggaaaagctcctcaatcttgcaggacactatcaagtgagttgatttccatttaatgttggtgaggaaaatccttgggagtaatacagtgtgattttctttcccagagatgtgtagagggaaggggtctctagaggtgtttcagagattacttatagcaacagtgcttcaatccagaacggctgggcatatgccctggggaaaagctggttatcctcattggcttgtcctctcccacaaccagttcagtggggtgagtgtccatcagttttggtgggaatgaatcagggagagaatagataagaaagaaatgtgaggagacaaaatagcaatgaccacaaat

SEQ ID NO: 233349 - DNA, 579 bp, Homo sapiens
cagatcaacaggtatgtttgggaggagattgtaaagggctacacaggtccagggagccaactctcctcacagagaaaagaagtccttgcagtcacaggcattgaacttcaaggttgctgtcagtggacaggcccaacatcatctcctaccatcccaggaaactagagatgctcagccacaaggcatagcagaggcaaaaagaaagcagatgtggctgatggaaaagctcctcaatcttgcaggacactatcaagtgagttgatttccatttaatgttggtgaggaaaatccttgggagtaatacagtgtgattttctttcccagagatgtgtagagggaaggggtctctagaggtgtttcagagattacttatagcaacagtgcttcaatcmagaacggctgggcatatgccctggggaaaagctggttatcctcattggcttgtcctctcccacaaccagttcagtggggtgagtgtccatcagttttggtgggaatgaatcagggagagaatagataagaaagaaatgtgaggagacaaaatagcaatgaccacaaatgggaatggatccactattc

SEQ ID NO: 233350 - DNA, 579 bp, Homo sapiens
cagatcaacaggtatgtttgggaggagattgtaaagggctacacaggtccagggagccaactctcctcacagagaaaagaagtccttgcagtcacaggcattgaacttcaaggttgctgtcagtggacaggcccaacatcatctcctaccatcccaggaaactagagatgctcagccacaaggcatagcagaggcaaaaagaaagcagatgtggctgatggaaaagctcctcaatcttgcaggacactatcaagtgagttgatttccatttaatgttggtgaggaaaatccttgggagtaatacagtgtgattttctttcccagagatgtgtagagggaaggggtctctagaggtgtttcagagattacttatagcaacagtgcttcaatccagaacggctgggcatatgccctggggaaaagctggttatccycattggcttgtcctctcccacaaccagttcagtggggtgagtgtccatcagttttggtgggaatgaatcagggagagaatagataagaaagaaatgtgaggagacaaaatagcaatgaccacaaatgggaatggatccactattc

SEQ ID NO: 233351 - DNA, 589 bp, Homo sapiens
ccaggcatggagactttcacagcttttaacaagtttcttctcagcaattctagcatccagatatagccccatcatagacctcgcatgagcatgtacttcataatcctggtgaatacagaagtttcctggactcttcatgagctgttgctttccctcctatatcagtgttttcagctgaggccatttgtgattgtgtttctgactttctgtagrcaacctgccaaaccttcatttttttttctgcttagatgcacaagaatgtaggcactaattcttatattaaactgtttatttctataatacttaattggctgttttcctggctgaaccaaaccaagagcagcagggatgataacttccaaaactgattaaattagaggtcaagaaattgagccattttaattctattattcttctttcatatattaaatagaaaacttttgtagatagtttttcttcattatttctttggttaccctgaggtactgcttgtagagaaaaggtagaataaatatgggattctttccctttatttaccattttctatttatcagttacttttttatttaccagttttctaagtagtatt

SEQ ID NO: 233352 - DNA, 564 bp, Homo sapiens
aagcttgatgatttaaacatcaggtgtgcacctgctcattgcagtcatcatcatcatcatcatcatcatcatcattatttttgtttgtttgggtttttttgagatgaatcttgctttatggcccaggctggactgcagtggcatgatcaaagctcactgcagcctcagactcctgggcttaggtgaccctgccacctcagcctctcaagtagctgagactacaggcacatgctaccatgcctgcctaatttttttgttttctatttttggcagacagagggttttaccatgttgcccagccttgtcttgaacatctgggctaaagcaatccatctgttttagcttcccaaagtgttgggcttacaggtgtgaaccaccatggctggcttgtggtcatcattattattgatgcttatattagttcatgtttggatagtgggacctccttcaagttgcctctcagatcctatggacatgatcctggggggtataaacgtgcccttgctttccagtatgacaagatgctctagactgattttgcwcattgcctgcctgcagccagaa

SEQ ID NO: 233353 - DNA, 439 bp, Homo sapiens
cttcccactgagcgttcagtacagcagaatgatgcagagctatgatcttggtatacttaaaagactaagcagatgtatctttgcacaactctgggggcattcattcatcacatttcttcaggatttagatgcatttgagaaacaaggtcaatggcatgagacaatttataagccatgttttgctagatgataacggagctttttaatacttcttttctaaaaaaaaaaaaagtattatggaaaaatacttttctattgtcaataaatattctttggcattttcaacaaacaaaccagacaggartaaatgtacttacaatgccaatgccaatgaaattaacctgtccaatcacttagccacacagatacttgatctgctcaactctagcaacatttatgtccactgtcactcatccacttacagtcacatcctgaattc

SEQ ID NO: 233354 - DNA, 552 bp, Homo sapiens
ggaccgaattctccagaatacatcttagggggggttttgccttggggttggggggaacatttcccatctgaaacaagaacatagggatgccagcacctctagtcattttctgatgagcattagttctacagcgtcctctatggtcctaatgcttattcttttccagggtgtgtcaccacccgtggacctctgcttatcggattagttatgctcaccaatgtagcagtcctgcacctgttttcccgcctttcttgaccacagagaaaggggtccgggctgctagattctagtggtcctttaccagcgtgcccaacattgcctttgcactcagaggtgaattatagagctgagctgggttcytatttcataacccagctgccccattaagacgcattcccataaacagttcttacacaaattcatttcagagagtgtaggtaacatcttgagtcaggattgagagagttttttgattctgtaaatactttaaggcttggctgagtgctaacagctcacatgtttgagcagaccaagtattaggcaattcttcta

SEQ ID NO: 233355 - DNA, 592 bp, Homo sapiens
gaacataacttcctatgaaatccttcctggctaattcaggaagtcatgggaggtgccatctctttcatctgctcccctctgtcttctagttttacttactttaatactcacaattccctgcaagcatgctcttctgtgctatttatttttcctatttccaataatggatgcatcgctcaagttggttctctgacatttcgcttaatcttaagtaggttataatattgaagacccaaatagtcttcaagaccttatattgaccatataaatatactctgyataaaaaaggctacatatattcttatatccaaaatttcccagatttctgcatcctaaattctctgtttccatctcctcacatgggcatttagtaatacaggaacgaaactctccttccacttttgaaattattgttattagggctctacagatttctaaaggaaagtaagaatatttaaaaggtcatttatgaaaagctcacagctatcatcacaatcaatggggaaaaagtgaaagcttttcctctaatacctggtatgaggcagggatgcccactatcaccatatccactcatcatagtactggaagaact

SEQ ID NO: 233356 - DNA, 559 bp, Homo sapiens
ctggcattttccccactcccacaggaaaggaagacggcaacaaataaacagtcagatttctctggcatgtcaaatggagagccctggagtgcagcataggagtggagatgcacctgtggtgactggaatttcagaagggaatcatggaagcacctggcctctgcagcctcatctacctcacttaaattgtgtttgcatggaatcaggaggaacttcttgtggggaaaagataagcagaagatccccaccggtccccattgccaaggaaaacacttacagttcttacaacaggacaatcctacattctgcacaaaccctgaaccaaatatgaagagctggggaaattcacacaacragattgtcccagaataggggcataaagtgtatactcctgaccccaaccttcccactatgagccaagctgaagtagcacagcaccatctttatatcaaagccacctctggagtgtgccctgccctaagggccagtagcgaccacacttctccagcactggggctccatcttcattaccccaagcccatatgggtgcctgaacact

SEQ ID NO: 233357 - DNA, 513 bp, Homo sapiens
taagttctggaagctataaaataaaggaataatggtcctgataacaaaatataatattggtagttatcaataaaaagtgcacaagcatcagtttacaatgccgagtccaacaaacgaaatcatatgttgttttaacataaacgtagaacatgcaaaacatttgaaagttggctaggtaggggagagggcaagatgaacaactagccagatgcaacagcactcactgaaagatgggtgtgctttttacagatcttcagagggaaagtacctagagtggacagagggaagacacataaacgggtgaaaggagagaaagctgggaaccctggacagggctatggcacactgggagtctgaaccacagcagcctcaggggaatgggtgagttgatttggcaaggaacaaygtactctcaccatgggcctctggagccccagcaggagaggacccctcgactacaacaggcactcaagctggcagggagagctgcttagaacagtggtaaggacagca

SEQ ID NO: 233358 - DNA, 495 bp, Homo sapiens
caaatcttgaggcatcacactacccaatttcaaactacactataaagccacggtcaccaaaacagcatggtactggtataataggcacatagatcaacggaacagaatagagaactcagaaataaatcccaatacttacagcccactgttttttgttttgtttgtcaaagatcaaagtgggcaaaggtcatccttttcaacaaatgctgctgggataattggccagccacatgtaggagaatgaaactgatttctcatctttcaccttatacaaaaatcaactcaagatggattaaggacttaaacctaagacctgaaactataaaaattctagaaaataacattggaaaaacccttctagacattgacttaggcaagratttcatgaccaagaacccaaaagcaaatgcaataaaaacaaagataaatacctggaacttaattaaactaaagaccttttgcatgggcaaaaggaacagtcagcagagtaaacag

SEQ ID NO: 233359 - DNA, 577 bp, Homo sapiens
acttaaactcattttctcagttgcaacaactacatttcaagtatcaatagccacagaagtctagtggctaccattttggacagcaaagacttagaacattttcatcattacccacatttctgttagatggagcagatacaaaagataaaatgaaattcagaccaaactcaatcatgtctggaaatggtgaawaaaacctcaatagaatagatacttgcttagtctgactggtaatatacatctgactctggatgtgaggtagtgagttttaaatgtatttaatttgagtatttgtggtatatatcctagtggagatgtccaataaacaagtgaaaatatagtctgaaactcaaatgtcttttttttcaaatagagaaaaaaaattggtggttattaacttatgggttttagctgaatctgtgataaagttaatggatatacctttgagagacactgtctcactcataatagttgctaacaatagaaaccattgtagctaatacatgtagttgaaagcatatttatgactgctagagattcaggcttagaggctatgcagccaaaagtctcccaacta

SEQ ID NO: 233360 - DNA, 577 bp, Homo sapiens
acttaaactcattttctcagttgcaacaactacatttcaagtatcaatagccacagaagtctagtggctaccattttggacagcaaagacttagaacattttcatcattacccacatttctgttagatggagcagatacaaaagataaaatgaaattcagaccaaactcaatcatgtctggaaatggtgaataaaacctcaatagaatagatacttgcttagtctgactggtaatatacatctgactctggatgtgaggtagtgagttttaaatgtatttaatttgagtatttgtggtatatatcctagtggagatgtccaataaacaagtgaaaatatagkctgaaactcaaatgtcttttttttcaaatagagaaaaaaaattggtggttattaacttatgggttttagctgaatctgtgataaagttaatggatatacctttgagagacactgtctcactcataatagttgctaacaatagaaaccattgtagctaatacatgtagttgaaagcatatttatgactgctagagattcaggcttagaggctatgcagccaaaagtctcccaacta

SEQ ID NO: 233361 - DNA, 577 bp, Homo sapiens
acttaaactcattttctcagttgcaacaactacatttcaagtatcaatagccacagaagtctagtggctaccattttggacagcaaagacttagaacattttcatcattacccacatttctgttagatggagcagatacaaaagataaaatgaaattcagaccaaactcaatcatgtctggaaatggtgaataaaacctcaatagaatagatacttgcttagtctgactggtaatatacatctgactctggatgtgaggtagtgagttttaaatgtatttaatttgagtatttgtggtatatatcctagtggagatgtccaataaacaagtgaaaatatagtctgaaactcaaatgtcttttttttcaaatagagaaaaaaaattggtggttattaacttatgggttttagctgaatctgtgataaagttaatggatatacctttgagagacactgtctcactcataatagttgctaacaatagaaaccattgtagctaatacatgtagytgaaagcatatttatgactgctagagattcaggcttagaggctatgcagccaaaagtctcccaacta

SEQ ID NO: 233362 - DNA, 627 bp, Homo sapiens
atgaccaatggcaatccaaaactgaaatcaagaacacaattcaattcaaaacatcaccaaaaagaataaacatacttaggaataaatttaacgaagtataagacttggactctgataatagtaacacttgatgaggtaaattcgataaattctaaataaatggaaacaaattttacattaatgggttgcgagactcaatttgattaagatgatagtttttcctaaattaatctactaattcagtgcaaccttgtcaaaatttcagtaaattccagggtgtttttttttctttttttmagttattgacaggcagattcaaaaatatatatggaagtacaaagcatatcaatttgccaaaacaatttttttaagtaataacaaggtacaaatacttttactttccaacttcaatacataccataaagctacagttatcaaaacagtgtaatactagcataagggtagtatataaataacagacaaaaatgaaaagtataaaactaagttttatttgtctactcaattaattattggcaaaactgcctggcaatttattatgggaaacacagtgtgttcagcagatggtgcagaggacattcagtatacacacgcagaaagattaactta

SEQ ID NO: 233363 - DNA, 549 bp, Homo sapiens
atgtgccacattttctttatgcagtctatcattgatgggcgtttaggttgattccatgtctttgctattgtgaatagtgctgcaatgaacataagtgtgcatgtatctttataacagaattatttatattccttttggttatatacccagtaatggaattgctaggtcaaatggtatttctgcctctagatctttgaggaattgccatactgtcttccatgatagttgagtttstcaattcctattggtcctccagttctttacctgggagggaaaaaagaaataacaattgtttatcagaatcacagaaaacttctggaggatagagggtaaattcttcttctgcttcacagacctggctcaataccaatgtatgcatctgttgacagattaataagagaaaccataaaagaagaaagaaaaatttatttaaaaattccctacactgttgaaaattgctgatctggttctttccatccctagttaattgagaagtcatagaaaagctaggaagacattgagatttttcttttaaattattcagtcctt

SEQ ID NO: 233364 - DNA, 549 bp, Homo sapiens
atgtgccacattttctttatgcagtctatcattgatgggcgtttaggttgattccatgtctttgctattgtgaatagtgctgcaatgaacataagtgtgcatgtatctttataacagaattatttatattccttttggttatatacccagtaatggaattgctaggtcaaatggtatttctgcctctagatctttgaggaattgccatactgtcttccatgatagttgagtttctcaattcctattggtcctccagttctttacctgggagggaaaaaagaaataacaattgtttatcagaatcacagaaaacttctggaggatagagggtaaattcttcttctgcttcacagacctgrctcaataccaatgtatgcatctgttgacagattaataagagaaaccataaaagaagaaagaaaaatttatttaaaaattccctacactgttgaaaattgctgatctggttctttccatccctagttaattgagaagtcatagaaaagctaggaagacattgagatttttcttttaaattattcagtcctt

SEQ ID NO: 233365 - DNA, 549 bp, Homo sapiens
atgtgccacattttctttatgcagtctatcattgatgggcgtttaggttgattccatgtctttgctattgtgaatagtgctgcaatgaacataagtgtgcatgtatctttataacagaattatttatattccttttggttatatacccagtaatggaattgctaggtcaaatggtatttctgcctctagatctttgaggaattgccatactgtcttccatgatagttgagtttctcaattcctattggtcctccagttctttacctgggagggaaaaaagaaataacaattgtttatcagaatcacagaaaacttctggaggatagagggtaaattcttcttctgcttcacagacctggctcaataccaatgtatgcatctgttgacagattaataagagaaaccataaaagaagaaagaaaaatttatttaaaaattccctacactgttgaaaattgctgatctggttctttycatccctagttaattgagaagtcatagaaaagctaggaagacattgagatttttcttttaaattattcagtcctt

SEQ ID NO: 233366 - DNA, 549 bp, Homo sapiens
atgtgccacattttctttatgcagtctatcattgatgggcgtttaggttgattccatgtctttgctattgtgaatagtgctgcaatgaacataagtgtgcatgtatctttataacagaattatttatattccttttggttatatacccagtaatggaattgctaggtcaaatggtatttctgcctctagatctttgaggaattgccatactgtcttccatgatagttgagtttctcaattcctattggtcctccagttctttacctgggagggaaaaaagaaataacaattgtttatcagaatcacagaaaacttctggaggatagagggtaaattcttcttctgcttcacagacctggctcaataccaatgtatgcatctgttgacagattaataagagaaaccataaaagaagaaagaaaaatttatttaaaaattccctacactgttgaaaattgctgatctggttctttccatcyctagttaattgagaagtcatagaaaagctaggaagacattgagatttttcttttaaattattcagtcctt

SEQ ID NO: 233367 - DNA, 467 bp, Homo sapiens
tttaatctgattattatggggccaagacccacaaatataaactaatttttttttccatggagagtatagttgcttaatgtaggttgctatttccagttctctccactgtcagtggactcaaccctcttgggctaccacaaaaaccaggaaagtgataaaaacaatatgctttcaacactgtctctatctcagaatgcttcatccaagactagaaatgtcagcatttgactttttccactttatgttgctgggtttgattctaagcagtgatrctaaacaaattaatatagcaaaagttaccatgtaaaacaaaattacataatttattacatgatgagtctgacaaggagaagcaatatattgcagtatataagaattctgacatgacagtttggatttacgtatttgcacagtatgtaaacaccactgatttttttccttatctgaccagtttcatacctagaatc

SEQ ID NO: 233368 - DNA, 544 bp, Homo sapiens
ttagaagcaactttgaatagtgcttacagagaaatattgaaatatgcaatgaaagaagaatttgatgtgaatgcaaccaggaattgaggaagaaataaaagtgattatgagaagcagctgggagctgctgcctggagcagtagcaatcatcatatttctgggagttttcattataaggagaagctgacagacctcttgaaatcctctattgagcagttctactagaagcagatggagtgtcaacctgggagcaccatgaaagtcccttttcctttttgtatccgggtgagtcactactaaaacgtactgtgggaatgaataaaatcggagcagaawaaaaggtgattgggaaagtagaaactacaggtctttcaatattcaccttcctaaaaagagaataatcataattccaccagaatatctggaacatgagaaaccagacacttaacaagtgcataactcaaggctgagagtattcataaaagtagttgtattaaactaaaaacactaagagggctatatataaaaaactcaactgaattta

SEQ ID NO: 233369 - DNA, 601 bp, Homo sapiens
caaaaaccttgcttggagttttgctaacttaggtgacagcactttgttcaaaataattctttttttttttttccgagaaagagtctcactctcactctgttgcccaggctagagtgcagtggtgtgatctcgatattgcagccttggcctcccgggttcaagtgattctcccacctcagtctcccgagtagctgggactataggcgtgtaccaccacaccgggctaatttttgtatttttagtagagatggggtttcaccacgttggccacgctggtcttgaactcctggcctcaagtgatctgctcaccttggcatcccaaagtgctgagattacaggcatgagccactgtgtgggccaaaataattcttattaagcattcaaacaccttatttcaatgtggccagaactctgggggaaaagaagtaggtttgtctcttgtttatsattactaaattttgtttctttgggcaccttggtcctttaataatgaggccactgaaatactttatagtgcaggcttagaagacaattattatgctatttaccattttacatgtttaagttgcatttggtcaacaagatgattaaatagtatatt

SEQ ID NO: 233370 - DNA, 526 bp, Homo sapiens
tttgtgttttttacacatcaaacagaatggtacgtttttcaaaagttaaaaaaaaaacaactcatccacatattgcaactagcaaaaatgacattccccagtgtgaaaatcatgcttgagagaattcttacatgtaaaggcaaaattgcgatgactttgcaggggaccgtgggattcccgcccgcagtgccggagctgtcccctaccagggtttgcagtggagttttgaatgcacttaacagtgtcttacggtaaaaacaaaatttcatccaccaattatttgttgagcgcccactgcctaccaagcacaaacaaaaccattcaaaaccacgaaatcgtcttcactttctccggatccagcagcctcccctattaaggttcgcacacgstattgcgccaacgctcctccagagcgggtcttaagataaaagaacaggacaagttgccccgccccatttcgctagcctcgtgagaaaacgtcatcgcacatagaaaacagacagacgtaacctacggtgtcccgcta

SEQ ID NO: 233371 - DNA, 505 bp, Homo sapiens
ccaaatggaagctctctaatagaaaactgtgacctttaacatagtttaacatctacaatgaaatcttattttcattctctgttctacatattatttcatgtattgttggtcccagaaaatttttaatgacaatattttcattgacagcatcttaatataacctatattcaaattcatcgaaagtcatgtatcacttgtacagcctctttcttgmcattattttcaaaatattgcttgcatccgatccttttctgcacatactcaaattcatactagggctgttatggaaatagctaatttacatttagattaaaaatttccttgaagcccatttacaccctgatgagttaaagacaaagtaactcaaagctgatagctggctttcattaaatccaagtattattacatattcaactagtcaaaatacaggcttcaggttcatggcttagatcctaaaatgtcaaatagggtgattgtagctcagcagacatagccaaattcagaa

SEQ ID NO: 233372 - DNA, 317 bp, Homo sapiens
  misc_feature (1)...(317): n = A,T,C or G
ccatgtacagctgcacatatcaccaactcccatggaaaaccataaggattagagtctggtctcacactttcaggcagtgctgccacaaccctgcttagctcccccaggaccagccccaaataccgctgaggggtagccccaggctcctccayagcggggaaggctgctccggcggttgccacaataaacttgggctgtgggcggcagagaacacgcagccttcagtctggaacccgaatccgcacgtggcaaacggagcggaccattgtggagccggctgcggngcgagctgcggacacgggcaaccaaaggtctca

SEQ ID NO: 233373 - DNA, 526 bp, Homo sapiens
caagttgcttccttagattcctatatctggaactattcctctagaggagatagagcaaatcaaacctctgacaatgtggaaatccagcatgcacttcatttttgtttatgacactgggtcaatctgacagaatagttttgttttcccagttctgactgaattaaagagagttgtgtctacagattattttcccagaagttcctctgtatatayaataggaaatgcaggatcagatctaggcaagggctctttaaatgtcagggcagtctttccacattgaacacccctgagaatgccaacatgtgtgaccatgcttttccccattttgggccatgatgaagaaatgctatcccaagccagcagagcagctgaactcttttctgtagctcaacatgagaaaaaccaacaacctctgcagcatgtctgccaaggaactgcatgcctgttggcaaggagacagcagcctacacagagggaagttgtaagaattagcccttccatgcatgtgctagtggtaactcctgta

SEQ ID NO: 233374 - DNA, 614 bp, Homo sapiens
tgaaggcccacaggagaaattcctcccagaactcagtaccaagagaagctttccttctcctgaagacttagttttgttgttgcttcatttggccttttggatgctataaatactttaacagattatattatctctttgcttgtaggaagccctgagatttgcaaccctctacactatcgacattggacattatggcatgcattcttaacatttgaactgtgccccgacttcatcttgcttttttactsttgttttccctcaattctgatttcgttaactaatctttgttctcttgtatcatatatatttctataaatggtttcaaattattttgagaatgaaaatggctattaatgcataaatacacacagtggattttaacccaaaccctttacgacactagtcctgtaaaaagacaatgtggcctcagacagacctgggctggaatcctgattctgtggatttctagctctgtgacgttggttaagtcgctcaatagttcccagtttccatttcctcctctttaaactgaggctagtatcatgtacattgcatagtaactgtgagaattaaagagaatgtatctagagcattggcacttaataattgttaaa

SEQ ID NO: 233375 - DNA, 494 bp, Homo sapiens
attaaacttattctttattattattaatagctatacagattgttaccaaagaatacttaaagacaatgtctggcttatcatgttgacaggcttatgagcactaacactatctactcatataccacatttctctctaacaaagacctacagttaaacacttccatactagctcaatgtctccaagccattctttccaacatgctagatttgttgcaagatcctctccccattaagkctccctgtaccatatcccctgtcgtggattgaactgtgtctcccccaaaaatatactgaagttctaatccccaatacctataatgtggccttatttggaaacaaaagactttgcaaatgtaatcaaattaagaagatgtcatactggattagggtaggtactaagtgtaacaggtagtgtgctgataagaaggccattgaagggccacgtgaagggacacacagatgcatgaaaaatgtcatgtaactatggaggcaga

SEQ ID NO: 233376 - DNA, 496 bp, Homo sapiens
attaaacttattctttattattattaatagctatacagattgttaccaaagaatacttaaagacaatgtctggcttatcatgttgacaggcttatgagcactaacactatctactcatataccacatttctctctaacaaagacctacagttaaacacttccatactagctcaatgtctccaagccattctttccaacatgctagatttgttgcaagatcctctccccattaagtctccctgtaccatatcccctgtcgtggattgaactgtgtctcccccaaaaatatactgaagttctaatccccaatacctataatgtggccttatttggaaacaaaagactttgcaaatgtaatcaaattaagaagatgtcatactggattagggtaggtactaagtgtaacargtagtgtgctgataagaaggccattgaagggccacgtgaagggacacacagatgcatgaaaaatgtcatgtaactatggaggcagaga

SEQ ID NO: 233377 - DNA, 392 bp, Homo sapiens
gccttaaaacagcccaattagtcagtataatatcatttaattaatgtatttatttattgaaataccatcattttatagctgaagaaattgacatgtagagagattaagtgacttacttaaagtcaaatgggatttaaaatgatgtatgaaaggctgacactgaacagatacaggactaaagtgcttctgattcaagccattaaggctcttaggttaaacacactcatrcctctgatactccatcatgagcctaaaggaaaagactgtgaacataaaagtgaatactttatacttttacttctcttttattaaaagtaaaatttcatgaaaatctgtaactgtgaagaaactttaaaacagaatataagataatacatgtaaagcaactagta

SEQ ID NO: 233378 - DNA, 390 bp, Homo sapiens
atagcaaagatgctgtgtgaggttcagggaggagggaaggtgaaacccaaagagaggccctgaaggaatggagagagcttaatggcaagcttcctgccaagctgcctctgcatgacctaaaggattccagctctcctatgtgacatgtaaccctggacttttctgtctcaacacctgccttgctgctttcttcgggacctttcctacctccctgtcatcttcccagctgctctcgtgtcctttatcccatctcctgtaccttgccatcctgactccctggaacctggatccctgggagcagtagccccctgctgcctgmtgagtgacagagctctgcctcccccacaggggtggctggcctccttcctcaggccccacttagcagaattc

SEQ ID NO: 233379 - DNA, 368 bp, Homo sapiens
agcaaacatgatacacgagaaacaaaacaaaacaaaaaaatccactatacctaggcatactgttttcaaactayagaaaatcaaagattaaaaaaaatcctgaaagaagtaaggtggggaacaaaacactttacctatagaggagcaaagataagaattacacctacattctccttagaaactgtgcaagcaaggaaggggactgacaatcaaatgcagtaaaactgcaggatacaaaaacaacatacaaaaaccaggagtatttctatgtgccaaaagtgaacaatctgaaaaataaatcaagaaagtaatataatttacgatagctacaaataaaaataaagtatctaagaattaatttaaccaaa

SEQ ID NO: 233380 - DNA, 463 bp, Homo sapiens
tattggtacttttcaatgctcttattccccagatcatctcatttcccattctttcttcccaatctttttgtttagtcgattgtttgtcttaaccattattcattgtcccgggtagcattgactaatccacytgcctttaaacttttagataaatgacacccgttagctttgtcagccctaggaaaattagcagttgggtaaaacaaaagcaagccctttgagtcagtctttcagggatccaccaaccaggccaaaataaacagcagttctttgaaaataaggtccattgtgctcctctagtactaggtacgtgtcctgagcatgcagatgtcttgaaggccgccattgagctcaggagcatgagacggaatcaaagaaagttgaaatgctgcatagcttttttactcagattcagctgtttttgttttttctctcttaagtatccccttcatttctataagct

SEQ ID NO: 233381 - DNA, 466 bp, Homo sapiens
atatattggtacttttcaatgctcttattccccagatcatctcatttcccattctttcttcccaatctttttgtttagtcgattgtttgtcttaaccattattcattgtcccgggtagcattgactaatccacttgcctttaaacttttagataaatgacacccgttagctttgtcagccctaggaaaattagcagttgggtaaaacaaaagcaagccctttgagtcagtctttcagggatccaccaaccaggycaaaataaacagcagttctttgaaaataaggtccattgtgctcctctagtactaggtacgtgtcctgagcatgcagatgtcttgaaggccgccattgagctcaggagcatgagacggaatcaaagaaagttgaaatgctgcatagcttttttactcagattcagctgtttttgttttttctctcttaagtatccccttcatttctataagct

SEQ ID NO: 233382 - DNA, 463 bp, Homo sapiens
tattggtacttttcaatgctcttattccccagatcatctcatttcccattctttcttcccaatctttttgtttagtcgattgtttgtcttaaccattattcattgtcccgggtagcattgactaatccacttgcctttaaacttttagataaatgacacccgttagctttgtcagccctaggaaaattagcagttgggtaaaacaaaagcaagccctttgagtcagtctttcagggatccaccaaccaggccaaaataaacagcagttctttgaaaataaggtccattgtgctcctctagtactaggtacstgtcctgagcatgcagatgtcttgaaggccgccattgagctcaggagcatgagacggaatcaaagaaagttgaaatgctgcatagcttttttactcagattcagctgtttttgttttttctctcttaagtatccccttcatttctataagct

SEQ ID NO: 233383 - DNA, 463 bp, Homo sapiens
tattggtacttttcaatgctcttattccccagatcatctcatttcccattctttcttcccaatctttttgtttagtcgattgtttgtcttaaccattattcattgtcccgggtagcattgactaatccacttgcctttaaacttttagataaatgacacccgttagctttgtcagccctaggaaaattagcagttgggtaaaacaaaagcaagccctttgagtcagtctttcagggatccaccaaccaggccaaaataaacagcagttctttgaaaataaggtccattgtgctcctctagtactaggtacgtgtcctgagcatgcagatgtcttgaaggccgccattgagctcaggagcatgagacggaatcaaagaaagttgaaatgctgcatagctyttttactcagattcagctgtttttgttttttctctcttaagtatccccttcatttctataagct

SEQ ID NO: 233384 - DNA, 577 bp, Homo sapiens
catttttgataatttggaaatgggatttcttgagtaaaaggttactgtaactggaatcgtagatttcctttgcaaaagaaaaaacttaactgrttaagaagtattttaaaggagacagttaacaaatccactattagctctctatgagatttaaagtttcaatgggaattgtgaaactcaagtatcaaaaaaaatatttatcacattttaaccatggaaagaatatatagttcataactattttttctctgaagcactgtttctcaacctgatgaaaactccttgccttaacttgaaaactccctaggagttgctgggtattgagaaccaaactttgcttcctgccaaccagttccccctactgtccctacctaaagacaccttgcatttccctgcttttgattcccatcaattagaatatccccttatatcttttccactttccttcatttctacctattgatatcccccaaagcccagatcaaatactacctgttctattgggttagtagatttgctagccacatacaatatataatgttagctactgcatatggtagctatttgcaaacttact

SEQ ID NO: 233385 - DNA, 577 bp, Homo sapiens
catttttgataatttggaaatgggatttcttgagtaaaaggttactgtaactggaatcgtagatttcctttgcaaaagaaaaaacttaactggttaagaagtattttaaaggagacagttracaaatccactattagctctctatgagatttaaagtttcaatgggaattgtgaaactcaagtatcaaaaaaaatatttatcacattttaaccatggaaagaatatatagttcataactattttttctctgaagcactgtttctcaacctgatgaaaactccttgccttaacttgaaaactccctaggagttgctgggtattgagaaccaaactttgcttcctgccaaccagttccccctactgtccctacctaaagacaccttgcatttccctgcttttgattcccatcaattagaatatccccttatatcttttccactttccttcatttctacctattgatatcccccaaagcccagatcaaatactacctgttctattgggttagtagatttgctagccacatacaatatataatgttagctactgcatatggtagctatttgcaaacttact

SEQ ID NO: 233386 - DNA, 577 bp, Homo sapiens
catttttgataatttggaaatgggatttcttgagtaaaaggttactgtaactggaatcgtagatttcctttgcaaaagaaaaaacttaactggttaagaagtattttaaaggagacagttaacaaatccactattagctctctatgagatttaaagtttcaatgggaattgtgaaactcaagtatcaaaaaaaatatttatcacattttaaccatggaaagaatatatagttcataactattttttctctgaagcactgtttctcaacctgatgaaaactccttgccttaacttgaaaactscctaggagttgctgggtattgagaaccaaactttgcttcctgccaaccagttccccctactgtccctacctaaagacaccttgcatttccctgcttttgattcccatcaattagaatatccccttatatcttttccactttccttcatttctacctattgatatcccccaaagcccagatcaaatactacctgttctattgggttagtagatttgctagccacatacaatatataatgttagctactgcatatggtagctatttgcaaacttact

SEQ ID NO: 233387 - DNA, 568 bp, Homo sapiens
tgaacatttttgataatttggaaatgggatttcttgagtaaaaggttactgtaactggaatcgtagatttcctttgcaaaagaaaaaacttaactggttaagaagtattttaaaggagacagttaacaaatccactattagctctctatgagatttaaagtttcaatgggaattgtgaaactcaagtatcaaaaaaaatatttatcacattttaaccatggaaagaatatatagttcataactattttttctctgaagcactgtttctcaacctgatgaaaactccttgccttaacttgaaaactccctaggagttgctgggtatygagaaccaaactttgcttcctgccaaccagttccccctactgtccctacctaaagacaccttgcatttccctgcttttgattcccatcaattagaatatccccttatatcttttccactttccttcatttctacctattgatatcccccaaagcccagatcaaatactacctgttctattgggttagtagatttgctagccacatacaatatataatgttagctactgcatatggtagctat

SEQ ID NO: 233388 - DNA, 516 bp, Homo sapiens
agatggtgtagcaagtttattcaaagggataatatcacagaacttctcgaacttaaagatattaatatccaagtacaaggaggttatagaacaccaagcacatttaactcaaagaagactacttcaaggcatttaataatcaagctcccaaaggtcaaggataaaagatcctaaaagcagcaagggaaaagaaacaacatacgatggtgatccaacatgtctggcagcagacttttcaatggaaaccttacaggacaggagagagtgacataacatacttaaagtgctgaaggaaaaaaaaaaaccttctaccctagaattgtacatctgataaaaatattcttcaaacgtgaaggacaaattaagactttttcagacaaaagmtgagggatttcgtcaacaccagacctgtcctacgagaaatgctacaggatgtacttcaatcacaaaggatgtcaatgagctataagacatcatttaaagatacaaaactcactagcaatacacaaaaacata

SEQ ID NO: 233389 - DNA, 516 bp, Homo sapiens
agatggtgtagcaagtttattcaaagggataatatcacagaacttctcgaacttaaagatattaatatccaagtacaaggaggttatagaacaccaagcacatttaactcaaagaagactacttcaaggcatttaataatcaagctcccaaaggtcaaggataaaagatcctaaaagcagcaagggaaaagaaacaacatacgatggtgatccaacatgtctggcagcagacttttcaatggaaaccttacaggacaggagagagtgacataacatacttaaagtgctgaaggaaaaaaaaaaaccttctaccctagaattgtacatctgataaaaatattcttcaaacgtgaaggacaaattaagactttttcagacaaaagctgagggatttygtcaacaccagacctgtcctacgagaaatgctacaggatgtacttcaatcacaaaggatgtcaatgagctataagacatcatttaaagatacaaaactcactagcaatacacaaaaacata

SEQ ID NO: 233390 - DNA, 572 bp, Homo sapiens
acaactatatgccaataaattgggacattcagaagaaatgaatgagttcctaaacacatacaacctgccaaaattgaactaggaagaaatcgaaaacctgaatagaccaataagaagtaatgagatcaaagccataataaaaagtcctccagcaaagaaaagcccagaacccaatggctgcactgctgaattctaccaaatatctaaagaataactcataccaattctactcatactattctgagaaatagaggatgaaggaatacttccaaactcattctacaaggtcagtattactgtgataccaaaaccaaagacacatcaaaaaataaaaactacaagccaatatcactgrtgaatattgatagaaaaagccttacctaaacactagcaaacagaattcgacaacatattaaaaagatcattcatcatgactaaatgggatttatctcagggatgcaaggatgattcaacatatgcaaatcaattaatgtgatacatcatatcaatggaatgagggacaaaaaccatatatgatcatttcaattgatgctgaaaaagcatttgataaa

SEQ ID NO: 233391 - DNA, 572 bp, Homo sapiens
acaactatatgccaataaattgggacattcagaagaaatgaatgagttcctaaacacatacaacctgccaaaattgaactaggaagaaatcgaaaacctgaatagaccaataagaagtaatgagatcaaagccataataaaaagtcctccagcaaagaaaagcccagaacccaatggctgcactgctgaattctaccaaatatctaaagaataactcataccaattctactcatactattctgagaaatagaggatgaaggaatacttccaaactcattctacaaggtcagtattactgtgataccaaaaccaaagacacatcaaaaaataaaaactacaagccaatatcactggtgaatattgatagaaaaakccttacctaaacactagcaaacagaattcgacaacatattaaaaagatcattcatcatgactaaatgggatttatctcagggatgcaaggatgattcaacatatgcaaatcaattaatgtgatacatcatatcaatggaatgagggacaaaaaccatatatgatcatttcaattgatgctgaaaaagcatttgataaa

SEQ ID NO: 233392 - DNA, 572 bp, Homo sapiens
acaactatatgccaataaattgggacattcagaagaaatgaatgagttcctaaacacatacaacctgccaaaattgaactaggaagaaatcgaaaacctgaatagaccaataagaagtaatgagatcaaagccataataaaaagtcctccagcaaagaaaagcccagaacccaatggctgcactgctgaattctaccaaatatctaaagaataactcataccaattctactcatactattctgagaaatagaggatgaaggaatacttccaaactcattctacaaggtcagtattactgtgataccaaaaccaaagacacatcaaaaaataaaaactacaagccaatatcactggtgaatattgatagaaaaagccttacctaaacactagcaaacagaattcgacaacatattaaaaagatcattcatcatgactaaatgggatttatctcagggatgcaaggatgatwcaacatatgcaaatcaattaatgtgatacatcatatcaatggaatgagggacaaaaaccatatatgatcatttcaattgatgctgaaaaagcatttgataaa

SEQ ID NO: 233393 - DNA, 561 bp, Homo sapiens
ggagtatgttctacaagaactggcatggactttctatttgcatatttaaattatttttctttctaggaatgtgactgctgtgcagcacaggcctcttcctatatttatcccttattttccatgttcatttgatcagacagttttatttctggcaattttcacatcacagggaaagagagggaaattaaaaaccaattcatacatttcattatctgccttctagccagttaacgctgaattagaacacacaagatgcttgaactttgcccttgtactttctaagaatcaaaatgtttaaagagaaaacaacccaaattagaaagacttgattgctgtctttacaactattcagggggaaaagatggaatatgctgatataagaaaatcttaactaacttgcattgttttargacaccagattttcattattagtttttatgtgataaagcctatttctgatttcccttaggtatttttttagcagaaagattctaaatttagaacaaagaaacaatatatatgaaaaaataatatagccagacacaggtcaactaggcaagt

SEQ ID NO: 233394 - DNA, 585 bp, Homo sapiens
aatttgcaggacttagacattttccagtgcttgggagaatgaagattccataccaccttataggttttgaataaataaggttataaaacctctttgggatttgagcccagcaagttctacctgtagctgaagcaatgaataagagtttatgagaataaatactttaaggtattttaaaatactgtattttcagtacacataataaaaatatatccatacaatgatcttgatgctaccataatttttctctttaaaaaaataatcccttgaaagtgctatcaggagctacctgtgtttttttttgaaaggcaaacttcctgggtttatagtactgctataattcttatgtcatccctagagtcttccctttccaatagtaataataatgcmcggtatatttttctcactcttagcttcttcctttggaaatgctgctaagtaggaaatactgaaagagttaaaagggacaattaattggaatgaaggcgttatctatctctgactttgaataaacaacggataagttgtccttaacttattgagacatatgactaagtaggaccacttgatctccaatattaataa

SEQ ID NO: 233395 - DNA, 365 bp, Homo sapiens
tgattaaaacaatgagataccactttatacccatttcagtggctctggtttggagcaactagaaatctcargcattactgatggaaatgtaaagtggtacagtcagtttggaaaacagctgatggtttcttataaagttaaaaatacacttactatatgacacagcaatcccacccccaggcatttacccaagagaaatgagaacatatgtccacacaaatacgtggacactaatacccatagccatctgatttttaatgggctaaaacagaaacaacccaaatgcccatggatacacatattggagtacgtttatataatagaatactactcagccatgaaaagcatggactaatgatgtacag

SEQ ID NO: 233396 - DNA, 439 bp, Homo sapiens
ttctagggaagggaagggaggtgaaggaccatgagctcatcattatcaaggattctgaaacttcagttcatttttattaataaattaccttcatgtggccaatgaattgccggtctgattggaaactctttcctgcaccgaagaaactgcaccaattagcaatattcatctgccaattcagctctgcaggttcaggctcatttaacttgacaaaaatagcttctttttcttgagtaggggaagtttttctctgcctccagccctagtgatgggcagagatggtggtggaatyttattacagccttcctgtccctgatgttctttatccagccgcagcgccacaggctgcccgttttttttttttttttggatacccatttcacgaccttctttggtttctttatcacaaaagtcactgtatgtcttttagctcaaagcc

SEQ ID NO: 233397 - DNA, 453 bp, Homo sapiens
cattccttagagttttctctctataagatcgtttcatctgcaaatagagacagttttacttcttcctttctaaagtaaaagccttttttttcttcttcttcattttcttgcctaattgctgtggctagaatctccagcacaatgttgaatagaagttgtaacagtataaatcaytgtgtgattcctgatcttagaggagtattctacagatgtctgctaggtctagttggtttatactgtttccttgttgatcttctgtttaggtgttctattcattacaaaaagtagggtaccgaagtctccaaatattttgattaaattgtctatttctcagctacacagctttctgtagcagaaaaacattagaattcgaggagtccagctactgaccaaaacctatgtctgatttttcaggcccaaccacaggcaattataaaaactttacctggcaaa

SEQ ID NO: 233398 - DNA, 593 bp, Homo sapiens
cgtttatgaaggccaaaatataaatgcctctggaatccagaagattcctctaataaaagtgttcttccattgaccccacccagcacacaggtggatgctgtttaagatcctaagtcatgaccccaagggttttaacgtgaagcagtttcaaaacggttttagccagtttcccacctcagccaaaataatacaccaataaagcatcytttgaacatgtagctgtgaacattgcattctgactagaaaatggaaagaccttgccatgtgaatcctggtaatgatatggatttcaggccctcctttctgctgaactcatggaggtttctgtctttactggctgcctactctggggtgcagagtatctttaagtggagaattactcatagcgacatttcttaagaaccacgggattcaccagaaaaacaggactcattcttaagcttctgaggaaggtctctttcccagtcaatgagtgtactatttggacaggaagctgagcaagttcgaaagccaaggaaagtctgctagccgcagaggtgatttggaaaatatccaagccttacctcatacacccacgcttcagatataccagt

SEQ ID NO: 233399 - DNA, 469 bp, Homo sapiens
ccagaatatggtctatcttggtaaatgttccatgggcacttgagaagaacgtgttttcttctatttgggagttgtttggtaatgctgttcaaatcttcgatatccctactcattagctctctatttgttccatcagttattgagagaggggttggaaatttctgatttgtctattttcttcactgttctttcagtttttgcctcaggtattttgaagtttcattctgagatgcataaacatttagagttgttatgtccttttcatgaatcaaaccttttattattatgaaatgaccttcatcatcccttgccatattctctgctctgaaatctattttgtctggtgctaatatagccactccagtttccttttgattggtgttagcrtggtatttttttccattattttacttttggcctatttttgtctttatagtaagtattcagtggggtaagacactctcatatt

SEQ ID NO: 233400 - DNA, 573 bp, Homo sapiens
ccctgggggcaaggcagccaggcaaggtaaggccagtgggttgtgaagggtccagcatgctccaacactgaggcccagacacctcacgtccctcctaccagccgagcagcaggtcacacaagaagatgtctgcaactgtggaacccagttccctggggtttaattttctttgctaattaagtgtctgagtcggaccccctgcaggaggtatgtgtctgcagcttcatggatgagaataataataaagccctagaatcacagcttcagaggggtcctgaaaggacttttcctagaaacaaacaaacatatcttttatcttcctctctctacgaatctaggctgggttgcaggaaagatggtgtcagagggccccaagctttgttatctggaagagaatgacctggyggattgggaggtctgggtgatcactctgactgagaagccaaggatgaaatacaaggtgaagagtagcaaagagacaagattggggtggatgcaatagttagtggacaagcctaactgttgtgaagtctgagctcaagtagggatcatagccatggagcaaaggggatg

SEQ ID NO: 233401 - DNA, 512 bp, Homo sapiens
ggtaagaagggggctctgatttttcagacttatgagtgtgggacaacctgtcccagtcccactcctggctctgcccctcaccagccgtgtaccttggaggtgtgacttcttccctcccagcttcagtttcctcacatggaagatgaggataatagttttccatatgtcacagggtcattacaaggattaaagaagattttgcagatkgcaaacctgaagtgccggacggtgcctggaattgaggcagaaagttcaaagtaaatgtgggtgtgagttttggaaaacaccttgataaactatttgggtggaaggaaaccagaaggcaggtctggaattcagggccaagggaatacagaattgctctgcattagtaaagaagaggccgctcattctcttttgtttccttccttctctccttccttcctttctgtatgttttgttttgttttgttttcaggtttgatatggcatgtcatgtggtgactttttctttttaaatgatgtcaagagcca

SEQ ID NO: 233402 - DNA, 478 bp, Homo sapiens
ttcactcccacatgggtgggccagggtcagaggcctctgcactcagataggaaaattcaggtggaaagaatgcctaagacacacctatgggcttttgccattgcagcctgtctggggaggtgtgcagacggaaaccaagactccrtgcaaggttgatatccagcagttacataatgaggataagaggtcaaatgcattcacctctccagcctcactttccttatgccttaggtgctcagctctgctcctggtgcatattaattggtccctaagttgtggcttttgcattatttcatttcccaactccctcaggatgccctgaaagtcctgggaggaatccttcttctgaagatatgccctcaggatgggccctccccacagcccgatgtccaagcagaatagccagctcctcctctcaggggaacgatgggcaggactgaggcctcctggctgggtaaatcccggctgcctccagctt

SEQ ID NO: 233403 - DNA, 478 bp, Homo sapiens
ttcactcccacatgggtgggccagggtcagaggcctctgcactcagataggaaaattcaggtggaaagaatgcctaagacacacctatgggcttttgccattgcagcctgtctggggaggtgtgcagacggaaaccaagactccgtgcaaggttgatatccagcagttacataatgaggataagaggtcaaatgcattcacctctccagcctcactttccttatgccttaggtgctcagctctgctcctggtgcatattaattggtccctaagttgtggcttttgcattatttcatttcccaactccctcaggatgccctgaaagtcctgggaggaatccttcttctgaagatatgccctcaggatgggccctccccacagcccgatgtccaagcagaatagccagctcctcctctcaggggaacgatgggcakgactgaggcctcctggctgggtaaatcccggctgcctccagctt

SEQ ID NO: 233404 - DNA, 571 bp, Homo sapiens
tattcattgccccattttcttgctcactcattcatacattcgttcatgagctcactcacccaccagtgtctcaggcactgagcccttttcatttcttcccacaaacatgtctcatgcccgcctcgcttctgggccttggcatcagttgttctcatagcctgaaatgttacctctgctcttctccaactacagtccttggtttagaatcacctgctccaggaagcctctctgactcatggtctaagttaagggctcagctcaaggtttccatactcatcctgtttatctctatcactacattgttccagcagccagtttcttagcctgactcccccacaagatcatgaactccttgaatttttggactgcatcttatccccacaactgacattgtagttggcacaccatagayatttagtaaatgcttgtaaagtcgatcaattttcagaacagtctgtgcaaagaattggaaggagaatcactgaccagccagaggcacatactactgggaagagaaagacatagtttgtgttgagcacctctatgcacctctatacatataactgattaa

SEQ ID NO: 233405 - DNA, 435 bp, Homo sapiens
ttagcatccaggagggtggagagtttgtctgacttgtacattgctgtagattcacagcagctacaacagtacctgatacatagttggtactcaatacatctttttggaatgattaatgctgaagttagggtcacaggatgggtaaagcatgggtccctccaagaacagggaacagaggtataatgaataacaggatcaggttcattgtctgaaatttggggtttagcttcttcattcagaatatgaggatatggaaaaccacaatgagacaactagttccaaataatccttctctaccagcttcctgtccaacaatctctactttctaaaatttctcatatctatccacttcctccatcacttctyttgtaccagtctagactggcatcatcgttgacctaaacttctctgcaacctccttgtggactctcctgc

SEQ ID NO: 233406 - DNA, 418 bp, Homo sapiens
agttctcaaggaaatggattagttcccgtgagagtgagtttttagaaagccrggacacccatcaggttttgtctcctctttacatatgtctgcttcccctttgaccttcttggccatgttatgatgcagcatgaaagtcctcagcagaagccagggccatgcccttaaacttctcagcctgcagaactgtgagctgaataagcttctgttctttataaattactcaaccccaagtattctgttgtaacaacataaaatggactaagacactcctactgcacccatccagtcacaactgctccttagctagagaaaagctcaacaggagaatggggtcctagatcatgtaatgcctggggtaacccttgttgaaatgttgatcttcggcctaagaacattgggaagccctgaagaattc

SEQ ID NO: 233407 - DNA, 578 bp, Homo sapiens
gtcgaggatttaaacacaaatagtttttgaggggatttcggaaaacccaggacaagggagtaggaacatgagatagggaagagaataaagtcagccygtgatacacatcacgtatcaagccatctgtgctgtgggcaattgaagcttaattccacctgaaaacttgaggatatggtgtagaaaaaagcatcagaatgataacatcatttattggttgagggtactccggggggctgttactccctggcacttacatcctgtcttacccacaggcagtttcccagcttcagagagagccttcaggcaaagagatgcagacattgcagttggaagtaagctaggaagtggtggaactcacgggaggcaggcagggcatccacagagtcagctacaacaacgagtcctgtggtgtctattgcctaaatgatgctctgatcatctatattctccccattctagatccctctctctctgtccagatcaccatctgacttttgcaatcatcactgactggtcttcttgcctccagcctggcatcctgcaatccttctccaaactgcagcctaagtgagatggca

SEQ ID NO: 233408 - DNA, 532 bp, Homo sapiens
atcattacctataggtcatctcccttaggtggtcccaccactatcatcttcattttgaagataaagaaacgaaggctaagggaggttaggggatctggccaaagacacacagctgggaagtggccacactaagagtcaaaccttcatggtcttacattcctgggctctagacctgggtaagagtcttgagtttctgtcttggcyccagattttgttaactctgtgtccttgggcaaatcttttgctcttttatggcttcgtttctctgtctttcagagtaatactagtagctaatattaactcttgcagacttgcaagattaaatgaaataacacggtgagttacaatctaaggatgtttctacccatattcctttgttctccatggtgcttagcccttctcacccaggcagaaaggtggctactctcccaggcattcattgctgcagggaagggatacaagctaagaattcagagaaaagatttgaaagcttagaccttatgggagctaggatattaacactgatttgagg

SEQ ID NO: 233409 - DNA, 415 bp, Homo sapiens
gcttgtttgaaagtgtataacatcttccctctctctctcttccttctgctccagccatgtaagatgtgcctgattcccctttgccttccaccatgattttaagtctcctgaggcctccccagaagcagaagccactatgctgcttgtacagccttcagaatcatgaacctctttttaataaattactcagtctcaggtatttctttacagcagtatgagaacaaactaatacagaaaattggtactgaggagtggggcattgctataaagatacctgaaaatgtggaagcaactttggaactgggtaacaggcacagattagaagagtgtwgagggctcagaagaagacaggaagatgagggaaattttggagcttcctagagacttgttaaatggttgtggccaaaatgctgat

SEQ ID NO: 233410 - DNA, 636 bp, Homo sapiens
cactggtttctaaacccagctcatcaacaggactggaaggtttctggcaggaccatactggtttgctctgcacagtacatcctaatcccatgcccctgagactgtagtgacaaagatttctaacattttcctatgcaatgggattgaattaycccagggataatggaaaggtatttttcatctttagggtgttaatgaatataaatgggatttacagcctatttctctgcttttttttccctctgggaagtgagatcatagaaaacttacagtagcaaaaggagagtgagagacccttcattcaaccctcccacccagaacacccccaagaatgagaaagacttcaagaaccccaatgccttcccctccttcccaaatggtcaaaaactcctccaagtaaaaagtaattgatcgatcatgttacaagtatttttagctacaaggaattgctaaccagcaaactttgagtgaaccaggacccagggaagtcaagatgtaaacctcttttctagatggaatactctctctgctcatggctttcttctgggaagtagggaaggtgttgtcttggtccatattagtccacatctcttagggaataattctgtcatctccccacctctaatgctctattct

SEQ ID NO: 233411 - DNA, 544 bp, Homo sapiens
gaggcctcacaatcatggtggaaagcaaataaggagcaaagtcacatcttacacggtggcaggcaagagagcatgtgcctgggaactcccctttttaaaaccatcagatcccatgagatttattcactatcataagaacagcacaggaaagaccctccctcatgattcaattgcctcccaccaggtccctcccacaacacatgggaattatgaaagttacaattcaagatgagatttgggtggggatacagccaaactatatcaacccccatagctggtctgtagttttaacatgatttctgggttctacctgtctgtcccagtgacaggcagtcccagctctgyctcagtgggtggggaagtttcagagtccctgccaaggggtctcttcctgcctccaagcatgacctctccaagtagaagtcaggcaaaagctccattctcagtccagtggaaagtcacctctgataaaaccaccttaaattccagcttttcctgtgctctgtgacatactgagtcactagaagtctggaaaagaaaaatc

SEQ ID NO: 233412 - DNA, 615 bp, Homo sapiens
catctatctattgatctctttgtccataattttattcattatctttattcttaatcaatctctctctatctgtctctctctctatctctttctattcatcactctctctttccccactcaaatccttacaactggagtgttgggttcattctgcgatccacattttgtaacagactgaacaactataattcatgcagttgagagtggccaagacagctcaagaccccatagtcacatcctgttaaaatcaaggaaaaaaaaatgctggcaaaaatctagccactgacttcaaatcactgaagggttttcttgggaaagagcagaccaagattgtgtggctccaaagggtttaaccaagaggatcaaagttataagatgtcatgttccgttcaacaagggaagacatttctaacaactgcagtgctttgaaattggattgggtaaccttgtgagacagggagctctttttacgatgctcattttattctcctgaaccattgcttttctctgtccccatatgtctgctggccccatttgggttgcttgacttgttcttgtgtggaaaaatgcagagttgcgtwgagtttctactcataaagaagactgtgtatcatg

SEQ ID NO: 233413 - DNA, 343 bp, Homo sapiens
actttcagtgtgttataaaaatgagattgtgaggttatttgttgctatagcatagcctacctcatccagaccagtatgtactgagaagggcttctttacaattgagggcttcctgggccattygtatgacaagagagaggctttgattaagaagtcagtgtgctgaagaaggcagtaacagagatccagcagaaaagagatttggataaaattattttgtttttgaaattctgacaagttgggcctaggtttatggcttcctaggggagaaatattacctgaaacatatctgaatttccagagttgctaggagaatattttaagtgtgaagccattagcctcc

SEQ ID NO: 233414 - DNA, 343 bp, Homo sapiens
actttcagtgtgttataaaaatgagattgtgaggttatttgttgctatagcatagcctacctcatccagaccagtatgtactgagaagggcttctttacaattgagggcttcctgggccattcgtatgacaagagagaggctttgattaagaagtcagtgtgctgaagaaggcagtaacagagatccagcagaaaagagatttggataaaattattttgtttttgaaattctgacaagttgggcctaggtttatggcttcctaggggagaaatrttacctgaaacatatctgaatttccagagttgctaggagaatattttaagtgtgaagccattagcctcc

SEQ ID NO: 233415 - DNA, 607 bp, Homo sapiens
tgattaagaagtcagtgtgctgaagaaggcagtaacagagatccagcagaaaagagatttggataaaattattttgtttttgaaattctgacaagttgggcctaggtttatggcttcctaggggagaaatattacctgaaacatatctgaatttccagagttgctaggagaatattttaagtgtgaagccattagcctcccctctcgggctctttatgccatctaagacagattggaggtgtttttgagatagtatatgtctctctgaggagttaacttggaagaaagaaggcatttatgatttgctacttgagacatggacaagctattaatatttccctttatcatggcaattcctggttacaaatgtaagtgaatgacttagaatraaaataagataaaaatatttttaaatgcccatacaattataaaaacaattcattattttaaaaaataagagaaaaaatagtgaacaaagctgtaaatctgcatacaaaatatccaaaagctataactaaatcaatagactgaactttatgtcagatggtagtggagaggtgaggaaaaaagcacaataatgaggaggaggtaaagagggagaggaata

SEQ ID NO: 233416 - DNA, 607 bp, Homo sapiens
tgattaagaagtcagtgtgctgaagaaggcagtaacagagatccagcagaaaagagatttggataaaattattttgtttttgaaattctgacaagttgggcctaggtttatggcttcctaggggagaaatattacctgaaacatatctgaatttccagagttgctaggagaatattttaagtgtgaagccattagcctcccctctcgggctctttatgccatctaagacagattggaggtgtttttgagatagtatatgtctctctgaggagttaacttggaagaaagaaggcatttatgatttgctacttgagacatggacaagctattaatatttccctttatcatggcaattcctggttacaaatgtaagtgaatgacttagaatgaaaataagataaaaatatttttaaatgcccatacaattataaaaacaattcattattttaaaaaataagagaaaaaatagtgaacaaagctgtaaatctgcatacaaaatatccaaaagctataactaaatcaatagactgaactttatgtcagatggtagtggagaggtgaggaaaaaagcacaataatgaggaggargtaaagagggagaggaata

SEQ ID NO: 233417 - DNA, 647 bp, Homo sapiens
  misc_feature (1)...(647): n = A,T,C or G
nnnnntcgcttatctcctggcaaaaaaaaaaatatatatatatatatataattaaactttataataactctttgaggcaatttttattattctctttttagagatgaggatccctaagatcacacggtaaatccattttcttgactctaactacatacaactatatatagttttcttgagaatacaggactctccataaagtaaatattatataagtaccgtatttgycaactagattaaaggaggttcaattcttgtctgtatgtgaagtttcaagtttataatagtttccctaaaaaataatttttattttaaaatttcaatgaagaaattccatggaaagaattccatggaaggatttggaagttgctatgatagacagctgtgaaacacaaccatgtcaatacccatacatttaaaacttcagagaatctctacattataaatttcatagctggtaagactgtttctttccaacaccagtagtcacaccatgatcacactgctcttgccctgatagtgaagacaataagctgtatttaatcagagggttaactgaggaccacactgatcataataatctcccacattctgttgctggcaggtgagggataaagttgaagatcatggtagaaagatacagacaa

SEQ ID NO: 233418 - DNA, 604 bp, Homo sapiens
aatggaatccagcacacaacacctaacggcttggcgggatgttgaggacattgtgggatttgaacccaacaaaagccacttagaaactgtatccatggccgggtgcggtggctcatgcctgtaatcccagcactttgggaggctgaggcgggcggatcatgaggtcaggagatcgagacgatcctgactaatacagtgaaaccccatctctactgaaaatataaaaacaaaattagcctggcattttggcgggcgcctgtagtcccagctacttgggaggctgaggcaggagaatggcgtgaatccaggaggcagagcttgcagtgaaccaagatcatgccactgcactccagtgcatctccaaaaaaaaacaacccaaaaaactgtatccatatactakgtccaggacatcagcctattatcatactaatgggtatctttgtaaacaagttaaccaggcattgaagtgtagacaagagagtccatatatattatcctttgttcacactttatcaattcaacattcaacagaaatatgtttaattcctttttcatgtctgacactgaagatacacagtaaattttaatacaacttggttcctgc

SEQ ID NO: 233419 - DNA, 604 bp, Homo sapiens
aatggaatccagcacacaacacctaacggcttggcgggatgttgaggacattgtgggatttgaacccaacaaaagccacttagaaactgtatccatggccgggtgcggtggctcatgcctgtaatcccagcactttgggaggctgaggcgggcggatcatgaggtcaggagatcgagacgatcctgactaatacagtgaaaccccatctctactgaaaatataaaaacaaaattagcctggcattttggcgggcgcctgtagtcccagctacttgggaggctgaggcaggagaatggcgtgaatccaggaggcagagcttgcagtgaaccaagatcatgccactgcactccagtgcatctccaaaaaaaaacaacccaaaaaactgtatccatatactatgtccaggacatcagcctattatcatactaatgggtatctttgtaaacaagttaaccaggcattgaagtgtagacaagagagtccatatatattatcctttgttcacactttatcaattcaacattcaacagaaatatgtttaattcctttttcatgtctgacactraagatacacagtaaattttaatacaacttggttcctgc

SEQ ID NO: 233420 - DNA, 578 bp, Homo sapiens
tttttgatgtgggcatttagtgatataaatttccmtcttaacactgctttagttacatcccagagattttggtacactgtctctctgttctcatttttcaaagaacttcttgatttctgccttaatttcattatttacccaaaagtctttcaggtgcaggctattccacttccatgtaatcatacgattttgagtggatttcttagtcttgatttctaatttgattgtgctgcagtccaagagaatgtttgttataatttcatttcttttgcatttgttgaggagttttttacttccaagtatgtgatcaattttagagtatgtgccatatgatgaggagaagaatctatattctgttgtttttaggtggagagttctgtagatatctatcagacccatttgagcctgtgctgagttaaggtcctaaatacgtttgttaattttctgtctcagtgatctgtctaatattgttagtggggtgtttaagtctctcactattattgtgtgggaatctaagtttctttgcaggtctctaaaaacttgctttatgaatctgggtactcctgtattgggtgctc

SEQ ID NO: 233421 - DNA, 578 bp, Homo sapiens
tttttgatgtgggcatttagtgatataaatttccatcttaacactgctttagttacatcccagagattttggtacactgtctctctgttctcatttttcaaagaacttcttgatttctgccttaatttcattatttacccaaaagtctttcaggtgcaggctattccacttccatgtaatcatacgattttgagtggatttcttagtcttgatttctaatttgattgtgctgcagtccaagagaatgtttgttataatttcatttcttttgcatttgttgaggagttttttacttccaagtatgtgatcaattttagagtatgtgccataygatgaggagaagaatctatattctgttgtttttaggtggagagttctgtagatatctatcagacccatttgagcctgtgctgagttaaggtcctaaatacgtttgttaattttctgtctcagtgatctgtctaatattgttagtggggtgtttaagtctctcactattattgtgtgggaatctaagtttctttgcaggtctctaaaaacttgctttatgaatctgggtactcctgtattgggtgctc

SEQ ID NO: 233422 - DNA, 578 bp, Homo sapiens
tttttgatgtgggcatttagtgatataaatttccatcttaacactgctttagttacatcccagagattttggtacactgtctctctgttctcatttttcaaagaacttcttgatttctgccttaatttcattatttacccaaaagtctttcaggtgcaggctattccacttccatgtaatcatacgattttgagtggatttcttagtcttgatttctaatttgattgtgctgcagtccaagagaatgtttgttataatttcatttcttttgcatttgttgaggagttttttacttccaagtatgtgatcaattttagagtatgtgccatatgatgaggagaagaatctatattctgttgtttttaggtggagagttctgtagatatctatcagrcccatttgagcctgtgctgagttaaggtcctaaatacgtttgttaattttctgtctcagtgatctgtctaatattgttagtggggtgtttaagtctctcactattattgtgtgggaatctaagtttctttgcaggtctctaaaaacttgctttatgaatctgggtactcctgtattgggtgctc

SEQ ID NO: 233423 - DNA, 525 bp, Homo sapiens
agtactcactgcccacaacagagataatggctatgcatttcagctaccaagaaagttttggaaaaaatacaacactccccagatcccctttgaagcattgttcagtcaagcatgataatgggttgcaggccaattcatatctatctgccccttcatattggatattctaaaatttctcaggtattagctagagaaagcttactacagagggctgagaagtagtgcagatgatatctaaatactgtttaatgttttattggacatgaaaaagacagtagaacaatctttacttgtcccttggtgtcctgaaaattatttcaagtcaagcaaaaaaaawaagagaggcatgccagattttgacacagtccaaaattatacctttctcaagaattttaacttcttcttttctccttgatatctaaaaatctaataaaaaccatgataatctgtctaataaattgtgaaatgttttggaaaacacaaatataaaagatacaaaacactactgatagttatgtcaaataa

SEQ ID NO: 233424 - DNA, 593 bp, Homo sapiens
tataaaacttataaaatatataaaatggtattttattaataatgcttgaattgacaaactcagattcttaacacatacttaaaataagctaattaataagagtgagagagttttgatgaaatgaataaactgacactaggttttgtggatgacagttgccatctaatgttaagtctcagcatycattttatttctcaaactgtaaagtatgaagaaacaactgattcctcccagtgagtaatagcaacatgtttatatagctttatagaagcaaatatatgcaatttataaaaggaacagtgcaaaggctaatcaatgacacacttaaaagaaggttaagtatgtgcataaagttggcaggaagagttgtattctggcctctaaacaaagacaagttagcttggcagcccttgttaagctacattctctaatatgtttgaaaatagatgcataacacatttgagtaaacctttaaaaatatatgcatatactatccatgatgcataaatgaaatataatcaaacattaatatactctctaaaaatgaaaagcattacatatattgtacctgatttgaactgtcattttcatag

SEQ ID NO: 233425 - DNA, 571 bp, Homo sapiens
agggaacaaaccctgaaatgtcattttctctccagagcctcctcagaatcgggctgagtctgagacatcacatggaattggacctttgcttggctttgtcactttccttcctatcctgcttcttttacccttttactggttttactgggagaattaatacattacttacacstgaatccttggcccagcatttgcttccaggaaactccagcctaagatagtgtttcacaccactcatcttccaccattcctcaagacctaaaagctctaattttaaaatgagcacaggtgagacatgggctatgcggtggtggtggggggaggggcggggaagtgtggggaagtggcaagcaagagagagagagaggatgggaaataggaatcatctttccattctttactgtctgccctcctattcatttccacattaccttctaaaacccactgtttacatgtcaccttctcttctacccattttagggtgctccgttacttagaaatatagtaaaaattccatagcctcatgaatgttgacaaaatgattctaaagtttttatggagaggcaaagga

SEQ ID NO: 233426 - DNA, 547 bp, Homo sapiens
aagggagttgcaaggatctagataactgctaatgtttagtttgcatgaaattagccagaataagtacataagagaagaattaaggtttttagattttaaaaggaggtagaaattaaaagaaaaaattaggtcatttctagatatttttagtttgaggcaatgtctaataggtagctgggtataaagtccagaatggagacatagatttaaagttatcagaatggaggtgrtagtttcagccatgagagtaaatgagacttctcatagaagccatgtagagtgataagattaccaagaacagaaatccaagtaaaattagcatcgagtgagcctaggaagagaagcatcctgcagaagcaagcaaattcagtgtggatggagatgcctgaggagggtcagcactgtggagtgctgtgaaagctgtgagagcagcccattttaggaagaatgaagagtcagcactgtcctgtgctacgtctactcagggaacatctgaaaatcaaccactgtctctgacatttgggcagttagttactggtgacctttg

SEQ ID NO: 233427 - DNA, 571 bp, Homo sapiens
  misc_feature (1)...(571): n = A,T,C or G
gattaaacctaggaagaaaagaatacagtttaaagaaagaaagctataacattttactgatagattaaaaaagtaatttaagarcaagaaacactgtttctgagtgaaagttttaacattgtaaacagtattgaagcttttcattaggaacacaacagggtggctagttaataataactgaattgtatattttaaaataaagagcataattggattgtttgtaactcacccgctcaatccttgatgggtaccccattctgcatgaagtgnnnnnnnnnnnnnnnnnnnnnnnnnnnnnnnnnnnnnnnnnnnnnnnnnnnnnnnnnnnnnnnnnnnnnnnnnnnnnnnnnnnnnnnnnnnnnnnnnnnnagagaaagtttctcatattacaaagagcaaatttcctttaaaattaatccatatattcaatctaaccacaatcaaaatctctaagggatatttgaaatgaaattttacaggttgattctgcagttcaatctggaatgataatatgtaaataaatatcagatgaattaaacttaaaaaatgaaaccatttattagacagaaaa

SEQ ID NO: 233428 - DNA, 615 bp, Homo sapiens
tccctttgtataactgtgagataacttaatattttataatccaccagatatttaataggtagttaaaatatgaaaggcattatgttagatctaagaccatttcacagcattctgaaatcatattgaatcaaataacttttataatatcattaatattatttttttcaatttagcatctggacctctatctgaatgagcatttacataaagcatgatatacaaaccttaaaaatgtggggctgcccttctgaatcaactgtgatatttgttctttcagtttccctgttgctcctgtggctttccttgagtcatctgcagagaatctttcyctggaatacattggatgcagttgtatcttatgcattggttttatgacaaggggatctgtggtcaaaacaagataagaaatttcaccatggaaaaggaggtgggacaagagctctgttctcttcattgatttcaaatcctgtaaatattttattaaattataccactctcaggacaatcttcgtatctcacagcttttgacaatgagatagattttttagcatgtatattctttacataattcattatattttgtaggatttttaagccatgaaagaaactaagtga

SEQ ID NO: 233429 - DNA, 549 bp, Homo sapiens
tctctggaggtgattgatttaccatggaatgtggccctatctggcaataagtcatgaatgytaagaatgtggctggtgctggaaaaggtatcctcaccaattaaaagaaagaagataaggcctgtctttttttctgctcagtattaatatatctgcatttccacctagaattttggcagctatctttcaaacaggaggaagttagcaaaaggcagtcaacaacaccgatcatggacaatgtaaaatgaaagagatgtggcttcctgtgatggcactgaacaattgaattaaccagccctgtaggcactctgcctcagctccttttaagtataaaaataagtccttccactattgaaacagtttacatctagaatttctattatttcaaattaaggcatcataagttattaacagtgattttagcagcctagccataaacacattacaatgattacttctggatgatatccagatggcaaatacacatataaaaagatactccataccatatgtcattaggaaaatgcaagtttaaataaggagacccca

SEQ ID NO: 233430 - DNA, 549 bp, Homo sapiens
tctctggaggtgattgatttaccatggaatgtggccctatctggcaataagtcatgaatgctaagaatgtggctggtgctggaaaaggtatcctcaccaattaaaagaaagaagataaggcctgtctttttttctgctcagtattaatatatctgcatttccacctagaattttggcagctatctttcaaacaggaggaagttagcaaaaggcagtcaacaacaccgatcatggacaatgtaaaatgaaagagatgtggcttcctgtgatggcactgaacaattgaattaaccagccctgtaggcactctgcctcagctccttttaagtatraaaataagtccttccactattgaaacagtttacatctagaatttctattatttcaaattaaggcatcataagttattaacagtgattttagcagcctagccataaacacattacaatgattacttctggatgatatccagatggcaaatacacatataaaaagatactccataccatatgtcattaggaaaatgcaagtttaaataaggagacccca

SEQ ID NO: 233431 - DNA, 549 bp, Homo sapiens
tctctggaggtgattgatttaccatggaatgtggccctatctggcaataagtcatgaatgctaagaatgtggctggtgctggaaaaggtatcctcaccaattaaaagaaagaagataaggcctgtctttttttctgctcagtattaatatatctgcatttccacctagaattttggcagctatctttcaaacaggaggaagttagcaaaaggcagtcaacaacaccgatcatggacaatgtaaaatgaaagagatgtggcttcctgtgatggcactgaacaattgaattaaccagccctgtaggcactctgcctcagctccttttaagtataaaaataagtccttccactattgaaacagtttacatctagaatttctattatttcaaattaaggcatcataasttattaacagtgattttagcagcctagccataaacacattacaatgattacttctggatgatatccagatggcaaatacacatataaaaagatactccataccatatgtcattaggaaaatgcaagtttaaataaggagacccca

SEQ ID NO: 233432 - DNA, 512 bp, Homo sapiens
catcagaagacatggagaaaacttaacagagcaatatgtattcaatgggtaagataatgtaacatgtattcaatgggtaagatactaagcgaaaaaaaagccagtttgaaaagactgcacactgtatgattccaactgtatgatttcatactgtatgattccaacactctggaaaggcaaaactatggagagagtaaaaagatcagtggtttccagggggtagggaaaggacaggatgaacagttggaacaaaggatgtttaggatcgtaaaactagtctgtaagacactataatggtagatacatatcatgatacatttggtcaaattcatggcatctacaccagcaatactgagtcctaatgtaaactatagactctaggtgaaaatgatgtgccaatgcaggtttatcagttgtgcaaatgcgacactctggtgraggatgttgacagtgggacaggctgtgcatacatagggaaagaagcataagggaaatctctgtagcttctgccc

SEQ ID NO: 233433 - DNA, 481 bp, Homo sapiens
aaccaggtacctgccttggtactttaaggttagctgttgctaattttagacttactacattcctactctatgcattgcttacaaytttataaacagtcctttttggagttttcctcagtaaccctttgtgagtggtcatctctttcctgccagggtcctcagggaggcagcatgccagttggcttgattcatcaaattccaaaccccttggggttgggtgaatgatggtcccctaaagatgtccaaatcctaatccctgaacatgtgaatattgtaacttatactttgcaaatgtgactaaggttcttgaaatgggaagataatcttatattatctgagtgggcctgctgtaatcacaagggtcttcataagagtgtggcaggaaggtcaacgtcaaagagagagagatgtaaggacttaagcagaggtaggagaaaagagaagatgctgctgctcgctttaaagatggaggacgaggact

SEQ ID NO: 233434 - DNA, 481 bp, Homo sapiens
aaccaggtacctgccttggtactttaaggttagctgttgctaattttagacttactacattcctactctatgcattgcttacaactttataaacagtcctttttggagttttcctcagtaaccctttgtgagtggtcatctctttcctgccagggtcctcagggaggcagcatgccagttggcttgattcatcaaattccaaaccccttggggttgggtgaatgatggtcccctaaagatgyccaaatcctaatccctgaacatgtgaatattgtaacttatactttgcaaatgtgactaaggttcttgaaatgggaagataatcttatattatctgagtgggcctgctgtaatcacaagggtcttcataagagtgtggcaggaaggtcaacgtcaaagagagagagatgtaaggacttaagcagaggtaggagaaaagagaagatgctgctgctcgctttaaagatggaggacgaggact

SEQ ID NO: 233435 - DNA, 481 bp, Homo sapiens
aaccaggtacctgccttggtactttaaggttagctgttgctaattttagacttactacattcctactctatgcattgcttacaactttataaacagtcctttttggagttttcctcagtaaccctttgtgagtggtcatctctttcctgccagggtcctcagggaggcagcatgccagttggcttgattcatcaaattccaaaccccttggggttgggtgaatgatggtcccctaaagatgtccaaatcctaatccctgaacatgtgaatattgtaacttatactttgcaaatgtgactaaggttcttgaaatgggragataatcttatattatctgagtgggcctgctgtaatcacaagggtcttcataagagtgtggcaggaaggtcaacgtcaaagagagagagatgtaaggacttaagcagaggtaggagaaaagagaagatgctgctgctcgctttaaagatggaggacgaggact

SEQ ID NO: 233436 - DNA, 481 bp, Homo sapiens
aaccaggtacctgccttggtactttaaggttagctgttgctaattttagacttactacattcctactctatgcattgcttacaactttataaacagtcctttttggagttttcctcagtaaccctttgtgagtggtcatctctttcctgccagggtcctcagggaggcagcatgccagttggcttgattcatcaaattccaaaccccttggggttgggtgaatgatggtcccctaaagatgtccaaatcctaatccctgaacatgtgaatattgtaacttatactttgcaaatgtgactaaggttcttgaaatgggaagataatcttatattatctgagtgggcctgctgtaatcacaagggtcttcataagagtrtggcaggaaggtcaacgtcaaagagagagagatgtaaggacttaagcagaggtaggagaaaagagaagatgctgctgctcgctttaaagatggaggacgaggact

SEQ ID NO: 233437 - DNA, 524 bp, Homo sapiens
gacagcgtggtctctgaaactagtttccttaggttcaaattccagtatgaatgacaatatagatacgtatgtgcgtgcatatatacatatacacatatatatttaaatatgtatttagtatattttctgaataactatacgatacatgtatatgtttgatatgtttgtataaatgcatgtacatttatatataatgtatatatctgagatagttatcacatatatgtaatacatatatctattgcaatatatacaaatrtatatctctaagtgatataatatgtacatacatagatatgtacatagatatatatcactgtatatgcatatattcacatgtagatgatatttaactatcactatatatacatatattcacatatgtatccaaataatatctctctctatatatatatgtatgtgtgtgtgatttatcaattattacaatagatggcttctaataattttataattaatactaactgttaatatcaaacatttcgcacacaaaagtaagacctgca

SEQ ID NO: 233438 - DNA, 532 bp, Homo sapiens
cgcttctgataacctttgttaaaagtgacatkggagataaagcaaccaagtaactgtacatctattcccatagtctatgttgaattctttaagactacaaatagaattatagctgcaatgggaaacatcagctgataacgatttttcatgatcattcccccaaatcttaacaaccttttcactggacaaacatggtcaatggggctgctttatgaatcacagtcactacctctctcaattgtctgatggtcgcgtaaatctcaacagctctgccaagtctagggtattatggtttcataacagtgagcagggaaggcgatttgaggaccttccacttggccctttctaagacaatcctcactctgtgggttatgtctcacagcagtgattttgccagctattaattgtatctattctcctagtatattttggggctggagaaatgattgtaggatgggcatgttacaaatgttagacatgatctcaggccaaagctacactcatccttttaactccataaaccccacagtgg

SEQ ID NO: 233439 - DNA, 648 bp, Homo sapiens
tcccactacaaagctggataaggatgctggcgctccccagtaccgaggcatttcttaatgcctgttaagggatggtccttcaagtattcattgcaaggggtaagttaagagaatggctgagcaggctgcgaacaatgtatcctttctgtcattcccaaatccctggatcttcagattccttccgtgaaagcatgccaggggaacatcaggatttacactccttcattktaaagcatatttagatgcaggctttaattaatccatccagcagacgattgtcattgccaagtactcaataaatttccatttttaaggtagctcaaatacattaggaaacatgtcctaatccaagtcttatagttcactcttgttgctctaacactttctgagtgaaatccgatggatttttccaaattcttgccaaaacaaaatggtgagatcctacaactccttcagtgttcttttgccagatgaatccttttgtttctgggggaggggtggctatgtggagatctcagtctctttgtgggcctgaagataatgaggtttaatgagttttgttcctatgataatcattaagtatctcagcaatagtcattgtaaagttttgaaaaggagttttgttctcctagtggggaaagagcccga

SEQ ID NO: 233440 - DNA, 648 bp, Homo sapiens
tcccactacaaagctggataaggatgctggcgctccccagtaccgaggcatttcttaatgcctgttaagggatggtccttcaagtattcattgcaaggggtaagttaagagaatggctgagcaggctgcgaacaatgtatcctttctgtcattcccaaatccctggatcttcagattccttccgtgaaagcatgccaggggaacatcaggatttacactccttcattttaaagcatatttagatgcaggctttaattaatccatccagcagacgattgtcattgccaagtactcaataaatttccatttttaaggtagctcaaatacattaggaaacatgtcctaatccaagtcttatagttcactcttgttgctctaacactttctgagtgaaatccgatggatttttccaaattcttgccaaaacaaaatggtgagatcctacaactccttcagtgttcttttgccagatgaatccttttgtttctgggggaggggtggctatgyggagatctcagtctctttgtgggcctgaagataatgaggtttaatgagttttgttcctatgataatcattaagtatctcagcaatagtcattgtaaagttttgaaaaggagttttgttctcctagtggggaaagagcccga

SEQ ID NO: 233441 - DNA, 552 bp, Homo sapiens
tgatatcataggcatcaacaatgcgcagggtggagtgctgaaagagagctgctgtccttgctgtctacagaaaccagcactaccttcttctactgccgccatccttgacagaayggatttggtacatttatgcctccctgcacctctagcttctgtttcaaagactgaggttggcctattgatgactacagcctagaacatgttcccatatcttccctacaggggaagagggggagtgaacattttgactgacgctgccctggtggttagtaggctttgctacctcaggtgctaattcctcacaggtgaaaagggtattcgcatcaggtgacaggagcaatggcatagatctacaacatatactcctcagcagctgaaattcatttagcacagatctatacatttcgtactgggttccagtaataatgtagttgctgaggatacaaccatgaacagtacagatcaagatacttgccactgtggagtttacattcaggcaggggaggaaatactaaaacaagagaccacataaattaataaattatagagttt

SEQ ID NO: 233442 - DNA, 562 bp, Homo sapiens
gagtgtaagcacgttctggattttgtacataattggtatgccagggattcatttatggaactcattgaaaatgttttaatgtatgaagtatttaaaagatgtgaagagtatttttaatgtttgaatttattgcatatttggtcaaagttatgtttatatttagaattggagagaacatgagtgacggaaaatttgaaaaatgcacaattaacgtgtaattttaaaacatgttttaatcctgaaatcaaatttaatttttaaaaataattacctagttggaaggccagaggtaaaaatatgtttgatgttcgagaaatttkatgtctcaatctgatcataaaatgcagtgaatccatcttctccttctgaccaactgaagtaacagggactatataaaatatctgatatataacttttcaaacactggaaaataggcaatgaagcattatgatctctgagagaagggaaacaaaatgagtccaaccactgtaggagcttacagctaggaggtgcttacaagttttagtacaggaaggaaaaatgtaaagagagcccagagatc

SEQ ID NO: 233443 - DNA, 605 bp, Homo sapiens
tattattactttaaatatttcatcttctcctttccctaggtcttctctttctattattagcgttatgtttatttacatcatttgcaattgttctatagctcttggatatttatttttttcattattttttctatttgtgttttagtcttaaaagtttctattagaatatcttcaagctcaattattttctctttggccttgtgcagttcacagctgagcccatggaaggtattccttttttctttatttaccatagtctgatgtgtgcaatttttttcctaattctttcttagagtttccattcctcttctgacattacccacctgttctttcatgttttctactttttcactggatttcttaacataccaatgtttgttatttaaaagtatatatttaataattcaaaatctgatttgtatctcagtctgtttctgatgytttgtctcttcagactgtgttttgtaaattgccttataattttacttgaaagctggatatactatattgggtaatagaaggtatataagccttagttggaggttttatgttaatccagccagaagctcagctctgtctaacgtttgcttacaactgtaggtaac

SEQ ID NO: 233444 - DNA, 584 bp, Homo sapiens
acctcatttgtccttacagaaaaatggaacctcaaagtcagaaatacagaatttgctactgtgcctcttttaaagttgtgattgagatttgtctgacatctcacttattatttgccctctttaataaaacctggttatgcatgtagggccatttctttctctcatgcatctgaatcaaaacaaacagataaataaaactttacttctaagaaaattcaattctgtaacacttactggaacaaatgacctttgtatcagattggtgcaaaagtartagtggtgtttgcctaagaattgatcatcttcctaagaattgatcatcttcctatctttgctaggaaagttgatatagcatttctggctgatctttagttaatatgtaaaatcattttgcatagtttctctaaattaacatactaaattctactgcctcatgttattgtctatgcctatgctccacatcttttctctatcttcttttctctttttattcattcccattgaatgtgttgcatatatttttataaatcatctaagatcattttggaaagtagtggagtaggattaaatttaatttcatatac

SEQ ID NO: 233445 - DNA, 448 bp, Homo sapiens
atattttcacttactatttagacttgataatgacaactgcttacttttctttagtcctttttctttaaatttgtaataaatttcaaaaatgatttcaaaccatttcttctgtcataaggttggwaaatattttatatttctcccagtctaatgttagctacttactgtgtgtgtgcatgtgtgtatatatatatatatatataatattctataattaacaacacacactatatatacatatgtaatattctaattttttattaaacaaatacgtttgtttttatttcctccctttactttcttgattatgaaggttttccctatgcttaaaatgtcttgtgatactttatttagttaatcatttatttttgtatttaagtttctaaaccatctggaatttattttatctatgatgtgaaacagactcaaacttaattttcttccagat

SEQ ID NO: 233446 - DNA, 391 bp, Homo sapiens
ggcaaaaccctgtatctacaaaaaaatacaaaaattagccaagcgtgatagcacatgtctgtagtcccagatactctggaggcagaggtgggagatcccatgagctccagaagtcaaggctgctgcagtgagccatgattgcacctctgcactccagcctgggcaacaaaacctgtctcaaaaaataaatacataaaataaaatgtatgcttcttgtatatgtttttgtaatrcacttaatataaatagcaaatcaatcaatcaataagtttatattgactgtgtgtcctccctgtctatattttggtctcttttatcagttgactgactaatcagtggtccccaaactttttggcatgaggaccggtttcatagacaacaatttttccac

SEQ ID NO: 233447 - DNA, 564 bp, Homo sapiens
tactgaccattgtgattatctttaaaaagtgaaatggcagcttgaccattgaattgattgctcggcttttctttggctttttgatgattaaaaaataacaataataacgytttttaccaggaacttcctagaggcagtaagagctgtctcagtttctatattttaaaaatatctaaagtaataccttatgtgaaatccctgagtggtagcaaaaaattttaatttggttctagatatttcagccatagtcccagctctgtcagtggtttgccagggttgggggtttggtgtggcaggtttagattagccatgccagtgctctgggcctcatggttcagtctgctgatgtaaaagcttggaattctgcagacacagagctcagcttaatgttggtttcctctgctaagtcttccccaacccctccatcaaagggactgcttctttcccttcctacagtaactctttgtcgtatgtactactttgttttcttcatagctatctaaaatggtctatttattattttgttgatgtgcttattgtctgtcttctctaactagaatgtga

SEQ ID NO: 233448 - DNA, 495 bp, Homo sapiens
cagaatttcttggtgtcattcacagtatcacaatgtttaaagaaatttactagacatgtgaagaaataggaaaatatgggtcataatcatgaaaaaatgaataaaatcataattacatgttatcaagaattggcagaaaaaattgaaaaataattataaatttaacaatccacaaaaaatgagtataataaattttttaaaagagcatattatgagatacatgttaagtcaaatacacattccataagaaaggtgaatataagtgaatcaggggagagaaagaaattagcmaagcctcaataaactatgtgtcattatcaaaccataacatatttgtaattggagacccataaagagaagagagagaaaatggaataaaaattatatattaacagagatattagccaaatactttccagagttcatcaaaaaacagtaatttacatatctaagaatctcagtgaattccaaaagcgataaacagtgagaaaacta

SEQ ID NO: 233449 - DNA, 625 bp, Homo sapiens
ggatttttaagtcgcctcttaatacacatacctgtatttgttttcaaagatttttctgcatgtattatctcatttaattttctcaattgtactgtgagggaggcaagtgaggtatcattatcctttctcacaagtgggaacactgagattacaagcgttctgcccagatcatgcaacacttaagtgacaaagccaggcatctatttcaggtccttcttctccaattattttttaaacacagatgtgctgctgtcagagtaaaggtccatttctaatcctaaaagaaaaacatggcataataagagagctacgcttattgtctacctattctgtaccaggcactctgttagacattttagatacatgttctcatataatcctcacagcaaacttatgtgattggttttattgtctcctttacagattacagaacagaggattagtaaggttaagtaactccttcaaggacacagataaaaggtggagcaaggatttcaactccaattctgaaatgcatgctttttcttaagctatgctccttaattayaaaatgctaaccaaaatggattttcttccattaaaaccaatgtctgaatgagctttgctgtcattgagtttgagagag

SEQ ID NO: 233450 - DNA, 643 bp, Homo sapiens
caggcatcctgagctttcaaagctcctcaggtgattctaatggaacacaaagctttagaatcactattctttggttttctcccttatagaacacacattgtcttatcctcctttggccaagccatagctgttaatccttcttgactcaacccactgatcatctccttgaagaaatcaactctgaacatactcctctagycaagttaaagatttttcttagggattccatagtttcttgtgcttacttaggctattgtatcagaaatatctatatgtctatttttttacctctagactataagcttatactgggtaagtgaattaatagaacatgtatgtcattgtgtgcccagtgcacagcacagaacttagcacctattaagtgcccaggaaatattttgtaggctggaactactgttaatggagaatgcaaatgaggtaataaatgaataatcagtgacaatgaaaataattaaactttactgtgtatatagccagacacaaagtattacagagtcgttaccttattttacattcccaaaaattcccattagaaagagtgatctccattttagcttaagaagttcaggtttagaggtggtaagtagatgctgtgcaggcataatttgaaggctggtctgtc

SEQ ID NO: 233451 - DNA, 547 bp, Homo sapiens
gttattttgggtatagattcccaaaactcaacaaactgtaaactcaaaatatgtgcagttcacrtacatttatctcaattaattttttttttagatagggtcttgctctgttgcccaggtgggaatgtagcagcataattacagcacactgtagcctccacccctaggctcaagggatcctcctacactaccttctgagtaggtgggattataggcacatatcactgtgcccagctaatttttgtatatttttgcagagatggagcctggctatgttgcccaggttggtcttgaactcctgggctcaaatgatcctcctaccttggctccccaaagtgctgggattataggcatgcggcatgatgctgggcctcaattaaattttttagttgaggtagctaacatgtgtttattgagtgcttccaacatgccaagttattattttaaacacttacatcaatcatgttacttatttcgcagagcaatcttatggatgctctttctcatcgtacagaagaggatgctgaggcactggtaagtttggcac

SEQ ID NO: 233452 - DNA, 595 bp, Homo sapiens
ggtttgaattcttcctaaaaagcagagcctgagacacgggcctttgtggaggtagtttatttggggtcatttgctcctgtggtacatgatggatggcctgagaaataaaccagggaaggtttatttccaagccacaggcttggaggattagtgaagtgtaaattgggaaagaagaaaagcarccaatccaaggttactgagctgattacaactacagaaaaactggagcttaatcctgtttgtgatatttcaacagctgtatggaatgtgccttagaaatctctgagattggaaaaaagagaatacttacctactagttcctgcccattggtaaagcattgttccaggaaatgttaacaccctatctgttcccagtgtgtgcagacatcagaatggctgatcaagctcttacggtagatccatgtgattgtgccagataagccctgggagaaaaagcaagatatatgcagtgcagccgagatcaggtgctattaggctacacctgagtacagctggttgctatagcaaagactagagaaaaattggtagagtaagagaatatgaaaggaaaatatatgtgcaacaaagaagccat

SEQ ID NO: 233453 - DNA, 379 bp, Homo sapiens
gaattcaaaatattgacaaatatgaatttggtagatcatcgagaggttttatttarctatcttcttcctatttccttttaggcctgagagttgtgaagtaattgtgtttaagtcacagcctatgtaactctgtatgactcattttacagattcttccaactctatacatggctctgtcctaggccacatataagagaacagaaaaatattaataactatcctttatttagtgtttactgtgtgctgggagttaggataagtacttgtcatttattttttcatttaattatcacaaaaagtctttgatgtagcttatgttattactataatcattttacagtcatgaaaactgaggcttagagaagttagatgacaatct

SEQ ID NO: 233454 - DNA, 631 bp, Homo sapiens
accaatagctcagcaatagaaagtgagaggtagtggtgtgtagtggaatcagattgatcatgattttgaatccaggaatcactgcttgctgtggaacataagactctgtttctttatctacaaaatgggcacacctgtcatgcaaagttgttccaaggaatatgacttgtgtagtgtagtaggttcaactcattggtgtccccaaaatagtagacctcttcactatacagttggagaatcagtgttacaatggcttgcactactgattgtgtctccctaggcacttgtaaccaaagaggaatttaggctgcttctatatagatacatcctacaaagtattatggccatactactcatattgatcatttaaacaatagaggtgaaagatgccaaagttgtggggttcagttgttcayaagtaacggcactgttacttgtggagatggacaaaagggttgaatcctgaggacttggtgatcacttaggcaatcaattcaaggcactagagaaatgtgagttctggtgtctatgaaatagatggagaggacagaaaacatatgacgacatctgattggtttacctaagacttagtatcatttctgggattcttccatgggctgaatgaaacaaa

SEQ ID NO: 233455 - DNA, 592 bp, Homo sapiens
ctgcaggagttttttttcacaccccagtggtgcctggaatgccagcgagacagaaccgttcactcccctggaaagggggctgaagctagggagccaagtggtctagcttagcagatcccacccccacagagcccagcaagctaagatccactggcttgaaattcttgctgccagcaaagcagtctgaagtcgacctgggatgctcgagcttggtggggggaggggtgtacgccattactaaggtttgagtagatggttttccgctcacagtgcmaacaagcccctggaaagttcaaactgggcggaacccaccacagctctgcaaagccgctgtagccagactgcctctctagattcctcctctctgggcagggcatctctgaaagaaaggcagcagcccctttcaggggcttatagataaaactcccatctccctgtgacagagcacctggagaaaggggcggctgtgggtgcagcttcagcagacttaaacatccctgcctgatggctctgaagagagcagcagatctcccagcacagagtttgagctctgctaagggacacactacctcctcacgtgggtccctgatcc

SEQ ID NO: 233456 - DNA, 627 bp, Homo sapiens
tatatgtattcaacacaatgtcatataatttacatgcatttaagggctgagaagaatgttcaagaatggcatccgtggttcgtaggcaggtggtatccttattgactcagcaaaggtgctcctgccttctctgttctgcacaagaaagaagtaaatttaaaattccatccataaatcagcagcttgactttaaataagattagaaaaacatagtcaatccttatttttcgtagtttgtgtatttgagagtttgcctacttgctaaaatttatttgtaaactttatttttatttatttatttatttatttatttttttgagatggagtcttgctctctctcccaggctggagtgcggtggcatgatctcagctcactgtagcctccacctcctgggttcaagtgattctctagcttcagggttcaagtgattctctagcctcagcctccagagtagttgacactacaggcatgcaccaccatgcctgtctaatttttttgcatttttagtaaagacagggtttcaccatgttggccaggctggtcttgaaytcctgacgtcaggtgatccacctgccttggcctcccaaagtgctgaaattacaggtgtgagccactgcacccggcct

SEQ ID NO: 233457 - DNA, 545 bp, Homo sapiens
agttgacactagcctggccaacatagtgaaaccccatctctactaaaaatacaaaaaaattagcagagcatggtgctgcacacctgtaatcccagctactcagaaggctgaggcatgagaatcactggaacccaggaggcagaggttgcagtgagccaagatcacatgactgygcttcagcctgggcaacagagtgagagtctgtctcaaaacaacaacaaaaaaaaaccacaaatgtcaaatatactcgcagaactgtagaaaaacatgaacaaagaacaaaggaaagtcaagaaaacatatgaacaaaatgagaatatcaacaaagaaattataaaaaaaaatattgagctgaaaagtacaataactaatttgaaaattttattagaggagatcaacagcaaactcaaataagtagaagaaagaataagcaaatttgaaaacagctcatttgaaattattgaatttgagaagcatacagaagaaaaaataaagtgaacagaggcttagggacttatgagatgccatcacactgaccaatatat

SEQ ID NO: 233458 - DNA, 545 bp, Homo sapiens
agttgacactagcctggccaacatagtgaaaccccatctctactaaaaatacaaaaaaattagcagagcatggtgctgcacacctgtaatcccagctactcagaaggctgaggcatgagaatcactggaacccaggaggcagaggttgcagtgagccaagatcacatgactgtgcttcagcctgggcaacagagtgagagtctgtctcaaaacaacaacaamaaaaaaccacaaatgtcaaatatactcgcagaactgtagaaaaacatgaacaaagaacaaaggaaagtcaagaaaacatatgaacaaaatgagaatatcaacaaagaaattataaaaaaaaatattgagctgaaaagtacaataactaatttgaaaattttattagaggagatcaacagcaaactcaaataagtagaagaaagaataagcaaatttgaaaacagctcatttgaaattattgaatttgagaagcatacagaagaaaaaataaagtgaacagaggcttagggacttatgagatgccatcacactgaccaatatat

SEQ ID NO: 233459 - DNA, 545 bp, Homo sapiens
agttgacactagcctggccaacatagtgaaaccccatctctactaaaaatacaaaaaaattagcagagcatggtgctgcacacctgtaatcccagctactcagaaggctgaggcatgagaatcactggaacccaggaggcagaggttgcagtgagccaagatcacatgactgtgcttcagcctgggcaacagagtgagagtctgtctcaaaacaacaacaaaaaaaaaccacaaatgtcaaatatactcgcagaactgtagaaaaacatgaacaaagaacaaaggaaagtcaagaaaacataygaacaaaatgagaatatcaacaaagaaattataaaaaaaaatattgagctgaaaagtacaataactaatttgaaaattttattagaggagatcaacagcaaactcaaataagtagaagaaagaataagcaaatttgaaaacagctcatttgaaattattgaatttgagaagcatacagaagaaaaaataaagtgaacagaggcttagggacttatgagatgccatcacactgaccaatatat

SEQ ID NO: 233460 - DNA, 605 bp, Homo sapiens
aaaaaagatcataaggcatgcaaagaaccagggaaaagatggcccactgaaatgaacaaaacacatctccagaaacagttctggaagaaacacaggcatcaggcttactagactttaaaacaactgtcagccaggtgcgatggctcatgcctataatcccagcactttgggaggccaaggcagtcagatcacttgaggccaggagttgacactagcctggccaacatagtgaaaccccatctctactaaaaatacaaaaaaattagcagagcatggtgctgcacacctgtaatcccagctactcagaaggctgaggcatgagaatcactggaacccaggaggcagaggttgcagtgagccaagatcacatgactgtgcttcagcctgggcaacagagtgagagtctgtctcaaaacaacaacaaaaaaaaaccacaaatgtcaaatatactcgcagaactgtagaaaaacatgaacaaagaacaaaggaaagtcaagaaaacatatgaacaaaatgagaayatcaacaaagaaattataaaaaaaaatattgagctgaaaagtacaataactaatttgaaaattttattagaggagatcaacagc

SEQ ID NO: 233461 - DNA, 455 bp, Homo sapiens
agcagcaagacagcagtatctatttttaaatycttggtctgacggatgaaagtcagagcaatagggtcatgtcttcaggatgcatatgcaaggaaatcactatatgtttggaaatggcatcttggcaacggagcacatttttagtgatgaatttaagacctcaaaggccaatgtgctcccagtgactggactcagcctgaggccagttccctgaaggcacaaactcagaactctgaggagtcatttcttaccccttaatgctgttcacctcagctgcatgaacctccttaaactggcttccaaccatagcaaagaatcactgcacccaaatacctctgaaacaaaggcaccccactgctgcttggcagttgtacatggcaggaattaccggctgctaaatgtgtaccgacgtctatcaccgtctacactgggaggctacggagacaaaatctaaa

SEQ ID NO: 233462 - DNA, 583 bp, Homo sapiens
gtgatattcagaagcccagacaacacagaggggaagcctgatattcacaatagctacagtctaataacagctgacacctaatgagtcttgcagtgacaggcattgtattgatatgcactttccatccctatgtatttactcctcactataagcttaggaagtagctagcattacagtctccattcccaaatgaggaagctgtggtccagagaagtgaagtaacttgctcaacatcacagagctccgttaaataaagtttatgggaggccattgttttggactgaattcctgcactaggtcccagcagacctacccaaaatagagttactcatactacgattccacatcaccaaaccaaatgctaagstgtttacctgtaaagtctgatcttttcagaaatcaggagagatatgatagccaaatctcactaagccaacaagactctctgtaaggaaagtaactttgaaatggcaagtccaccttatgttccttgtttcggctttctccagccttttctgcctatgaaacctgccctctctgctcagctcagtggagctcccttccattttgtgggctgaatgct

SEQ ID NO: 233463 - DNA, 541 bp, Homo sapiens
tttcttttgttccctataaactgcctttctgctagccaccttcagccagcctgaggaatgtatagcacaccttttagatcacttttcataagccacagctttgagctgagttgcttgtggcgcctcsttctccattacacttaatgaaagcacagccaagggaactcactctgtcaagggcaaaaggaagacagtggagaagcagcccccctggggcaagaggagagtctttggagctctcagaacacctggaaggaatgtttcaggtagcccagagccctatgtcaagcagatcaaagatattttgaataatgaaaaaggaaagaagagactagacaaagcggggttaaaatctggacagagaccactgttgtcaatgaaaagacaaaaaagaaaattcagagctcagatggaacaaaaggagatttggctacaattccctagaggcagcaaatgtgtgtacctgggagggatctcattaagatccaaccaaggacagaggtcactgggagctcattggtttgtgttcatttatgccctg

SEQ ID NO: 233464 - DNA, 512 bp, Homo sapiens
tctgagtaaggttccttccagcaaagtttacaccgtttgacctgccaaaacaaagacttgacttgaactgtcccatcacattgtaattccagggtcttgggctgcccctcccattcagaagagagttctttatgtctgcaatagacccacatccctctccatctttaactagaaccatcagaacactgccacttttgttctgcttccaaaattcccaaaatgggtgattttgcccccaaaggactcacataccagtgtagccctagtgggaagcaggacggagggcgtctcccaggcataycagacagcacagggggaaaggatgccaacacatgttaggatatgacctgatgtgacctaatatgacccttgacaggttcttacttcacatgttggctttagtttcttcgtctgtaaaaacagaaggtttggtcagatagcatctcaagtctcttccactcctgaaaatctgtaattatgcctgggtcatgtggctcaagggcaactacccc

SEQ ID NO: 233465 - DNA, 323 bp, Homo sapiens
gatgcccactttcatcactgttattcgacatagtactggaagtcctagttagaccaatcagacaagagaaagaagaggygtgcaaactggaatggaagaagtcaaattatccatgtttgcaggtgatatgattttgcatttggaaaatcctaaagactacacacacaaaaaaactattagaactgataaacaaattcaacaaagttgcaggatataaaatcgacatacaaaaatcagtaccatatctatatccccactatgaacaaagtgaaaattttaaaagtaatgccatttacaatagccacaaataaaagcaaatacct

SEQ ID NO: 233466 - DNA, 545 bp, Homo sapiens
caggcatttccacacatcctctgaaatatagatggaggttcccaaaccccaattcttgacttctgtgcacttgcaggatcaacaccacatggaagctgccaaggcttgtggcttgcaccctctgaagacatggcctgagctctactttggcccctatcagccatggcygcagcagctgggatccagggcaccaagtccctaggctgcacacagcatggggaccctaggcctggcccactaaaacatttttttctccaaggcctccaggtgtgtgattggtggggctgccatgaagacctctgacatgccctggagacattttcctcattgtcttggggattaacactcagctccaagttacttataaaaatttctgcacccagcctgaatttttcctcagaaaatgggattttcttttctattgcattgtcaggttgcaaattttctgaacttatatgctgtttcccttttaaaactaaatgtctttaacagcacccaagtcacctcttgaaagctttgctgcttagaattttctccaaccagat

SEQ ID NO: 233467 - DNA, 545 bp, Homo sapiens
caggcatttccacacatcctctgaaatatagatggaggttcccaaaccccaattcttgacttctgtgcacttgcaggatcaacaccacatggaagctgccaaggcttgtggcttgcaccctctgaagacatggcctgagctctactttggcccctatcagccatggctgcagcagctgggatccagggcaccaagtccctaggctgcacacagcatggggaccctaggcctggcccactaaaacatttttttctccaaggcctccaggtgtgtrattggtggggctgccatgaagacctctgacatgccctggagacattttcctcattgtcttggggattaacactcagctccaagttacttataaaaatttctgcacccagcctgaatttttcctcagaaaatgggattttcttttctattgcattgtcaggttgcaaattttctgaacttatatgctgtttcccttttaaaactaaatgtctttaacagcacccaagtcacctcttgaaagctttgctgcttagaattttctccaaccagat

SEQ ID NO: 233468 - DNA, 423 bp, Homo sapiens
gaaaaatcctaacaactgctgagggtgggggtagagggtgctgggaaacacattaccttcaaacccccaacaataagactaaaagcttacttctcaacagaaatgcargaagcaggaaaagatatttggaatagtttttccaaaatatttggaatagtttctctaaaatattccaaaggaatatctttaaagtattttaaaagccaatatttgccaagttacaattccaaactcaacaaaaaatatcctttaaaaataaagcaaaataaacaatcacctgctggcctgtactgaaaaaaacactgaagggaattcttcagaaaaatggtatcagacagaaatgaaaaaatgcaggtaggaatgaggagcaccgaatagtgtatatgtatttaaaatacaaatgaatattgaccctacaaaaca

SEQ ID NO: 233469 - DNA, 334 bp, Homo sapiens
agaacatctgagtcaaatacataagaaatattagatggcagatataaatctgaatatatctgtattgggttaaatattgcagctaaaagattacaatcatcagattagattaaaagttaaaagaactacatactgttttgaagagtgccttgtagttatgttacaatcaaagtcaactttaaagcaagaaacaccacaagaaatgaggagkatcataatataatgaagtgctcagatcaccatgaagatatcacgtctaccaattctaaatcatatgcatccaataacatagcttcaaaatatataaagaagaaattggtgaaaccaaaaaaaa

SEQ ID NO: 233470 - DNA, 414 bp, Homo sapiens
tgtgactctacttaacactactgaactgtaaacttaaaaatggttaaatgggtatgaaaaaatagtttgacagaatgaataatacctagtatttratagcacagcaatgtgattatagtcaaaataatttaactgtacatttaaaaataaataaaagagtataattggatggtttgtaacacaaaggataaatgcttgatgtgatggatactccattttccatgatgtgattattacgcgttgcatgcctgtatcaaaacatctcatgtaccccagaaatatatatacctactatataaccacaaatattaaaaaattttaaattgttaagatgataaatttaatgttatgtgttttatcataataaatacatacaataatcataagcagcctgaaaaaatcaacctacagatt

SEQ ID NO: 233471 - DNA, 414 bp, Homo sapiens
tgtgactctacttaacactactgaactgtaaacttaaaaatggttaaatgggtatgaaaaaatagtttgacagaatgaataatacctagtatttgatagcacagcartgtgattatagtcaaaataatttaactgtacatttaaaaataaataaaagagtataattggatggtttgtaacacaaaggataaatgcttgatgtgatggatactccattttccatgatgtgattattacgcgttgcatgcctgtatcaaaacatctcatgtaccccagaaatatatatacctactatataaccacaaatattaaaaaattttaaattgttaagatgataaatttaatgttatgtgttttatcataataaatacatacaataatcataagcagcctgaaaaaatcaacctacagatt

SEQ ID NO: 233472 - DNA, 440 bp, Homo sapiens
gtgtgactctacttaacactactgaactgtaaacttaaaaatggttaaatgggtatgaaaaaatagtttgacagaatgaataatacctagtatttgatagcacagcaatgtgattatagtcaaaataatttaactgtacatttaaaaataaataaaagagtataattggatggtttgtaacacaaaggataaatgcttgatgtgatggatactccattttccatgatgtgattattacgcgttgcatgcctgtatcaaaacatctcatgkaccccagaaatatatatacctactatataaccacaaatattaaaaaattttaaattgttaagatgataaatttaatgttatgtgttttatcataataaatacatacaataatcataagcagcctgaaaaaatcaacctacagatttaatgaagttattggcagccaacaa

SEQ ID NO: 233473 - DNA, 429 bp, Homo sapiens
ctttcttacattattaactgaagaaaaataggtgccttttacaactttaagattaggaaacaaaaagaagacagaaagacccaaataaggactgtagggtggacgcctaatgacttcctattaaaactctcataaaattgcccttgtttgatgaaaggaatgagcaggagcattgtcatgttggagaaggactctctggtaaagctttcctgggcatttttctgctaaagctttggctaactttctcaaaacactctcataataagtagatgttatcattttttgccctccagaaaataaacaagcaaaattccttgagcatccaaaaacacttttgccatggcctttgctctgactggtctgcttttacttyggctggagcacttcctcctcctggtagccattgctttgattgtgccttgtcctcag

SEQ ID NO: 233474 - DNA, 386 bp, Homo sapiens
atcgtttttcacttcttaaaggctagacagagcggacttcaagcctactctcttgatctgttattttgctcttagtgatctgtttaggtttttctctgtgggtaattgtgcgatgttttaaagatgcctgaaggcgtcttgaccgtgacttgatagggtctgacttcagagggtctcatagtctccctgagttctttaaaggctctagtaactggtasagtcttaaaaatatgcagccatttctccaaagcttgcctattggtttgggagcattttaaatggcagatgcttttgatccacctttcttctgtctctgagatgactcccacccactgcacgtggtctatgcacaggttatcaaaccggaattgacctccccacagaga

SEQ ID NO: 233475 - DNA, 483 bp, Homo sapiens
tggtgttagctctgagcttttttcatggatttcctttatcagattgaggaagctccattccgctcttagtttgtgaagtgctttcatcatggaaaggtgctgggttttgtcaaatgcttttctgcatgtattgagatgctcacatggtttttgtttttcattctattgayatgatatattgtattagttgattttcagatgttaaactttgtattcctggtatgaattctactttgtcatggtgtataaatctttttttctgttgctgtatttgacttgttagcattttatgcagggcttttgtatccttattcataagagatattggtctgtagttttcttgtctagttttgatatcagggtaatactggcctcatagaataagatggggagtgttccctcccattttattatttttggaaaagtttgtgaagattcgttattaattcttctttaaatatttgatggaattcatcagtaaag

SEQ ID NO: 233476 - DNA, 406 bp, Homo sapiens
acaccaggtttaaaacccaaaagtaacatgaatggccttctgtgaatttgaggcaaaaggtggtgttgttaagaatgacctgaacttccaggcakatctgggtatgtagaaattgattaatgcactggagtctaattccacctacattttgggaaaacgttctactttgcatctgcatgggtagcttatctctgtgacttcaaggattttctgtgaagattaaatctgttttgtaggggagacattagcaaagatacctataagatgtaattttcaaagtaagaactattaggagtggggattttgggttttaactgcaaatgtaatcagcaagcctagtgacggctgcttctctgacaggcgctcagatttacttgaatgccttagctcccacaagggaagaaat

SEQ ID NO: 233477 - DNA, 479 bp, Homo sapiens
catctcattcagaataatgccaaggtctttccaatgacctgcaaggtccccaaaaatcttgcttcttggtatctctctattcttatctcacatcactctcctcctcacagattgtccttgctagcctttaaacacaccaagcacacctttgcatgtattgttccctcttcctggaatgtttatagaatgttcttccacacagtattcagagattactttctaaatttctttaagtctctgtttaaatatcatgctaccagaggcttgtcttgaaaagcacaaaactaactgcacctggcattcccttaatctgttcctgtttttatagcagtgatcaccacctgatatattttatgtacatttttaatgcccttaaagcctttttcttgtccctagaattaagctcattgagascaagagtgtgtttgtaccttactatatcctcagtacttaaaactatgcctagcaccatcataggc

SEQ ID NO: 233478 - DNA, 551 bp, Homo sapiens
gtgtttgtaccttactatatcctcagtacttaaaactatgcctagcaccatcayaggcacctgggaaacacatttaatgaataaacaaatgaatgaaaggttgtgcgttgtgtatttttttccttttaaatgctcattatggaattgtaaaaacatatacaaattacataaaattgtttaatgcattttcacttcaacagttattaatatatgaacaatcttgttttattcttcctaccctatttctctctactcatgtcttactagatagttttaaagcaaactcccgatgtcatttcatctgtaaatcatatgtatatttttaattgttctccaaaaatttatgcaatttatattcactatgagcagtgtttaagatgtccatttccttacctccttcttatactagtaggtgtgatcatataaaaataatatttgtcaagtttattggtaaaattcatctcattttatttttgaattaaaaagaacagtgagaaaaaagaaagttcttgaagtgtgagataatatcctcttcttttacctctatggcc

SEQ ID NO: 233479 - DNA, 551 bp, Homo sapiens
gtgtttgtaccttactatatcctcagtacttaaaactatgcctagcaccatcataggcacctgggaaacacatttaatgaataaacaaatgaatgaaaggttgtgcrttgtgtatttttttccttttaaatgctcattatggaattgtaaaaacatatacaaattacataaaattgtttaatgcattttcacttcaacagttattaatatatgaacaatcttgttttattcttcctaccctatttctctctactcatgtcttactagatagttttaaagcaaactcccgatgtcatttcatctgtaaatcatatgtatatttttaattgttctccaaaaatttatgcaatttatattcactatgagcagtgtttaagatgtccatttccttacctccttcttatactagtaggtgtgatcatataaaaataatatttgtcaagtttattggtaaaattcatctcattttatttttgaattaaaaagaacagtgagaaaaaagaaagttcttgaagtgtgagataatatcctcttcttttacctctatggcc

SEQ ID NO: 233480 - DNA, 551 bp, Homo sapiens
gtgtttgtaccttactatatcctcagtacttaaaactatgcctagcaccatcataggcacctgggaaacacatttaatgaataaacaaatgaatgaaaggttgtgcgttgtgtatttttttccttttaaatgctcattatggaattgtaaaaacatatacaaattacataaaattgtttaatgcattttcacttcaacagttattaatatatgaacaatcttgttttattcttcctaccctatttctctctactcatgtcttactagatagttttaaagcaaacycccgatgtcatttcatctgtaaatcatatgtatatttttaattgttctccaaaaatttatgcaatttatattcactatgagcagtgtttaagatgtccatttccttacctccttcttatactagtaggtgtgatcatataaaaataatatttgtcaagtttattggtaaaattcatctcattttatttttgaattaaaaagaacagtgagaaaaaagaaagttcttgaagtgtgagataatatcctcttcttttacctctatggcc

SEQ ID NO: 233481 - DNA, 551 bp, Homo sapiens
gtgtttgtaccttactatatcctcagtacttaaaactatgcctagcaccatcataggcacctgggaaacacatttaatgaataaacaaatgaatgaaaggttgtgcgttgtgtatttttttccttttaaatgctcattatggaattgtaaaaacatatacaaattacataaaattgtttaatgcattttcacttcaacagttattaatatatgaacaatcttgttttattcttcctaccctatttctctctactcatgtcttactagatagttttaaagcaaactcccratgtcatttcatctgtaaatcatatgtatatttttaattgttctccaaaaatttatgcaatttatattcactatgagcagtgtttaagatgtccatttccttacctccttcttatactagtaggtgtgatcatataaaaataatatttgtcaagtttattggtaaaattcatctcattttatttttgaattaaaaagaacagtgagaaaaaagaaagttcttgaagtgtgagataatatcctcttcttttacctctatggcc

SEQ ID NO: 233482 - DNA, 519 bp, Homo sapiens
gccaagaatctgatggttgagttttcagttagtttgggagtaaggtagatccttgttgtaacttgctgagactcatccaactagatttctgggagggaaattgattccttttcctcgctgaggggtataacaacaggccaacaatgtctacgctccatgtagatagacactcactagaccatggattgacctccttatcaatcaatgtacaaattagttggaggtgaaaaatggaagcagaggtctgcaaggaataaggtcttcgtagsctggtcctttctgcagattcctgggagggcttctgatgtttccaagctgctgcttatctgaggctcttgacttccacagtcctgaagggcagacccaagaagagggggctttccctaagtgttccacagaccctcagaaacttctagccgaagctcacattcaaagtccttagactagtcttcagaggtacctgtgcagagtctcttaggaacataaatctgaatagcatcataattgatggtctcctag

SEQ ID NO: 233483 - DNA, 599 bp, Homo sapiens
tctccatacataagggttgaccctggctgtcatgtttatactatatacacgcattactttgacaaagctggttgaacctgggtagtacctgaaacaagctaggtcaatcgatggttctatcttgagaacttgaaactgggattcaggtatgcaaactctgacaccattggagagtcatatattataactttattgtataatatggttgtcactagacacatgtggcattttgaagttaagtttaaattaattaaaattttgaaccttagttaccccagccatatttcaagtgctcaatagacatatgtggctagtgacctaccatattgaacagagcaaatgtggaatagagytaatttttccctcactgtagaaattttttggatagcaccaacctgtcacatgctgggagtagagaaagcctgtaagcaggtacagggaaagaaagtagatgtgcagacagaagtaaaaacaaaagacaaagaaatggtgggatgttggctgcctctactatctaggcccttgttctagcatttaggaagactcaattttttcttgcctttaaactccatgatacgtgtgtatatgtccattcaata

SEQ ID NO: 233484 - DNA, 599 bp, Homo sapiens
aagaagtataaggttcttccatcaaaaaagtactaatttatgtctctcatcaatttagatgcaaacatacttaaccaaatattagcaaatgaagccaaccaattataaaaagaattttactttgtgaccaagtgaggtttattccaggtatgcaagactggctcaatatttggaaataaatcagtttaacccgtcaaatcagcgagctaaacaagaaaaatcatatgatcataaaaattgatgcagaaaaagcattggcaaaatccaatgctcagtcaagagaaaaacttcttacaagtcaagaatagagagtagattactccaacttgaaaaatagcctttacagaaacaaacaaacaaacttacaactaatattattcttaaggatgaaagatcgaatgctttccctcttagacttgaaacaaggcaaatatgtctgttctcaccactcttattcaaaatagggctggaactagccaagaaaaagaaaaggcataaggattggaaagaaaaaagtgaaactttttatttataattttatttataggaagtgccragaaatttataaatattcctagaaataagtgaattcagtaagg

SEQ ID NO: 233485 - DNA, 508 bp, Homo sapiens
tacaataatagtgaaggacttccccaccccaatgacagtaataggccattaaggcagaaagtcagcaaagaaattctggacataaactgtactatagaccaaatrgttctaatagacatttatagaatattgtacgtaacaactgtagaatatatatcttttttatctgcacatggaacattctgtaaaattgaccacatgcttggctataaagaaaatctcaataaattcaaaaaaatcaaaatcatattgattatcttctcaggccgtagtggaataaaattaaaaattaataccaagagaagctctaaaaactacacatgtacatggaaactaaacaaattgttcctgaatgacttttgagtaaacaacaaaatcaagtcagaaattaaaaaaaattagaaatgaatgaaactagagacacacttaccaaaatgtctgagatacagcaaaagcagtgcaaagaggaaaggccacagtattaaatgactacatcaaaaagacagaa

SEQ ID NO: 233486 - DNA, 503 bp, Homo sapiens
tacaataatagtgaaggacttccccaccccaatgacagtaataggccattaaggcagaaagtcagcaaagaaattctggacataaactgtactatagaccaaatggttctaatagacatttatagaatattgtacgtaacaactgtagaatatatatcttttttatctgcacatggaacattctgtaaaattgaccacatgcttggctataaagaaaatctcaataaattcaaaaaaatcaaaatcatattgattatcttctcaggccgtagtggaataaaattaaaaattaataccaagagaagctctaaaaactacacawgtacatggaaactaaacaaattgttcctgaatgacttttgagtaaacaacaaaatcaagtcagaaattaaaaaaaattagaaatgaatgaaactagagacacacttaccaaaatgtctgagatacagcaaaagcagtgcaaagaggaaaggccacagtattaaatgactacatcaaaaaga

SEQ ID NO: 233487 - DNA, 531 bp, Homo sapiens
acttgcttctgacaacttctttccctcaggtaaaccaaggaggccttcatgcttcatgtgtcagtcccaacccaacttctcactgctgctcttctgacaaatgaacatgattccgctgttacctgcctctatctgtatttatgttttataagttatttacacattttagctaaagacatttagaacatttgagtttgcactgattatgtttttgacaattgcatttactagtaaaccttcagttcttcctcttgctaacatagttggaaggagggttcttttattattgaaataaccaaagtccttcactccattgcttgcaactccaaaattttacttaacaaaaaactatgtcattaagaattgtcatagtttcaaaacgttaccattatgcctaacaaacttatttcagtgactgctccactcatttgttatatcttacttaactccatgtcaaagaccaggctctccactaaagatagaaacccaaraggtgcagaagctagtgagtcagcaatacagtctccctcc

SEQ ID NO: 233488 - DNA, 371 bp, Homo sapiens
ttttcttctggacatctttggtttttattggtgaagatttgaggttagggagaagcaaggattgctagaaaagataacaatattagaaaataaaactgtgcagcctatcagttaggttcttagttgcaagcaatgaggtgtttattgagtatattggctagattagagagtcattggaaggactggagaatagggctcaaggcaaagttcccaagcaccagattcaaaatcaagctgcagaaccattcatgagtaaactggtctgtatctgagcaccagaagtgactgtttgcaatgcagctacctctgcatcaggaatttcagcctgtagtcttcgcttytgtacacactgccagggagagaaaatgtaa

SEQ ID NO: 233489 - DNA, 608 bp, Homo sapiens
tagcataaaacataggagtaattcttcaagacattggtctgagcaaagaattttttgtgtaagacctaagaagtacaggcaaccaagcaaaaacagaccaatgagattatatcaagccaaaatgtctctagacagcaaaggaaaaaatcaacaatatgctgagacaacccatagaatgggaaagaatgtttggaatgtttgcaaactatccatctgacaagggattaataactagaatatataaagagctcaaagaactcaatagcaaacatacaaatgattccattgaaaaatgggcaaaagatctgagtagacatttctcagaagaaatcatacaaatgaccacctggtaaatgaaaaaatgctcagcatcactaattatcaaasaaatgcaaatcaaaaccacaatgagatatcatctcactgcagtcaaatggcttttatcaaaaaagacaaggaataatgggtcatgacaaggatgtggagaaaggagaatctccatacatcgtgagtgggaatattaattagcacagtcatacaaaaatacctatagaggtttcttaaaaaagtaaaaatggaactaccatatgatccagcaattcaactgc

SEQ ID NO: 233490 - DNA, 547 bp, Homo sapiens
accccaccagcacaaaaattgtcatccactaaagctcagaggattattagtgtttcttagcaataaagcatttttcatgaagggatgtatatacttctatacataatgctattgcacacttaatagactacagtacagtgtaaacctaacttttatatgtttcaaaaaaccaaaacatttgtgtgactcactttactgctatattttctttattgtggtggtctgggaccaacccatgatatctcaaaactgtgcctgtatcttattttgagctgatgttaattaccatacaaagaatatccatttgaaggaatgtggaggagtcattttacctatttcttttcttggaagttcatattgtttccattctttatgtcagaggtaatattattcacaggcagatattagtaaaagaaacccttcaatttctgagattaacttacrtattatatgtatatttgtaataaaattacatttgtggaactcacaacactgaattcaaagttaataaacctataatgcttcctttcattacaaacagctgtag

SEQ ID NO: 233491 - DNA, 596 bp, Homo sapiens
ttgtgtgtactaacacaactgtatacatttataattagagagtttatcttagcaattaaggtaataatagcatgctattaaacagtacttataatcgccagagactgttttaagccctttacataaaataattcatttgatcctgagaacaattctgtgaggtaggtattaacattgtggtttaagagtccaacctttaacaactgaacaacaggtcttctcttgacataatacaattattttgcttattgctaaagaatgtccagattgaaataaacagcagcatcttatttatatcttagcattttaagtagccttccatttagcaccatttttaaagttacagacatggagatggagcagkcagagctttaggaaggaaagggagtcagagacaactagaggcttttgaacccctctttgccctgggtgtcttcagttggctcctatatcttcagcaatattcagtaaatgaaaaattaatgattgaaattctgaaatgaacagtctctctggtcccagcagtctctagattgggaattctgttatccaaatattttgctttaactctcaccttgcaaaaataccaaatctga

SEQ ID NO: 233492 - DNA, 386 bp, Homo sapiens
ctgtccttttaggactggatgtaggtttctgcctctctttttggccctggcattgctggccccaaycacattcctgattgcccgggaagaacagcctttgaaattcaacatctgcttctgggtagttggtgagtgtcctctctgggcccagacagcaggatctgctcctctctacttgggaaacttttaaatacatttctgtttgcaggttgaacaagcccacctgaccaagagagggaagcacgctaactgttttcagtttggacactcttgggggctttttagtaattgcatgtgtttctgagcaagtgagtgtcttttgtgggtaccagacaacaggattgctcctctcaactagggacagtctgaagaattttggtgtgcaa

SEQ ID NO: 233493 - DNA, 460 bp, Homo sapiens
aagcttatttgcagaaataatgactggaaacttcaaatctaagaaagaaataggagatacatatatgagagatatatatgatatatatatatgagagagatatatatamtatatatgagagagatatatatgatatatatatgagagatatatatatatgagatatctatctatctatctacctatctatctatctatctgtctatcatctatctatatgtgatatatatctagcagtgggattgctgtatcatatggtaggtctcttttcagtttttttgaggaactggaaactggtctccacagtgattttactagtttacattcctaccagcaatttatgaagtttaccttttttccacatcatttctagcatttgttatgctctgtcttttgagaaaaaataaatcattttaactggagttagattatatcttattgaagctttaatttgtatttc

SEQ ID NO: 233494 - DNA, 539 bp, Homo sapiens
gagtttattctttctgacatgaggcctgccttaagacaagtgtcaattcaaggctcatcttcctgacaaagctttaccagacctcattttacagcactccacattgcaggtaatactgcaacactgatcactgttcattccactagatttaatatttaatcctcagtctccagatttcaaaagtcacctttgtatcctgagtttccagctctatatctggcacatgggaggttaaatgtgcctcagtttagttaggataggtttgrctgtgagaaagacctaaaaattgtggcataaacaatacagacattttttttcctgacatgaaacatttgaagaacggtaatgggggttgctgttacggttgcttagttctatgtcctctcaaccccttgtaacttctctgttgcatgtggctcccattcacaaagttattctaggattcaggaaaagagaaaaaggctctttaaatttcatttaaaggaaaatatcacaagtcctcacagagcgttttcattaaaactccatttgtcagaatt

SEQ ID NO: 233495 - DNA, 391 bp, Homo sapiens
ttcagagcctaatcaccttctaaaggccccacctcctaatacactcgtgttggggstgaggacttcaacatgggaatttgggggagcgcacacactcagatcacagtaggccccaacgataagagagtgttcacctgagtttaaatagggtttgttattaaaattaaaaacccaaaagtcctataaaccagaggctgaactactaaacaaacacaaataaggtcttatgcctctcccatgcatttcataccaatagagacatctgcctatgactctttcaagaaatcccttatttagtgagatatgaactgggctcctgcgattttacagagcttaacatgatcaaaattagccccatggactaaaattgcatttgcactttaaggaattc

SEQ ID NO: 233496 - DNA, 566 bp, Homo sapiens
actatactgaaatattacaagctaccatttcctgctgtgcattgattttgaaaaatcattttactgtgctaaaaatatacctaatatgtatgttctaaaaaggtctttttctacagaaacattggcaaaatcatcttcattgttcatagattgttgcagcagatccaactgaaggatacaccaaccattttaatcggacacaaaagaacakgctgtcctcacctgaccaccacccacaacaaccgaactttaatcagacacaaaagaacaggctgtcacctgaccaccacccacaacaaccgaagggcagggtgagtccatttagagtctcgagaatttcagacgtgcattcactttaaaggtgagattatattaatagcaaagtttaaaagtcacattatacacaaaattaatgaaatcattaaataccataaatctattttgaaaaatattgccttatgaagtaattcttatagttttaatgaaaaattatatagcactgtattattcataaagaacagtaaatattatttttccagcagaaatacaacttaaaaatggaattc

SEQ ID NO: 233497 - DNA, 514 bp, Homo sapiens
gggtgtaaaatagattgatggaaaaaaagcagcagccagaaaaaaaaggaataataaaaaataaattttaagggagtatcattaaaactaaaacttamtactgaacaaaaattttggaatccagaagaaaatgaaaaggcatctcaatgtcctgaaagaaagtaattaccaaaccagaatcaataacacctttcaagagtgaaaatgaaataatgattttatgatgaagaaaaactcagaattttttttaccagaaaacctacactaagagaaatactaaaagtagttcttcaagcagaaagaaaatgagctaagagttaagataaaattataggaaagaacaaagatcaacagtgagggttattatgtaactacataaaattgaccactggctaaatattgacctgcaaaattaatattattagtggccctatggtgtttcagtgcagggcaaaaaaaaatgcaaaaggtacagggtggtaagttgagataaagaatcaccatcttcggaaat

SEQ ID NO: 233498 - DNA, 514 bp, Homo sapiens
gggtgtaaaatagattgatggaaaaaaagcagcagccagaaaaaaaaggaataataaaaaataaattttaagggagtatcattaaaactaaaacttaatactgaacaaaaattttggaatccagaagaaaatgaaaaggcatctcaatgtsctgaaagaaagtaattaccaaaccagaatcaataacacctttcaagagtgaaaatgaaataatgattttatgatgaagaaaaactcagaattttttttaccagaaaacctacactaagagaaatactaaaagtagttcttcaagcagaaagaaaatgagctaagagttaagataaaattataggaaagaacaaagatcaacagtgagggttattatgtaactacataaaattgaccactggctaaatattgacctgcaaaattaatattattagtggccctatggtgtttcagtgcagggcaaaaaaaaatgcaaaaggtacagggtggtaagttgagataaagaatcaccatcttcggaaat

SEQ ID NO: 233499 - DNA, 633 bp, Homo sapiens
aatgcctgcctgcttcttccatatataagaagccatgaatgctgaggtctcatggaatccctcacagccctgccattgcggccagcatcttttcaaatagaatgaattgtcaaacagaacgcattgacatgttccacagagataaagattttcacttagtcatcatgctgccacaagttcctttgagttttcctgtgtttattgttttgttattttgttttctgttttgcattgttttttacaacaccaaaaaagcaggctgttcccttcctccatctcatcaaatacaggtgctgttactgaaattttctgcagcrtgtttgtcaaattcagtattgaatgaaaatgattaagaacaagaagaataaaacataaaatctcacgtaggatgaaaacccatgggaaagagttttgcagcaatagggttgtagcaaagttttattttttaattcaatgcatattgtcataaagatttgcatatgagcaacaggacgaccttagctacagaagacgtgaggctttggtgctgtggctgggagtggtgagcttcccccttgggctcctcacattcagaatgtgggtgctggggttgagtatgggtagaaattctcccctatatttacagccatcatt

SEQ ID NO: 233500 - DNA, 552 bp, Homo sapiens
aaggagtgcttgaaagtctgactctcatagaaaagcactgttataataacaaggaaaaaatatcatcttctttagcactatagactatgcagaaggcaaaagacagggtgttggtcactagggcagtgaatgagaaaaaaatcatttaggtcaaagagcracaaagcaccatgataattgcccactgcaatttggaaggaagatgccatatttcgggtttagtgagagaggaagcaaaaagagttttaaattttcaggctgaggcactattcacaatagctgagatgtggatgtcacccaagtggccatcaacagatgaatggataaagaaaatggggtacctatacacaatggagtactattactatggtaccatagtaaaagtacagtatcgtactctagtatttactgtaaaaaagaatgagatccagtcatttgcaacaacatggaaacaactagagatcattatgttaagtgaaataagccaggcgcagaaagagacacagcacatgttctcacttatttgtggaatctagaaatcaaaaccgttga

SEQ ID NO: 233501 - DNA, 552 bp, Homo sapiens
aaggagtgcttgaaagtctgactctcatagaaaagcactgttataataacaaggaaaaaatatcatcttctttagcactatagactatgcagaaggcaaaagacagggtgttggtcactagggcagtgaatgagaaaaaaatcatttaggtcaaagagcgacaaagcaccatgataattgcccactgcaatttggaaggaagatgccatatttcgggtttagtgagagaggaagcaaaaagagttttaaattttcaggctgaggcactattcacaatagctgagatgtggatgtcacccaagtggccatcaacagatgaatggataaagaaaatggggtacctatacacaatggagtactattactatggtaccatagtaawagtacagtatcgtactctagtatttactgtaaaaaagaatgagatccagtcatttgcaacaacatggaaacaactagagatcattatgttaagtgaaataagccaggcgcagaaagagacacagcacatgttctcacttatttgtggaatctagaaatcaaaaccgttga

SEQ ID NO: 233502 - DNA, 570 bp, Homo sapiens
ctcataatcccaacaatttgggaggccaaggcgggcagatcacttgaggtcaggagttcaatatcagcctggccaacatggtgaaaccccatctctactaaaaatacaaaaattagcctgatgtggtggtgcatgcttgtaatctcagctacttgggaggctgaggcaggagaattgtttgaacccaggaggtggaggttgcagtgagctgagatcayaccactgcactccagcccaggcaacagagtgagagtcttccttaaaaaaagagaaaggaaagaattaaagaaaaaccccaaaaacaaaaaccaaagaagtggtaaataacacacagattaaacaggaagtctcaaaagaaactaaaaatatttggactaaatgaaaatgaagataaaacctatcaaaatttgtaagatgcagcaaaagtaatgcttagagagaaatgtatagtattaaatgcatgtattggaaaaaatatctaaaattagtctaaacttccatttaaaaaaacataaaaagtagagcaatttaaatacacaaaaagaagaaaataataaaaatgaaattaaa

SEQ ID NO: 233503 - DNA, 570 bp, Homo sapiens
ctcataatcccaacaatttgggaggccaaggcgggcagatcacttgaggtcaggagttcaatatcagcctggccaacatggtgaaaccccatctctactaaaaatacaaaaattagcctgatgtggtggtgcatgcttgtaatctcagctacttgggaggctgaggcaggagaattgtttgaacccaggaggtggaggttgcagtgagctgagatcacaccactgcactccagcccrggcaacagagtgagagtcttccttaaaaaaagagaaaggaaagaattaaagaaaaaccccaaaaacaaaaaccaaagaagtggtaaataacacacagattaaacaggaagtctcaaaagaaactaaaaatatttggactaaatgaaaatgaagataaaacctatcaaaatttgtaagatgcagcaaaagtaatgcttagagagaaatgtatagtattaaatgcatgtattggaaaaaatatctaaaattagtctaaacttccatttaaaaaaacataaaaagtagagcaatttaaatacacaaaaagaagaaaataataaaaatgaaattaaa

SEQ ID NO: 233504 - DNA, 494 bp, Homo sapiens
tccaaacactgcctgtaagactcccacaggaatttaacccatggagttaaaagtaatctgtcagtacgatcctgagtgtcttcaccacttacagcacttaggagaacactacaaagaaaaaaatgttgaaaacaattttagacagtttcctactttgccatgtgattaaaaaccaaaacaatgttcatcagaaaacagtgcaaattcttcccacaatwtgtacacactgcaaaggtgtcactatctactccctgaattcccaatctgcattatgttcatttaaattggtatttgcccctctatcttaaggctgtcattttccacttctatgaatttttattacctacataaattaactggttactatgcatttaaaacttcaaagatttgcatttttttctgataaacatctacttcaaaaggaaatgaagacccatgtaaaagaaaacaccaagttaactatcaaagcatttattagaggtctaacccacata

SEQ ID NO: 233505 - DNA, 494 bp, Homo sapiens
tccaaacactgcctgtaagactcccacaggaatttaacccatggagttaaaagtaatctgtcagtacgatcctgagtgtcttcaccacttacagcacttaggagaacactacaaagaaaaaaatgttgaaaacaattttagacagtttcctactttgccatgtgattaaaaaccaaaacaatgttcatcagaaaacagtgcaaattcttcccacaatatgtacacactgcaaaggtgtcactatctactccctgaattcccaatctgcattatgttcatttaaattggtatttgcccctctatcttaaggctgtcattttccacttctatgaatttttattacctayataaattaactggttactatgcatttaaaacttcaaagatttgcatttttttctgataaacatctacttcaaaaggaaatgaagacccatgtaaaagaaaacaccaagttaactatcaaagcatttattagaggtctaacccacata

SEQ ID NO: 233506 - DNA, 494 bp, Homo sapiens
tccaaacactgcctgtaagactcccacaggaatttaacccatggagttaaaagtaatctgtcagtacgatcctgagtgtcttcaccacttacagcacttaggagaacactacaaagaaaaaaatgttgaaaacaattttagacagtttcctactttgccatgtgattaaaaaccaaaacaatgttcatcagaaaacagtgcaaattcttcccacaatatgtacacactgcaaaggtgtcactatctactccctgaattcccaatctgcattatgttcatttaaattggtatttgcccctctatcttaaggctgtcattttccacttctatgaatttttattacctacataaattaactggttactatgcatttaaaacttcaaagatttgcatttttttctgataaacatctacytcaaaaggaaatgaagacccatgtaaaagaaaacaccaagttaactatcaaagcatttattagaggtctaacccacata

SEQ ID NO: 233507 - DNA, 553 bp, Homo sapiens
tgtttaatatgaagaaactgtattaaatatttttaaatcctttccggctttagcattatgattctgtataaacttttcaatgtattgctttataattccacattatttttattattctaacaattagagatatctgttcagattaaatttataacacattacagaagcttcatgatatgtgatacatatattctttttccagagagaattataattacattatattagaaaacctaataamtgtttttctaaacttaaaaggaaaaatgattttgttcttttggttgtaaattcacatatcttcagatgttactggcctacaaaaatgaatgaggtggtattagcatttttgccacatcatattttactggttctgtaatccacctgtataaattgctgcaactccaaacttcacacccacacatctactaaatcatttttaagcgtccccaggttgtactgtgtatgcttataaataaattcacttatattcttcagctccagaatctttactgataacttctcccagcaaatatactaaatggcagcaact

SEQ ID NO: 233508 - DNA, 554 bp, Homo sapiens
agaatgggggttatggagattcatctatctaccagtgaacatgtggtagacacatgaatgtaataaatcttatgattgtgcaataaattcatgcctcagaaaaattatttaaggacagcaatttactgagcactagtcacgtagcaagcatttattaagaacctattgcastcttcatccacaaataaggcgaaggtagtatttgtagcacatattacttggaggtcgatcttcttttgttcatacatagggctcttgttctgaggaataaaaaagatccatttgggtgtcctcctgcatttagtttacgtggagaaactttgagatgttaaattatttaaggtaatattggtagaaaagtgaaaggagagaactcaatagtttcactcctatcctaccttgagccagactccatttcagaattttgtatgaatatctactgatttaagcaattacatgatgtacatgaatctggaaaagatggttctctaaaattaagactggtcaagttaaagttatttaagcagacatgtctgatttgtgtgtattataag

SEQ ID NO: 233509 - DNA, 532 bp, Homo sapiens
attttagaagaaataatgatggaaaacttgctttttattttttaaaaataacatatacatttaagaatctcaaagaactccaagtagaataaactcaaagagatccacaattaaacacatcataaccaaactatcaagagccaaaaacagagagatagtcttgaaaggagcaatagagaagtgattaatcatgtacagaagatctgtaataagattaatagctaatttytcatcagaaaggatggaaaccagtaagtagtgagaggataggaaaaagtgctgataggaaaaaaaaaaaaaaaaaaaaaaagtcaaccaagaattctatatccagcaaaagtattcttgaaaaataaggagaaatttttaagttcccacataaacaaaaactgagggtattcaacactataagtagatgtgtcctacaaaaacataccagaagagtcctccaagttaaaatgaaaggtcaaaaatatgaatttgaaactacatcaataaataaagaacaatgtcaaaaatatataagaaaata

SEQ ID NO: 233510 - DNA, 568 bp, Homo sapiens
ttccttgtgtgttttgattttcaattaagtgctgcaattacttgaattttttttctgttaaatattgataacttacatgaaagttttttctccagtaatgatttacaattattcctggtaggcgcctaaggtackttcaattcatgaccactttcaataaaattattaactctaagttcttttctaacaatactggtggcaaactgagggaactcatacctatggctacaaatttccaggacagatcacctcaagctcagctttaaagtcttacttggggaatttttctaaaaccttaaatgtggatagttgggggtctaggattatatctaattcccctttacactgagggtgtaaaattgtgggttcccagaaatatctctgcagcttcctacttgtctgtctaccttggatgtcaatgggcttttctccaggcatcagtttccttaaagcctatgaaaaccatagctgatttgttttgttgattagtaaagtccctctcaatatgtaaataagctttcatgctctaaaagtattttccgaaatatgacttctacttcttttcagc

SEQ ID NO: 233511 - DNA, 568 bp, Homo sapiens
ttccttgtgtgttttgattttcaattaagtgctgcaattacttgaattttttttctgttaaatattgataacttacatgaaagttttttctccagtaatgatttacaattattcctggtaggcgcctaaggtacgttcaattcatgaccactttcaataaaattattaactctaagttcttttctaacaatactggtggcaaactgagggaactcatacctatggctacaaatttccaggacagatcacctcaagctcagctttaaagtcttacttggggaatttttctaaaaccttaaatgtggatagttgggggtctaggattatatctaattcmcctttacactgagggtgtaaaattgtgggttcccagaaatatctctgcagcttcctacttgtctgtctaccttggatgtcaatgggcttttctccaggcatcagtttccttaaagcctatgaaaaccatagctgatttgttttgttgattagtaaagtccctctcaatatgtaaataagctttcatgctctaaaagtattttccgaaatatgacttctacttcttttcagc

SEQ ID NO: 233512 - DNA, 550 bp, Homo sapiens
tgatgcctgaatttttttcctagtacaatgaagtaatgtcttcatatttctaaaatgacacttccatccgggagaaaaaatagctcagtgcattaattgatgccaatttcacatggaacatttttatggaaagcacttagttctgattttccaggtataaaagaatgatgtcactgttcgtgtttcatcagacctgactrtatacctaagacaggaagaaggaagtggctttggattttatgtaagtaatagagtacatgtaaacaaataaggctggcatttgcttttacctcctgtttacaaatgtatttggtgctactgaaataaaatgctactgcattaagctaatgcaatggtaggttctgggcaaacagatgatggaaagagtgagacagattagaaagatatgagatggatgatgaattatataccaaatggactgaaaggatagatctttctgcttttcacttttcttctttccacaaatgttctcatatgttttttttctaaagcacaataacattccttgcaatataatattgagtactta

SEQ ID NO: 233513 - DNA, 550 bp, Homo sapiens
tgatgcctgaatttttttcctagtacaatgaagtaatgtcttcatatttctaaaatgacacttccatccgggagaaaaaatagctcagtgcattaattgatgccaatttcacatggaacatttttatggaaagcacttagttctgattttccaggtataaaagaatgatgtcactgttcgtgtttcatcagacctgactgtatacctaagacaggaagaaggaagtggctttggattttatgtaagtaatagagtacatgtaaacaaataaggctggcatttgcttttacctcctgtttacaaatgtatttggtgctactgaaataaaatgctactgcattaagctaatgcaatggtaggttctgggcaaacagatgatggaaagagtgaracagattagaaagatatgagatggatgatgaattatataccaaatggactgaaaggatagatctttctgcttttcacttttcttctttccacaaatgttctcatatgttttttttctaaagcacaataacattccttgcaatataatattgagtactta

SEQ ID NO: 233514 - DNA, 605 bp, Homo sapiens
gaacttccttagagaggacttttttgtccacagaatctcaagtagcttatttcccctgaagtctgctttatttccttcatggcacaaataacttgttgatattttgttaataatttatttttggtcagctggctgaagagttgacactataagatcaaaaatcttgtctatctcattcaagactctatccccagtgtctcaaacagttgttcctagaacatactaggtacttargacttgtttgttgaatgaattaatgaattaattaatgaacaaatgcttgaacatctattactcagcttttcctttctttcacatgaataacttctatgtatcttttagctgcttatttaaacatcacttcctcctggaagcctttccggaccctggaggatgagctagatgatcctcacctgtgttcccttagcagccaaatagatgacgggattggggagattaattgcacctgtaaaatgataggcctggatgagataacaatcactcttatctctcccagccctgaacactctgcggcttctctgagaaaccctatcgaaggggatgtggaatcccagagctactcttgctatcaactcgccgcatga

SEQ ID NO: 233515 - DNA, 560 bp, Homo sapiens
tagttcctgtattagtttccagtgcccaccataacaaattactacaaatttcatggcttaaaacaagagaaatttattatctcaggtcctggaggccagaagtgtgaaattactgttccttgtctctcccagcttccagtggttcccaggtgttccttggctttggccagatcattccaatctatacctctatggtcatccttcctcctttttttctctgtgtgycttttataaagacacttgtcactgtattaagcgtccagtcagataatctagaatgatctcttaatcttgacagcttcaatttaattacatctgcaaagaaccttccccaaataaggtaacaatcacagattttgagtattaggacatagatatatgcttctggacaccaccatttaatccactacacacaggaactgtatgtacagtgtctcatcagctcctcacaagtctgtgagttgtggatatatataagcattggcttttgttgttaaattcattttaggatgaaaacatgcagaaaagaagggtttttttttttttttttttttttgaga

SEQ ID NO: 233516 - DNA, 560 bp, Homo sapiens
tagttcctgtattagtttccagtgcccaccataacaaattactacaaatttcatggcttaaaacaagagaaatttattatctcaggtcctggaggccagaagtgtgaaattactgttccttgtctctcccagcttccagtggttcccaggtgttccttggctttggccagatcattccaatctatacctctatggtcatccttcctcctttttttctctgtgtgtcttttataaagacacttgtcactgtattaagygtccagtcagataatctagaatgatctcttaatcttgacagcttcaatttaattacatctgcaaagaaccttccccaaataaggtaacaatcacagattttgagtattaggacatagatatatgcttctggacaccaccatttaatccactacacacaggaactgtatgtacagtgtctcatcagctcctcacaagtctgtgagttgtggatatatataagcattggcttttgttgttaaattcattttaggatgaaaacatgcagaaaagaagggtttttttttttttttttttttttgaga

SEQ ID NO: 233517 - DNA, 542 bp, Homo sapiens
agcttaagcttagataaactggaatcccagtgttctaaaagataggtttgggatcagtcaggtctaaatgaaatctcagttttaccaattaccagttgtgtggttctggaagcattacttaatctctgagacccaatttcgttagctataaataaagataatatatataccccacagagttaaaatattaaatatcatcatgtacrttaaattgtccaacacaggtgctcatgaaattcattcatccattcaataaataggtatcaagcacctccaatgtataaggaggtattctaggaactgatgatgcagttttaaactaaacaatatttctgccttcgtggagccatttctttcagttaaaaaaatgctatgaagcaaaagaatgcagaataataggatggacagcaatagtaatggtgttgctagaaataaacactagatcctttttccctgtgttcacacagttctcctctttttgaatcccaaactctcctgcccactgaccacaggtctccagggaggatgaataaagggttaga

SEQ ID NO: 233518 - DNA, 518 bp, Homo sapiens
tacaacaaaactgaaggggaacctaattaaaatgtcacctgagaaagtattaaaaatcctatttgatgattgatctttatgtgatttttggcatacaacctggtaagaagttataacactgctataagaaaagtttttcttttcccatctacttatttttgtgaataggtttctcagtgcttacaaccaaaaaatgaaaagtaaataaaatttatgaaataccatctcacgttagcaataatgaatattcctcagcagacatatggcctaattttttaaaaagttcacctcattcagagaagcatttctaataaaaccttatgtttcacatcacatttagcaaaattttaataagtgtatggtagattgatcagttgtatacatctaataattgttatgataatttaatccagaagaaattsggttttgttagcatcttatatttacagaacattaaagaaattttaatatgaatttatatacatgttttgtttcagaataatataacaacatgatca

SEQ ID NO: 233519 - DNA, 612 bp, Homo sapiens
aatgactaaaccattcatttcggccattacttgtttcctttaacagttccacaaaagtagtccatcatgaaatagatgtgtattcaaattctggttttatgtttgtgtgctatatgtctcccagmaactttcttaaacttgttgagcctcagtttcttcccctctagaagaagaaaacggtagtacattctttacagtttgttatgaggtataaattaaattcaatgtaaaaccatctaacacattgcaattgctcaattgctcaatatggttagtggccataattatcactgcctgtgttccaggtagaaaaaaaaaagaaaggacctaaatgcaaaacatatctgatctatcttctcctatctttagcggctctctgtccagtacattctcgctgccctaagcattgaagtttggcttgcatctggaggagccaagaactgagctaagtccactgctatctgattctgctcgtgaggtcactccaggcagttggggacacagagctcacctctgctgaccctttcctgatatttcacatagcagaagcctatccagaattcttttttgtaggcccagtgccataaatcttggacatatcttttaacacca

SEQ ID NO: 233520 - DNA, 312 bp, Homo sapiens
actcaatagctcagagaccagcagcctgtgaatatagatgaggtcacaagttcatcagtgtgtaaataacggtagttcttaacaacccccaccaacaccaccatcaatttccaataacccagtctttattttttaatgtttccccgtcccttcaagcattctcaggaacaagttcactcagtctttctttgaaatccttccatgagcagaattttaggaggaatcttcgcaaagccacagrcactgtaaccttggtgagatcccgggtctctctctggcactcctccagctaccatcctgctccacacatct

SEQ ID NO: 233521 - DNA, 312 bp, Homo sapiens
actcaatagctcagagaccagcagcctgtgaatatagatgaggtcacaagttcatcagtgtgtaaataacggtagttcttaacaacccccaccaacaccaccatcaatttccaataacccagtctttattttttaatgtttccccgtcccttcaagcattctcaggaacaagttcactcagtctttctttgaaatccttccatgagcagaattttaggaggaatcttcgcaaagccacagacactgtaaccttggtgagakcccgggtctctctctggcactcctccagctaccatcctgctccacacatct

SEQ ID NO: 233522 - DNA, 432 bp, Homo sapiens
catatttgttgccaatctccaaagagcgctgctgcttcccaaaatcttayagttttttcataaacatgattccttaagctttagatagcaccctcacagtctctcatcgggccaggctgagtggaaattaatcacgttattccctctcaattttacctcttccttctctaccctctgtcccacatgtcagtatgtccccctcttcctccagttaaaagctaaagcaccgtctttgtataacaacttatgcaactggacacttgatagaaaacagtaccattaactccacttgccagacacatatgaaccccagctctagcttgtgcaaaacactctccctacccaacctacctaccaagttgtacacatccctggatttggagagtctattcctggatccctcagggtggggtggggtgggtggcaatgtag

SEQ ID NO: 233523 - DNA, 432 bp, Homo sapiens
tttgttgccaatctccaaagagcgctgctgcttcccaaaatcttacagttttttcataaacatgattccttaagctttagatagcaccctcacagtctctcatcgggccaggctgagtggaaattaatcacgttattccctctcaattttacctcttcyttctctaccctctgtcccacatgtcagtatgtccccctcttcctccagttaaaagctaaagcaccgtctttgtataacaacttatgcaactggacacttgatagaaaacagtaccattaactccacttgccagacacatatgaaccccagctctagcttgtgcaaaacactctccctacccaacctacctaccaagttgtacacatccctggatttggagagtctattcctggatccctcagggtggggtggggtgggtggcaatgtagaaag

SEQ ID NO: 233524 - DNA, 428 bp, Homo sapiens
tttgttgccaatctccaaagagcgctgctgcttcccaaaatcttacagttttttcataaacatgattccttaagctttagatagcaccctcacagtctctcatcgggccaggctgagtggaaattaatcacgttattccctctcaattttacctcttccttctctaccctctgtcccacatrtcagtatgtccccctcttcctccagttaaaagctaaagcaccgtctttgtataacaacttatgcaactggacacttgatagaaaacagtaccattaactccacttgccagacacatatgaaccccagctctagcttgtgcaaaacactctccctacccaacctacctaccaagttgtacacatccctggatttggagagtctattcctggatccctcagggtggggtggggtgggtggcaatgtag

SEQ ID NO: 233525 - DNA, 659 bp, Homo sapiens
gggtattaactcaaaggatggtaaaatcatagtcatctattgcttctcctgtgcaccaaggttattacatgtgtgatacggtttggctgtgtccccacccaaatctcaccttgaattgcaataatccccacatgtcaagggtgggtccaggtgaagataatggaatcatgggggtggtttcccccatactgttctcgtggtagtgaataagtctcacaagatctgatagttttataaatcagagtttgttcccctgcacaagctgtcttgcctgtcaccatgtaagaaatgtccttgcttctcctttgccttccaccgtgattgtgaggcctccctagccatgtggaactgtgagtcaattaaacctctttcctttataaattacccagtctttggtatgtcttcatcagcagtatgagaacagactaatacaatgtgtaatttccttaaattatcccaacaacaagataaggtaggtcatattaacagtctattatttttaatattatcattttatgaagaagaaaatattgagatgttaagatcacccagtaaataactgccacrggcttcacatccattcctgtccagctccagtactcatattctctcatctaactgcattgtatctcattgcatcagggtaaaacatggttaat

SEQ ID NO: 233526 - DNA, 577 bp, Homo sapiens
gtcacacttgatacttaactacctccctcagaagtgaccacattacttctactctcagtccattggtcagaaatagtcacatggtcagctcaagtgcaagggagactgggaaatgccaaagagcacatgggtatcagtaagcactagcagctcatggcacagtgaatgtcgcacagagccaagaatgtgcttccttcagcaagtgagttatctaatctcagttgctacccttaacaatacaaaaaaagtgatcagaagttctggagttacaatcttaaatcttcaactgttccataccaaatatttaggcttggttcratgtacaacacctgttcttccttcctggctcaacccctttccccaagcatttacttaagatacaaatgatgatgtggtgggcataaggttttttttttttttttttttttttttttttttttttgtgtgtgtgtgtgtgtgtgtgtgtgtgtgtgtgtgtgtgtgtgtgtgttttcagcattgcctgaagaaaacaccaagggttaatttatttttcttattactcacccatctccctttatctctgttgagtttaata

SEQ ID NO: 233527 - DNA, 577 bp, Homo sapiens
gtcacacttgatacttaactacctccctcagaagtgaccacattacttctactctcagtccattggtcagaaatagtcacatggtcagctcaagtgcaagggagactgggaaatgccaaagagcacatgggtatcagtaagcactagcagctcatggcacagtgaatgtcgcacagagccaagaatgtgcttccttcagcaagtgagttatctaatctcagttgctacccttaacaatacaaaaaaagtgatcagaagttctggagttacaatcttaaatcttcaactgttccataccaaatatttaggcttggttcgatgtacaacacctgttyttccttcctggctcaacccctttccccaagcatttacttaagatacaaatgatgatgtggtgggcataaggttttttttttttttttttttttttttttttttttttgtgtgtgtgtgtgtgtgtgtgtgtgtgtgtgtgtgtgtgtgtgtgtgttttcagcattgcctgaagaaaacaccaagggttaatttatttttcttattactcacccatctccctttatctctgttgagtttaata

SEQ ID NO: 233528 - DNA, 575 bp, Homo sapiens
ggagaaattgactggagtcagattgcaggaagggatggaaaactactctcagttgagtcccctcatgtgcttctctactcccaccccatcactctctctacataactgaagtggtcagtaatgaatgccaagtatgtgctatgcatcatacaaagtggtttacatatttaatctcttaatcttcacaaaaatggaaaaatttgtgtcttaactagaagcaaatttggctgasagtaatattgtcatttccttgctttcaaataacgaggcataaacaagatataaatttgtttttctcttatgtacaactctggcattcagggttatcctgagggctctggtccaggagagtttttcaggtacataggtgcttctgttttgttgctcttctatcttaattccccaggccatgtcatagcccaaatttggcttctctggttctagatatcttgtttgtattcttgtcagcagcagggaggaagagaagagagtcatgggagcatactaggtgtgttctaagaaagctttctggaagcttcctcacagtgtttttgctagcatcttgtccagaagtt

SEQ ID NO: 233529 - DNA, 442 bp, Homo sapiens
gtgtgaccaatggccagtgatatagccctcaggagatcctgagaacatgtgcccaaaatgatgggctacagcttggttttatacattttagggtgacaggagacatcaattaatacatgtgaggtgtacgctggtttggtccagaaaggyccagacaaccggaagtggaggcttccaagtcctaggcagattcaaagatattctgattggcaattgactgaaagggttattatcaataggaaggaaagtctgtgttgtggtaataaggggttgtggagaccaaggttttatcagacagatgaagcctccaggtagcagccttcagagagaatagattgtaaatgttgcttgtcagacttaaagagtctgctctatcagtaattccaaaagggaggagggtataatgaggcgtgtctggctcccctttcccattatgaattga

SEQ ID NO: 233530 - DNA, 533 bp, Homo sapiens
ttgcccttgtttgcagatgacattatctaatattcagaaaaacttaagactccaccaaagaactgttgtaactcaaaagcaaatttagtaaagttgcaggatagaaaatcaacatacaaaaatcagtagcagtagcatttctatataccaacagcaaacaatctgaaaaaaaaaaaaaaaatcaaggaagcaattttatacctaagtataaaaataaaatacgtaggaaaaaatatagctaaagaagtgaagatttctacaatgaaaactataaaacatttacaaaataaattgaagaggacacaaagaaaatggaaaagtatttcatgtttatgaataagaagaattaatattgttaaaatgttcacacttttaartgataaacagattcaatgcagcctctatcaaaatatcaatgacagaaatagaaaaaacaatcttaaatctcatttggagccagaagaccctggatagtcaatacaatcctgaatgacaagaacaaagctggaggcatcactgtacctgacttcaaa

SEQ ID NO: 233531 - DNA, 441 bp, Homo sapiens
gcctctttcagtgatatcaagttaaaaccaggtactgtgatcgctcaactgayttttgttcttatgaaagtgttttttgtgtgtgcagagttgtttagtttggtgttcctatggggaagatgattggtggagcttctatttggccattttgctctgccttctccctataaactcatacatgggaatggcagtagttatgtactcaagagctcaaggtccttccttttcactgataaaacgaagtaagctcgtggttgtgatatgtgaaattctaaatcaaggcagtactccttcactttctccatcctgcgtacaccttggcttctaattagcctagcagatctagagctccctttactcagaccctgaaagtgaaacagtgtaatgtgaactttggtgttagactggggttcaaataatgccttggccatgtcctaactg

SEQ ID NO: 233532 - DNA, 517 bp, Homo sapiens
tttactccttcatcttagttcttccttgctgtccagacatagtcctgacttrcatgtgacatgggggaacaaactgttctatctgtaccaccagttaactaaggagtccttcaggctcagctatgaattccatcaggaaaattctgagctttttggagtaatggagggagaggtgatgggattctgttgtggaactgagagggtccagtggaagtgagtcagaatgttcagtgttctgcaacaaagacttcccttcactaccccttcaagcatcacacagactctccaggtctggggtggcttgtggtcccatgtggttattacatgcacctctacgtactgaatttgttgatccttgcagactagcagtgcaagagctgatctgaactcaggggccctggagaagcaaagtcactcctccccattctgaagcagctgtggttccttacatttggacacaggcctgagaccttggctacagtgagctagtgctggggaatctacttattgatcaccg

SEQ ID NO: 233533 - DNA, 517 bp, Homo sapiens
tttactccttcatcttagttcttccttgctgtccagacatagtcctgacttgcatgtgacatgggggaacaaactgttctatctgtaccaccagttaactaaggagtccttcaggctcagctatgaattccatcaggaaaattctgagctttttggagtaatggagggagaggtgatgggattctgttgtggaactgagagggtccagtggaagtgagtcagaatgttcagtgttctgcaacaaagacttcccttcactaccccttcaagcatcacacagactctccaggtctggggtggcttgtggtcccatgtggttattacatgcacctctacgtactgaatttgttgatccttgcagactagcagtgcaagagctgatctgaactcaggggccctggagaagcaaagtcactcctccccattctgaagcagctgtggttccttacatttggacacaggcctgagaccwtggctacagtgagctagtgctggggaatctacttattgatcaccg

SEQ ID NO: 233534 - DNA, 580 bp, Homo sapiens
attgtttttaaaagattccacatataaatgagatcatgcaataattttctttatttttctgtctatgtctggcttatttcactaagcttaatgtcctccagacacattcatgttgtggtaaatggtaagatcttgttctttattgggctgaataatattcccttgtatacatataccacatttttgtatccattcattcatcaayggacacttaggttgtttccatatcttggctattgtgaataatgctgcaatgaacatggaagtgcggatatctttatgaggtgttgatttcatttcctttgggtatatgcccaggagaaagattgcattgctgggtcatatggtagttctatttttaatccctttagaaatatccatactgtttttcataatggctatcccaatcttctccaatctaaattccatttagataatgttgcctgcagaagactctgagcctaaggcatctcatgtctttggaacaaaactgggactttatccttgaattaaacaaagtgactgatacgcaattgagcagggaataactttctcacagtgaaatttgatgttaaaatgc

SEQ ID NO: 233535 - DNA, 483 bp, Homo sapiens
gcatctcatgtctttggaacaaaactgggactttatccttgaattaaacaaagtgactgayacgcaattgagcagggaataactttctcacagtgaaatttgatgttaaaatgccccctctctctacacccccaaactgtcttacagtcttccaaaaaatgttggtgttttcttttcccccttttgggaaaattagctaaagtttatgtgtttcttcacattccaaaacattctaagatagcacataatctctgtgtcaagtaagattgcctataataaagtcctgtaaaatagctcaccccagtttttttgaagtattgctactaatataacgccttgtggttatttaaagatgcacagtttccaaaaccctgctctgttcactgggctttagtagcaacaaagagactaggtctgcctgaggattatcatccttaaatgtatagattaggaagttgaagcctggagaagtgaaattagata

SEQ ID NO: 233536 - DNA, 619 bp, Homo sapiens
ttgggggtaatgatcccaaattggattagagcacctggtaacagtttctcagaaacgctgatgattatgttcatcctagagaagaatgtgtggaggttgtgcaggcacagaaggaagaaagaggttttccaggaagagggaattgtacaagcctgggcagaggcacaaaggggtggaagagcaagattcactcagggaattgcagtaaattggcaygactggagtccagactacatgtttggtcaggcagtggggtaggtatagaaaaggaaagaatggccaagagtgagagactcagagtatttgggatagagttatgagaggcctgggggacactataatgaacttggatttgatgctagtagctctgaggaaccatgtatgtaatttaaattgaaggtgtctcactaagatgatggaagttccattgggctcctatggggtgagtagaattctatggcaattttttgcaataattatggcacaagagtgaggccaagagtaaatgatctggagtgtgagaagccacttaattctttgtatgttggtccttaaggtgtaagcatccctttcatggaccttttgtaggtccaatgaatgacctcaacatgaaaccttg

SEQ ID NO: 233537 - DNA, 591 bp, Homo sapiens
ggctccattgtgaagagtgacttaatgattaagaagctggattttgggcaagaaaaaagaggggctttggacaggagagtgcattcattttctattgctgccgcacaacatgaaacttagtggtctgaaacaacacagactcacagttctggagatcagatgtgtaacatggtaggcagattgcattcctctggttttggggaagccgtacctttctcagcttctagaggttctccatattccctggctggtggccaagcatattccgaattctgcttccrttgccacatcttcgtgtctgcctgactctactgtgtctctctcacaagaacttttgtcccagatagtccaggactatctccccatctcaagatccttaatttaattacattggcaaagtcccttttgccatgtaaagtaacaaatttgcaagttctggggattagaatttgggctttgatggaggacatttcagcctaccacagaaagtaacatggctgtctggggattttccaggatagcttgtgagattagagttaggaaggccagttaagatgctgttgtgagaatgtgagaatgctgttgtgagaa

SEQ ID NO: 233538 - DNA, 447 bp, Homo sapiens
gccaagcatattccgaattctgcttccgttgccacatcttcgtgtctgcctgactctactgtgtctctctcacaagaacttttgtcccagatagtccaggacwatctccccatctcaagatccttaatttaattacattggcaaagtcccttttgccatgtaaagtaacaaatttgcaagttctggggattagaatttgggctttgatggaggacatttcagcctaccacagaaagtaacatggctgtctggggattttccaggatagcttgtgagattagagttaggaaggccagttaagatgctgttgtgagaatgtgagaatgctgttgtgagaatgttgtggggaatgtgaatgtaagcattaggggcaatcaggacactggggaggaatggctgctgaagaactaaaatcaccaagacttggctaatgagattaggagaagg

SEQ ID NO: 233539 - DNA, 657 bp, Homo sapiens
tgtttggcattagttttgaggattcccaagaacagctatctataccaacgtttaagaagcatcttcatagtgcagatttatagaaagatatcctccagcaatacagaggctatgtgaaaagcagtgtgaaggtgacagatatttgtcacctatgttatgtcaggcactgtgctaagtattatatatgtagcatctcatttaataataacaactgacatgcagagttgttattattaatccccattttatagacaaacatttccaggactctgagttatattgcacaaggctccttgatgttctcaycatgcagcagaatttgaaaaccagtctgtctgatttcaaaacttgtgttcttttaccagaacaccatacactgcctctcagagtaaaggagagataaatcagtgaggacagctaagttgggaggtcaggagactctctctcctggaagagaaacaccgaactaaaacaaaaccatgaagttcagtgttctaatttagaacaccaacctttgaagtcccatattctggcctttgctgggtatagaatacgagccatctcatgctctaagatggctggtaacctttatctctttcttccaggttagaaagttagctgtttctgaaggcattaatcttagtgagaaaatatatc

SEQ ID NO: 233540 - DNA, 657 bp, Homo sapiens
tgtttggcattagttttgaggattcccaagaacagctatctataccaacgtttaagaagcatcttcatagtgcagatttatagaaagatatcctccagcaatacagaggctatgtgaaaagcagtgtgaaggtgacagatatttgtcacctatgttatgtcaggcactgtgctaagtattatatatgtagcatctcatttaataataacaactgacatgcagagttgttattattaatccccattttatagacaaacatttccaggactctgagttatattgcacaaggctccttgatgttctcatcatgcagcagaatttgaaaaccagtctgtctgatttcaaaacttgtgttcttttaccagamcaccatacactgcctctcagagtaaaggagagataaatcagtgaggacagctaagttgggaggtcaggagactctctctcctggaagagaaacaccgaactaaaacaaaaccatgaagttcagtgttctaatttagaacaccaacctttgaagtcccatattctggcctttgctgggtatagaatacgagccatctcatgctctaagatggctggtaacctttatctctttcttccaggttagaaagttagctgtttctgaaggcattaatcttagtgagaaaatatatc

SEQ ID NO: 233541 - DNA, 398 bp, Homo sapiens
ttttctcttagaagaagctctgcttaacatagatatttgtctcaatgggtaataaattacaaagaaatggcactacatgcatagatctgtctttccatggctttctggattatgaaaacattaccccacaggaagattatattacatctctgatctttttctgaggggtattgtagattgagtttgctccagccccaacatgaatatctcatttaagagccattaaaattgttttctatctctaaaatctgtaaatttcaagtcagtcacacctttttttccaatgggacctcacacagacttttcacgmgaagccttttcatgctttcagaaatcatcatttgccagaaagaatattagctactcagcctaaatctacaaagggaggcaaaagtcaa

SEQ ID NO: 233542 - DNA, 492 bp, Homo sapiens
taaggggttcaaatggattagaggactcacaagctttcctctttcctgtcccagcctctcagttcttcttacagttcacacaatttcacctgagtagggtctcataggaactgcttkagttaccgtccaatcctgaatctaccacactggccaggagtagagggtaagaagaaaaaatactctgattggccagcctgggttatgtgtccatcctgaaagctgaaagtaatccctatggcctgtaggaagaagtgaaggtgagcatgaagtgaaaaggaacaagctgactgatcaggcctgactcataatctacacctgaaatccacggttcagtctgtgtacccaaacacatggttccaaggattgggtgaaggagaggaggcttcctaaggaccatgtgagttgagttccttgcaaaagggggaaaggatgctggcagacacaaatcagctgttaattttatgtgtccacttgccttggctctgttgtctg

SEQ ID NO: 233543 - DNA, 580 bp, Homo sapiens
gtgtgtgtgtcaggggctggcagatttattctgtagaggacaagctgatcgatattttaggctttgtgggccaagtggtcttgtacaatgacacagctctgccactatagcrggaaagcagccataggcaatatgtacatgaatgggtgtggttgtgtcccagtatgtcccaataaaactttattggcaaatgcagggggaggagggtggctactatggaaaaaaaaaaaaacaggtaataacaggtgttggtgaggatgtggagaaatcagaactctatgtgctgttggtgagaattgtaaaatggtgcagaggctatggaaaatagtatgacagctcctcaaaaaattaaaggtagaattatccaacgatccagcaatcccacttcggggtgtataccaaaagagtggaaagcagagtcttgaagagctgcctgcacacccgtgttcacagcagcattacccacaggagccaagaggaggaagaagcccaagtgtcctctgagaaagatgaatgaataagcaaaatgtggtccatccacaccacggaaaattactcagccttaaaacagaagccctgg

SEQ ID NO: 233544 - DNA, 580 bp, Homo sapiens
gtgtgtgtgtcaggggctggcagatttattctgtagaggacaagctgatcgatattttaggctttgtgggccaagtggtcttgtacaatgacacagctctgccactatagcgggaaagcagccataggcaatatgtacatgaatgggtgtggttgtgtcccagtatgtcccaataaaactttattggcaaatgcagggggaggagggtggctactatggaaaaaaaaaaaaacaggtaataacaggtgtyggtgaggatgtggagaaatcagaactctatgtgctgttggtgagaattgtaaaatggtgcagaggctatggaaaatagtatgacagctcctcaaaaaattaaaggtagaattatccaacgatccagcaatcccacttcggggtgtataccaaaagagtggaaagcagagtcttgaagagctgcctgcacacccgtgttcacagcagcattacccacaggagccaagaggaggaagaagcccaagtgtcctctgagaaagatgaatgaataagcaaaatgtggtccatccacaccacggaaaattactcagccttaaaacagaagccctgg

SEQ ID NO: 233545 - DNA, 580 bp, Homo sapiens
gtgtgtgtgtcaggggctggcagatttattctgtagaggacaagctgatcgatattttaggctttgtgggccaagtggtcttgtacaatgacacagctctgccactatagcgggaaagcagccataggcaatatgtacatgaatgggtgtggttgtgtcccagtatgtcccaataaaactttattggcaaatgcagggggaggagggtggctactatggaaaaaaaaaaaaacaggtaataacaggtgttggtgaggatgtggagaaatcagarctctatgtgctgttggtgagaattgtaaaatggtgcagaggctatggaaaatagtatgacagctcctcaaaaaattaaaggtagaattatccaacgatccagcaatcccacttcggggtgtataccaaaagagtggaaagcagagtcttgaagagctgcctgcacacccgtgttcacagcagcattacccacaggagccaagaggaggaagaagcccaagtgtcctctgagaaagatgaatgaataagcaaaatgtggtccatccacaccacggaaaattactcagccttaaaacagaagccctgg

SEQ ID NO: 233546 - DNA, 509 bp, Homo sapiens
tctagagctgtgagagaatccatttctgttgttttaagccaccatggtaatttgttatggtaattgttcatggtaatttgttgtggcagccctaggaaactaatacatggtgaacagagttaatgcaaaaatgaccacccacactgaagtctcccttatcacagtgccactgagcatgggcatggcctgacaaaaacaaagatgcagatgtggcatggtctttaacaaaatcctcaaaaaagaaaccaaagaatgaggaataggttcactaatagttgcacagactcttagtgttggaagggactttgagaccaactagagtcatcctgttcatttgacggcagaagaaactgaaatgagttktctcttggcttcctctcccctttgcctcaggagagatgcagatggtctgtcttatctccggcaggaaatctccatctggctggcaccctaagtgattcagctggattcccagggagggggaatttctcatgagtaagatggtaacc

SEQ ID NO: 233547 - DNA, 636 bp, Homo sapiens
gattaatatttcttacctctacaataagaagaaataccttgttctatgagcagctgccatactttcagacatgtttctgacttttagataattaacaaatcctctgaagaaaaggagcaggcctgagaaggttgaaataatatggatatactatgtttttatacagaaaagggcaagataaatttaaagtagacaattataaacaagatcctcttggcttaaggaattttacttgcagacttccattcatttctgtaatatattttacactataaggataaactctgtcacaaggaaatacaatttttcaatttgttaagcctagatgtaccaaaattaaagcaaatctagctataaaaatccagaattacataaaaatatacatttaagtgattttcttcaatagtaaagttacctgacgcacttaaactgattcaactcataaaaaccccattgaacccatgggctcaatcttttcaattaatataactactgggtgaactaagacatatttatttatataaagtagataaaaaggaaatatatacatgaggttrctaacaattatgaggaaaaaaacaataagcctgtatagtaatatcaagtgcctgtcatctgtgaaatctgtatttgaag

SEQ ID NO: 233548 - DNA, 636 bp, Homo sapiens
gattaatatttcttacctctacaataagaagaaataccttgttctatgagcagctgccatactttcagacatgtttctgacttttagataattaacaaatcctctgaagaaaaggagcaggcctgagaaggttgaaataatatggatatactatgtttttatacagaaaagggcaagataaatttaaagtagacaattataaacaagatcctcttggcttaaggaattttacttgcagacttccattcatttctgtaatatattttacactataaggataaactctgtcacaaggaaatacaatttttcaatttgttaagcctagatgtaccaaaattaaagcaaatctagctataaaaatccagaattacataaaaatatacatttaagtgattttcttcaatagtaaagttacctgacgcacttaaactgattcaactcataaaaaccccattgaacccatgggctcaatcttttcaattaatataactactgggtgaactaagacatatttatttatataaagtagataaaaaggaaatatatacatgaggttactaacaattrtgaggaaaaaaacaataagcctgtatagtaatatcaagtgcctgtcatctgtgaaatctgtatttgaag

SEQ ID NO: 233549 - DNA, 531 bp, Homo sapiens
tgattaataatcaaaacctatggattactgaaaccctggaaagctataagttttaaaataatgaagaaatgcattacatccataaacattaatattttcatagtgggtacttttaaatcaacttcataatatatattattaaagtgaacatttaagagaagctaatatatttgatctrtgattctactaaaaattttaggaggatttagctcattcaattagaaatcaatgtttaaatgtagaatgtatgtattttaatttattaattgtataacagcatttaaaatgtgtaggtaatttttcaaaagacttattacaacagtaagtaaagcactcttgatcattctcctagatcttacagttaaaaaaaaaaaaaactaggaagaaacatttgtaaaaagaagtcaaaagaggccttcaaaaggctgggggatgattatgcgaacaacactaatgcctatgcaatttttacagaaaactatctggagactagaaaagttgttaagatggggaacttgtctccctacgcac

SEQ ID NO: 233550 - DNA, 510 bp, Homo sapiens
acttctttctctgaactcctgaacctttgtactatttgatgctattaacatttagtgatgaattttgagtgtcttgagttcatggactatgctacatatctttttattccttacaatgtctaatacattgttctaaacatagtatgcatttagtagataaggttaaaagtatgaattaacattcatctgatttaagatcagttttgtgtttctacgaatgcaactytaattgtttatttaatccagtgcttttatccttttctccttggtcacttttctaaggaatctttttggattttttttcctagttgtcaattaatgaaataatatcacacaaatattgtatttatgtttatgtatacctgtgttttaggcataaaaagcagcattgttttcatctatcaataaccaacatttgaccttttagaagcaatactgctttctttgagaatgtaaggtttagttttttcactgaaagcagttagcatttgcaagcagaaaatcttgctt

SEQ ID NO: 233551 - DNA, 442 bp, Homo sapiens
taaaaaccctcttaatgggggaaggaagtagggatgtggaagtaaattatttttagtggaaatggatgatcccagggaacgatggtctgggatgaaatttctctgagctctggggagatggtggtaaggtgaggggtggaagtttactgtgaacaaagattattttatcatmcagataaaatgccccaggtaacctcctggagctgttctcaaaagaatagataaaaatttgttggggcttggtgaagtcctccagtctcttcttgagcagctaatctttcctgtttatttgatgagattccagggatgaggggttaagacatttgcattcgttctgaaaagaaattttctgccatgcatggtggctcatgactgtaatcccagcagtttggaaagccacaggactgcttaagtccaggagtttgaaaccagcttaggtaac

SEQ ID NO: 233552 - DNA, 394 bp, Homo sapiens
tagctattctagttcttttgcctttccttataaatttagaatcagcttgtctatatctgaaaaaaaaatttgcttaaattttgatagatattacattaaatccataaaacattttgaaaagaattagtatctttaacaaattcagtcttcaatcaattaaaatggtagggctccttatatttagatattcatttgtttctttcataagcattttgtaattttcagcatccagatagcatacacgttttgtgagaattataactacacattttttggaggttattgtatttatatgaaattgtgtgatatttcattatttaagtaatttttagattctaattttacatakgtagtgcataaaataagactggttttcatgtattgaccttgtact

SEQ ID NO: 233553 - DNA, 493 bp, Homo sapiens
ccagcaggtaatcataagttggcatatggtaggcctgcagaaagaattcactaatataatgtatttttaacaaatctaatagagatgataagataaatgacaaatagctaaaatgtgagttgatatattgtaacaaatatcaaaagtgttaaggggttccaagtaggaaagattacatactattgggggaggagaatacatgggaaagaggaagtaaatctatttaaaggtggatctaacataggctttaaagcctaggtagaattctagcaggtaaatatgagagacaaataagaagcagcaaggtcgtaagtgaaagatactaaaatgaatgyaattacaagagagggagatgagactcaaaagtgagactaagtgcatgcatacgtcagttcaggctgccataataaaatcacacagatagggtggcttaaacaacagaaatgtatttgctcacaattctggaggctagaagtctgaaagtccaagctca

SEQ ID NO: 233554 - DNA, 569 bp, Homo sapiens
catcatgcataggaattttctaaatactgatttattgcctttcttcttcctgattacggtagcctgtcccgatccccatgccctcaaatatcccaatattaacaacttagctttgtccatatgtatttttctccatattttaaataayattttataagttttctctctttacatatacatatatatgtacgtgcatatatgtacacacactatgtatgcacatatgcaatcatacatatatagaatcgttttattttttattaatctaaacaattatgcgatagatacctttatatacagactcttacaaattggcacatttgcttctatagaatagctttctacgaaaaggaattgcttttttaaaaaaaatttgctttctaggaaagataccgccagattctcattttaaagattaattcactgagccctctggaacagaggctaaacaaggttaaattgctttacagttcaaccagccatctaagagagtatccttttatttcataaccacactagcattaggttttagaacattatatagtttttcagattaaatcattgttata

SEQ ID NO: 233555 - DNA, 632 bp, Homo sapiens
tgtcttttcttggtttgtcaaatgttcattatttgaaaatataatatttagatacatattataacatcatactaaccatctggtgttcaacaattcagtctcaaaattaaatatgtagtatgcactatttgctgataggcttaaaataatgtggaaatagccacagttattcctcccttcctttagtcttaaatagaaatactacggccagataactgggactaatgataatctgattttttaaaaataacaaattaatataccagaatatggaaaacctgtattcttccctcttctcagtcactaacacttcttgtacatctttggagtagtcatctaacttttatgattcttgattatcccaataaaaaatgaggacaaagattataattcatattccacagagacctggattcttgtgaggtgccctttgcagagttaagatgttttgttttatttgtttttcaagayggtgcataggagacagtgttagcatgtctctcctacttggaaggacaaaatagtgagtagagaatcacattgtgattttttttcaagaaccaccacaggaacttactaagaaaaccttaaaaatccacagatcctttgtaagaagcagcaggccacagcct

SEQ ID NO: 233556 - DNA, 549 bp, Homo sapiens
ttcatattccacagagacctggattcttgtgaggtgccctttgcagagttaagatgttttgttttatttgtttttcaagacggtgcataggagacagtgttagcatgtctctcctacttggaaggacaaaatagtgagtagagaatcacattgtgattttttttcaagaaccaccacaggaacttactaagaaaaccttaaaaatccacagatcctttgtaagaagcagcaggccacagcctactctgtgtggtaggtgaaaaactgtaattttccagagtgtgaggtgggagggctggcctccaaacacacaaccccamcgggaaatatgaaaatccagaccacgggagaaggccttatccctacccagagctggaatgaacatagggagtgctgtgaaatgtagaagtagaagcagcaatgggatgtgcctcgcagacattgccagtctctctcatgaactatgagaagcccttcccaactgtatctcacagaggtccttgggggaagtcagccaacagactcagggaggagtcgcaaggttaaagg

SEQ ID NO: 233557 - DNA, 616 bp, Homo sapiens
actcatgtaaacttagggtaaagtttatgtgaaaaacgttaacctaaatttatgtgagtcyttatgtggaaaaggatatttcacacaaatggaaactaaaaacaagcaggagtagctaatcttatatcagacaaaacaggctttaaagcaacaacagcaaaaaaaaaaagacaaagacaaacattatataatgataagaggattcatcctacaggaacataacacaatcctaaatttatacacacctaacactggagtacctaggtttataaaaacattattactagacctaagaaatgagacagacagtaacacaatgatagtggggaacttcaatgctccactgaaagcactagagaggtcatcaggatagaaagtcaatgaaaaaatggatataaactattctgtaggataaatggaattagcatatatacacagaacattattcccaacaactgcacaatatacattcttctcatcagcacatgaaacattctccaaaataggacatatgacaaaacaagtctcaataaatttaaaaaataaaaattaaatcaagtatcttctgaagccatagtgaaataaagctagaaatcaacttcaaaaggaatgctca

SEQ ID NO: 233558 - DNA, 561 bp, Homo sapiens
tatgcaatttgcaattgcaaagatatggaacaaatctaagtgcccatcaaccagtgagcaggtaaagaaaatgaggtatatatacaccatggaatattactcagccataaaaaggaatgaaatcatgtctttcatgacaacttggttggagctggagcccattaatctaagtgaagtaactcaggaatggaaaaccaaatatcattatgttctcacttataagtgggagctaaackatgaggatgcaaaggcataagaatgatataatggactttggggactcagcaggaaggatgaagggcgtaagggatgaaagaccacatattgggtaatatgtacattgcttgggtgatgggtgcaccaaaatcttagaaatcaccactaaagaacttatccatgtaaccaaaaaccaccagtgccccaaaaaatattgaaataaaaataaaaattaattattataaaaggaattaagatgtttaaaattgataagaaacatctctctcaaactttacatgtcaaaagaaaactttctacaaatttaattccttacttgttgtatta

SEQ ID NO: 233559 - DNA, 598 bp, Homo sapiens
ctttgtggggtgatttaatggtcactaagcagcaggaaagagtgctcacctcagcagaagatggcattgctaaaactaggtaacattgtcagagcacagctgggtggtcaggacattggacagtaattactagccagtgaaaaagaatgagctctaaatgaggagacgaaaagaacaagaccttggggattgggtttttagttataattaacataaatcgagagatagatttggtttggccaaaatacaagaggagatctatttctaagcttctgctgtgtgaaccttaaaatgtctgcaaaagcccttggatgcacttcctcccatttctttcacagctgtggtgtgctattatcgctattgttaataataactacagtaatattttccataatacctttctcctgaagtctataggrtatcaggcaaaagcttccaaattctgtgaataacgtttgtctaataagcgttgcaaaatgtcaagttagtgaaaaaaaaatagatgttaggaaacaagggaggaaaagatgatttagaacaaaatagaatggaaaaaatcaaaggaagaaattatctgttaacagctagtgaacacagc

SEQ ID NO: 233560 - DNA, 599 bp, Homo sapiens
tggaggattaatgggaataattgtaaatcaattttagaaatttgacaggcatgctatacactatcattattaaagaaaagccattcttgtgaattactacagagataagaaaaatctgtatggtcagtgtactcaagtttacataataaatcatgtgatgtaaagagaaagttgtaatttcaagaggagcagtgttaacatacagtctactgtttaaacatacttaacaggatacattattattgctattggatgatatccctcaacattctacaaaatcagaatctactacttctatattcttttcccaaaatagaattaggtttttttcactttaaaggaaaamgtaacccacaaaagcagctttttgtaaatcaaggttttaataaaattgaggtgtatcatttaacagagaatatattatgtaagctaagcaatctattcattgaacagcactgaaaatagtaatgaaatagtatcttatatcaaatagaaaactagttagctttaaagctaaatgaagacaagctccactggaaaggtaaaaagagtatttcctaatagaaagaaaaataatacaatatctcaaaataaagtta

SEQ ID NO: 233561 - DNA, 626 bp, Homo sapiens
actaactaaatgagccctgccctttcacaacccacctgcaaaggcagtscaccacaaaaggtatctacttaatgatgcaaacagaaaactccagattacaaatgaaaacaaactaaatcaaaacaaaggagcttcctggaaaatgaccaagcaatactcatgctttgataacttgatagaaaggctgaagatgacagaactagttcccattggggtatgtatttatttatatccagcttacttaaagcctaagccaacaaatctaaacacattgagcattgaatttcccttatatttccctgaattcagtgagaactgattaacccatttagaaagagctaaacctatctttacatgtagctaattatgttctaatgcatacattcagtaatgccatgaggctgtccatctgcaaactgccagaaataagctgcccaaattcagagaacaatttattttaaggctaaaaaatgacactgatttaaagcttgcatttgctgatttgataaactgtaagttgaaacaattacattaatgtagcacatcttaatgcctaagatttttctaaaaagaaaacaaaaagaaatagaaaaagtaattgcctttaactttatgtgttaacagaa

SEQ ID NO: 233562 - DNA, 562 bp, Homo sapiens
aggctctttacacagtaacatcatgatygtttttagcaaaaggaaatggtctgtgattattgagctattatttcccatgagtcctcaaaaagatggaccagggaaagcaaatcagtagttttgtcagtttcttattattagtatgatcatgtgatgtgttggaatgtacagattgtctatggggagaagagtgtcatttctctttggaaaaataacctgcctaacttatctttatagaacctcaggaagtcttcattaacttacaatttttaatcattaatacaggcttagataagtaggttgtatcagcaaataggatttcaacttacctaagaccatagtcacaagattcatgatttttgtttgtgggaagaagtcttaaatatctttgagaaaattaaagtaataatgagatattttggagggtcatcttaaaattttagaagaatatggtaatagtaatttgttcggatttctggtctgtgatgtaagaagcttgcaaattgtcactctatctcaagtaaaaagctgaggaaactgaaaaatcaactcttcttatttt

SEQ ID NO: 233563 - DNA, 621 bp, Homo sapiens
ttttgtgtgtatgtgatggcaatatttttgcagatgagttatctttctaaaaaaatctctcaacatgttattcctttactttgataatattttcaatgacttycaattccttataaaataaaatccaatttattttgtctggaacttttcctatagctcaagctgcttttagcaccagatctctcactaaactgaactcaacaggctttttgcttccatcctaaaagccctgtatgccttggctaacgtgatttcctccttccttctaaaaaattatcacgtcctcctaatcattttgtatcaaaatcttacctactcttcaagatttggattaaatgtcactgcctttaccaaacaacaccatattttcccattgccctttctctttttctattagtatatgtatcacattttgccttttcaaatagagtattgggtatgttgtttcttaacctcattctaagcaactaaaaaaaacaacccccttgaatgcaaaaaagcacattgttttgcctacttcgtccccaaattagagtttgttatttttgtaagtgatttacccagttactctatcaaagtaagttcttacatcttcataatgagggagttggagatgacccc

SEQ ID NO: 233564 - DNA, 411 bp, Homo sapiens
gaaatgtctgatacatagttagtgcagtttatttttattttctttttctcttcagttaagaatacttggcactgatgaaacagttgtgaatgttttaccctattttactctataatgtttagcagtgattcaccacctgtrtcatgtgtctcctagatgggtctttaaaacacaggttggtgggccttaccctgttacatttaggcagcctgcagtgggcctgagaatttgcatttctaaaagcctcccttgtcctgatgatgccactggatgctagattacacctggtgaattattaccttcaagtgtactgtcaaattatgatctctagattggttagcctaatttgtttttagtttgcgaactcttgtggggttttttgttgttgttgcagtttttttgttgttgttt

SEQ ID NO: 233565 - DNA, 634 bp, Homo sapiens
aacaatataatttattttccaaactgggacacttgtgagcgtgaaagggaatgctattaatagttaccaagaaacaataaatacggattargactgaactgggcaaataggacatgtggtgcctgtaacaacagaagctgcatcttggattaaattatcattctcaaggaagtatcagtgtgcatgatttgtgaaagtaacacatatttttggcagtcaatagctaattgacattacagctctaatgacctccactatgctgaaaggagaacgatattaggaagatgtacttatgagataataagcagaaagaatggaagtgtggctgtatgcccagttttggtactaagaataggtctactagatagatctaagagaaaggagaaagagacacaccaaataaaagtaaatatggaattatgttgatgctagaatatagaccatggagcatcaaaagctacttgacatagccaggtaagagcagaacaatactgggatactaagtgaacactactaccagtaatacaaagccatcaaaatcaccacgtgatcttactatggaaatggcctgccacattctgagcaaaatagggattttttttttcagaaccaatgtgtcatgctgtcataacac

SEQ ID NO: 233566 - DNA, 524 bp, Homo sapiens
tattaggggatgctgagctggaaacccaattcagcaccagagacagaaatactgtattttgactcattcatcttacatggaagatgaagcctgccaatcaagtagaaaatgtaggcctccaagacaataactcacctgcctttttgtggttkatatttttcatcttggttaaaaagtgtccattgataggggatttaatcaaaacattaaagaagacataatatagccaccaaatctaattatttccaactactagatatcagagctttaaaaaaattgtttttaactgcatttgcttcatttttcttatgggatattaatagaaaaatggagtgcatttctaacagttgcattttttcatatgtgtggctatgtttatgctgatattagttaaaagttctaaaaacaagcaaagaaaatatacacagttttttggcattgattggttgatataataattatgtatatttacttaatatgcataatttaaaaatgtatatttttatgtatatatatttatacgt

SEQ ID NO: 233567 - DNA, 559 bp, Homo sapiens
aattctgggatctcaagcagcttctcttgtccttgattttttttttttttaatccagccagcagagcccctttcccttggttgctacagcttatttgtatactaagaatgccaccagttcaactagaactcattcagcaaaccaacccctatggtatttgaagtatttgaagtatcgtaaaatagttttccacccagaatgattagagtscagacaggggcttccatcttgccctgggtaacactatgagaactatgctgggatgccctgggtgttctgggtgatcagagtggccaacctggcttccctgctcgaaaccacttgagagtccagacctaagcagtctccactttcattggcatgggcacagagacacctctgcattccccagtttttaattaagtatggttaactttaacctaaaattcgaccagtcttaagaatgtagagaatttataactttcacaaaatagatatttggttgataccaatacgtaaataaaccaacaaataattgatgtaaattgccatcccactgtgtctaaccaatgtattaaaa

SEQ ID NO: 233568 - DNA, 484 bp, Homo sapiens
ttttgaatattcatttactcttgcaaagccaaaacttgctcatttgttctatctcaccaaggtggcctcacaaaactaaagctagaaaagttgataggaaatacaaatgtctaccaccaccgcagagagggaaaaatgtatttatatctgacaacattgctagctctaaatgtggtagagcaaaaatwaaaaaaaagtgaacttagattagatagattaaactgctaaaagctcagttgagctttccacaaagcatagggagtaaaaagaaaaaattaataaattaaggcatagcttactattgcagaaaaaaagagagtagaaataaatgctacttgaggctggaaatattcaaaaactgaagaaagacagccagggctttgagatgttttacagagatactggtcacacacacgcacacacacacacacacacacacacccctatttttggtactatcccaatagcacactcacacaaaaga

SEQ ID NO: 233569 - DNA, 574 bp, Homo sapiens
gcctacccccacttttgcagaactgccagtgtaacttggatttggaggtaagaagtgatgaattgataattagygctactcagcatatcatgctgtaatctattcaattgtttacagagagaatttctgtcttgggttagctttctaatagttctaacattaactttaacaaactaaagtgagaattaatctctacacttggccacaaatatatacgggagtcctaattgcagatacatttaagaaaaatatgataatctgagtttacaaaatagaaaaaaagttatggtaaattttagatccatttccacatacatgtgtatatgatatattatgtaagtaaataatacttacaatatgacctattttgcttatttggaaaatttaagcatcagtcagtttttgacatttaatttgcacattgattttccaaactataactcatgtattgatcatagaaataaaattttattcatcattatattccaaaagtctaaatcatcacataccataaaattaataataagctaacaatgaatgaataagtaaatgcatgaatataattatataaata

SEQ ID NO: 233570 - DNA, 574 bp, Homo sapiens
gcctacccccacttttgcagaactgccagtgtaacttggatttggaggtaagaagtgatgaattgataattagcgctactcagcatatcatgctgtaatctattcaattgtttacagagagaatttctgtcttgggttagctttctaatagttctaacattaactttaacaaactaaagtgagaattaatctctacacttggccacaaatatatacgggagtcctaattgcagatacatttaagaaaaatatgataatctgagtttacaaaatagaaaaaaagttatggtaaattttagatccatttccacatacatgtgtatatgatatattatgtaagtaaataatacttamaatatgacctattttgcttatttggaaaatttaagcatcagtcagtttttgacatttaatttgcacattgattttccaaactataactcatgtattgatcatagaaataaaattttattcatcattatattccaaaagtctaaatcatcacataccataaaattaataataagctaacaatgaatgaataagtaaatgcatgaatataattatataaata

SEQ ID NO: 233571 - DNA, 540 bp, Homo sapiens
ttgatgaattttcatcctgcactatttgtttttacctaattaaaaagaattatgagcacaaatgttcactttatactactgcatayaaggaaagcatggttattatcaactatagccagtatgtttttctgataataaaaatttaaatgtatgtagatgttattcagaataatataataattattatccatgttatacagaattatacattattcagaataatccaatattatgatccagaataaaacaatattattaggaataatacagcccagaacaatacatgctattcagaataatgttgttattcagaataatacaattatagtttagaatgtgtgtgtacacacacacatatatgtgtattttatcacatgctttctgcttctcagtctctaccttgaagtgattataatagatttcatactgctatgtaagacattgaaaaatgtcattccaggaatgaatccaaactaataaagctggtttcctatgtgatcaaatttctaatgtctcaaaaatgtgtcagtttcttcctca

SEQ ID NO: 233572 - DNA, 519 bp, Homo sapiens
cctcataatgttcactttaacccatgatgtgggttaagaggagtgaaccaatgttccctttctgactgattatgaggcaacgtgtgtaccgttaaakcttcttgtctacattgagccttcgtcttttatctgtcaaagtataaggttatccatgtataaggctggctgcaaaatccttcacaaataaaagtataccccataagtacacacaacagaccctcttttcacttctattcttcagaggcataagcaaggaaaaaaatagttagacaagaatctcatgatgctagagaagtcttgatctttgatcttgggaaaagctattcacatcagagatgccatcttcttctggggagaaacttcccaggttagctttactttaagggcttcactgggtgtacagttccaagagtgtggagggacccttctcagttgtgagattatgaacttaaaattcaaggtcctgaagttttgctgtagtgtggatggcaaatacagcctttctctgatgttctcaga

SEQ ID NO: 233573 - DNA, 471 bp, Homo sapiens
agtctctcccaaagcctgctgtaaccactccctggctactgcctatgttcgctcaaggccctgtagctctaaaatcagcaggtggcaaagccagctaggcatgtgtccttccctgtagggcagcraggtccctcaggccctgagtgggtccagaggtgctgtctgggagtcagggagtagagtcaaaaatcttagaagcctatctagtgttctgttgtattgcggccgatctggcactcaaaccaccagatgcaatccttcccactcctccctcttgtattagtctgttctcccactgctaataaagacatatctgagactgggtaattgttaaaggaaagagttttaatggactcacagttccacatggctgggtaggcctcacaatcatggtggaaggcaaaggagaaaaaaatatgtcttatgtggtgggaggcaagagagcatgtgcagaggaatggcctttttata

SEQ ID NO: 233574 - DNA, 470 bp, Homo sapiens
gccaggaaagcactgagtctctcccaaagcctgctgtaaccactccctggctactgcctatgttcgctcaaggccctgtagctctaaaatcagcaggtggcaaagccagctaggcatgtgtccttccctgtagggcagcaaggtccctcaggccctgagtgggtccagaggtgctgtctgggagtcaggragtagagtcaaaaatcttagaagcctatctagtgttctgttgtattgcggccgatctggcactcaaaccaccagatgcaatccttcccactcctccctcttgtattagtctgttctcccactgctaataaagacatatctgagactgggtaattgttaaaggaaagagttttaatggactcacagttccacatggctgggtaggcctcacaatcatggtggaaggcaaaggagaaaaaaatatgtcttatgtggtgggaggcaagagagcatgtgcagag

SEQ ID NO: 233575 - DNA, 466 bp, Homo sapiens
gaaagcactgagtctctcccaaagcctgctgtaaccactccctggctactgcctatgttcgctcaaggccctgtagctctaaaatcagcaggtggcaaagccagctaggcatgtgtccttccctgtagggcagcaaggtccctcaggccctgagtgggtccagaggtgctgtctgggagtcagggagtagagtcaaaaatcttagaagyctatctagtgttctgttgtattgcggccgatctggcactcaaaccaccagatgcaatccttcccactcctccctcttgtattagtctgttctcccactgctaataaagacatatctgagactgggtaattgttaaaggaaagagttttaatggactcacagttccacatggctgggtaggcctcacaatcatggtggaaggcaaaggagaaaaaaatatgtcttatgtggtgggaggcaagagagcatgtgcagagg

SEQ ID NO: 233576 - DNA, 502 bp, Homo sapiens
ggagctagggcctggaacaggggcctcacaactctgactggtgccctatcttgatgtggctgggatggtatccaagatgcaaggcaaagtcccccctactttccctctcctctcctcaagtggaaggaaggggtctcttttggagccatgagctgtgtatcccggggctaagggttgggtgatgctagtactcccttggctgccccagctggtatctcagtatgtmtcgtccccaacatccctgtccactgtccctgggtctagttcaacactaggacccacctaagagttgcagtccttatgtcctagacttcctttcaaatttacttggagacacagagcactgtagcccttggtggcagtggccaggtttgcaggcacttaagttggtaccattcccctctggctagggctggtttaaacactccctcaatgggtgggcatcagctgagtttgattgggttttcctttctcctctaacaggattgcactgcgttcaatg

SEQ ID NO: 233577 - DNA, 536 bp, Homo sapiens
gtgtcttttccagcttctttccatttttcctgtctccttctggtactccaatcaattgtaggtttggtctttttatgaagtaccacatttcgtgcaggctttgttaattcttttttgttcttttatctctattcttgtctgcatgtcttatttcagtaaggttgtcatcaaactctgatatcctttcttctgcttggttgatttggctgttgatacttgtgtataattcacwaagttcttatgctatgtttttcagctccatcaggtcatttatcttcttctctaaactggttactctagttagcaattcctctaacctcttctcaagattcttagcttctttgcattgtgttagaacatgctcctttagctcatcatggttttttattacccatcttctgaagcctactctgtcaattcatccatttgatcctctgtccagttctaggcccttgatagacagatgtggtgatcatgttgaggagaagaggcgctctgctcttttgggtttttagcattttttcattgattatttc

SEQ ID NO: 233578 - DNA, 599 bp, Homo sapiens
agatctatagtctcaccttccatgtgacaatctaatactcaatgaatgctcacctctattttagtccaattcttcctcccagcagcacagtgggacacttagcatagtagaaataatagtaataaaacctgggttctaccacttaataattgtatgaattcaggaaagtcattttacttgactcaactgtaaaatggggataacaaattcatcccagtctacttcacaaggcattaatattatttttctttttttgagacagcatctcactctrttgcccaggctggagtgcattggtgcaatcttggttccctgcaacctccaccgcccagttcaggcaattctcatgcctcagcctccagagtagctaggattacagtcacatgccatcatgcccagcaatttttttttttttttttaatgtagagattggaggatttcgccatgttggccaggctggtctcaaactcctggcctcaagtgatccacctgccttggcctcccaacatgctgggattacaggcattagccaccctacctggccttcacagggcattattaaggctcaatgaggtatttgagtttcctccctgtcagca

SEQ ID NO: 233579 - DNA, 608 bp, Homo sapiens
ccttccatgtgacaatctaatactcaatgaatgctcacctctattttagtccaattcttcctcccagcagcacagtgggacacttagcatagtagaaataatagtaataaaacctgggttctaccacttaataattgtatgaattcaggaaagtcattttacttgactcaactgtaaaatggggataacaaattcatcccagtctacttcacaaggcattaatattatttttctttttttgagacagcatctcactctattgcccaggctggagtgcattggtgcaatcttggttccctgcaacctccaccgcccagttcaggcaattctcatgcstcagcctccagagtagctaggattacagtcacatgccatcatgcccagcaatttttttttttttttttaatgtagagattggaggatttcgccatgttggccaggctggtctcaaactcctggcctcaagtgatccacctgccttggcctcccaacatgctgggattacaggcattagccaccctacctggccttcacagggcattattaaggctcaatgaggtatttgagtttcctccctgtcagcaagaccccattagacacaacaaaaa

SEQ ID NO: 233580 - DNA, 608 bp, Homo sapiens
ccttccatgtgacaatctaatactcaatgaatgctcacctctattttagtccaattcttcctcccagcagcacagtgggacacttagcatagtagaaataatagtaataaaacctgggttctaccacttaataattgtatgaattcaggaaagtcattttacttgactcaactgtaaaatggggataacaaattcatcccagtctacttcacaaggcattaatattatttttctttttttgagacagcatctcactctattgcccaggctggagtgcattggtgcaatcttggttccctgcaacctccaccgcccagttcaggcaattctcatgcctcagcctccagagtagctaggattacagtcacatgccatcatgcccagcaatttttttttttttttttaatgtagagattggaggatttygccatgttggccaggctggtctcaaactcctggcctcaagtgatccacctgccttggcctcccaacatgctgggattacaggcattagccaccctacctggccttcacagggcattattaaggctcaatgaggtatttgagtttcctccctgtcagcaagaccccattagacacaacaaaaa

SEQ ID NO: 233581 - DNA, 453 bp, Homo sapiens
gcctctggctggagttattggagatcctacagggaagccccacccactgaggaaggatgggtcagggttacacctgaacaggcactgtggccgcctactgccattgccggtgtgttgggctgtggggacaagtcttgggaccaagctgtgtagcctccctggctccacaraaatttttgtgtatttttggatttttagtagagacagggtttttccatttcggccaggctggtctggaactcctggcctcatgtgatccacctgcctcagcctcccaaaggctgagattacaggcatgagccactgtccctggctgccttgatttatcttgattgatcaactgatggatcaatcacttagccaacaggcattttcagagtgcctactatgaagtgttagccactatgctggatgctacaaaaacaaagataaaggacactgtactctctctca

SEQ ID NO: 233582 - DNA, 619 bp, Homo sapiens
tggtaagtccctggggtcagggatttatcccataccctcttatttttccaagaggttatttgactccaggaattccatccaacattaattcacctgatatcgaccactgtttcatgacaagggctggggactgatgaacgcaggtggacatacatggcttttacccacagaaagctaatggacaagagagggaaagaggaaaataacagtgtgtttaagtcattctcagttaattcaggaaagacttggcagggtggtaatgaaagtaagtttagaagggaaccacatttataatctattccagtgctttttaacattttacagcagaaactatttatcaaatgaaacacattcatcaaatgaaaygcaatgattggcattgtttatgtccacatagacacctgatatgtaacaacaaagtgggtctgctctggctggaggttcggaggagttgcaggagcaggacttcagtttctcagttcaccccacataccatcaaagctgtgccctggggaacatggcttgaaaactactaaatcactccccgctcctcccctcatcatgaaacatcatgaaactgttggagaaactgcgccctgagaggcaaaggtatcaacaa

SEQ ID NO: 233583 - DNA, 619 bp, Homo sapiens
tggtaagtccctggggtcagggatttatcccataccctcttatttttccaagaggttatttgactccaggaattccatccaacattaattcacctgatatcgaccactgtttcatgacaagggctggggactgatgaacgcaggtggacatacatggcttttacccacagaaagctaatggacaagagagggaaagaggaaaataacagtgtgtttaagtcattctcagttaattcaggaaagacttggcagggtggtaatgaaagtaagtttagaagggaaccacatttataatctattccagtgctttttaacattttacagcagaaactatttatcaaatgaaacacattcatcaaatgaaatgcaatgattggcattgtttatgtccacatagacacctgatatgtaacaacaaagtgggtctgctctggctggaggttcggaggagttgsaggagcaggacttcagtttctcagttcaccccacataccatcaaagctgtgccctggggaacatggcttgaaaactactaaatcactccccgctcctcccctcatcatgaaacatcatgaaactgttggagaaactgcgccctgagaggcaaaggtatcaacaa

SEQ ID NO: 233584 - DNA, 588 bp, Homo sapiens
ttacagcagaaactatttatcaaatgaaacacattcatcaaatgaaatgcaatgattggcattgtttatgtccacatagacacctgatatgtaacaacaaagtgggtctgctctggctggaggttcggaggagttgcaggagcaggacttyagtttctcagttcaccccacataccatcaaagctgtgccctggggaacatggcttgaaaactactaaatcactccccgctcctcccctcatcatgaaacatcatgaaactgttggagaaactgcgccctgagaggcaaaggtatcaacaaagtcagagagtgagctgaagtcaggagccagctcttaggtgccccattccaaggcttgtaaccacaccattgggaggaggaatttttttgttgatgtttatttgtttttgcattttttaagattttttacttggaaataattttagatttgcagaaactttgcaaagatggcacagagaattcccaaatactctttacctagcctcccctagtgttaatatctttcataaacatagtatatgtgtatgtactgagatattaacaagaaatgaactgctgagtgtctg

SEQ ID NO: 233585 - DNA, 588 bp, Homo sapiens
ttacagcagaaactatttatcaaatgaaacacattcatcaaatgaaatgcaatgattggcattgtttatgtccacatagacacctgatatgtaacaacaaagtgggtctgctctggctggaggttcggaggagttgcaggagcaggacttcagtttctcagttcaccccacataccatcaaagctgtgccctggggaacatggcttgaaaactactaaatcactccccgctcctcccctcatcatgaaacatcatgaaactgttggagaaactgcgccctgagaggcaaaggtatcaacaaagtcagagagtgagctgaagtcaggagccagctcttaggtgccccattccaaggcttgtaaccacaccattgggaggaggaatttttttgttgatgtttatttgtttttgcattttttaagattttttacttggaaataattttagatttgcagraactttgcaaagatggcacagagaattcccaaatactctttacctagcctcccctagtgttaatatctttcataaacatagtatatgtgtatgtactgagatattaacaagaaatgaactgctgagtgtctg

SEQ ID NO: 233586 - DNA, 540 bp, Homo sapiens
taaggagataaaaaataaataaataaataaataaaaaaagaaacagaatatcaaccacagtgttgggtgggaatattcagtattaggtaggagatgaaattaataaccacaaagtgtttttccatatccttacatttgagtaccgtatcttatggctctgcctaaccacaggaaaaacaaattgcagtcttgatcatgtgatggtaatggtgtggcctcctcctttctcccrtatacccacactctggtaccaccaaaaaaaattgatgatccctgctaatggtataaattttatcctctattcctgggtgaagtcctggaaattactaggctcagatttactcttttgtttatgtcgttctctgattcctaaatgatagaggccattaggataatgctgataaaaagaaagaaagagaattgaaataatacctttttaaaataaagagtattatcttccttgcccaataagtatagttttaaagatgcttcttaatagattctatcacagtctttggcaaaataattccaaagggacaa

SEQ ID NO: 233587 - DNA, 604 bp, Homo sapiens
ggtagcaggcttcagagaaaacagattgtatacgtttcttattagatctatggtctgtgctgatgttaatgctggttggtttttcccaaattcccaaagggaggagggcataatgaggtatgtctgacctccccttcccatcatggcctgaactagtttttcaggttaactttgaaatgcccttggccgagaggaggggtccattcagatggttgaggggggccttagaattttatttttggcttatacattggttgtatatactgaaagcagggatgagtgaatacatgcttttaatctttccaaccattcatgcttcagtacacacattttgcatctgagaaacctgagctacagagaggtgaagccccaggagctaaggggagcatttttgaggtcaggagcttacatggacaatttcatccaaagaaggctctcagagrtactgggagggtggaagggctgaaaagccttccgtcactggccacaataatatctgtgaaagagctatttttattattttgtatctaagaaaaagaagagtcagaaacttgaaatgtcttggccaaagttatatactgattctttcattcatttattctac

SEQ ID NO: 233588 - DNA, 429 bp, Homo sapiens
ccagaggaatgcaaatgcaagtacttgttttagctctgatcccagcatcaacaaggcacctgaccaaacctcgtatgcccctttgctgcttttactttctccaatgccagtgccttcagctggttttcttacgtacacaacctcaaaaacagaaaaatacacagagagataaaaagtataaagcacttcaaaccaccccaccaagagagccttctgaaaagtcaaactcagtacactgtttggcctggcctcattttaatctatttttcatgttaaaatatcaaggcatgaaagaaggaagcagagaaaggaaagaaagggataatatgaaaaatgctttatttgacaatgtgtcattcrgaaactgattatttctgtctctggcctttttaatattccctcactatggccaagccaccaggggatttg

SEQ ID NO: 233589 - DNA, 392 bp, Homo sapiens
ttctgttgcctataacagaatacttaagatagggaaatttataaagaaaatgaatttatttcttacagttagggaggataggaagtccagggttgaggggcacttctggtagaggccttcttcttggtggggactctgaagagttccaaagttggcacagagcatcacatggcaaggaacctgaatatgctagctcaggtttgtcttcctcttgttataaagctccaagttccactcccgtaataacccattaatccattaatccaagaaagaattmattcattcatgagggcagatccctcatgatccaatcatcttttgaagttcccacctttcaatactgccacattggggattaagtttccaacacttgaagtttgggggacacattt

SEQ ID NO: 233590 - DNA, 575 bp, Homo sapiens
ttacttttgtaatagttttggggtgccacaaatcatgctcatataaatggccagcaaacttgatgcataaatgctgtgtgtgttctgactgctccctcaacgggccrtttccccgtctctctccctctcctcaggcctcccttttccctaagacacaacaattgaaagcaggccaattaagaactcttcgctggcctctaagtgttcatataaaagagtcacatgtctctcactttaaataaaaaactagaaataattaagcttagtgagaaaggcatgttgaaagctgagacaggcctgaaagctggacctcttgtgccagttagcaaagttctgaattcaaaataaaagttttgaaggaaattacaagtgctacttcagtgaacatatgaacgatgagaagccaaaacagccttgttgatcatatggagaaattttagcggtctgaagagatcaaatcagccacctaatccagggcaattcctgacttcaagtctctgaaggctgagtgagatgaggaagctgctgaagagaaattgaggctagtagagagttggttcttgtcgtttaacaaa

SEQ ID NO: 233591 - DNA, 575 bp, Homo sapiens
ttacttttgtaatagttttggggtgccacaaatcatgctcatataaatggccagcaaacttgatgcataaatgctgtgtgtgttctgactgctccctcaacgggccatttccccgtctctctccctctcctcaggcctcccttttccctaagacacaacaattgaaagcaggccaattaagaactcttcgctggcctctaagtgttcatataaaagagtcacatgtctctcactttaaataaaaaactagaaataattaagcttagtgagaaaggcatgttgaaagctgagacaggcctgaaagctggacctcttgtgccagttagcaaagttctgaattcaaaataaaagttttgaaggaaattacaagtgctacttcagtgaacatatgaacgatgagaagccaaaacagccttgttgatcatatggagaaattttagcggtctgaagagatcaaatcagccacctaatccagggcaattcctgacttcaagtctctgaaggctgagtgagatgaggaagctgctgaagagaaattgargctagtagagagttggttcttgtcgtttaacaaa

SEQ ID NO: 233592 - DNA, 276 bp, Homo sapiens
agtcagcaataaacagagttgctggacttagggtgccccctaaagcacatacagcttagatcrcaacacccaagtcctttcaaatatctggaaagccatcccaagaaggatgggtacaaataagcccagacagtgaagactacagtaaatacctaactcttcagtgcccagacactgacgaatatccacaatcaccaagaccatccaggaaatcatgacctcgccaaatgaactgaataaggcaccaggaaccaatcctggagaaagagatacgtg

SEQ ID NO: 233593 - DNA, 581 bp, Homo sapiens
ctctggccatggcttcagtgggtacaagccctaagcctcagcagctctttcacatggtgttgagcctgcaagtgcacaaaagtcaagaattagggttggaaaaactcttcccagatttcagaagatgtatggaaactcctaaatgcccaagcagaagtttgcttcaagggcgtggccctcatggagaacctctgctagggcagtgctaaagggaaatgtggggttggagcccccacacagagtccctatgagggcactgcctagtggagctgtgagaagagggctattgtcctctagaccccagaatgatagatcgactgacagcttgcaccatgcacctgggaaagctgcactcaattccaaccccttaaaggcagctgagatggagcctgtgmcctgcaaagctacaagggtggagcttcccaaaagcatagggacccacctcttgcatcagcataacctggatgtgagacatggagtcaaaggagatcattttggacctttaagatttgactgccctgctggattttggacttgcatggggcctgtagcccctttgttttggccaatttctcccattc

SEQ ID NO: 233594 - DNA, 538 bp, Homo sapiens
ctatataaaccctagaagaaaacctaggatataccattttggacattrgccttggcaaagatttcatgatgaagtccccaagagcaattgcagcaagaacaaaaatagagaagttggactaattaaagtaaagagcttctgcaccaaaaatgtatctatctatcaacagagtactcagacaacctacagaatgacagaaaatatttacctacagaatgagagaaaatatttgcaagctatgcatctgataaaggtctaatatcctgaatctataaggatcttaaacaaaccaagaaacaaaaaacaaccccattcaccaatgggcaaaggacatgaaaaggaatttctcgaaagaagacatacatgcagccaacaagcatataaaaaatgctcattatctctgattaccacataactgcaaatcaaaataataataaaatatcatctcctatcagtcagaatgtctattattaaagagtcagagaatacagatattggtgaggttgcagagaaaaggaaatgctgatactgtgaatgg

SEQ ID NO: 233595 - DNA, 618 bp, Homo sapiens
tgatgtgtgcaaattctgagtcactttcatggaaaaaaattatgttycttctgtttattgtcattacttgaaaacctgacaaggaagctttggcatgcagacaagggccacaccctgagagatggaggagcaacaagttagcaataatctgggcacctagaagacctcatgaaacaaaaccacctacacacaatccatatccttttggtctgtgatgagagggaaataaacttctctaccatttgagattccacctctgagatgtctgttagagaagctaagcctatatcctatatcccatgtaatctacccactctgtgcagggcagttggtcccattgcagatatatttagcaactttcagttctgatgaatattgtcacatcctctctctagttgcagcagctccattagcacacaatgagccacagaaccagcaacccaagccagtaacagtggcagcacaactccaaacagtaataggagctctaaataactttacagccagagccagcagctccactagttcccaacagttgcttctgtcagcagtttcacaggatttttcaagtttgtttctttgccaccagatagctaagtgttatcttcttagcatcta

SEQ ID NO: 233596 - DNA, 611 bp, Homo sapiens
tgtgatgttgtctatgtaaattaggtgccacttactgctgagaatgtgaacaaagatgggatacgccataactaacaacacaaatatgtcttcaagatttttttttaaaaaactatagtctataaaagggataagtagggtaatttgaaatgaagtgcartttttcattagatgatgatgtctttggatccactgaggtggtcagggaagattctgttttacttacaggaattttcatttttaaaatttaaaagctccctgtctttctttctcctactccctctttctctcctggcaacaataggtcaagtctgtttggctgtatcataattattttcataagtttaactaccctgaggttgcttgaggttgtttcatattcactctttcttcagctgctgcccaaattcttatcattgcacagtgtaaatatacacaaatgaggagttcagtaacaataaatcaagtaccatacataaataaatggaaacactgtaagagtaatagtccagcatatgtaggaataagtagaaaatgatagtggatattcagaaaaaaatttgaattgcggattgttctaaattcattgcaaattaacatctgagacgctg

SEQ ID NO: 233597 - DNA, 603 bp, Homo sapiens
gaaatatgatgggtaattaatactattccattcaaagtttcaattttgatagagaagcaggcaacttacagtcaaggttattctttgtgtgtcaaagaattattgagaggggcaataatgtgtgtcaaataataatctgcattttgccatccctgaattagtctttccccatctctyagtaagtaaaaattacttattgatggtcagggaaggtttcatcttcatttcaccctaggagttctggactggcatatacatgtcttcacttcttaaaatcgacagaatttgagtagcttgtgttcactgaattctcagcaacgtgtgactcaccttgcaccaacttcgtaccaggaattatttagaaaaagctttctactgaactcatcattttttcctgatgtagaatatatatacacaatgtgaacaaaataacacagcagaccctcttgttgtgaattaaaaacagaatatttataaacttaacaaaaagataggtagatttttaaatgtcatgaacaactttaaaatgttacttataaaatctgaaatttaaaatgtttatatataatatgattagtcttaatattaaatggattttatgat

SEQ ID NO: 233598 - DNA, 591 bp, Homo sapiens
tcaggtcttcaactgtttgaatgaggcccatgcacattatggagggcaatgtactttattcgaagtccatgaaatttaaatgttcatctcatccaaaatacccttacaaaggcaaccaaagtaagatttggtcacacatgtggacaacctgtgacccagccaagttgacacataaaattaactatcacaacatccaaactcctcttttcataattttcttagattgaattaaaattatttmatgtctttcttcacagataatgagctccttataataagttttctcaactttttcactgttgtcattttacactagataattattgtgagaggctgttctgttcattgcagcaggttgacagtatcatagtctttacctactccatgccagtagcatcttctgtccttcagttacagggataaaaaatgtccccagacactgttcaaaagtgctcttgggcaaattgaccccatcaagagccaccacttgaataggggttctgggttttcatcttggaatgataagccctgaacataggagtgaaatgttgaaatatttgctatagtaatcaatatatcagtaaatgaatg

SEQ ID NO: 233599 - DNA, 618 bp, Homo sapiens
gcttattttggtgaccataggcaagttttatacttttcaaatgtcaaaggtgttaattaattttactctttccaagatagaaaataatgcttacggaaggttcattgcttgttacaaattaatgctacataggaattaataccaggaaaaatgaatacacataagggaaagaaaagcttgattaactacacagatggatatgtggagcacagagatgaaatgagggtttaggagttaccactgcactaagagttgccctttccccttatgcttacaacgttagcacagacaaagccttctcttgaattattttaccttagcaaattactactttcaattgtatatgcaaagcttgcttattgctttctgttctgtctgcacatctttgcattctgttcttgttctgtcccgcaggattagtagccaggttattctytcagtcaaatcatgaccctagtgtaggtttgttaccatcatgttaaacagccttcatgtcacggtatgaaaaattcttgatccaaactttgcttttcactcatgctagttgtcatatgaaaaataccttcagctgcaaataagaaaaaaacctgtaacagtagcttaaacaaataatgagtt

SEQ ID NO: 233600 - DNA, 432 bp, Homo sapiens
ataggatttctggtcaaaataaattcatggataattataaaggtaagtattgcttcaacttaggtttataatttcatctttttttacattatttaaaatactaatgcataagaactattataagtaattttatgatatcaataactgaaaaatgttataaagaagctatattgaaacagggctttagtattttattgaaactaagctgatatgagttcaaattaaattgttataacttaaatatcycatggtaactacaaagaaagtagctatagaatataaataaaggaaatgaaaagggaattaaaaagttttagtacaaaaagtcagctaaatgcaaaagaaagtaatatgcagaagaaagctgggtagggggaatcccaatgggacatatagaaaacaaataacataatgatagaagtaaggcacttc

SEQ ID NO: 233601 - DNA, 395 bp, Homo sapiens
cctttacaagtgattgtgacaataaatgtttttaaataacaggataagaaaatcatgtttatgtttttagtaccacaattagtttttaagagatctttgwaaaaaaaaacttagtctattgggatctgattaaaaacatatgcaggatacgttatgaaaatgggctatatatatcttagaactgctctgaatataggctatgtcatttaatagttctatggtcaatgagcctcattttttatcatttaaatagggagaatcaaacttaatatcagcatggctttaatacttatattaaattatgtatgtatgttaaagcactgagttaggctgcaccatttttcacaaatatttgtgattcatcactgaagatgaattatgtttccccaactcaa

SEQ ID NO: 233602 - DNA, 599 bp, Homo sapiens
tagaggtactctgccctttgtcttccttgtggtactcctagcacaatccatgcaaggactcaagctctagaaaaatgaaactcagaaatgaaaatattttgaaataaattctgctttttgaacagcaaaattctstaagacaatgagttataaaatgtcttataacatgggtgatataggtaatacacaaaattaatatattaatagattaccctatagatgtttatctgattcttagagaaattagttaaaattatgttcaaataatttttgagcacttattttcttccagagtctgaattttatgctttcaagtgctacctttataggtttttattaatttttttcttcccattcccataattatttaagcttctttctgataatcctttggtttccagcaagaaatctgagataatatcttaagatggggttgtgcaaaattgcattatggaggtcataatggtcaaatttaaactccacatcttatatttttaggtacgggtaattgaatataaatataaaatatgacatttgtcttgctgctttaaaagttagaggtaggtcattttattgattttagtaaaatttagttgttt

SEQ ID NO: 233603 - DNA, 555 bp, Homo sapiens
atgatttgtctatatgatttgttatgattatatgaataaatattacctattattatctgttgtcatctcctctcagttcacaaaatttatacttcgcaaattttgttattaatatttcctaatttattaattagctgaagtagaccttattgtggaattttcgtttgatttgatacctttaatggactgaacctttcagcatatttgtatactaaattatctttatctggttccagtatcacaaccacagcatttgattaatacaccttagctttttcttttttyaaaatttaagtagatgagttgtcaccatttatatttgttgttatactgtactattttgctttaattgtgcagttctttatacttgtataaatttaaggggcaaaagtgcaattttgttacttgaatatattgcatagtggtgaagtctgggcttttagagtgttcatcactgaataatgtacattgtactcattaagtattaagctcccacttttaggtgagaacatgtggtatttgtttttctgtttctgagttgcttcacttaagata

SEQ ID NO: 233604 - DNA, 474 bp, Homo sapiens
attatatcaaaatatgtataggtctcgcatactgaaaattagaatacgctgatgaaagaagtcaaggaagatgtaaacaaatggaaagatgtacagtgttcatggattggaaggctcaaaataataaagatgtcaaatatcttccaattcataaacaggtttactacaatacctataaaatctcagcaagagttttttgtagatatagacaagattgtttaartttatatggaaaatcaaatgattcaaatagctaaaacaattttgaaaaaataaagtgagataaatagtttagccaatatccagatttattatatatctatagctatcaagattctagttgtattggcagataaatagacaggtagatcaaaagaaatagcaaactcagaaataactccacttattctgagtggagtatctgatttttgttaaatgtgcaaaagcaatttcttagaatattgaaagccattt

SEQ ID NO: 233605 - DNA, 632 bp, Homo sapiens
cccttagggcagggagcgctcactctcattcttacttacactgtaagggggtttatcattgtattttctgattaggatgccctacagaacaggacatcgagttctctgatgggtattttttttgcataggattggtggaagagactattcctttccccctttatttgtaatgttttcctctgtactgcacctccatacttcttccaccatccttaaccacaagatgggcacaggatccagctgggatcattgttgaacctcaagccctgtacacagtgattggtccaggggtgggttcacgatcgatattagctaatcagagaaattccttgggaatttttttattttaaaactgyggacgtcagcctaaaactgctggcagccatgcttctgtttggttcaagctggcctgagaagaactaatctgatccagggaaaacagggatgaaagacagagagcatttgatcgtgttaacttccctgggtccagctgtcccctaaccccagccttaccctgactggtacacagacaaacgtattcccactttggccctaaatcaacttaggtttctgatccttacaacccaacattctaacaggaccgggattttgtttttttttctgggtttttt

SEQ ID NO: 233606 - DNA, 632 bp, Homo sapiens
cccttagggcagggagcgctcactctcattcttacttacactgtaagggggtttatcattgtattttctgattaggatgccctacagaacaggacatcgagttctctgatgggtattttttttgcataggattggtggaagagactattcctttccccctttatttgtaatgttttcctctgtactgcacctccatacttcttccaccatccttaaccacaagatgggcacaggatccagctgggatcattgttgaacctcaagccctgtacacagtgattggtccaggggtgggttcacgatcgatattagctaatcagagaaattccttgggaatttttttattttaaaactgcggacgtcagcctaaaactgctggcagccatgcttctgtttggttcaagctggcctgagaagaactaatctgatccagggaaaacagggatgaaagacagagagcatttgatcrtgttaacttccctgggtccagctgtcccctaaccccagccttaccctgactggtacacagacaaacgtattcccactttggccctaaatcaacttaggtttctgatccttacaacccaacattctaacaggaccgggattttgtttttttttctgggtttttt

SEQ ID NO: 233607 - DNA, 632 bp, Homo sapiens
cccttagggcagggagcgctcactctcattcttacttacactgtaagggggtttatcattgtattttctgattaggatgccctacagaacaggacatcgagttctctgatgggtattttttttgcataggattggtggaagagactattcctttccccctttatttgtaatgttttcctctgtactgcacctccatacttcttccaccatccttaaccacaagatgggcacaggatccagctgggatcattgttgaacctcaagccctgtacacagtgattggtccaggggtgggttcacgatcgatattagctaatcagagaaattccttgggaatttttttattttaaaactgcggacgtcagcctaaaactgctggcagccatgcttctgtttggttcaagctggcctgagaagaactaatctgatccagggaaaacagggatgaaagacagagagcatttgatcgtgttaacttccctgggtccagctgtcccctaaccccarccttaccctgactggtacacagacaaacgtattcccactttggccctaaatcaacttaggtttctgatccttacaacccaacattctaacaggaccgggattttgtttttttttctgggtttttt

SEQ ID NO: 233608 - DNA, 486 bp, Homo sapiens
gtcccagcactttgggaggctgaagtgggaagatcacttgagcctagagattcgagaccagcctrggcaataaagtgagggctcatctttacaagaaaataaaaaacttagccagggtgtggtggtgcatgcctgtggtcccagctacgcaggaagctgaggcgggaggattgcttgagcccagaaggttgaggctgcagtgagccatgtttgcgccactgcactccggcctgggagacagagccagaccctgtcgcaaaagaaaaaacaaaaagagagttcatagaagggttcaaatgagaggtataaactagaggtttagaagggttcaaatgagaggtataaactagaagtttgataaatttgaagagtcaggacatttaatcttcaaagtaatccaatgagctgttaatattccagttttactgctgaaaaaaacggagttggagagaagtaaagtgcctggactaggctcagcagccccca

SEQ ID NO: 233609 - DNA, 486 bp, Homo sapiens
gtcccagcactttgggaggctgaagtgggaagatcacttgagcctagagattcgagaccagcctaggcaataaagtgagggctcatctttacaagaaaataaaaaacttagccagggtgtggtggtgcatgyctgtggtcccagctacgcaggaagctgaggcgggaggattgcttgagcccagaaggttgaggctgcagtgagccatgtttgcgccactgcactccggcctgggagacagagccagaccctgtcgcaaaagaaaaaacaaaaagagagttcatagaagggttcaaatgagaggtataaactagaggtttagaagggttcaaatgagaggtataaactagaagtttgataaatttgaagagtcaggacatttaatcttcaaagtaatccaatgagctgttaatattccagttttactgctgaaaaaaacggagttggagagaagtaaagtgcctggactaggctcagcagccccca

SEQ ID NO: 233610 - DNA, 486 bp, Homo sapiens
gtcccagcactttgggaggctgaagtgggaagatcacttgagcctagagattcgagaccagcctaggcaataaagtgagggctcatctttacaagaaaataaaaaacttagccagggtgtggtggtgcatgcctgtggtcccagctacgcaggaagctgaggcgggaggattgcttgagcccagaaggttgaggctgcagtgagccatgtttgcgccactgcactccggcctgggagacrgagccagaccctgtcgcaaaagaaaaaacaaaaagagagttcatagaagggttcaaatgagaggtataaactagaggtttagaagggttcaaatgagaggtataaactagaagtttgataaatttgaagagtcaggacatttaatcttcaaagtaatccaatgagctgttaatattccagttttactgctgaaaaaaacggagttggagagaagtaaagtgcctggactaggctcagcagccccca

SEQ ID NO: 233611 - DNA, 565 bp, Homo sapiens
gaccaagatgcccttcagtaagtgaatgtataaactgtggtacatccagataatggaatattattcagcactgaaaagaaatgagctagtcatgaaagaacatggaagaaccatcaaggtggttgccaggggctagggaggagagagggatgaacaggcagggcacacaggactggtgctcccagggtggtgaaactactctgtwtgagactgtgatggtagatacatgtcattatacattcatccaaagccatggaatctacagctccaagactgaaccctaatgtaaactatggactttgggtaataatgatgtgtcaatatatgtttattgattgcaacaaacagaccattctgttgaaagatcttggtagtcgggaggctgtgcgtgtggggcaggaggtatatgggaaatctctgtgctttctgcgtaattttgctgtgaaccttaaactgctctataaaatggtattatgaaacagcaacaacattcaaaccaaagtgaggagacacagcactgcattctactcatgacatctagtaaagtgtcttttgacctatagta

SEQ ID NO: 233612 - DNA, 652 bp, Homo sapiens
gtggaccatggttctcagtaagcctgygtttgggcatcgattagactttcttattgctcacacagtctggatcctactggtgcagggtgatggtggggtggtctttattttttgcaatttctctaggcacaaatcttttttcttcttttctgttttcttttctttccttttttttttttttttttttgagatggcggcgtttcactctgttgcccaggctggagtgcagtggcacatctcagctcactgcaacctctgcctctcctgggttcaagcgattctcatgcctcagcctcccaagtagctgggatcacaggtgtgcatcaccacaccaggctaattttttctatttttagtagagatgggttttgctatgttggccagattggtctcgaactcctgacctcaaatgatctgcccacctcagcctcccaaagtgttgagattacaggcatgagccactgcgcccagcccacagatctctttctttatagaagatgaagaaagggactttttatcctataagggtacttagctgatgaattctagaatgagttcaagcgtggctaaaaaatgcttgaagataatttcgggttctctgcagcccagtgtttcatttaccttccaaacagaaagctcctcctccctgcac

SEQ ID NO: 233613 - DNA, 556 bp, Homo sapiens
aatcaacaagtcaaaggaatgtctttaatggggatgctgcctgtattcatctgttttgacgctgctgataaagacatatccaagattcagtaattattttattttattgtatttcattttattttatttttttgagacagagtttcactcttgttgcccaggctggagcgcaatggcacaatctcggctcactgcaacctctgcctcctgggttcaagcaattctcctgcctcagcctcccaagtagctgggactacaggcatgcgccaccacgtctggctaattttttgtatttagtagagatgtggtttcactatgtttgtcaggctagtcttgaactcctgacctcaggtgatctgcccaccttggcctcccaaagtgctgggattacagttgtgagccactgtgcctggccaactgagtaatttataaacaaaaagagatttaaatggactcatarttccacatggctggggaggcctcacagtcacagcagaaggcaaaaggcacgccttacatggtggcaggcaaaaggaaaaaatgagaatcaagcaaa

SEQ ID NO: 233614 - DNA, 469 bp, Homo sapiens
caaaaccacatatttatagccaactgaccattgacaaagctgacaagaacatacattatgaaaagatctcctttttaattttaataaatagtgctatcaaaatggtattgccatatgcagaaaaatgaaattagacctgtrtctgtcattatttacaaaaattaactcaaggtgaattaaagtcttaaatataataatgaaagctataaaagtacaagaagaaaacctaggcaaagctcttctggacattagcctaggcaaagaatttatgactaaaaccttaaaagcacagacaataaaaacaaaagaaacaaatggaacataattaaactaaaaacttctgcacagcaaaagatataatcaacagagggagcagacaacatgcaaaatagaagaaaatatttgcaaactatgcatccaacaagaaactgatacacataatttacaaagctctcaaacaactacaaaa

SEQ ID NO: 233615 - DNA, 469 bp, Homo sapiens
caaaaccacatatttatagccaactgaccattgacaaagctgacaagaacatacattatgaaaagatctcctttttaattttaataaatagtgctatcaaaatggtattgccatatgcagaaaaatgaaattagacctgtatctgtcattatttacaaaaattaactcaaggtgaattaaagtcttaaatataataatgaaagctataaaagtacaagaagaaaacctaggmaaagctcttctggacattagcctaggcaaagaatttatgactaaaaccttaaaagcacagacaataaaaacaaaagaaacaaatggaacataattaaactaaaaacttctgcacagcaaaagatataatcaacagagggagcagacaacatgcaaaatagaagaaaatatttgcaaactatgcatccaacaagaaactgatacacataatttacaaagctctcaaacaactacaaaa

SEQ ID NO: 233616 - DNA, 589 bp, Homo sapiens
ttaatcccattaaaaagtgggcaaaagacatgaatagacatttttcaaaagaagacatacaaatggtcagaaggtgtatgaaaaaattcccagcatcactaattatcagagaaatgcaaaccaaaaccacagtgtattatcatcttagcccagtgagaatggctattacttttttaacttttattttaggtttgcaatacatgtgaagctttgttgcacaggtaaactcacgtcatggtggtttgttatacagactattttagcacctgagtattaagcccagtacccaatagtcatattttctgctcctctcccttctcccaccctctaccctcaagtaaaccacagtatctgttgtttccttctttgtgttcatgrgttattatctagctcccacttataagtgagaacatgtggtatttggttttctgatcctgacttagtttgctaaggataatagcctccagctccaaccatgttcccacacaaaaaaaattctttcttttttatggctgcatagtattccatggtgtgtatatactacattttcttcatcaaatctgtcattgatgggcatttaggttgattc

SEQ ID NO: 233617 - DNA, 495 bp, Homo sapiens
ggagataccagttagggcaargggacactattcaactttgttgagtctcaaagctgtcttcttttcttagttctcacaaaataatagtatttacttaaaaatagaaggtttctaaatttaaacacaaaataaaaatatccttttacataggtaaaccaaaatctacaagtctgaacattgaggtttacaataagagacaggaaataggaattcagtatatgaaatacatgaaggcttggtcaggcaggaagaagtagaaaggcatatacaaaaaaaagtggaagaagaaagagatatgcaaaagttgaatgcttagagagaaggatgccataaggaagaatttaagtaccttggagctaatggcctgttttgcaggtttagcctagaagagtctgtaagaccatcagagaaaatcccacatccagcaccaaaccatatctaccaagcctagggataatttgcatagtatggccaaaggagaggatccagactgat

SEQ ID NO: 233618 - DNA, 495 bp, Homo sapiens
ggagataccagttagggcaaagggacactattcaactttgttgagtctcaaagctgtcttcttttcttagttctcacaaaataatagtwtttacttaaaaatagaaggtttctaaatttaaacacaaaataaaaatatccttttacataggtaaaccaaaatctacaagtctgaacattgaggtttacaataagagacaggaaataggaattcagtatatgaaatacatgaaggcttggtcaggcaggaagaagtagaaaggcatatacaaaaaaaagtggaagaagaaagagatatgcaaaagttgaatgcttagagagaaggatgccataaggaagaatttaagtaccttggagctaatggcctgttttgcaggtttagcctagaagagtctgtaagaccatcagagaaaatcccacatccagcaccaaaccatatctaccaagcctagggataatttgcatagtatggccaaaggagaggatccagactgat

SEQ ID NO: 233619 - DNA, 608 bp, Homo sapiens
gatgaggcccattttggtcctttcaggctgctataacaaatgttcttaatctacttaatttataaataacagaaatttattgctcacagttctggaggctgtgaagtccaaaatcaagacactagcagattgatgtctggtaagaaatagccctctctgcttctaagattgttccttcttrctatgtactcatatgacagaagggatgaacaagaaaccatgggtcttttttctaagggaattcatcccattcatgagggctccatccatgtggcttaatcaccttccaaagacctcatttcttaatactactgcattaggaattaggttttaacatatgaattttgggggacacaaacattcagacaataacaaggctcaagccggcttgaaagtggcttgaggttgttgagacagggagttctgggtatgcatatataatcttgaaggatgtaggttctgattgatacctccctttggccttgtggaatccttgccccatagacagctgaaggagtatcagagtggaacttgccaaaagctccttgcttagttctaagagtgtgtgttggttaattttatatgtcaacttgactgggctaaggaat

SEQ ID NO: 233620 - DNA, 586 bp, Homo sapiens
tccaacattaacccaaaagtccaagtccaaagacttatctgagacaaggcaagttcattttacctatgatcctgtaaaatcaaaagcaagttagttacttctagatacaatgtgggtacaggcattgggtaaatgttcccattccaaatgagagaaattggccaaaacaaaggggccacagacctcatgcaagtctgaaatccagaaggcagtcattaagccctaaagctctgaaattatctcctttgactatatgtctcaaatctggggcacactgatgcaaggggtggactcccatgrccttcggcaggtccctcacgggctgttgagtgcctgtggcttttccaaatatacagtgtaaggtgtcagtggatctacctttctggggtctggaggacagtggccctcttcttacagttccactaggcagtgtcccagtggggaccctgtgtgggggctccaatgccacatttcccttccaaactgccctagcagaggtcctcaatgagggctccacccctgcagcagacttctgcctggacatcaagtgtttccatacatcctttaaaatccaggcagagcttcc

SEQ ID NO: 233621 - DNA, 528 bp, Homo sapiens
gtaagctttctttttctagaggtattcagacacttgggtgcaggtgtggagtatgtgggattaattagggtcaaagctttgtcaggtaagaaaaggaagaaagaaagggctggaggagttaacggcttttgcaaggaaatgattttagcggtgaacaaaaatataaggtgggtaagggaatgctttatagtgaaaaagggatggtgttcctggactgaaaattttattaagatcaaagaagagcttctgtgcaaagactagaagtgataggacatgggcgggctagagaataaggttctggaatttgggattttggaggtagtatagttgttaaagacaagaatcaaagtattaccatgggagtgagtggatggttgagatagagtggtaaatygatcattggaaggaagaatcattggaggttgagaaactgagagtcaagttgttaggtggatcatcactgaatgttgacaacatacttatgttgataggagtattggtacaagtagactataagacaggtgctag

SEQ ID NO: 233622 - DNA, 596 bp, Homo sapiens
aactactgtcaatgtttaagattcagcagaacttggtactgtttttagatccaagagtcaaagccctgtaacttatcaccacaaggactttaaaagttacatatatgtaataatcttactttaaaaaattttaatttcaattttcrtaaacaaaccaaaacaatcacaattacacaggaattattttgataaaacataaaatccgtttgttaggtcagttaccaaaaggcaaaaaagtccttctgaaatatgattggttttccctatgaggagtccatttagataacttggaagtcaaaactaatgaaaatagtacttgaattagttagacataggaagaatgtactctgggtcataagtgaaatttttcagttttatagaaaagttgaaagccaaagcacagaattttatattggaagaaaacattttctttagacttttaatgtaaaacatttttagcatcaggcaacaacagcagttggaacctgaggaaaaaagttacaacagctgatgaagaagttgaagaaagaggtattacttcaggccttctcaaaggggacataaagctgaaaacagtgaggcacaataaaagttga

SEQ ID NO: 233623 - DNA, 264 bp, Homo sapiens
tacaagtgcaccagtaatctcagttctcagtggcagttgttctgcctggctgcatctagtcagccatattgttctgtcctctgtcagttctaatagctttttggtggagtctttgggttttttcaaatagaagatcatatcatctgcaaacaaggataatttgacttccttctttacaatgtgaatgcactttatttctttattttgtctgttgctttagctaggacttycagtactatgttgaataacagtgttgaaagtggg

SEQ ID NO: 233624 - DNA, 599 bp, Homo sapiens
ggctactcataaaaatcactaatgatcccttgaatttctgtggtatcagatacaatgtctcttttttatttctgatttaatttatttggatcttgtctctctttttcttagtctatctaaaggcttatcaattttgttttatattttcaaaaaaatggctttttggttcattgatctttgtattgtttgcttcatttcaattttatttatttctgctgtcatattattttttctgctaattttaggtttggttcttttattgttttttaagatgcatcattaggttacttatttgtagtgttttttttkatataggttgcttattgctataaacttccctcttggtgctgcttttgctgtactaatctcacaggttttggtatgctgtgtttccaccatcatttctttcaagaaattttaaaatctcctttttaatttcttcattgacccactgttcattcaggagcatgttgtttaatttctatgtgtttgtatagtttctaacattcctcttgctattaatgtctagtttattccattgtggtcagaagatacttgatattatttcttttcttttattaagacttgttttgtgatct

SEQ ID NO: 233625 - DNA, 544 bp, Homo sapiens
agcttcttcttatttttgaatttactttttttgggaaggagactttttttcttaaacttgtgactatagggtttgtttggtggaagtctttgatttttcttctgagtgcatacagtggtgaagagtctgtatgatttcttaggctataaatagtgttagtccaatctgtgttttcctttatgtgttacagtatatttgtttgtggggctgtggtaaaattatcagggactggaatgctagatgtgtccatcttcaggttttagtggtaggagtggtgggttaatgtgtttatcyttactacctggagcagcatatgctggcatgtgtgtttgcaattcaagcaggctgtggttgggcctctggatgactttctctgatgtcagttgttagcagtatatgggatgggacagcagaaaatcaaccataggcttctgagcagcctgtttatgggcaatggcagtagcagtgattgtgatgtgttcctcaaagtcttgagtgctgtgctcttgtgttagcagcagtgattgcaatggactgtatgagt

SEQ ID NO: 233626 - DNA, 356 bp, Homo sapiens
cacatataacataagtgagatatctagaaatattaaacatttgaaagatatattgcacagcctcctgacttgttaaattatgatcccacagaacagaatatgatgacctccacaggaaaattgatgcactgatgtctacttaacacaratatatttataaagagtaaataatgtgataaccagtaataccattttattaatttgttattacacagagtagaaatattgtactgctttttttcaatttttaatctacctgttaacatgtctgaaaatcagatatgtctgaaaatcaatggcaggtcgtgaattaattggtaatattttccttaaaaatataaagaatagaagcttat

SEQ ID NO: 233627 - DNA, 595 bp, Homo sapiens
taggctgtgaatatttatctattactttgaaattatgtatttttgtaggaaaataatatgttaatgatgttgaagatagaaattttcacaattatatttgggatttttcccttcatacttgctgtttattgggaataccatattatttgaaatagcaaatgccgaaggtaatgcagaatttctgaactccacctatgacttctaattattaagatatacctaatgcctttagggttttgatcattttataatactcaaaattaagaagtagatagcttttcattcagaattttggattcctgagagagaaagcctggaattaaatcttgtctttttcactaggaatgtaaacatagataatattattatatatcgtttctctatttccctaactacttcaaagcattgctatgaaaactaaatgagttaataattttaacatgcgacygggcgcagttgctcacacctgtaattccagcactttgggaggccaaggcaggtggatcacctgaggagaggagttcgagaccagcctggccaacatggtgaaaccccgtctctactaaaaatacaaaaattagcaggttttcgtggt

SEQ ID NO: 233628 - DNA, 652 bp, Homo sapiens
agatcagaaagataatagtggcccatctaccgacagcctgactggaagtctaagctgctyttagaaaaagtggccaaagtaaatcaatattatataaagcagatgcagggtaaattagcaagaatggcacatataggagactaaactcagcataaaataacatgctataattgccagcgtgaagcaaagagtgcggtagcaataccagcctcagtatgaggcataaaattattctaaagttactagacaattatgttacaattattaataacagcttaatatttggaaatgttaagcaattatcccctgatttcttctttacctgttgacttttctcccaaatatgtcagttattctccaagatattcattgccactagaaagagggattatggtaagcgagcagttaaaacaataacaacaacaagaaagaaaaaccttgaatttccaaagtttagttcacaatattactcagtacaaaagaaaaaaaatacctgaaacctctaaaacagaccaaccactcttgcaacaagatagaatcacagtgggataattagacaagaaggatgcaaggaattattaggtgttggcatctgagagaaattagattatacctggctttactgagctcctctaaagctagcatagcaaag

SEQ ID NO: 233629 - DNA, 652 bp, Homo sapiens
agatcagaaagataatagtggcccatctaccgacagcctgactggaagtctaagctgctcttagaaaaagtggccaaagtaaatcaatattatataaagcagatgcagggtaaattagcaagaatggcacatataggagactaaactcagcataaaataacatgctataattgccagcgtgaagcaaagagtgcggtagcaataccagcctcagtatgaggcataaaattattctaaagttactagacaattatgttacaattattaataacagcttaatatttggaaatgttaagcaattatcccctgatttcttctttacctgttgacttttctcccaaatatgtcagttattctccaagatattcattgccactagaaagagggattatggtaagcgagcagttaaaacaataacaacaacaagaaagaaaaacmttgaatttccaaagtttagttcacaatattactcagtacaaaagaaaaaaaatacctgaaacctctaaaacagaccaaccactcttgcaacaagatagaatcacagtgggataattagacaagaaggatgcaaggaattattaggtgttggcatctgagagaaattagattatacctggctttactgagctcctctaaagctagcatagcaaag

SEQ ID NO: 233630 - DNA, 607 bp, Homo sapiens
gcattttaaacctgttattaactctttcttcttgtcccaaagttgaacatgtctctataacctctctcttgagttccaagttcactttatcagctgctgatctatgctgccttgtgaacatcaaaaacagtttgtcataatatatatacatatctgaaaaaatcctataaatctagcttaaaatattgaaatcatataaagtctattgtctgagcataattgaattaaactagaaatcagtaaataatgacatctagaaaatcacaaattatttggaaaaaatacaacagatctttgaataatacattggtcaaataatgcattggtcaaaatttctaacttaatttagaagttagaaaatattttgagctggacacaatgaaagcacatcgtataaaaatttgtggtatgttaccaaggcagtgctaggaagaaactctatascatttgtgtaagtcagtactagatgctacagtaaaaaaaccatagcttgggttacttaacagaaatttatttgtcataatggtagaggctgggaagtcaagagatcagggtagcagtgtggtggagtttggatgagaatcatctttctgcttgtcaaatagcc

SEQ ID NO: 233631 - DNA, 421 bp, Homo sapiens
aaattgaacaaaagaaaaacaacagagaaaaccagctaaagaaaaatctggtttacagtaaaagaatcaataaaattgacagctttttccmaaatgaccaagaacaaatatatatagagagagagaaaagaagagaacagaaagtaccaaggtaatgaaagaaaaatatcactgctggcccaatataaataaaaaataaaataatggcatttctcaagtaaatctctgtccataaatatgacaacttatgattgaacacattgtttgaaagatgctatttatcaaaatttataaataattaagcacaccaataatatatccacaaaagaaattaaatttgcaattaaaacattgcaataacaacaaaaaatcttcaggcctaggtagattcacagaaaaattttggaaagtatgtacagaa

SEQ ID NO: 233632 - DNA, 457 bp, Homo sapiens
tagcagcattacattattatattagaaaaaaagaaatgtcttaaatcaagaatctaatcttctatcttaagacaataaaaaatatggaaaattaaaacaaaattaataaggaaaaaagtatcaagataaaaaatataaatgaaattgaacaaaagaaaaacaacagagaaaaccagctaaagaaaaatctggtttacagtaaaagaatcaataaaattgacagctttttcccaaatgaccaagaacaaatatatakagagagagagaaaagaagagaacagaaagtaccaaggtaatgaaagaaaaatatcactgctggcccaatataaataaaaaataaaataatggcatttctcaagtaaatctctgtccataaatatgacaacttatgattgaacacattgtttgaaagatgctatttatcaaaatttataaataattaagcacaccaataata

SEQ ID NO: 233633 - DNA, 544 bp, Homo sapiens
aaaaaagccatggcatacacagcttcattctacaggaccaaaaatgaaagtctctactttactttctccccttgtcatctcctgtaatctgtgtacgctgattctgctcctttctccttatatttctaggtctctgatatagttccttagaagagtatccattattaactaaacttctctatctacataaccaggatagctcttttctcaatctttctcacatttccagagtactacttttaaagaatatgcatatatatcactttacctctcagtgggacatcatttgatctagtcttaggaactttagatattctctcaagraaagggctctgtatcttctatggccaaatcataaatcttagtattctccttaaagtaatactcaccccaccccccatcaagaactggagtttctgttcttagagctgctttacagtaacacagaaaatcagtgctgtttggtaagtatattagtctgttctcacattgctataaaaacctacctgagactgggtaatttataaagaagaaaagtttaatt

SEQ ID NO: 233634 - DNA, 519 bp, Homo sapiens
tccagtctctctactaagagtgacctttgttccggttcccaataagttccacatctccatctgagaccaccacagcctggcttcgctgtccatatcactaacggcactttgatcacaaccattcaacaagtctctaggagggtccaaactttcccttatcttcctgtcttcttttgagccctccaactgttctaacctctgcctgttatccagctccaaagctgcttccacattttcaratatcattatagcaatgcctcacttctctggtaccaattttctgtattagtccatcctcatattactttaaagaactacctgagactgtgtaattaataaagaaaggaggttgaattgattcacagttccgcaggctgtacaggaggcatgactggggaggccttagtaacctgataatcatggtggaaggcaaaggggaagcaagcatatcttcacatggtggcagagagagagagagagagagaaagagaaagaaaagtgctacacacttaaaaacag

SEQ ID NO: 233635 - DNA, 519 bp, Homo sapiens
tccagtctctctactaagagtgacctttgttccggttcccaataagttccacatctccatctgagaccaccacagcctggcttcgctgtccatatcactaacggcactttgatcacaaccattcaacaagtctctaggagggtccaaactttcccttatcttcctgtcttcttttgagccctccaactgttctaacctctgcctgttatccagctccaaagctgcttccacattttcagatatcattatagcartgcctcacttctctggtaccaattttctgtattagtccatcctcatattactttaaagaactacctgagactgtgtaattaataaagaaaggaggttgaattgattcacagttccgcaggctgtacaggaggcatgactggggaggccttagtaacctgataatcatggtggaaggcaaaggggaagcaagcatatcttcacatggtggcagagagagagagagagagagaaagagaaagaaaagtgctacacacttaaaaacag

SEQ ID NO: 233636 - DNA, 519 bp, Homo sapiens
tccagtctctctactaagagtgacctttgttccggttcccaataagttccacatctccatctgagaccaccacagcctggcttcgctgtccatatcactaacggcactttgatcacaaccattcaacaagtctctaggagggtccaaactttcccttatcttcctgtcttcttttgagccctccaactgttctaacctctgcctgttatccagctccaaagctgcttccacattttcagatatcattatagcaatgcctcacttctctggtaccaattttctgtattagtccatcctcatattactttaaagaactacctgagactgtgtaattaataaagaaaggaggttgaattgattcacagttccgcaggctgtacaggaggcatgactggggaggccttagtaacctgataatcatggtggaaggcaaaggggaagsaagcatatcttcacatggtggcagagagagagagagagagagaaagagaaagaaaagtgctacacacttaaaaacag

SEQ ID NO: 233637 - DNA, 624 bp, Homo sapiens
ttctgtattaatttcataagctctgctactgtggaaatttcattctaacctttattttttcaatattacttcaaaataatttttctaaagttggggttagaaattttatttttatttccattttcccaccactttatgatgaaaagaagtctgaattgctatgaattgctcagtagatcactgctggatatctaattgtaaaatcctactttgttcctgttttaattattccaaccaaagtccactaaaatatttcatgtcagttactgtttgatatgttggtgatatagaattttaaaaattacattgtattcataattctaaaaattcagaattgtttatggaaggtttatcaagaaatagttacattgtagcacaatatatgtcaacagaggatttgaaaagttcgcagtctcgaggctgctttctctcatcaaaatgctgtagctgaactgmagctatttttggtgttctgctatttgatacttactcctatcacagaattctttagctatgtgagaagggtcatgtagtcttctggtccaggttttaattttatgcataggttcttactcctgtatttcattttctttctagaaggcttgcggctgcacccaagctgcc

SEQ ID NO: 233638 - DNA, 592 bp, Homo sapiens
ttctataagcaggcattcacaggatcagaatcatgtccaagcatggtatggttagaaaataccattgctggcgactttcccctggaaccttagaaaggccatttatggtaagcctcatgcctgctcatatggagctgcatccaagagttgaatgtgctcagctgacactgcccctgggagataagaagatttctgtgtaaacacagtgtastcaaattgcacccacatcatattaaatatattcagtggcaatcacatttgtggtaacttaacctacattgacccctgactgggggcaatgagaccactaaggcttgaatgcagaatggacttcaaggggatgaattccctgaagtgatccatacctgcagaaccttgtatcctgtgccaatgcatgtcttcagtacacagataaagcattttataaaggttatctattaccatctaggcagaaataatttctcctacttcgtcttttatccagggtatctcatgctcatgctcaacttttatgcatattatttcattaaacacacacatacaattatgtgcaaaaaacttttctaagtactttgcaaatattaacacattt

SEQ ID NO: 233639 - DNA, 592 bp, Homo sapiens
ttctataagcaggcattcacaggatcagaatcatgtccaagcatggtatggttagaaaataccattgctggcgactttcccctggaaccttagaaaggccatttatggtaagcctcatgcctgctcatatggagctgcatccaagagttgaatgtgctcagctgacactgcccctgggagataagaagatttctgtgtaaacacagtgtactcaaattgcacccacatcatattaaatatattcagtggcaatcacatttgtggtaacttaacctacattgacccctgactgggggcaatgagaccactaaggcttgaatgcagaatggacttcaaggggatgaattccctgaagtgatccatacctgcagaaccttgtatcctgtgmcaatgcatgtcttcagtacacagataaagcattttataaaggttatctattaccatctaggcagaaataatttctcctacttcgtcttttatccagggtatctcatgctcatgctcaacttttatgcatattatttcattaaacacacacatacaattatgtgcaaaaaacttttctaagtactttgcaaatattaacacattt

SEQ ID NO: 233640 - DNA, 592 bp, Homo sapiens
ttctataagcaggcattcacaggatcagaatcatgtccaagcatggtatggttagaaaataccattgctggcgactttcccctggaaccttagaaaggccatttatggtaagcctcatgcctgctcatatggagctgcatccaagagttgaatgtgctcagctgacactgcccctgggagataagaagatttctgtgtaaacacagtgtactcaaattgcacccacatcatattaaatatattcagtggcaatcacatttgtggtaacttaacctacattgacccctgactgggggcaatgagaccactaaggcttgaatgcagaatggacttcaaggggatgaattccctgaagtgatccatacctgcagaaccttgtatcctgtgccaatgcatgtcttcagtacacagataaagcattttataaaggttatctattaccatctaggcagaaataatttctcctacttcgtcttttatccagggtatctcatgctcatgctcaacttttatgcatattrtttcattaaacacacacatacaattatgtgcaaaaaacttttctaagtactttgcaaatattaacacattt

SEQ ID NO: 233641 - DNA, 592 bp, Homo sapiens
ttctataagcaggcattcacaggatcagaatcatgtccaagcatggtatggttagaaaataccattgctggcgactttcccctggaaccttagaaaggccatttatggtaagcctcatgcctgctcatatggagctgcatccaagagttgaatgtgctcagctgacactgcccctgggagataagaagatttctgtgtaaacacagtgtactcaaattgcacccacatcatattaaatatattcagtggcaatcacatttgtggtaacttaacctacattgacccctgactgggggcaatgagaccactaaggcttgaatgcagaatggacttcaaggggatgaattccctgaagtgatccatacctgcagaaccttgtatcctgtgccaatgcatgtcttcagtacacagataaagcattttataaaggttatctattaccatctaggcagaaataatttctcctacttcgtcttttatccagggtatctcatgctcatgctcaacttttatgcatattatttcattaaacacacacatacaattawgtgcaaaaaacttttctaagtactttgcaaatattaacacattt

SEQ ID NO: 233642 - DNA, 575 bp, Homo sapiens
aaccaaagtttattgcccattgctttgctctggacctrttcctgcattgggagactttttttttttttttttttttgagatggagtcctgctctgtcgcccaggctggagtgcagtggtgcgatctcgggtcactgcaagctccgcctcccgagttcacgccattctcctgcctcagcctcccgagtagctgggactacaggcgcccgccgccatgcccggctgatttttttgtatttttagtagagacggggtttcaccgtgttagctaggatggtctcgatctcctgacgtcgagatcagcccgcttcagcctcccaaaatactgggattacaggcgtgagccactgcgcccggccaagaaacatttttataaactttgtattactttttaggtgggactaattttatcttgttggataaatcctatacgatggtagatcaaacatgctttttgttcattgttttctttcaaccaaaatcttttttctcccaccctctgccatttcattgactaaagataatgaacacctattattgacaaaatagcacctttcataaatatgtacagaagtt

SEQ ID NO: 233643 - DNA, 575 bp, Homo sapiens
aaccaaagtttattgcccattgctttgctctggacctgttcctgcattgggagactttttttttttttttttttttgagatggagtcctgctctgtcgcccaggctggagtgcagtggtgcgatctcgggtcactgcaagctccgcctcccgagttcacgccattctcctgcctcagcctcccgagtagctgggactacaggcgcccgccgccatgcccggctratttttttgtatttttagtagagacggggtttcaccgtgttagctaggatggtctcgatctcctgacgtcgagatcagcccgcttcagcctcccaaaatactgggattacaggcgtgagccactgcgcccggccaagaaacatttttataaactttgtattactttttaggtgggactaattttatcttgttggataaatcctatacgatggtagatcaaacatgctttttgttcattgttttctttcaaccaaaatcttttttctcccaccctctgccatttcattgactaaagataatgaacacctattattgacaaaatagcacctttcataaatatgtacagaagtt

SEQ ID NO: 233644 - DNA, 568 bp, Homo sapiens
agctttctgaagtcttggttacattgaatattatcattattatttgattcttgcaaagtagataggcgaatacattgttgttttattttagtatatacactgtttgagtcttgctctgttgcccaggctagagtgcagtggggcaatcttggctcactgtaaactccgcctcccagattcaagtgattctcctgtctcagcctcctgagtagctgggattataggtgcccaccaccacgccaggctaatttttgtatttttagtagagatggtttcaccatgttggccaggctggtctcaaactcctgacctcagttgttccacctgcctcggcctcccagagtcctgggattacaggagtgagccatcagcactggcctattttaatatttttattaaaactttatttttctatttcctcttacrtttgttttttgagaaatattgttcattcattttctactccacttatttattatatattaatattttttcataaaattgaactctgtgcatgtagaatattaacatttttgtttttgtggaatggttttcataatgttttctt

SEQ ID NO: 233645 - DNA, 491 bp, Homo sapiens
ggctaggactttcactagtatgctatacagatgtggagagtaagcatcctttacctgttccttatcttagaagaaaagctttcaacactttacaatagtgtatgatgtttgctgtgggctagtagtgtatcatatttattgtgttgaagtaaatccttctatacctactttgatgagaaatttttataatgaaatgawgttgaatttcatcaaatgcttttcatgcatctattgagatgatttttatctttcagtctgttaatgtgatgaattacattattgattagtctatgttaaaccatacttgtatcccagagatacatcctagttgctcttaacgagtgacactttcaatgtactgttgaattcagttggctaatatttggttaaggatttttgcttctatgttcatcagggatagtggttcataatcttatttttttatagtgtctttttctggctaatacaggcttcacaaaataagttttaaa

SEQ ID NO: 233646 - DNA, 558 bp, Homo sapiens
gaattcatgtgattgacttttattgcattattgctttattgcacttatccagaactgaacccacaatacttcagaagtatgcctgtgyatataatcatgcaaaatcttctattatttgttccattttacaattttgttttgcctctttttaaaaaaactgctagcacaactgtggtttatgaccacgtgtttaattctaaatttattttatttacataaatttacagtacagtattaagcaaattatgcctcacattttccctatatagtattaatattcttataattgatgccatctttatttgtatgttgcataataaattctcccacacaagtaaggcaatttatactgttttatctatgcttaattaatgttattaaatttggtttttaaattttgtatcatttatatttagtcaaaattatgacaacataactgtgcaattttttagtctttatttgtatatattgcattcattttttcactgcttttcccccaaccccttcagtgaggttgattcatgcagttttaatatagctagaatctcttgtcacggg

SEQ ID NO: 233647 - DNA, 558 bp, Homo sapiens
gaattcatgtgattgacttttattgcattattgctttattgcacttatccagaactgaacccacaatacttcagaagtatgcctgtgcatataatcatgcaaaatcttctattatttgttccattttacaattttgttttgcctctttttaaaaaaactgctagcacaactgtggtttatgaccacgtgtttaattctaaatttattttatttacataaatttacagtacagtattaagcaaattatgcctcacattttccctatatagtattaatattcttataattgatgccatctttatttgtatgttgcataataaattctcccacacaaktaaggcaatttatactgttttatctatgcttaattaatgttattaaatttggtttttaaattttgtatcatttatatttagtcaaaattatgacaacataactgtgcaattttttagtctttatttgtatatattgcattcattttttcactgcttttcccccaaccccttcagtgaggttgattcatgcagttttaatatagctagaatctcttgtcacggg

SEQ ID NO: 233648 - DNA, 424 bp, Homo sapiens
caaatgaattcaaaaatcagattggacaaatcagaatggatacaagaagataacaaatgcttgactggctattcaggttcccaagcggacagaagacttgaagtggcagccagggcaggcaatgccacctactggtcagccaaggtagaaaaaagaaatagcctagtgaattaacttcwgccatactaggccatttggtgttgtgacacagtgcaaaatctccttctaattagtgaaataaacatcagatcatctgcaataacctttctggaatatagctacttaattttaaaagaataaaccaaagtgattatgtttatcaaaaaagtcgaaaaggagaaccacagacacattccataggatttcagaatgagccctctttaaaatgccactgtctctatttcagtctatcttcctatttcag

SEQ ID NO: 233649 - DNA, 594 bp, Homo sapiens
tgagttttcaaaatgctcttgggaagcacatttgatggataattgcaaatgctttgtgaaagagcttcagaactgcatgagcttccggattaaggatgtatcattttagagcacaacaagwctcttttatgctttctcacactctttgtttgatgggcctcatcaacctatggtagtggtgaaaaccaatttgctcagttgaacagctctataatgcttgttagttaactgtctcctaaaaatcatgaagaacagttaaacatttcatgaagttctagaaattaacgtatcctaaaagtctagaagttagtccaaacaacaacaaaatagcaccttatgtaagcatggtttttgtgaaacttgtgatacttacacattgatgggggaattgtggattggcgtaacccagttagaaagcattataatattatatagcatgcattgtcatctagcatatagcgtatatggaaccataaatgtccattctcttcaggagaacaattttttcctagatagtcagtccctagatttggtttgatgacaaatctaaacctctgcatatatttctcatatgatttaatactaacttccatc

SEQ ID NO: 233650 - DNA, 479 bp, Homo sapiens
tatgtttcatccaaaatgcaaaacaaattaaattgcaatattgttaaggaggagcagaactccgcatttctttagaattaatgtcaaatgtaatttttttttctttataatgctcagcatgattattcttgttaccttcttaatgttgtcaaggttccttccttaagaaaacatcttatgcttgtacacaacayagaaggatgataataggcctttgatttaaatagtgtgttgatgagagttccagtctcagtcaatcagacaaaattaattaagatcaggtggataaatggtggtatgctcagctattaacacagttttttcattgaaatgcttatagctgaagatagagaacccgcctcttaacaggcataaaaactagaggaaagaattgacaagctgagggtcaaatgagtgcattcacatcacaaactaaaaatgcatgttggctattgaatgaagagaaattttttattgtc

SEQ ID NO: 233651 - DNA, 479 bp, Homo sapiens
tatgtttcatccaaaatgcaaaacaaattaaattgcaatattgttaaggaggagcagaactccgcatttctttagaattaatgtcaaatgtaatttttttttctttataatgctcagcatgattattcttgttaccttcttaatgttgtcaaggttccttccttaagaaaacatcttatgcttgtacacaacacagaaggatgataataggcctttgatttaaatagtgtgttgatgagagttccrgtctcagtcaatcagacaaaattaattaagatcaggtggataaatggtggtatgctcagctattaacacagttttttcattgaaatgcttatagctgaagatagagaacccgcctcttaacaggcataaaaactagaggaaagaattgacaagctgagggtcaaatgagtgcattcacatcacaaactaaaaatgcatgttggctattgaatgaagagaaattttttattgtc

SEQ ID NO: 233652 - DNA, 608 bp, Homo sapiens
taaagacacctgagtgagagtaacagtgattgtaaggaagtaagaaatctgaaaggataagaatttagagcagagaatgccatatttataactaaactttagaaaagaagaggctgggaaacagcatttctatgaaggtatatttttcaaatgaaagcagtaattttgtgacatgaaacacagaaaccgaaacttaaactgtctttgaggtgtgataaaataaataaagtgttagcccctgcttcaagtaaagtaattatagaaaaaaaattacatacttaacaagaagatacattttttacytgaatttcaggtattaacagccactatagcctagatttgtgaagtaaacaaactctacttaattaaggcttgaatgaatcattgcctgccgtgttccttgggcaattggcattgccaaaattactctagacaagtcaggtggtacagaggaattaagcaattcatgtagaatgtgttgctaaataatatttggtgatctatgtatcccaggtttattaggtaacaactgcctttgtttcacttaacttttatttgtatagctttacattgacacatttatttttaaattattaagttgtgaagta

SEQ ID NO: 233653 - DNA, 608 bp, Homo sapiens
taaagacacctgagtgagagtaacagtgattgtaaggaagtaagaaatctgaaaggataagaatttagagcagagaatgccatatttataactaaactttagaaaagaagaggctgggaaacagcatttctatgaaggtatatttttcaaatgaaagcagtaattttgtgacatgaaacacagaaaccgaaacttaaactgtctttgaggtgtgataaaataaataaagtgttagcccctgcttcaagtaaagtaattatagaaaaaaaattacatacttaacaagaagatacattttttacctgaatttcaggtattaacagccactatagcytagatttgtgaagtaaacaaactctacttaattaaggcttgaatgaatcattgcctgccgtgttccttgggcaattggcattgccaaaattactctagacaagtcaggtggtacagaggaattaagcaattcatgtagaatgtgttgctaaataatatttggtgatctatgtatcccaggtttattaggtaacaactgcctttgtttcacttaacttttatttgtatagctttacattgacacatttatttttaaattattaagttgtgaagta

SEQ ID NO: 233654 - DNA, 625 bp, Homo sapiens
gcctttttctaccttcgtatctgaagcaaatcttcaggtattcagtctgcttctttctttccataactaactctatacatttttccccttgatattttgttccttcctagcatggctatgtacatactgtctttaaaaatactcaatttttgaaatttcttaaaaaaattacaaatgtaacttaccatttgatggcatattcaatggattgaatgtttgtgttttcccaagtttttgtgttgaaatgctaataaccaatgtaaggagacttggaggccgggccactgggaagtaatcagatcatgaggatgaagcccttatgaatgggagtagtgcytttataaaatagatcccagagagctctctcatgctcttcatgccccgtgagaatttggaagtcagtagtctgcaatctggaagacagcccttcgccaaagtcaaatatgctgtgccctaatctgggacttctagcctccagaattgaaaaaaaaaaattgttgtctttaaacagccaagtattataacagccttaagtaacacagcttataactgaacactaaagggaaatgtaaaagaaaaatgtaattttactaattgctgaaggcacaaaatcctcactttagaa

SEQ ID NO: 233655 - DNA, 580 bp, Homo sapiens
tgctggtgaaaattttccttttaaagttgattcatttccttgttcatcaaacagaatttgtggttgtagctctgattaaagacaacactagcacttttatggagaatataacgaaaagaattcagtaaatcaacacaaaaatgaaatccactgaaaatacgtgtatgtattaactttgaagctattttatcatcagcaattttacttgatgagcacataaataaagagaatactaaataagatataggagaatagtataatcttccattggcatttcacatttttaatccatgtgaaatatacattaaccttatattatgcaatcaccagccagtcatttgccaatttgccaataacaacaaagaagctttcattctcatatatatatatatatatatatatatatatatatatatatatatawagacatatatatacacacacacacacacacacacacacacacacacacagaatttatcctgttcccaactttatatgccaagtattttttcagactattcaaacatatgcataagaacaaacataatgacttctgaagtcagctttgagtttttct

SEQ ID NO: 233656 - DNA, 580 bp, Homo sapiens
tgctggtgaaaattttccttttaaagttgattcatttccttgttcatcaaacagaatttgtggttgtagctctgattaaagacaacactagcacttttatggagaatataacgaaaagaattcagtaaatcaacacaaaaatgaaatccactgaaaatacgtgtatgtattaactttgaagctattttatcatcagcaattttacttgatgagcacataaataaagagaatactaaataagatataggagaatagtataatcttccattggcatttcacatttttaatccatgtgaaatatacattaaccttatattatgcaatcaccagccagtcatttgccaatttgccaataacaacaaagaagctttcattctcatatatatatatatatatatatatatatatatatatatatatataaagacatatatatacacacacacacacacacacacacacacacacacacagaatttatcctgttcccaactttatatgccaagtattttttcagactattsaaacatatgcataagaacaaacataatgacttctgaagtcagctttgagtttttct

SEQ ID NO: 233657 - DNA, 478 bp, Homo sapiens
ggttcattagaaaggaagcatttccggaaaacaccagtacagagtgggagagtgggcctgagaaaggaasaagggcaagcacgtttgtaatattaagtcccactgagctcataaagcaatgtaggttatacttcagtgaagtccaaatcaattgtaccaaaccaatcagacattagctaagggctgcccctgaggagatgtaaattcgcaggcacttccagctacctctgcacttgcagaaaacgtgctctccaggagactaagggtagctcttccataaaggccctcagttctggttgttggtaataaaagcacattggagagcaatgtgcacaaaattgatgaaggaatatgacagtgatcagacaaagcaacaccaacatttgttgcagccttggatacactcatgcctcacactggattctctacatggattcttcagaatgataactagtcatgattacaaagggttgaattc

SEQ ID NO: 233658 - DNA, 297 bp, Homo sapiens
ggctgcccctgaggagatgtaaattcrcaggcacttccagctacctctgcacttgcagaaaacgtgctctccaggagactaagggtagctcttccataaaggccctcagttctggttgttggtaataaaagcacattggagagcaatgtgcacaaaattgatgaaggaatatgacagtgatcagacaaagcaacaccaacatttgttgcagccttggatacactcatgcctcacactggattctctacatggattcttcagaatgataactagtcatgattacaaagggttgaattc

SEQ ID NO: 233659 - DNA, 426 bp, Homo sapiens
tgggcctgagaaaggaagaagggcaagcacgtttgtaatattaagtcccactgagctcataaagcaatgtaggttatacttcagtgaagtccaaatcaattgtaccaaaccaatcagacattagctaagggctgcccctgaggagatgtaaattcgcaggcacttccagctacctctgcacttgcagaaaacgtgctctccaggagactaagggtagctcttccataaaggccctcagttctggttgttggtaataaaagcacattggagagcaatgtgcacaaaattgatgaaggaatatgacagtgatcagacaaagcaacaccaacatttgttgcagccttggatacactcatgcctcacactggattytctacatggattcttcagaatgataactagtcatgattacaaagggttgaattc

SEQ ID NO: 233660 - DNA, 426 bp, Homo sapiens
tgggcctgagaaaggaagaagggcaagcacgtttgtaatattaagtcccactgagctcataaagcaatgtaggttatacttcagtgaagtccaaatcaattgtaccaaaccaatcagacattagctaagggctgcccctgaggagatgtaaattcgcaggcacttccagctacctctgcacttgcagaaaacgtgctctccaggagactaagggtagctcttccataaaggccctcagttctggttgttggtaataaaagcacattggagagcaatgtgcacaaaattgatgaaggaatatgacagtgatcagacaaagcaacaccaacatttgttgcagccttggatacactcatgcctcacactggattctytacatggattcttcagaatgataactagtcatgattacaaagggttgaattc

SEQ ID NO: 233661 - DNA, 537 bp, Homo sapiens
atggtctccattcttccccagatttgtgactctccaaatgttttctcagacactaatttgctgacagtaattcaatgttccatttacatcattctatgaaagacaactgcatatgtttatatactacatttattttcacaactcaatttctttgcccatctttttctttagttctttagtccattacatttcagtaatatgctaaataaaaatcctacaacttgaaatgtctagttcacttttctcattgcatgatttgtgtagtaggggtggtgttaacttccagaggcacagttcttaaacatcagagtagctgatgattcattatcttggcagatgactttgtctgctggyctaacaagaacatcctagagctcttattttaatatgatttcatatacatttgttaacaatacgactttcatacatcatatactgtttaataaaatctttaataactgatatatgcaaacagaaaaaggaaacatctaggaatacttatatgatcctaaaatttctaagcaaaatttcaaaaag

SEQ ID NO: 233662 - DNA, 537 bp, Homo sapiens
atggtctccattcttccccagatttgtgactctccaaatgttttctcagacactaatttgctgacagtaattcaatgttccatttacatcattctatgaaagacaactgcatatgtttatatactacatttattttcacaactcaatttctttgcccatctttttctttagttctttagtccattacatttcagtaatatgctaaataaaaatcctacaacttgaaatgtctagttcacttttctcattgcatgatttgtgtagtaggggtggtgttaacttccagaggcacagttcttaaacatcagagtagctgatgattcattatcttggcagatgactttgtctgctggcctaacaagaacatcctagagctcttattttaatatgatttcatatacatttgttaacaatacgactttcatacatcatatactgtttaataaaatctttaataactgawatatgcaaacagaaaaaggaaacatctaggaatacttatatgatcctaaaatttctaagcaaaatttcaaaaag

SEQ ID NO: 233663 - DNA, 616 bp, Homo sapiens
  misc_feature (1)...(616): n = A,T,C or G
tatccaagttgcaagtcaaagtcccctttactctctcctctagagggaaggaatctctcctccagctgggaccctcaatgccaggagttcggggacagatgacacaaacactccctaagctgcccaggctggtgtcccactaggtcatgtggaccctcagtccagtggctcccagcccagctcagtaccaagaattgcccaggaattgctgtctttgtggtctagattgcttttgaagtktatttagaaccctataaccctttagtccatggtggtgggcccagttggaactcaagttctgactgatggaatggataattgcctctgtctaggactggtctgaataccccttccatgggtgtaggctgagttctaccccatgttgctttccactgtgacagggtagtgctgattcaatgcaaagtttcacagtccctacattatccctcccacaagcacaagattctctctctggtccatgtggctgctgccaggtgataggggaggggtagtagggaattcaagtctgtctctcctgcccgctttagtttctccttcccatgatatgatgttaaaaataggttcctattgtactgtacgacctgattttctnata

SEQ ID NO: 233664 - DNA, 570 bp, Homo sapiens
atataattgcacttagacttatttatctttattgtagtttctttagaamaaaagcaaatgtttggcaattatttaaaggaatcaccataaaacactcttcagaatttgaactgaagtagtagctcaagtgttgccaaataattcactaaactatgaaatcatgtgtgtgtgtagaaataatatatacaatccattctaacctgttacttgatataaatatatactgcataaccatatataataatataatactttatatatagttttatatacaatgcacatataatgcaagaatataaattagttttaaacaatgcataaaattttagcatgctctttttatggaaagtttctaaataacataatttttattctaattaaattaatttgaaattatttataaaactatatggaagcaataaaaccacctacaatgggatgttcctagagtcctcattggtagcatccaggaaaaaagaagcccttttaaattttaggtttttttttctttgtgaaactatatatacaaaaagaaaaaactaataaaactaaagtcatactgcataaata

SEQ ID NO: 233665 - DNA, 570 bp, Homo sapiens
atataattgcacttagacttatttatctttattgtagtttctttagaaaaaaagcaaatgtttggcaattatttaaaggaatcaccataaaacactcttcagaatttgaactgaagtagtagctcaagtgttgccaaataattcactaaactatgaaatcatgtgtgtgtgtagaaataatatatacaatccattctaacctgttacttgatataaatatatactgcataaccatatataataatataatactttatatatagttttatatacaatgcacatataatgcaagaatataaattagttttaaacaatgcataaaattttagcatgctctttttatggaaagtttctaaataacataatttttattctaattaaattaatttgaaattatttataaaactatatggaagcaataaaaccacctacaatgggatgttcctasagtcctcattggtagcatccaggaaaaaagaagcccttttaaattttaggtttttttttctttgtgaaactatatatacaaaaagaaaaaactaataaaactaaagtcatactgcataaata

SEQ ID NO: 233666 - DNA, 620 bp, Homo sapiens
ccaatgccagatgtggcctataaaaggagtcatcgactctagagtcaatcaagtgaatgagtgaagccaggactattccagaggttataaactcactgattagtggtaaagggctggaccaagaggaagcactttctcttagatgaagtttttaagactaaattcccttttgaactaagaggttaatcctcacgtasacagctcctcacttggtaccatcctggctaaaacaaacaaaaagatgaggttttcatagcctttaccttcatgtggaagcctgaggattctcagttccaagcaagtgtgtcccagattcaggcctctctatgtaaatctcaggtctggactaaccagaacctcatctttttcaaactttacccacgatgggtagtggtcatctcttactcccaccctggccagctccccaatataaggaccagttaaggactttctgttggagtctctcagatcaagaatagctaatctgcaaattggtggccaaagaaaaggaaccatctgggttgatcctgagagaactcatgggacagggagtggctcacatgttcctggattcatcaatggtctttagcagccctggcctggctgccctatccatgtgt

SEQ ID NO: 233667 - DNA, 606 bp, Homo sapiens
gaagcaagtagacctcccccacggcctcaagcaatcaagtagctgctttaagaaggaggataaacgtgtagctctattacgtagcaaaatggaataacaggaccatttgggagtagagctctaagaggaaccctctctgacctgtggggatgtggatatctgaaaagaaaaagccaacagaagttctagatctacaggaggggcttgaggatgctaggaagtgcaaccgggaacytagattagcagcagtaaccagtcggaccagtgtccacagcacactcaagtggcagcaggaagcaagggctgcagaatgctggctctcccagctttctattagaaaacccaccagagttgttggtcattttagagaggggtggtacttcaagacagagacactgaccctagtgtatctggcagatggagtgcttgatccaggtttaatttcatttgaaaaaataataaaaaatgtacccatttctttcccacagaatttaagatgttaataacaattacatcaataaaagaagcaagctatctaatcaaggggaaaagtgggaaaaacaagagagggtctataacaaaaaaaacagaggctttaaaaattgt

SEQ ID NO: 233668 - DNA, 503 bp, Homo sapiens
ttagtggtgggggtagggcgtatgcctcaggatatttttaatgctcccctgggcagcagtcaggcttgagaacctctattctggcttatctgtttattttgctgtgatatattaagtgtatgtttctttcattattgtaacttagatttttttaccctttcacttgctcatcacagcccattaggcattgtattactcagagttctccagagaagcagaaccaacaggatgtgtgtgcttgcgtgtgtgggggggggatatctatgtgtgtgtgttcatgtgtgtgtakgcatgtgtgtgtctgaaccaacaggatctgtaccacatcctgttagtacacatatcttcatacatataagaagaaagacttactttaaggaattggctcacacagttgtggaggcttggtaaatccaaaatctgcaagggtagaccaacaggctggagatccagggaagagttgcagtttgagtgcaaaggcaggctgctggcagagttccctt

SEQ ID NO: 233669 - DNA, 503 bp, Homo sapiens
ttagtggtgggggtagggcgtatgcctcaggatatttttaatgctcccctgggcagcagtcaggcttgagaacctctattctggcttatctgtttattttgctgtgatatattaagtgtatgtttctttcattattgtaacttagatttttttaccctttcacttgctcatcacagcccattaggcattgtattactcagagttctccagagaagcagaaccaacaggatgtgtgtgcttgcgtgtgtgggggggggatatctatgtgtgtgtgttcatgtgtgtgtaggcatgtgtgtgtctgaaccaacaggatctgtaccacatcctgttagtacacatatcttcatayatataagaagaaagacttactttaaggaattggctcacacagttgtggaggcttggtaaatccaaaatctgcaagggtagaccaacaggctggagatccagggaagagttgcagtttgagtgcaaaggcaggctgctggcagagttccctt

SEQ ID NO: 233670 - DNA, 582 bp, Homo sapiens
ttacatggtgttttccttgcttgaatgaatgaaaatctattttagaatccaaatacttgtacaaaccttacctatgattccaaaattgaaattattttggaaaagtataattgttaagcaatagtttttaatctagattgagcagtcagaatgtcagaggatctgtagccccagaattattggaaatgtgctcaattcacttggccycaagcatttaaaaataggctttgtataagaagtctgtaaaacaaatttcgtggccaacatactttcataacaaaagctcaaactagaatagtgtttagactgaattgaggttttaaaatagtcaaaaatttttggttaatctctcttgaatctgttagataatctttataattttcaaattgaggtacatgatctctgattaaactgaatgctatatagattgattaattctatgaaattctgacatctttgaataataacttctggcttatgtattcgtatgttaaactatgcatcatttttataattgagctaaattaccagtaacatatgactaacaatcccacttattaaaaggataattgctagcttcaa

SEQ ID NO: 233671 - DNA, 621 bp, Homo sapiens
acaaatataaattgtgagctatagacggactaaattttctgactttttaaaggcattgtgtgttgttttatacttccagattgccttatgcacctcttaagatctttttcttacagttggtataaaccctccatgtgggaagacctacaattatagcagctggtgtttatagcaagtaacaaggctgaattaaacaactattatctccattttggaatggtttrttaaaacaatgaaatcctttcaagaaagtactacatgttggccaggtgcagtggcttatgcctgcaatcccagcactttgggaggcttgaggagggccgatcacttgaggtcaggagttcgagaccagcctggccaacatggtggaaccctgtctctactaaaaatccaaaaattagccgggtagtagtggcatgtgcctgtaatcccagctactcaggaggctgaggcaggagaattgcttgagcctgggaggtggaggttgccatgagctgagatcccaccactgcactccagtctgggcaacggagtgagaccctgtctcaaacaaacaaactccagaaagtactgcatcttaaatgatgcccaagtagtactaattttgtttttgttttcgtt

SEQ ID NO: 233672 - DNA, 621 bp, Homo sapiens
acaaatataaattgtgagctatagacggactaaattttctgactttttaaaggcattgtgtgttgttttatacttccagattgccttatgcacctcttaagatctttttcttacagttggtataaaccctccatgtgggaagacctacaattatagcagctggtgtttatagcaagtaacaaggctgaattaaacaactattatctccattttggaatggtttgttaaaacaatgaaatcctttcaagaaagtactacatgttggccaggtgcagtggcttatgcctgcaatcccagcactttgggaggcttgaggagggccgatcacttgaggtcaggagttcgagaccagcctggccaacatggtggaaccctgtctctactaaaaatccaaaaattagccgggtrgtagtggcatgtgcctgtaatcccagctactcaggaggctgaggcaggagaattgcttgagcctgggaggtggaggttgccatgagctgagatcccaccactgcactccagtctgggcaacggagtgagaccctgtctcaaacaaacaaactccagaaagtactgcatcttaaatgatgcccaagtagtactaattttgtttttgttttcgtt

SEQ ID NO: 233673 - DNA, 621 bp, Homo sapiens
acaaatataaattgtgagctatagacggactaaattttctgactttttaaaggcattgtgtgttgttttatacttccagattgccttatgcacctcttaagatctttttcttacagttggtataaaccctccatgtgggaagacctacaattatagcagctggtgtttatagcaagtaacaaggctgaattaaacaactattatctccattttggaatggtttgttaaaacaatgaaatcctttcaagaaagtactacatgttggccaggtgcagtggcttatgcctgcaatcccagcactttgggaggcttgaggagggccgatcacttgaggtcaggagttcgagaccagcctggccaacatggtggaaccctgtctctactaaaaatccaaaaattagccgggtagtagtggcatgtgcctgtaatcccagctactcaggaggctgaggcaggagaattgcttgagcctgggaggtggaggttgccatgagctgagatcccaccactgcactccagtctgggcaacggagtgagaccctgtctcaaacaaacaaactccagaaagtactgcatcttaawtgatgcccaagtagtactaattttgtttttgttttcgtt

SEQ ID NO: 233674 - DNA, 512 bp, Homo sapiens
taaacaggattaataacatatcccattaagtttcttgggtagacmcaactacacgcctacctagtatctattctccatttcttaaattaatgattttcttggagatctcaatgtgctcagcttaaaacagaacaaaacaaaaagaaaacacatgcatttcataatctttcttgcagctaaggataggtcatgtgacacaggtctggccaatgaatgtaagcagaaatcaagtgcacacttctgacatttttttttcttggaataaacactactgtcttcttctttcccccgtctgaaaaatatagacacaattactaaagctggagtttcaacagccatcagctaactataaggaaagtaccaagaacattgcagaaatctctgttctgatctcccaaggtataaagcaaatgctaatatagcacacgactggacttactatgtgaggaaaataaatgtgtttttcaaaccaaaactttaaagattttagttacatttacctgaaatttaat

SEQ ID NO: 233675 - DNA, 512 bp, Homo sapiens
taaacaggattaataacatatcccattaagtttcttgggtagacccaactacacgcctacctagtatctattctccatttcttaaattaatgattttcttggagatctcaatgtgctcagcttaaaacagaacaaaacaaaaagaaaacacatgcatttcataatctttcttgcagctaaggataggtcatgtgacacaggtctggccaatgaatgtaagcagaaatcaagtgcacacttctgacatttttttttcttggaataaacactactgtcttcttctttcccccgtctgaaaaatatagacacaattactaaagctggagtttcaacagccatcagctaactataaggaaagtaccaagaacattgcagaaatctctgttctgatctcccaaggtataaagcaaatrctaatatagcacacgactggacttactatgtgaggaaaataaatgtgtttttcaaaccaaaactttaaagattttagttacatttacctgaaatttaat

SEQ ID NO: 233676 - DNA, 540 bp, Homo sapiens
gaacagctctatttcaagaacatctgaatatgatgtttttcataatcttaaaaaaacctgtatcggtaatcaatacaatacattccaagtgaccctatttttttgcaaaagaagaagaaaatctctagaaaaccatttgcattcatataagctttacaatgyctgaaacaaatgtttaggcctcagtcttttccagttcaaagaccaatgaaaataatttgtagaccacacttgaacaaccacaaattgagtgctgttcctaaaggaagctttcgcagctgggatgcctgaaacaattctggcattaagtgggtgaatattattattaataatatttaattaagtttctacctgagcaccctgctgaaagactctctaaaaactagtctaacatcattaatctaacaaaataagggccaaattaggaaacagaagaaggctacagttttatcattgtactgacctatcttagaggtaacgttgactctccttagagatagtttccaaaatactattactcagttgaagaaaagttagacc

SEQ ID NO: 233677 - DNA, 499 bp, Homo sapiens
gatggactagcataatttctctcaaaagtgttcctgagtgtttgctgtcctgatctggaacaccacactgcaccttcccataccacaccatatcatattcagtcaatttgcttgctagtccaggggagatggcaggaagtttcttttaatctctggctttgttccaaaataaatattcacttgaggtgtcttaattgcagtrggaagtaactcttgtctgaaaggtattcaatttaacaggcatttgttgagagcctactatatgtccagcacaattctaggcactttggatacaacaatgaacataaacaaacaaaaaatccctgccctcatgaagcctacattccagaggaagaagaaagatgttttaaaaaatacttagaataggtcaagtatataaaatgatgaccagagtaatgaaaataaagtagaaaaaggagtgtcagggagacaggtagtggtcagttttaaataaggtggtgaaggaaaactttataga

SEQ ID NO: 233678 - DNA, 495 bp, Homo sapiens
aaaattttagtcataaatatctttttttcagtgtgttttttttttcttccccacagttctcggcagttttttgctctcaaatgtgggcaaggtaacaaaaatttggcttaaaaatgtgggcaaaagttaacaaaatatgtcaattatgttattcttttttccccaacaattagccttatgctttccaaaaacaatcccaatgtttatctctatttccaaggaaatacaaatctctgagaatttcaaggatcgctattttgctttactgttctcatgtccttagtcagttccttgttgtaactatctggtacaacatttttgatatcatgtgaaagaggtatggaaaagtagaaaaaaccccagactgaagcaagtcagatttggaagtgtaaccatgrggaagtgactagaacactttaagcctcaatttacataaaagatagtaatagataatattattggataattatggacaatgatacctggttgggttgt

SEQ ID NO: 233679 - DNA, 579 bp, Homo sapiens
tctagtcatcactaatcatttgatcaagcccttgagtttgacaatctcaaactatgttatcacacagaaaataagcagaagattccataacactaaagaaaaaagagtttctttaaaaactctattctcccctaatgaaagaaagaatgtggtggacattgtcctagcctgctaagcgtgcctgccttgtgtgtttccccagacagactcacctgcctcactgatcaaagggttgggcactgacaaactggtcacactccttccccagaatctttcaaaagttttaaaaattagtttgacrgtatatttgagctgaatttgagggacagagctcacattcattgtgtagatcaatgacactcaaagcatggtcccaagccagcagcatcagcatcatctggaaacttattaaaaatgcaaatttgggggcatcaccctaaaccgaactgtgtgggaaattctggggacagagtccaggaatctatttttaaaaacctttcaggtgatgctggtgcacttaactttgtaaaccaccagtgcaaactaacccagatacataactctttcatcatatgaaat

SEQ ID NO: 233680 - DNA, 575 bp, Homo sapiens
acaggtttaataggtaaataatcttgacttataggatcccccatgtcaacactaagttgagaatcaagttaaggaagtacagtatgtcctttagcataattgacaggcagttctcagttttactgyggatgactttaacttgagtataaccaataatgctcttaccatggatttgtgtaagatggattactgcaggtcaagggcaaactatttacatctgatggaggcagcatagaatagtgataagttcctaaataaaattgtcttggttttaaaccccaactcttttacctgttaggcttaaccttcctgagtcatacaaagtcacttgacctcaattgtggataacaacggcccttgctctaaggggctattgtgaggattaaatagtacatgtagtgttcagcctggtgcatgtacaacattggcatttgcaagctgttattataaagtaatggtgaagaatctgagcttcctagatcttatctagatctaaatcctgcctctgtcagatctttgaaaattttcttagtttctatgccttgattttattgtctaaaccaagagaaaatagc

SEQ ID NO: 233681 - DNA, 575 bp, Homo sapiens
acaggtttaataggtaaataatcttgacttataggatcccccatgtcaacactaagttgagaatcaagttaaggaagtacagtatgtcctttagcataattgacaggcagttctcagttttactgtggatgactttaacttgagtataaccaataatgctcttaccatggatttgtgtaagatggattactgcaggtcaagggcaaactatttacatctgatggaggcagcatagaatagtgataagttcctaaataaaattgtcttggttttaaaccccaactcttttacctgttaggcttaaccttcctgagtcatasaaagtcacttgacctcaattgtggataacaacggcccttgctctaaggggctattgtgaggattaaatagtacatgtagtgttcagcctggtgcatgtacaacattggcatttgcaagctgttattataaagtaatggtgaagaatctgagcttcctagatcttatctagatctaaatcctgcctctgtcagatctttgaaaattttcttagtttctatgccttgattttattgtctaaaccaagagaaaatagc

SEQ ID NO: 233682 - DNA, 575 bp, Homo sapiens
acaggtttaataggtaaataatcttgacttataggatcccccatgtcaacactaagttgagaatcaagttaaggaagtacagtatgtcctttagcataattgacaggcagttctcagttttactgtggatgactttaacttgagtataaccaataatgctcttaccatggatttgtgtaagatggattactgcaggtcaagggcaaactatttacatctgatggaggcagcatagaatagtgataagttcctaaataaaattgtcttggttttaaaccccaactcttttacctgttaggcttaaccttcctgagtcatacaaagtcacttgacctcaattgtggataacaacggcccttgctctaaggggctattgtgaggattaaatagtacatgtagtgttcagcctggtgcatgtrcaacattggcatttgcaagctgttattataaagtaatggtgaagaatctgagcttcctagatcttatctagatctaaatcctgcctctgtcagatctttgaaaattttcttagtttctatgccttgattttattgtctaaaccaagagaaaatagc

SEQ ID NO: 233683 - DNA, 562 bp, Homo sapiens
gtatcacaacctgctagaagtagaggagagttaatgttccatggactgaactttgataaatgagaaacagaagataagaaggattaagcagacaatatatatatcttctactcctttgtcctcaatggactgtccctgaatgcagtggttcagtatagcctacatagatgaagtcccacaagattaagcattcatctttgttttcttatgacattatggccagcttraaaacatactaccttgcattttctttacttttatcccaacctcatttctcttttattcttctctcttgcttccctggaatcacagttgcaaataactgtcttatattttagcacacaagctgaggtttggctcatttccctgggacctagcctaagaaaacagttaacaattattcagtgcctactatgttcccagtgctgttctaggagctttaaatgtatcctttcattgtcttctccaaacaatccaatgacataggtattcttagtatcttcatttccgttttatagatgatatgagaaactagggcacagaaatgttgagcatctttcat

SEQ ID NO: 233684 - DNA, 562 bp, Homo sapiens
gtatcacaacctgctagaagtagaggagagttaatgttccatggactgaactttgataaatgagaaacagaagataagaaggattaagcagacaatatatatatcttctactcctttgtcctcaatggactgtccctgaatgcagtggttcagtatagcctacatagatgaagtcccacaagattaagcattcatctttgttttcttatgacattatggccagcttaaaaacrtactaccttgcattttctttacttttatcccaacctcatttctcttttattcttctctcttgcttccctggaatcacagttgcaaataactgtcttatattttagcacacaagctgaggtttggctcatttccctgggacctagcctaagaaaacagttaacaattattcagtgcctactatgttcccagtgctgttctaggagctttaaatgtatcctttcattgtcttctccaaacaatccaatgacataggtattcttagtatcttcatttccgttttatagatgatatgagaaactagggcacagaaatgttgagcatctttcat

SEQ ID NO: 233685 - DNA, 562 bp, Homo sapiens
gtatcacaacctgctagaagtagaggagagttaatgttccatggactgaactttgataaatgagaaacagaagataagaaggattaagcagacaatatatatatcttctactcctttgtcctcaatggactgtccctgaatgcagtggttcagtatagcctacatagatgaagtcccacaagattaagcattcatctttgttttcttatgacattatggccagcttaaaaacatactaccttgcattttctttacttttatcccaacctcatttctcttttattcttctctcttgcttccctggaatcacagttgcaaataactgtcytatattttagcacacaagctgaggtttggctcatttccctgggacctagcctaagaaaacagttaacaattattcagtgcctactatgttcccagtgctgttctaggagctttaaatgtatcctttcattgtcttctccaaacaatccaatgacataggtattcttagtatcttcatttccgttttatagatgatatgagaaactagggcacagaaatgttgagcatctttcat

SEQ ID NO: 233686 - DNA, 600 bp, Homo sapiens
aaaaatgtttatctaaccagaaaagttgaaccaagtgaaggaatatcaaccagaggtgagatatttggaggaacaattcaaaggtctggattctctctggcttcctcagtttagttaaccatttaaatttggataaatcacatgatcattctatgcctcagtttccccagctactatatgaaaatacaattcctaagctgcctgtctctcattacttgtgtaagaactgaatacattatatctaggaaagcatttctaaatactaaattgttaytattatcaccattagagtaattttgttaataaaaagcttacaaactttaatgttactaaaatttagatcaacttttacatctcaaaaaaaggacttttgaagacacgagacaaatataacatgaatttaagataattaactaaagtaaggcaaagggaaaagaaaagttgcaaagcaaacaggtaaggacaagatcagtgcatagcgtaaatgccatccttgctagcgatagaacacacattttgttctatgctttctggcagctgacacaaggaagaaaacaccatcagctactggagttctagtatccacaaattgaaaatgaa

SEQ ID NO: 233687 - DNA, 600 bp, Homo sapiens
aaaaatgtttatctaaccagaaaagttgaaccaagtgaaggaatatcaaccagaggtgagatatttggaggaacaattcaaaggtctggattctctctggcttcctcagtttagttaaccatttaaatttggataaatcacatgatcattctatgcctcagtttccccagctactatatgaaaatacaattcctaagctgcctgtctctcattacttgtgtaagaactgaatacattatatctaggaaagcatttctaaatactaaattgttactattatcaccattagagtaattttgttaataaaaagcttacaaactttaatgttactaaaatttagatcaacttttacatctcaaaaaaaggactkttgaagacacgagacaaatataacatgaatttaagataattaactaaagtaaggcaaagggaaaagaaaagttgcaaagcaaacaggtaaggacaagatcagtgcatagcgtaaatgccatccttgctagcgatagaacacacattttgttctatgctttctggcagctgacacaaggaagaaaacaccatcagctactggagttctagtatccacaaattgaaaatgaa

SEQ ID NO: 233688 - DNA, 582 bp, Homo sapiens
ttcattttgtctatctggcttgattgaccattgtagcagtgatggtatgtatattggaaaatgcaccaggcaggcgtaagtagcctctggtttcttgggattttagtaaagttattaaatagaacacatcatgcatcgctttagtctgcaatagtattttttaaagaaaaatgatcagttgaaagtggcagtaggattgtttaagtgtaggtccatttatggctcatttacagtttttatgtagctttgccaatgttttgtattcctgacagtcccatgagtcactgacatcytgtcaattacagtagccaacctctctacctgtatatctgcaggaaattggccgagatacaaatttaggaaatgtaaggtgtcattctttcagggaaggtacaatagctccaggaagtggataaaatgatctctcaaaaggaagaagggggtatcaagttccccacccctcctccttggttttcattatgtcccctcattgttttttatttcaaaattcgaataatgtgcaagctttgatacatccaggtttttaatcctgccaagaaaacattgtacttttgagataat

SEQ ID NO: 233689 - DNA, 582 bp, Homo sapiens
ttcattttgtctatctggcttgattgaccattgtagcagtgatggtatgtatattggaaaatgcaccaggcaggcgtaagtagcctctggtttcttgggattttagtaaagttattaaatagaacacatcatgcatcgctttagtctgcaatagtattttttaaagaaaaatgatcagttgaaagtggcagtaggattgtttaagtgtaggtccatttatggctcatttacagtttttatgtagctttgccaatgttttgtattcctgacagtcccatgagtcactgacatcttgtcaattacagtagccaacctctctacctgtatatctgcaggaaattggccgagatacaaatttaggaaatgtaaggtgtcwttctttcagggaaggtacaatagctccaggaagtggataaaatgatctctcaaaaggaagaagggggtatcaagttccccacccctcctccttggttttcattatgtcccctcattgttttttatttcaaaattcgaataatgtgcaagctttgatacatccaggtttttaatcctgccaagaaaacattgtacttttgagataat

SEQ ID NO: 233690 - DNA, 582 bp, Homo sapiens
ttcattttgtctatctggcttgattgaccattgtagcagtgatggtatgtatattggaaaatgcaccaggcaggcgtaagtagcctctggtttcttgggattttagtaaagttattaaatagaacacatcatgcatcgctttagtctgcaatagtattttttaaagaaaaatgatcagttgaaagtggcagtaggattgtttaagtgtaggtccatttatggctcatttacagtttttatgtagctttgccaatgttttgtattcctgacagtcccatgagtcactgacatcttgtcaattacagtagccaacctctctacctgtatatctgcaggaaattggccgagatacaaatttaggaaatgtaaggtgtcattctttcagggaaggtacaatagctccaggaagtggataaaatgatctctcaaaaggaagaagggggtatcaagttccccacccctcctccttggttttcattatgtccyctcattgttttttatttcaaaattcgaataatgtgcaagctttgatacatccaggtttttaatcctgccaagaaaacattgtacttttgagataat

SEQ ID NO: 233691 - DNA, 560 bp, Homo sapiens
acaaaaatagttctttatggcttgaagctcttatattgctaatggcttttgacagtggtattacagcttgtttaatccaattgaatttgattattcattcagtaagaagataaattagttgacagaggaaatgtttttcagtcactggttcatattaatgtctgaaaattcagttgtccagaaaaaaagagataggggtagaagagaagccaaagagatataattctaatcaagrattttcctgaaatttgaatttgactatgaagaaagtattgattgtggggagaaataatgttaattccctaaaacacagggtgagaactttttaatggagtacacattactcatcaaaatatagtcccaaactatattatcaaacatgtctaacccactttacacacatacacacacacacacacacacacacaccaccctacgatgcagttatatgaatctttattgtttactaaacataatacatttcctccttccccacttacgtgcctttgcacattgtattctttgtatcctcttcctagaatgctcttctttaaattgat

SEQ ID NO: 233692 - DNA, 560 bp, Homo sapiens
acaaaaatagttctttatggcttgaagctcttatattgctaatggcttttgacagtggtattacagcttgtttaatccaattgaatttgattattcattcagtaagaagataaattagttgacagaggaaatgtttttcagtcactggttcatattaatgtctgaaaattcagttgtccagaaaaaaagagataggggtagaagagaagccaaagagatataattctaatcaaggattttcctgaaatttgaatttgactatgaagaaagtattgattgtggggagaaataatgttaattccctaaaacacagggtgagaactttttaatggagtacacattactcatcaaaatatagtcccaaactatattatcaaacatgtctaacccactttacacacatacacacacacacacacacacacacaccaccctackatgcagttatatgaatctttattgtttactaaacataatacatttcctccttccccacttacgtgcctttgcacattgtattctttgtatcctcttcctagaatgctcttctttaaattgat

SEQ ID NO: 233693 - DNA, 560 bp, Homo sapiens
acaaaaatagttctttatggcttgaagctcttatattgctaatggcttttgacagtggtattacagcttgtttaatccaattgaatttgattattcattcagtaagaagataaattagttgacagaggaaatgtttttcagtcactggttcatattaatgtctgaaaattcagttgtccagaaaaaaagagataggggtagaagagaagccaaagagatataattctaatcaaggattttcctgaaatttgaatttgactatgaagaaagtattgattgtggggagaaataatgttaattccctaaaacacagggtgagaactttttaatggagtacacattactcatcaaaatatagtcccaaactatattatcaaacatgtctaacccactttacacacatacacacacacacacacacacacacaccaccctacgatgcagttatatgaatctttattgtttactaaacataatacatttcctccttccccacttmcgtgcctttgcacattgtattctttgtatcctcttcctagaatgctcttctttaaattgat

SEQ ID NO: 233694 - DNA, 560 bp, Homo sapiens
acaaaaatagttctttatggcttgaagctcttatattgctaatggcttttgacagtggtattacagcttgtttaatccaattgaatttgattattcattcagtaagaagataaattagttgacagaggaaatgtttttcagtcactggttcatattaatgtctgaaaattcagttgtccagaaaaaaagagataggggtagaagagaagccaaagagatataattctaatcaaggattttcctgaaatttgaatttgactatgaagaaagtattgattgtggggagaaataatgttaattccctaaaacacagggtgagaactttttaatggagtacacattactcatcaaaatatagtcccaaactatattatcaaacatgtctaacccactttacacacatacacacacacacacacacacacacaccaccctacgatgcagttatatgaatctttattgtttactaaacataatacatttcctccttccccacttacktgcctttgcacattgtattctttgtatcctcttcctagaatgctcttctttaaattgat

SEQ ID NO: 233695 - DNA, 459 bp, Homo sapiens
tttattatggaaaagcgattgctaaaacacgttggcttcctttttcctgtcaggagakctcattccagtgttaacctgaggagcctgcatatatttgcctttgtcccagaaatatataagtgttcctgtgctgtggagaattaggcactgggaagttaagagagggagagagagagagcccagaattggagtcccagtcttctaaatgcaacctatagcttggaaataaattagacttttaaagacagatatttattggaggtactcctaacaaatttttacctactcaagaaacctgagtcataattctcatattccattctggtctacctaacctcagcacacttatgtgactactaaaattgtttattaacttaaaaactttttgatggcaacaaaaaaagagcagtaaaaaaatgagaaaacatttacattataaataaaatccaaggccaggtg

SEQ ID NO: 233696 - DNA, 607 bp, Homo sapiens
aaaatggtcccataccaacaattcctatcagaccaatcttacttcatcgtataatgaatgttacaggggatggaaggaaacaaaaatattaaaaatgaatgtttgaattatgtcctgatcagtattaatatgccaggaatatattttagaaacccaacagtactaggggaaatgataatgaatgtgaagccctggtaatcaatatattattatgaaatactrtttacagttttgtttcattttttctaaaaatattcaaagcaaatctatgctgagtaaagagtttggcatctgtcttatttatagatctatcctggatgtgtatgtgtgacacaatacaaatttctcaccttttctgcccctaaacttgtttaccctcctatgttccctgtgtccttgatggttccccctagctactaggcaccaaaacaaaatctgggaagcatgctagacctcacccctgtcatctagtcaatctctggattcagtcaattgtaattcctaaatattgctcaagtccaaattttgtcatatagatctacctcctagcccttgatatcactcagctgaattattgcaatattcccctaactggactctctgcatt

SEQ ID NO: 233697 - DNA, 607 bp, Homo sapiens
aaaatggtcccataccaacaattcctatcagaccaatcttacttcatcgtataatgaatgttacaggggatggaaggaaacaaaaatattaaaaatgaatgtttgaattatgtcctgatcagtattaatatgccaggaatatattttagaaacccaacagtactaggggaaatgataatgaatgtgaagccctggtaatcaatatattattatgaaatactgtttacagttttgtttcattttttctaaaaatattcaaagcaaatctatgctgagtaaagagtttggcatctgtcttatttatagatctatcmtggatgtgtatgtgtgacacaatacaaatttctcaccttttctgcccctaaacttgtttaccctcctatgttccctgtgtccttgatggttccccctagctactaggcaccaaaacaaaatctgggaagcatgctagacctcacccctgtcatctagtcaatctctggattcagtcaattgtaattcctaaatattgctcaagtccaaattttgtcatatagatctacctcctagcccttgatatcactcagctgaattattgcaatattcccctaactggactctctgcatt

SEQ ID NO: 233698 - DNA, 346 bp, Homo sapiens
aggttgaattaacttggccaagatgatgcatctaataagaaaaggctctagaattcaaggttttttttaacctcaaagtctatttttcatataatcagtttcaaaatccttcaaacaygttctcaaagtgtatttaagattaggagcctgtatgagattgattcatatgaaattaccaatattcagtcatttttgtcctatgtaaatggcagtttcaaaagttcagcctaatcattcattcacatgtgaccctgtagactgactattcttcagtggatttactttgctcactgacattcctccacgcactcagccacccaggtgaactgatcctggctggtcactc

SEQ ID NO: 233699 - DNA, 572 bp, Homo sapiens
ccaggtatctctcaaacttgtctttcataatgattaatgctcccatgggggaaaaaaaaaaaaaaaawatatatatatatatatatatagtttcagacaaaggtttcacgactccaagaggccacacttagtgtattagtttcatattgctgctgttacaaattaccacaaacttagtggattaaaccaacacaaaattattatctcacaataattctgtaggtcaggagtctgacaagggtctcactgggttaaaaattctgcattcctgtccggagaagttaagcaagaatatatttccttgccttttccagcagccagcactccttgagttattgttccttcctccaaatcttcacagccagcagtagcaggttgagtctttttcaccttgcatcattcacatctccttttctacctcctcttctacttttaaggacctcttggtgattaaattgggcccacccacccagataacccaggataacctcgctatcttgagattggctgtttatcagctttaatttcatctgcaatcttaattcccctttacatgtaagatcacataccca

SEQ ID NO: 233700 - DNA, 502 bp, Homo sapiens
gcgggtttcatgttctttgtgagcccctatacctggcattctactactaatatacaaccaatcacactgatggaaggtagtaatttatacaattttcttcctatgaacttcctatgtactcttaaagagcaggagccatgctttagatgcacaataaatgtatgtcaaattaaaattgttgaactggaygctctttaccccaaaatgcagcgcagactgatcagaacactagtgcttgtcagatccactgtgcacatctcctttagtaagtaaattcttctggctatgaagtggagaaaaaattggaagataagtggagatgccagtaggccaattaaggagctaatcagtaatttaggcaagaaacaattgtgggtggataaataattgttataaattccttaatggaaaactacacaatagtgaaaaagaacaaactattgatctatgcaacaacatgggtgaatctcatagacatacttttatgaagccaggtcctaga

SEQ ID NO: 233701 - DNA, 260 bp, Homo sapiens
gggttttccagacacttcaaccaagactagcaaaacaagattagtttgctagactaacaaggtggcagaataaaaatgaattatctaaataacaaaattaggcatatctgattcataagattgttacatctctgcattttctgtttatatgctatggcaccacatcartgtgcttgaaagctgcaggttaaaacacatgcattcatggcatacaattaggtttaggacatacaacgattttctgtctgagtttaagaaag

SEQ ID NO: 233702 - DNA, 589 bp, Homo sapiens
ctctctctattttgactgaattcccaccctatggaattttggcttaattgtccttgggtggggcctcatcatcttgaatcttctctgataattctaatgtacaggcagggctgagatggcagagatgaaaatcagatttgtattaacttggtcctttctttcctagatcctattgaagtgctaatatagtttcacttcagctattcaccttctaatctttctaggtccatctattttttaacaaatatttctttctaacrttttgtacagtatttgattgtccgtgttatttacaagctccaattttaaactttaaaatgacaaatgcaaagagaaaggaaacgtttccagctaacaggtcaggtgatagagacaataagagccgtggataaaaatagcttccaaattatagccccaggttttcttattatttaagccatattgtactaaattttctaaatttagcagccactatagcactccctgggccttttgataatattgacagattctgaatgcttttgtgtcaaagcactaactataactcttctagacacttcttgttttcagaaatccaattagacaaaac

SEQ ID NO: 233703 - DNA, 589 bp, Homo sapiens
ctctctctattttgactgaattcccaccctatggaattttggcttaattgtccttgggtggggcctcatcatcttgaatcttctctgataattctaatgtacaggcagggctgagatggcagagatgaaaatcagatttgtattaacttggtcctttctttcctagatcctattgaagtgctaatatagtttcacttcagctattcaccttctaatctttctaggtccatctattttttaacaaatatttctttctaacgttttgtacagtatttgattgtccgtgttatttacaagctccaattttaaactttaaaatgacaaatgcaaagagaaaggaaacgtttccagctaacasgtcaggtgatagagacaataagagccgtggataaaaatagcttccaaattatagccccaggttttcttattatttaagccatattgtactaaattttctaaatttagcagccactatagcactccctgggccttttgataatattgacagattctgaatgcttttgtgtcaaagcactaactataactcttctagacacttcttgttttcagaaatccaattagacaaaac

SEQ ID NO: 233704 - DNA, 531 bp, Homo sapiens
tcattgtagaagacccactctgcttcattaactccactgtagacagtattatcacctgtttttacacttactcaagacagagtttataccaagaagaacctcagagaaaggagatttgggttattggagttcagaccaactactaagaaacataagccacagatcttaattatttccccctcaggaagcaaatataagtttgcagaggtatttcataaaacscacacacttgtttcagctagcacttgatatccacatgtcttcaacagggtagtaaagaggacttccatcctgaaatccccttccatgttgggaatatcgtagtagaagatgcagactctgggaccagaaagacaggtttcatcctttactatctgagagtcatgggttcctttgcaaaagggtaataacaatatgctgcacttcacacatttgttttatgaatcaaatgaaacaatgaatgtcaaacagcacagtctcatgcataataaatgctcaataacgaccagttgttgctattacgttattatt

SEQ ID NO: 233705 - DNA, 576 bp, Homo sapiens
ttttccattacacattcaaagaataataactcagtatatgccatgagccagtcctcatgctagtcactggggtgacaatgttcaacaagacagacaagttacctgccccaaatttataatgttgagatttttgaaataatcactctgggtttttttctgcattgaatgtcaaactagaccaaactgaagatagtttaaccatgtatttagcaaccagttttagagctgccctatataaacgatttggcttcctggggcagttcatctgtgattctcagaaactgtagttaatgtgggtaaccaggaaggatcactaacactgccatgcggtgcagcagcaggtcaggctcagcttcctaaaccagtgccaggatcagccacagcaaagtgacggggaagcacgagccatcttggcttattctaactggggtggacagcagagacacttgargtactccttacagcacagctccaagccatgtgacccagccgaacagtgccaaggcacaggggaagttggcctgcagccatcactactgagtaattcatgttcaccaaaagctctggtcagacaag

SEQ ID NO: 233706 - DNA, 550 bp, Homo sapiens
actttacacatgttacatttaaaaaattgagctttagccttacatttagcagcaggaaattaataaatattttacctgctttttttttttttttctttttgagatagagtttcactcttgtcacccaggctggagtgcaatggcgctatctcggctcacggcaacctccgcttcccaggttcaagcaattctcctgcctcagtctcccgagtagctgggattacaggcatgcgccactacrcccagctaatttttgtatttttaccagagacggggtttctcaatgtcggtcaggctggtctcaaactcctgacctcaggtgatccacctgcctcagcctcccaaagtgccgggattacaggcgcgagccaccgcacctggcctttacccacttttgaaatgtagctgccttgatctagtcacagtagtctcattgtatatagattactatagaaagtaaaatacagactacagatggaaagtcaggagataaagaggtcataataataggttatcataatagaaatataggaggcaaaattacaataat

SEQ ID NO: 233707 - DNA, 635 bp, Homo sapiens
atgatggtttccagcttcatccttgtccctacaaaggacatgaactcatcmtttttatggctgcatagtattccatggtgtatatgtgccacattttcttaatccagtctatcattgttggacatttgggttggttccaagtctttgctattgtcagtagtgcctcaataaactccttctttctttgcctagttacacctcaatgcaacctcctggcaggccagccttaagcccagcagtacaaccatgcatctaagctgagttctcatcagagccaacttcaattataaacaactgagatgatgccagaggccagaatccctgagaacccaatttgctgtcatcaccgcagctgaaacaaggcgcttggcatctagaaaagctgatctgtaggaaatttccaatagagttcaattttttttctaagtttaaagtgtacaatatcatcaaggtcagacactcgaggtaaaactaggcttgtgtttaaatataataaaaatatttgaggaatagtaagagtggtgactacttttacacaggaatgtttcaaataaattgtttttttcttgtgccttttaaattttgtgatttgtcaatgagatgctgacatatttttaatgaagcatgccttgtaa

SEQ ID NO: 233708 - DNA, 635 bp, Homo sapiens
atgatggtttccagcttcatccttgtccctacaaaggacatgaactcatcctttttatggctgcatagtattccatggtgtatatgtgccacattttcttaatccagtctatcattgttggamatttgggttggttccaagtctttgctattgtcagtagtgcctcaataaactccttctttctttgcctagttacacctcaatgcaacctcctggcaggccagccttaagcccagcagtacaaccatgcatctaagctgagttctcatcagagccaacttcaattataaacaactgagatgatgccagaggccagaatccctgagaacccaatttgctgtcatcaccgcagctgaaacaaggcgcttggcatctagaaaagctgatctgtaggaaatttccaatagagttcaattttttttctaagtttaaagtgtacaatatcatcaaggtcagacactcgaggtaaaactaggcttgtgtttaaatataataaaaatatttgaggaatagtaagagtggtgactacttttacacaggaatgtttcaaataaattgtttttttcttgtgccttttaaattttgtgatttgtcaatgagatgctgacatatttttaatgaagcatgccttgtaa

SEQ ID NO: 233709 - DNA, 635 bp, Homo sapiens
atgatggtttccagcttcatccttgtccctacaaaggacatgaactcatcctttttatggctgcatagtattccatggtgtatatgtgccacattttcttaatccagtctatcattgttggacatttgggttggttccaagtctttgctattgtcagtagtgcctcaataaactccttctttctttgcctagttacacctcaatgcaacctcctggcaggccagccttaagcccagcagtacaaccatgcatctaagctgagttctcatcagagccaacttcaattataaacaactgagatgatgccagaggccagaawccctgagaacccaatttgctgtcatcaccgcagctgaaacaaggcgcttggcatctagaaaagctgatctgtaggaaatttccaatagagttcaattttttttctaagtttaaagtgtacaatatcatcaaggtcagacactcgaggtaaaactaggcttgtgtttaaatataataaaaatatttgaggaatagtaagagtggtgactacttttacacaggaatgtttcaaataaattgtttttttcttgtgccttttaaattttgtgatttgtcaatgagatgctgacatatttttaatgaagcatgccttgtaa

SEQ ID NO: 233710 - DNA, 580 bp, Homo sapiens
cttataagaccaaacctataaaatgaggggaaacttcacaattacttgtaatttgctctgtggaattgtaacagatggattataaagatgattccatgataaacatstaaatgtggttactaccttctgtgctttcttggttcatatttttattttttttctttataaacagacaattcattcttatctatggcaatgcaaacttttcagatgtattgaatatgtcatagtttttttctattgtaggcatctctaaaaaaggtatagaaaacaaacagagaaaagtctggtgttggaaaggagagagaaataaagcttgtaaaggaatgaagattagagctttctggagataaaaattcttagaagatacaaaagctagttactgaattagatgaaggttctttttcagtttttcccagttgttcacctcttagaaggcacatattcacagcagaaaagaaaaaaagggttaaaaagaaaatacctcggtgtagtgagactgtaatttcatgagggcattactgaagactcactttttccagcatcactcagcatggtattatgcatgtgtgtaatgtaa

SEQ ID NO: 233711 - DNA, 580 bp, Homo sapiens
cttataagaccaaacctataaaatgaggggaaacttcacaattacttgtaatttgctctgtggaattgtaacagatggattataaagatgattccatgataaacatctaaatgtggttactaccttctgtgctttcttggttcatatttttattttttttctttataaacagayaattcattcttatctatggcaatgcaaacttttcagatgtattgaatatgtcatagtttttttctattgtaggcatctctaaaaaaggtatagaaaacaaacagagaaaagtctggtgttggaaaggagagagaaataaagcttgtaaaggaatgaagattagagctttctggagataaaaattcttagaagatacaaaagctagttactgaattagatgaaggttctttttcagtttttcccagttgttcacctcttagaaggcacatattcacagcagaaaagaaaaaaagggttaaaaagaaaatacctcggtgtagtgagactgtaatttcatgagggcattactgaagactcactttttccagcatcactcagcatggtattatgcatgtgtgtaatgtaa

SEQ ID NO: 233712 - DNA, 580 bp, Homo sapiens
cttataagaccaaacctataaaatgaggggaaacttcacaattacttgtaatttgctctgtggaattgtaacagatggattataaagatgattccatgataaacatctaaatgtggttactaccttctgtgctttcttggttcatatttttattttttttctttataaacagacaattcattcttatctatggcaatgcaaacttttcagatgtattgaatatgtcatagtktttttctattgtaggcatctctaaaaaaggtatagaaaacaaacagagaaaagtctggtgttggaaaggagagagaaataaagcttgtaaaggaatgaagattagagctttctggagataaaaattcttagaagatacaaaagctagttactgaattagatgaaggttctttttcagtttttcccagttgttcacctcttagaaggcacatattcacagcagaaaagaaaaaaagggttaaaaagaaaatacctcggtgtagtgagactgtaatttcatgagggcattactgaagactcactttttccagcatcactcagcatggtattatgcatgtgtgtaatgtaa

SEQ ID NO: 233713 - DNA, 580 bp, Homo sapiens
cttataagaccaaacctataaaatgaggggaaacttcacaattacttgtaatttgctctgtggaattgtaacagatggattataaagatgattccatgataaacatctaaatgtggttactaccttctgtgctttcttggttcatatttttattttttttctttataaacagacaattcattcttatctatggcaatgcaaacttttcagatgtattgaatatgtcatagtttttttctattgtaggcatctctaaaaaagktatagaaaacaaacagagaaaagtctggtgttggaaaggagagagaaataaagcttgtaaaggaatgaagattagagctttctggagataaaaattcttagaagatacaaaagctagttactgaattagatgaaggttctttttcagtttttcccagttgttcacctcttagaaggcacatattcacagcagaaaagaaaaaaagggttaaaaagaaaatacctcggtgtagtgagactgtaatttcatgagggcattactgaagactcactttttccagcatcactcagcatggtattatgcatgtgtgtaatgtaa

SEQ ID NO: 233714 - DNA, 341 bp, Homo sapiens
gttaaaaagaaaatacctcggtgtagtgagactgtaatttcatgagggcattactgaagactcactttttccagcatcactcagcatggtattatgcatgtstgtaatgtaaaggaaagtgaatatgcattcttggatgggtgatcaaatcgtaattccagaatgtaatcagaagctgattcattatcctcttgagatttcacaatcttttcatcaggaattaaaattcagaagagggtaaatgtatctaatcatttgaaagttaaaaattagtggatggaggcaacatggccgaataggaacagctccagtctacacctcccagcgtcagtgatgcagaa

SEQ ID NO: 233715 - DNA, 341 bp, Homo sapiens
gttaaaaagaaaatacctcggtgtagtgagactgtaatttcatgagggcattactgaagactcactttttccagcatcactcagcatggtattatgcatgtgtgtaatgtaaaggaaagtgaataygcattcttggatgggtgatcaaatcgtaattccagaatgtaatcagaagctgattcattatcctcttgagatttcacaatcttttcatcaggaattaaaattcagaagagggtaaatgtatctaatcatttgaaagttaaaaattagtggatggaggcaacatggccgaataggaacagctccagtctacacctcccagcgtcagtgatgcagaa

SEQ ID NO: 233716 - DNA, 451 bp, Homo sapiens
ggtgttggaaaggagagagaaataaagcttgtaaaggaatgaagattagagctttctggagataaaaattcttagaagatacaaaagctagttactgaattagatgaaggttctttttcagtttttcccagttgttcacctcttagaaggcacatattcacagcagaaaagaaaaaaagggttaaaaagaaaatacctcggtgtagtgagactgtaatttcatgagggcattactgaagactcactttttccagcatcactcagcatggtattatgcatgtgtgtaatgtaaaggaaagtgaatatgcattcttggatgggtgatcaaatcgtaattccagaatrtaatcagaagctgattcattatcctcttgagatttcacaatcttttcatcaggaattaaaattcagaagagggtaaatgtatctaatcatttgaaagttaaaaatt

SEQ ID NO: 233717 - DNA, 341 bp, Homo sapiens
gttaaaaagaaaatacctcggtgtagtgagactgtaatttcatgagggcattactgaagactcactttttccagcatcactcagcatggtattatgcatgtgtgtaatgtaaaggaaagtgaatatgcattcttggatgggtgatcaaatcgtaattccagaatgtaatcagaagctgattcattatcctcttgagatttcacaatcttttcatcaggaattaaaattcagaagagggtaaatgtatctaatcatttgaaagttaaaaattagtggatggaggmaacatggccgaataggaacagctccagtctacacctcccagcgtcagtgatgcagaa

SEQ ID NO: 233718 - DNA, 402 bp, Homo sapiens
acctcctatctctcctggattctaattagggcagagtaagtgctagttctctgccaacccaggattaggccctgcagctgcagtgaaaataatcacagaagaaaactaagaaataaaaaatggagaaagtgagacatcaaactagaattactagaaacccccaggaagaaggaaaaaaaaaaaacccaggaaaacagaaaaacaatcaaacsagttaattaaaccttgtggtgcgacccgaagatcagggtttcctaaaggagtggaaatttattgacttgaagagtatttattgattactgatttgaagaggaagaaaaaccatgaatggtctaaagcaaaagcctagtgtctgaagaagtcagtagggtgaaaacaagagctggccagaatgtccacaga

SEQ ID NO: 233719 - DNA, 425 bp, Homo sapiens
cccctgccatattgtttgtaatatccaggctgggaaaggatgatattactccctgtatcacaggggatgtacacacccctgtgatattattagtaatatccaygggggagataatactacttccaataccataaacaccctgtgtgtacaccctctgtgatattttttgtaatatccagggtgggagaggagtatattactccctataaggcagagtgtgtatacacccctctgtgatattgttcataatatccactgggggatatgatattactcccaatatcataaacacctcacatgtacaccgtctgtgatattatttgtaatatccagtgggggagaggatgatattactttccacatcgcaaggggtttacacccctctgtgatacagtttgtaatatctagagggggagagggtgata

SEQ ID NO: 233720 - DNA, 425 bp, Homo sapiens
cccctgccatattgtttgtaatatccaggctgggaaaggatgatattactccctgtatcacaggggatgtacacacccctgtgatattattagtaatatccacgggggagataatactacttccaataccataaacaccctgtgtgtacaccctctgtgatattttttgtaatatccagggtgggagaggagtatattactccctataaggcagagtgtgtatacacccctctgtgatattgttcataatatccactgggggatatgatrttactcccaatatcataaacacctcacatgtacaccgtctgtgatattatttgtaatatccagtgggggagaggatgatattactttccacatcgcaaggggtttacacccctctgtgatacagtttgtaatatctagagggggagagggtgata

SEQ ID NO: 233721 - DNA, 425 bp, Homo sapiens
cccctgccatattgtttgtaatatccaggctgggaaaggatgatattactccctgtatcacaggggatgtacacacccctgtgatattattagtaatatccacgggggagataatactacttccaataccataaacaccctgtgtgtacaccctctgtgatattttttgtaatatccagggtgggagaggagtatattactccctataaggcagagtgtgtatacacccctctgtgatattgttcataatatccactgggggatatgatattactcccaatatcataaacacctcacatgtacaccgtctgtgatattatttgtaatatccagtgggggagaggatgatattactttccacatcgcarggggtttacacccctctgtgatacagtttgtaatatctagagggggagagggtgata

SEQ ID NO: 233722 - DNA, 578 bp, Homo sapiens
aatttcttctttgtatttggtgatcttaagaggaaatattagtgtcctttttcttaagccactggtctaaaatatctgtcaagcataagatttaaatccctgacaaacaacttctaagattttagaaaaagttttgagtaccttgtgattccaactcttatctctgcttttgagcctckatttctaccccctcgtcatagtccttacccacctgtaactttaagacatcaaagttcattttaaaaaagaaaaaaataataagtttcatagaaagaaaacctctcatatatattgggagggctaagacaaatatgtttctcttttcatgcatttttctggttgaactgaattctttcacctcctcttagaaaagtcttcgactgtgccagctagaagtacggcagaatgggtaaagtccagccttgctaagacaatttttttggtctgtggtacctacagaggaggttcttacttataatgtgaagtacatggcataaactggtggagaagagcttccttttgttaaatcgttcatttattccactggcctaatgaaagttatatgaaccacaatgagt

SEQ ID NO: 233723 - DNA, 501 bp, Homo sapiens
gtgctagtgtgacaactttgatacactcatttagacattgacctactatcttgtttgaaagctaaaacccaaagaaatttgtctttttacataaaacaaattcagcccttgccttccttgtagattacatcttccactagcagtaataaaaaagtaacaatatgcataagtcaaagtatcttcttagatcctctgtagtgttttattatttarttgtgttaattaaagtaactgtctcaaaatttcaaggaatgcctgagaagcaattcatgttcaaaggctgccctcttgtgacaatgtgttgtatgctttactgtaaaagtaaccttattttaccttataacctctacaatccaattcataacagcataaaaaggaaacaaaaccttacataattttgaattttaaaacgtaccttgtttgtatggctcctttagctaatgaatagtcaatttggtaaatattccagtgagttgaaggtttgaatctatctcacttaac

SEQ ID NO: 233724 - DNA, 501 bp, Homo sapiens
gtgctagtgtgacaactttgatacactcatttagacattgacctactatcttgtttgaaagctaaaacccaaagaaatttgtctttttacataaaacaaattcagcccttgccttccttgtagattacatcttccactagcagtaataaaaaagtaacaatatgcataagtcaaagtatcttcttagatcctctgtagtgttttattatttaattgtgttaattaaagtaactgtctcaaaatttcaaggaatgcctgagaagcaattcatgttcaaaggctgccctcttgtgacaatgtgttgtatgctttactgtaaaagtaaccttattttaccttataacctctacaatccaattcataacagcataaaaaggaaacaaaaccttacataattttgaattttaaaamgtaccttgtttgtatggctcctttagctaatgaatagtcaatttggtaaatattccagtgagttgaaggtttgaatctatctcacttaac

SEQ ID NO: 233725 - DNA, 501 bp, Homo sapiens
gtgctagtgtgacaactttgatacactcatttagacattgacctactatcttgtttgaaagctaaaacccaaagaaatttgtctttttacataaaacaaattcagcccttgccttccttgtagattacatcttccactagcagtaataaaaaagtaacaatatgcataagtcaaagtatcttcttagatcctctgtagtgttttattatttaattgtgttaattaaagtaactgtctcaaaatttcaaggaatgcctgagaagcaattcatgttcaaaggctgccctcttgtgacaatgtgttgtatgctttactgtaaaagtaaccttattttaccttataacctctacaatccaattcataacagcataaaaaggaaacaaaaccttacataattttgaattttaaaacgtaccttgtttrtatggctcctttagctaatgaatagtcaatttggtaaatattccagtgagttgaaggtttgaatctatctcacttaac

SEQ ID NO: 233726 - DNA, 408 bp, Homo sapiens
atatgtctaagcagaagggtccatgggccaaattaggtatagatttttgcattccaaatatggtaaagaagaagcaggaagctggggctcctatacaggtcacacagaaatggacaaggaagaggccagaagcagcttgtggggacaagatgtcaagccccaaatgtttaacccaccaaccatcctccaaattctggctctgtttaacaaggctgtggtctgacactwcatgccgcctcagtgactaaagcataatttcccgtctcctgggagtgttgacagctgactcctggcaacaatactcacagcacagtaaagttccttcatccaagttcatgtcccttctcaaggcatcccacatccgagaactgcttggtacagaaatataatggcctggttttcttgctc

SEQ ID NO: 233727 - DNA, 495 bp, Homo sapiens
aagaaacttcctgtgacaacataataaattcaaaaagttctgtaactcagacaatttagatagaagtcataactttggcctataaagccctgttcaccctaaagatggattaaacaatgaaaaagatattgatatcaaaaattcaatcaggaatttgattaaagcatttcattaaatgtgataatttcttagtatattatcttacatatgcaatattcatgtgtaacaaattatatacaagtaaacatttgaccatattatctgcagcataatttacatatcaatttacatattcagttttgcttacmtgaaaacttggatcttctcaataagaaaatttgtgaaatctttaattcctcatccccaggaatgtaaataaataaatataaatactgtaagtcagtgattttttcctaggaagacagtaaaaatactttacgtgccttctcattgtaaacctaaataacaaacagagaaaggctctctaaaggaaaa

SEQ ID NO: 233728 - DNA, 495 bp, Homo sapiens
aagaaacttcctgtgacaacataataaattcaaaaagttctgtaactcagacaatttagatagaagtcataactttggcctataaagccctgttcaccctaaagatggattaaacaatgaaaaagatattgatatcaaaaattcaatcaggaatttgattaaagcatttcattaaatgtgataatttcttagtatattatcttacatatgcaatattcatgtgtaacaaattatatacaagtaaacatttgaccatattatctgcagcataatttacatatcaatttacatattcagttttgcttacatgaaaacttggatcttctcaataagaaaatttgtgaaatctttaattcctcatccccaggaatgtaaataaataaatataaatactgtaagtyagtgattttttcctaggaagacagtaaaaatactttacgtgccttctcattgtaaacctaaataacaaacagagaaaggctctctaaaggaaaa

SEQ ID NO: 233729 - DNA, 511 bp, Homo sapiens
gggttttggagaaggggatgaaggaattgtgctgcatcagaggtccccacctaacagccacagggactttttctctgctctggccaggccgttgtattaggctgatacaaaagtaattttggttttgtcattgaaagtaatgagaccatctgacttacaatgtctgtgccgtaaccarctcctaatagcctcctaggacagctttgccctgacatacactgtcgtgtagccacgtctgctttgtaactcctgaggtagctgccaccatgaccaatgccttctcatctttactctacatgcaggtaacagttataattatatctctctgtattcacagaacatttagtacatctgggacttctacaaaatttccctagctgattttggtgttctagtgtcctggcagctctagccatgtagggatgatgctttatcagaatttctgttgagttttttgctttttctcacaaactgattccacttttcccacatacatttgacaattcatttg

SEQ ID NO: 233730 - DNA, 511 bp, Homo sapiens
gggttttggagaaggggatgaaggaattgtgctgcatcagaggtccccacctaacagccacagggactttttctctgctctggccaggccgttgtattaggctgatacaaaagtaattttggttttgtcattgaaagtaatgagaccatctgacttacaatgtctgtgccgtaaccagctcctaatagcctcctaggacagctttgccctgacatacactgtcgtgtagccacgtctgctttgtaactcctgaggtagctgccaccatgaccaatgccttctcatctttactctacatgcaggtaacagttataattatatctctstgtattcacagaacatttagtacatctgggacttctacaaaatttccctagctgattttggtgttctagtgtcctggcagctctagccatgtagggatgatgctttatcagaatttctgttgagttttttgctttttctcacaaactgattccacttttcccacatacatttgacaattcatttg

SEQ ID NO: 233731 - DNA, 511 bp, Homo sapiens
gggttttggagaaggggatgaaggaattgtgctgcatcagaggtccccacctaacagccacagggactttttctctgctctggccaggccgttgtattaggctgatacaaaagtaattttggttttgtcattgaaagtaatgagaccatctgacttacaatgtctgtgccgtaaccagctcctaatagcctcctaggacagctttgccctgacatacactgtcgtgtagccacgtctgctttgtaactcctgaggtagctgccaccatgaccaatgccttctcatctttactctacatgcaggtaacagttataattatatctctctgtattcacagaacatttagtacatctgggacttctacaaaatttccctagctgattttggtgttctagtgtcctggcagctctagccatgtagggatgatgctttatcagmatttctgttgagttttttgctttttctcacaaactgattccacttttcccacatacatttgacaattcatttg

SEQ ID NO: 233732 - DNA, 273 bp, Homo sapiens
acgctgactttcttgttccaaatgattgttttcaagaatgtttgtatagaaaacagccttggaatagaaarccagtacctccttctggaacaaaggaaaagtttatttactgtctagtataatgcagataatttctccctcttgggaagggtacagccaagtgaacttcccataatacaagttggggtttcttgagcttgggtttttcttccacagtgtaatgtgcaggtgccacttggctctctttgtgttatcctgggaaagctgatggct

SEQ ID NO: 233733 - DNA, 561 bp, Homo sapiens
cagcccttgagccatttcaaacagatgatgaggcagactcagatgaggaagaggaggatgagtgtaaaaaactaacttcaaattctgagtgtggggagcagctaccagaggagattaaagaaaagaaagaaaaactttaaaaagtatgttttactagcccgttggctccacctgccgaattaagtgaatgrccacctcctctctctcctctaaatgggtgagaaaataaattggctgaaaaacttactgctcctgtagttacaacattaaaatctggagcaattggtggtgctagacaaaattctattcaaaaagctaaagccaagggagaccttgaagcatggcaatttcccgttactataatccagcaagtaggacagaatatagctaattaggctgctttctcttttaagttactaaagaatttaagcaagccattagtcaatatggactgaactctctttttgtgcaaactttatttaaaaatatggctcttgataatagattactaccatataattaggatactttgacaaaacctgttctcactccatctcagta

SEQ ID NO: 233734 - DNA, 561 bp, Homo sapiens
cagcccttgagccatttcaaacagatgatgaggcagactcagatgaggaagaggaggatgagtgtaaaaaactaacttcaaattctgagtgtggggagcagctaccagaggagattaaagaaaagaaagaaaaactttaaaaagtatgttttactagcccgttggctccacctgccgaattaagtgaatggccacctcctctctctcctctaaatgggtgagaaaataaattggctgaaaaacttactgctcctgtagttacaacattaaaatctggagcaattggtggtgstagacaaaattctattcaaaaagctaaagccaagggagaccttgaagcatggcaatttcccgttactataatccagcaagtaggacagaatatagctaattaggctgctttctcttttaagttactaaagaatttaagcaagccattagtcaatatggactgaactctctttttgtgcaaactttatttaaaaatatggctcttgataatagattactaccatataattaggatactttgacaaaacctgttctcactccatctcagta

SEQ ID NO: 233735 - DNA, 328 bp, Homo sapiens
ccatcttaaaaaatatgttttaggaacacataattctaaattatgaaattattctcatatgtaagatactgctatatgacaattcaagatttcttgcttcctaggttttttmttaaaataagggttactaagtgttaatatcttgctagatatatgtgattaagactactagatacaagagaaacaattctatatgcaaaatgtataccggtttttgtttcagaaaaagtaaattcgcttagagatttttaaggatttttttaaattgaaggaataaaaaagatagataaaactaaatgtgtataaaaagttgggaaagatgaaaaaa

SEQ ID NO: 233736 - DNA, 328 bp, Homo sapiens
ccatcttaaaaaatatgttttaggaacacataattctaaattatgaaattattctcatatgtaagatactgctatatgacaattcaagatttcttgcttcctaggttttttcttaaaataagggttactaagtgttaatatcttgctagatatatgtgattaagactactagatacaagagaaacaattctrtatgcaaaatgtataccggtttttgtttcagaaaaagtaaattcgcttagagatttttaaggatttttttaaattgaaggaataaaaaagatagataaaactaaatgtgtataaaaagttgggaaagatgaaaaaa

SEQ ID NO: 233737 - DNA, 354 bp, Homo sapiens
ctggttttcctgtttacattcctttgtaatattatgctcactcatgaccctggacacactctttctatgtctaaattcaagtctccttatcatcggaattgacttccaagtgatttaaattagcttcccgtaagaagacacagttatgccacaggagttttaccctttaaatgactggcctgtaataaagattttaggttttatcaagataatccatgtgttgcctttatttttttttaattacttgggaaaactgagggttttcagttttcacatccatgtaaccttctatgttgcttttgatrtcttttggttgtcatgctaattaaatgaatgactgttatttaaaaatga

SEQ ID NO: 233738 - DNA, 354 bp, Homo sapiens
ctggttttcctgtttacattcctttgtaatattatgctcactcatgaccctggacacactctttctatgtctaaattcaagtctccttatcatcggaattgacttccaagtgatttaaattagcttcccgtaagaagacacagttatgccacaggagttttaccctttaaatgactggcctgtaataaagattttaggttttatcaagataatccatgtgttgcctttatttttttttaattacttgggaaaactgagggttttcagttttcacatccatgtaaccttctatgttgcttttgatgtcttttggttgtcwtgctaattaaatgaatgactgttatttaaaaatga

SEQ ID NO: 233739 - DNA, 357 bp, Homo sapiens
tcttgctgcactttatggaaataatcaggccmggtatgataagactaaaacttattttgcatacaaaattggtcctactatgatttgtctttgataaaatgatggactagagaaaatttttgttccaaaagaaaactatgacatatgctattagattccaaccctgatcattgttttagagtttttattatttgcctataatttgggctgaatcctgaattatttcctggatccaagtgttccctagtgaatctgaatataatatatttttaaaaacttcttttatcctgtcaggaatgagatgtattttttgaaggactacttaaactagcaattacaattcgattattatgatta

SEQ ID NO: 233740 - DNA, 357 bp, Homo sapiens
tcttgctgcactttatggaaataatcaggccaggtatgataagactaaaacttattttgcatacaaaattggtcctactatgatttgtctttgataaaatgatggactagagaaaatttttgttccaaaagaaaactatgacatatgctattagattccaaccctgatcattgttttagagtttttattatttgcctataatttgggctgaatcctgaattatttcctggmtccaagtgttccctagtgaatctgaatataatatatttttaaaaacttcttttatcctgtcaggaatgagatgtattttttgaaggactacttaaactagcaattacaattcgattattatgatta

SEQ ID NO: 233741 - DNA, 357 bp, Homo sapiens
tcttgctgcactttatggaaataatcaggccaggtatgataagactaaaacttattttgcatacaaaattggtcctactatgatttgtctttgataaaatgatggactagagaaaatttttgttccaaaagaaaactatgacatatgctattagattccaaccctgatcattgttttagagtttttattatttgcctataatttgggctgaatcctgaattatttcctggatccaagtgttccctagtgaatctgaatataatatatttttaaaaacttsttttatcctgtcaggaatgagatgtattttttgaaggactacttaaactagcaattacaattcgattattatgatta

SEQ ID NO: 233742 - DNA, 390 bp, Homo sapiens
actggcttataaaaaacaaacaccattttatttgtttgaagttctgtggatctgcattttggtgtggtgggttcagctgggtagttgatatatttgtgttgcytggatcacaaaaagtccttagtcacctggtgccttgactgagcctggttggtttaagatagtttccttcacaatctggtggtttgtggtgactcttggctaggccctgtgtctccaacagggttgctccagacctcttcacaatttgactgtgtccaaaatggcaagaaccaatggatatttgcatcacattttccattgtccattcactggacaagtcagatggaaaagcccaatttattatcagagcataatatgagggcttgcatagaaggaaagctgttattg

SEQ ID NO: 233743 - DNA, 546 bp, Homo sapiens
aacacacttgattttcaaagcaccttcctaacccatttttaattggaatagagtcaaaggtagatggcttattaktagtcatctcatttaaacctcatggaattttcctgttaaatctcaaagtaaacaatttgttataggctgttttgtcaagtgcatggaagggacagcataagacatgtggtacttcatttcaaaattgcttgagatggttttcattataatcatacattatttgcttctggttttccagaaaagccagctaaacctgtggttcatttagatataaatgaaatatcctcaaaggattgctcaaagtgacttatgcaacttgaatatatatttttttctgtagggtgtttattccaaattatctggccatttgtggcaatttgcagttttttagaaaacaccaaatatttttcaagttagagatgttttaataaaaacagtcatattgaactggaagcagccaaataaaatggccctttatttcacagttgagaatttgaaattggaaggtaattaacatatgtaaggatgatg

SEQ ID NO: 233744 - DNA, 390 bp, Homo sapiens
actggcttataaaaaacaaacaccattttatttgtttgaagttctgtggatctgcattttggtgtggtgggttcagctgggtagttgatatatttgtgttgcctggatcacaaaaagtccttagtcacctggtgccttgactgagcctggttggtttaagatagtttccttcacaatctggtggtttgtggtgactcttggctaggccctgtgtctccaacagggttgctccagacctcttcacartttgactgtgtccaaaatggcaagaaccaatggatatttgcatcacattttccattgtccattcactggacaagtcagatggaaaagcccaatttattatcagagcataatatgagggcttgcatagaaggaaagctgttattg

SEQ ID NO: 233745 - DNA, 390 bp, Homo sapiens
actggcttataaaaaacaaacaccattttatttgtttgaagttctgtggatctgcattttggtgtggtgggttcagctgggtagttgatatatttgtgttgcctggatcacaaaaagtccttagtcacctggtgccttgactgagcctggttggtttaagatagtttccttcacaatctggtggtttgtggtgactcttggctaggccctgtgtctccaacagggttgctccagacctcttcacaatwtgactgtgtccaaaatggcaagaaccaatggatatttgcatcacattttccattgtccattcactggacaagtcagatggaaaagcccaatttattatcagagcataatatgagggcttgcatagaaggaaagctgttattg

SEQ ID NO: 233746 - DNA, 415 bp, Homo sapiens
ataatatgagggcttgcatagaaggaaagctgttattgggaaacatgagtacaatggtgtactgtaggaaatacatattatgtacattttaaaaaatgtaattgtaggccaaaattgctggtttgcaagatgcactttccatgatgttcaggtakagaaaagcaagatgtactgtcatgggaacactcatatgaagttatttgtggaatctacatataaataggaaaatagttaatacagcctagtatatttctataacatttattttagtgaacttataatgtttctttgcattaaattattagattatatctttagatcatattgttactaaattaataggtaatacatatttttattcaaaaataaattgtgcatctaatgtctaccaattaatgtacttgtagatgtatct

SEQ ID NO: 233747 - DNA, 415 bp, Homo sapiens
ataatatgagggcttgcatagaaggaaagctgttattgggaaacatgagtacaatggtgtactgtaggaaatacatattatgtacattttaaaaaatgtaattgtaggccaaaattgctggtttgcaagatgcactttccatgatgttcaggtagagaaaagcaakatgtactgtcatgggaacactcatatgaagttatttgtggaatctacatataaataggaaaatagttaatacagcctagtatatttctataacatttattttagtgaacttataatgtttctttgcattaaattattagattatatctttagatcatattgttactaaattaataggtaatacatatttttattcaaaaataaattgtgcatctaatgtctaccaattaatgtacttgtagatgtatct

SEQ ID NO: 233748 - DNA, 546 bp, Homo sapiens
aacacacttgattttcaaagcaccttcctaacccatttttaattggaatagagtcaaaggtagatggcttattagtagtcatctcatttaaacctcatggaattttcctgytaaatctcaaagtaaacaatttgttataggctgttttgtcaagtgcatggaagggacagcataagacatgtggtacttcatttcaaaattgcttgagatggttttcattataatcatacattatttgcttctggttttccagaaaagccagctaaacctgtggttcatttagatataaatgaaatatcctcaaaggattgctcaaagtgacttatgcaacttgaatatatatttttttctgtagggtgtttattccaaattatctggccatttgtggcaatttgcagttttttagaaaacaccaaatatttttcaagttagagatgttttaataaaaacagtcatattgaactggaagcagccaaataaaatggccctttatttcacagttgagaatttgaaattggaaggtaattaacatatgtaaggatgatg

SEQ ID NO: 233749 - DNA, 592 bp, Homo sapiens
ggagggctttcccaggtaatgtgtctagagtgttgggcagaagaatctgggactacaccacaccagttctctscttaatccacgtcatttgccttctatcccagctatgtttccagtgtcctctgggtgtttccaagagcaacaggaaacgaataaatctctggtgagttgtttatttgttcttcactttgttttacactgtattttctgagtttttgggtgtctgtgaattaaaaaggaaaagtagaaataagtaaaactcaggttgaaggaaatatacataaataagataaagctgacctgtagatataggcaggttataagagcttagagttgtctaagttgggtgcaaattttcctctgatctttctgatgccgagacaaaaaaggcagtcatatttgttacgtgattggagtggaacccgagaagagaacatgctgtgttcttgtgggacaggaaagcttgcgtgcaccaagtctgaaccaccaccttcattggtgacatatattatgtgctggaacatatttcacaccggcctggcagtaaccacttgtagtgttgtacagtggaaacggtcatcttccgctaaag

SEQ ID NO: 233750 - DNA, 592 bp, Homo sapiens
ggagggctttcccaggtaatgtgtctagagtgttgggcagaagaatctgggactacaccacaccagttctctccttaakccacgtcatttgccttctatcccagctatgtttccagtgtcctctgggtgtttccaagagcaacaggaaacgaataaatctctggtgagttgtttatttgttcttcactttgttttacactgtattttctgagtttttgggtgtctgtgaattaaaaaggaaaagtagaaataagtaaaactcaggttgaaggaaatatacataaataagataaagctgacctgtagatataggcaggttataagagcttagagttgtctaagttgggtgcaaattttcctctgatctttctgatgccgagacaaaaaaggcagtcatatttgttacgtgattggagtggaacccgagaagagaacatgctgtgttcttgtgggacaggaaagcttgcgtgcaccaagtctgaaccaccaccttcattggtgacatatattatgtgctggaacatatttcacaccggcctggcagtaaccacttgtagtgttgtacagtggaaacggtcatcttccgctaaag

SEQ ID NO: 233751 - DNA, 592 bp, Homo sapiens
ggagggctttcccaggtaatgtgtctagagtgttgggcagaagaatctgggactacaccacaccagttctctccttaatccacgtcatttgccttctatcccagctatgtttccagtgtcctctgggtgtttccaagagcaacaggaaacgaataaatctctggtgagttgtttatttgttcttcactttgttttacactgtattttctgagtttttgggtgtctgtgaattaaaaaggaaaagtagaaataagtaaaactcaggttgaaggaaatatacataaataagataaagctgacctgtagatataggcaggttataagagcttagagttgtctaagttgggtgcaaattttcctctgatctttctgatgccgagacaaaaaaggcagtcatatttgttacgtgattggagtggaacccgagaagagaacatgctgtgttcttgtgggacaggaaagcttgcgtgcaccaagtctgaaccaccaccttcattggtgacatakattatgtgctggaacatatttcacaccggcctggcagtaaccacttgtagtgttgtacagtggaaacggtcatcttccgctaaag

SEQ ID NO: 233752 - DNA, 551 bp, Homo sapiens
agatcatcctggctaacacagtgaaatccgtctttactaaaaatacaaaaattagcctggcatggtggtaggtgcctgtagtcccagctacttgggaggctgaggcaggagaatggcatgaacctgggaggtggaggttgcagtgagccaagattgcaccactgtactccagcctgggtgacagagcaagactccatctcagaaaaaaaaaaaaaaaaaaaaaatcaagaattttagaaatcctatacaattttagaatggattgatgacatacactaaatataacctgaagaaggttcaacattattttttattttgacagtgctacccatgtgacttaacatgttaaatagtcctgtttacctctcttttgggtgcttcaggggcctctgtagtrtcccaaagttagaggtcagaaaagacaattttgaagttgaaatttgattttgggaagcctattaaatatattaaaggtttaaacacttgatgttatgaaatagaattccacgtcaccataagtcattcatttacctaaaatcatgacttaaaaa

SEQ ID NO: 233753 - DNA, 218 bp, Homo sapiens
cttctgtctggatatcttgagtttctggattgtaaaccttattagggcccatttttcctagaattggagcctctactttgttcttgctactttagttcacccagaaagcacgatctctgcctraatttcaaagtgttggctagcttaaatatccttttgtgagactttcgtcttcctgcggggtgattttttcatcttacataccattgctaatcttt

SEQ ID NO: 233754 - DNA, 218 bp, Homo sapiens
cttctgtctggatatcttgagtttctggattgtaaaccttattagggcccatttttcctagaattggagcctctactttgttcttgctactttagttcacccagaaagcacgatctctgcctgaatttcaaagtgttggctagyttaaatatccttttgtgagactttcgtcttcctgcggggtgattttttcatcttacataccattgctaatcttt

SEQ ID NO: 233755 - DNA, 218 bp, Homo sapiens
cttctgtctggatatcttgagtttctggattgtaaaccttattagggcccatttttcctagaattggagcctctactttgttcttgctactttagttcacccagaaagcacgatctctgcctgaatttcaaagtgttggctagcttaaatatccttttgtgagactttygtcttcctgcggggtgattttttcatcttacataccattgctaatcttt

SEQ ID NO: 233756 - DNA, 314 bp, Homo sapiens
cttctgtctggatatcttgagtttctggattgtaaaccttattagggcccatttttcctagaattggagcctctactttgttcttgctactttagttcacccagaaagcacgatctctgcctgaatttcaaagtgttggctagcttaaatatccttttgtgagactttcgtcttcctgcggggtgattttttcatcttacataccattgctaatctttttgtcttgaatgtaattgaaatagttttaatctgtgttaccagcaacaagaacccyttttatgagatgaagaggccaggtcagtctcataacatgt

SEQ ID NO: 233757 - DNA, 596 bp, Homo sapiens
ttcatacaacggaatattattcagctttaaaacaagaaagcccgtcaatatgcaacatggatgaacctagaggacattaatgctaagtaaagtaaatcagtcacagaaggacaaactgtatgattccacttgtataaagtatctaagatagccaaattcattagaatcacagattagaatgrtgatagctctttaaattgaagtcaattttgcattcctaggttttgtaattttggtatcaggattctgactcataaaacaagtttggaatttcccccttctttatttctgaaataatttaaaaattttattttttttaaacgtttgaaagaattcaccagtgaaattctttagatctggggtttgcttatttttttatttatttaattttatgtttttatgtgcaggtattttacaattaatttaattactttaataaatgtcaattacttcatatgttccattaaatcttgtgaatttttttataagtttttttcaaggaagtcaccctttcatccaagtaatgaaaatttgtatataatgtttcacaatattccattatcttgttaatgtctcttgtgtttacaactgtacaa

SEQ ID NO: 233758 - DNA, 485 bp, Homo sapiens
gtatctaagatagccaaattcattagaatcacagattagaatgatgatagctctttaaattgaagtcaattttgcattcctaggttttgtaattttggtatcaggattctgactcataamacaagtttggaatttcccccttctttatttctgaaataatttaaaaattttattttttttaaacgtttgaaagaattcaccagtgaaattctttagatctggggtttgcttatttttttatttatttaattttatgtttttatgtgcaggtattttacaattaatttaattactttaataaatgtcaattacttcatatgttccattaaatcttgtgaatttttttataagtttttttcaaggaagtcaccctttcatccaagtaatgaaaatttgtatataatgtttcacaatattccattatcttgttaatgtctcttgtgtttacaactgtacaatctcattaatccctgatatgtataatt

SEQ ID NO: 233759 - DNA, 485 bp, Homo sapiens
gtatctaagatagccaaattcattagaatcacagattagaatgatgatagctctttaaattgaagtcaattttgcattcctaggttttgtaattttggtatcaggattctgactcataaaacaagtttggaatttcccccttctttatttctgaaataatttaaaaattttattttttttaaacgtttgaaagaattcaccagtgaaattctttagatctggggtttgcttatttttttatttatttaattttatgtttttatgtgcaggtattttacaattaatttaattactttaataaatgtcaattacttcatatgttccattaaatcttgtgaawttttttataagtttttttcaaggaagtcaccctttcatccaagtaatgaaaatttgtatataatgtttcacaatattccattatcttgttaatgtctcttgtgtttacaactgtacaatctcattaatccctgatatgtataatt

SEQ ID NO: 233760 - DNA, 526 bp, Homo sapiens
gggtctgcttaactttatcccatacatttttatatagtatatttttatttgtattcagttcaatgtatttaaaagtgtttcttatgatttcttcattgagctaaagggcattttaaggtgtatttaaatcttccaatagtgtagactttcctgggtagcttgtttttacccatttcaactcattttcattatggtcagaaagcttactttccatgattacagtgttttgaaacttcttgagagatattttgtggtctatagcctattgataaatgtttcatgtgtagcataatagaacatatattctattgtcttggtcaatatcgattaggtcaagctgttgtcaaaattattttatcttaattttctttagttattctgtcagcaatacagcattatgtcttcataattacttgacattttatcattaygaaatagctgtctgttgtaatattgctcgtttggaggtctactttttcttatactaatatagccacataagatttcttgtccttgttgttacctt

SEQ ID NO: 233761 - DNA, 563 bp, Homo sapiens
tctacatttggttctctttatttttattctgttctttgagtttcttaaacctgtaagttgatatatgctgacaattaggaaaacttttggtctttactttttcaaatagctttttytgtctcatttacttctctactctttctaggactccaattatattagtgctagactggccctatttttattatttttcttcgtttgtattaactgtattgggaaactgttcttgatctgtttttaagtgcactgataattttttgtgccatctttaatttactggtatgtacataaaatgacatttttataaaagatattctgtctctcagttctaaaatttgtcctattatctctttatcatttttacttctctgttgagattctccatatattccctcttatgaccatctattccttaaatccttgaatatgcttataatagcttattttaaatttcttatattctaattccagcatgtgggccatttcaatgtcttaattcattgtttactttttttgtcatgtgtcatattttcctggttctatgtctaggcaggttaaattat

SEQ ID NO: 233762 - DNA, 563 bp, Homo sapiens
tctacatttggttctctttatttttattctgttctttgagtttcttaaacctgtaagttgatatatgctgacaattaggaaaacttttggtctttactttttcaaatagctttttttgtctcatttacttctctactctttctaggactccaattatattagtgctagactggccctatttttattatttttcttcgtttgtattaactgtattgggaaaytgttcttgatctgtttttaagtgcactgataattttttgtgccatctttaatttactggtatgtacataaaatgacatttttataaaagatattctgtctctcagttctaaaatttgtcctattatctctttatcatttttacttctctgttgagattctccatatattccctcttatgaccatctattccttaaatccttgaatatgcttataatagcttattttaaatttcttatattctaattccagcatgtgggccatttcaatgtcttaattcattgtttactttttttgtcatgtgtcatattttcctggttctatgtctaggcaggttaaattat

SEQ ID NO: 233763 - DNA, 563 bp, Homo sapiens
tctacatttggttctctttatttttattctgttctttgagtttcttaaacctgtaagttgatatatgctgacaattaggaaaacttttggtctttactttttcaaatagctttttttgtctcatttacttctctactctttctaggactccaattatattagtgctagactggccctatttttattatttttcttcgtttgtattaactgtattgggaaactgttcttgatctgtttttaagtgcactgataattttttgtgccatctttaatttactggtatgtacataaaatgacatttttatawaagatattctgtctctcagttctaaaatttgtcctattatctctttatcatttttacttctctgttgagattctccatatattccctcttatgaccatctattccttaaatccttgaatatgcttataatagcttattttaaatttcttatattctaattccagcatgtgggccatttcaatgtcttaattcattgtttactttttttgtcatgtgtcatattttcctggttctatgtctaggcaggttaaattat

SEQ ID NO: 233764 - DNA, 563 bp, Homo sapiens
tctacatttggttctctttatttttattctgttctttgagtttcttaaacctgtaagttgatatatgctgacaattaggaaaacttttggtctttactttttcaaatagctttttttgtctcatttacttctctactctttctaggactccaattatattagtgctagactggccctatttttattatttttcttcgtttgtattaactgtattgggaaactgttcttgatctgtttttaagtgcactgataattttttgtgccatctttaatttactggtatgtacataaaatgacatttttataaaagataytctgtctctcagttctaaaatttgtcctattatctctttatcatttttacttctctgttgagattctccatatattccctcttatgaccatctattccttaaatccttgaatatgcttataatagcttattttaaatttcttatattctaattccagcatgtgggccatttcaatgtcttaattcattgtttactttttttgtcatgtgtcatattttcctggttctatgtctaggcaggttaaattat

SEQ ID NO: 233765 - DNA, 592 bp, Homo sapiens
aaattcaataattctgcttcataaaaaaatagaaagtttctactggttttaattatttttgaagctgtatcattaaatgaaatttctgcctcatggaaggtttttagaactatgtaataataccatacagaccattaggagagaaatgaataaagactgaaagaagtaagcactgtgtggtaacatagatggcgcacagttgtgtgcgtggagccctaatacatttgaccatggaatttatacaataaatgttagtttcctgtgaacctgctaattaatatgacttttgcagacatttccttaacctaaacagtttgggtttcctgtatatagactgcatgtattctcatctttaacctttccataatcttccctaattacagatgtcattggttcttaatagcaaaagaacagcagtagcttataaagttatattatttgttttttactaatatgtgaagtgattttgtctttcatttcacctstagagctaattatgtcttctaggttaacaaaatttccagatcataccatcattagtttaaactttacaatgaaatcattatttccatttattactagcctgaattat

SEQ ID NO: 233766 - DNA, 461 bp, Homo sapiens
ccacccacagggatctggtgaaattaaatgggaagttatttcctaactggcatatcttggwgtaaaattaatctaataacagctttcataagagaacataagcttaaaagacaacatttttcattcaactttaccaaacaaagtgcaaatttaggtgtccagttgtgaagtttggttgtgtgtggattgtacggtgaaggtaccagtggacaacagttgctcatcaagcaagtttatacaaaagcttttggacaagtccaactctagataaaattcgaaagtatttcatgcttgtgttcagagtttctttttctctctccaaggtaactcacatatcaaaagacatacgggttgtgggtagaacttcctaaaattgctggtgagaagtgtaccatgcataagcatacttcactagcttgaattttctgttagtctcacaggcaacaattacaatcctgtat

SEQ ID NO: 233767 - DNA, 404 bp, Homo sapiens
tgaaattaaatgggaagttatttcctaactggcatatcttggtgtaaaattaatctaataacagctttcataagagaacataagcttaaaagacaacatttttcattcaactttaccaaacaaagtgcaaatttaggtgtccagttgtgaagtttggttgtgtgtggattgtacggtgaaggtaycagtggacaacagttgctcatcaagcaagtttatacaaaagcttttggacaagtccaactctagataaaattcgaaagtatttcatgcttgtgttcagagtttctttttctctctccaaggtaactcacatatcaaaagacatacgggttgtgggtagaacttcctaaaattgctggtgagaagtgtaccatgcataagcatacttcactagcttgaat

SEQ ID NO: 233768 - DNA, 461 bp, Homo sapiens
ccacccacagggatctggtgaaattaaatgggaagttatttcctaactggcatatcttggtgtaaaattaatctaataacagctttcataagagaacataagcttaaaagacaacatttttcattcaactttaccaaacaaagtgcaaatttaggtgtccagttgtgaagtttggttgtgtgtggattgtacggtgaaggtaccagtggacaacagttsctcatcaagcaagtttatacaaaagcttttggacaagtccaactctagataaaattcgaaagtatttcatgcttgtgttcagagtttctttttctctctccaaggtaactcacatatcaaaagacatacgggttgtgggtagaacttcctaaaattgctggtgagaagtgtaccatgcataagcatacttcactagcttgaattttctgttagtctcacaggcaacaattacaatcctgtat

SEQ ID NO: 233769 - DNA, 568 bp, Homo sapiens
tgtgatgtatgagtaattagtccacccacagggatctggtgaaattaaatgggaagttatttcctaactggcatatcttggtgtaaaattaatctaataacagctttcataagagaacataagcttaaaagacaacatttttcattcaactttaccaaacaaagtgcaaatttaggtgtccagttgtgaagtttggttgtgtgtggattgtacggtgaaggtaccagtggacaacagttgctcatcaagcaagtttatacaaaagcttttggacaagtccaactctagataaaattygaaagtatttcatgcttgtgttcagagtttctttttctctctccaaggtaactcacatatcaaaagacatacgggttgtgggtagaacttcctaaaattgctggtgagaagtgtaccatgcataagcatacttcactagcttgaattttctgttagtctcacaggcaacaattacaatcctgtatgtttttctatctccagacactcctgaacataaaaagaccaagtaacatccctggttaagatgtgtacaggttccaagacatgtcta

SEQ ID NO: 233770 - DNA, 404 bp, Homo sapiens
tgaaattaaatgggaagttatttcctaactggcatatcttggtgtaaaattaatctaataacagctttcataagagaacataagcttaaaagacaacatttttcattcaactttaccaaacaaagtgcaaatttaggtgtccagttgtgaagtttggttgtgtgtggattgtacggtgaaggtaccagtggacaacagttgctcatcaagcaagtttatacaaaagcttttggacaagtccaactctagataaaattcgaaagtatttcatgcttgtgttcagagtttctttttctctctccaaggtaacycacatatcaaaagacatacgggttgtgggtagaacttcctaaaattgctggtgagaagtgtaccatgcataagcatacttcactagcttgaat

SEQ ID NO: 233771 - DNA, 461 bp, Homo sapiens
ccacccacagggatctggtgaaattaaatgggaagttatttcctaactggcatatcttggtgtaaaattaatctaataacagctttcataagagaacataagcttaaaagacaacatttttcattcaactttaccaaacaaagtgcaaatttaggtgtccagttgtgaagtttggttgtgtgtggattgtacggtgaaggtaccagtggacaacagttgctcatcaagcaagtttatacaaaagcttttggacaagtccaactctagataaaattcgaaagtatttcatgcttgtgttcagagtttctttttctctctccaaggtaactcacatatcaaaagacataygggttgtgggtagaacttcctaaaattgctggtgagaagtgtaccatgcataagcatacttcactagcttgaattttctgttagtctcacaggcaacaattacaatcctgtat

SEQ ID NO: 233772 - DNA, 404 bp, Homo sapiens
tgaaattaaatgggaagttatttcctaactggcatatcttggtgtaaaattaatctaataacagctttcataagagaacataagcttaaaagacaacatttttcattcaactttaccaaacaaagtgcaaatttaggtgtccagttgtgaagtttggttgtgtgtggattgtacggtgaaggtaccagtggacaacagttgctcatcaagcaagtttatacaaaagcttttggacaagtccaactctagataaaattcgaaagtatttcatgcttgtgttcagagtttctttttctctctccaaggtaactcacatatcaaaagacatacgggttgtgggtagaacttcctaaaattgctggtgagaagtgtrccatgcataagcatacttcactagcttgaat

SEQ ID NO: 233773 - DNA, 609 bp, Homo sapiens
ggtctttaatttatcaaagtttggagtgcaccccaagttggatcactgaagcacataactatagataagktcactcaaaagcacaaatccaggtaataaatattcactagtagtttatatgcatttagcaatttgaatgctgtgaagtgtagcccagaaaatcaatcgacatggagctattaaagaggcattcatggcacctgcactttgaagctcttcagactcaggttaaacaggagacatggtagctcatatatactgcaaaaacccttcctctttccctttttatctatgaacctgcccttttcaatgttatctagatgcctgaaggtatgaatacccttgatcttggtaaaaaatggtaccacccatcagcaaaatctcactgatcagtgtctatgttacctcactgagttagccttttgtgttgttgtggcccagaatgacaatgttgacacaatccaaaccagtagttggaaagttaatgttggatgcgtctttgacaattgatggaatgacctgaaatcaaatgtgaggcagtggagacacaagaatgctattcaggaagttagtgatctgtggagatactaaatgaaatatctggaagga

SEQ ID NO: 233774 - DNA, 609 bp, Homo sapiens
ggtctttaatttatcaaagtttggagtgcaccccaagttggatcactgaagcacataactatagataagttcactcaraagcacaaatccaggtaataaatattcactagtagtttatatgcatttagcaatttgaatgctgtgaagtgtagcccagaaaatcaatcgacatggagctattaaagaggcattcatggcacctgcactttgaagctcttcagactcaggttaaacaggagacatggtagctcatatatactgcaaaaacccttcctctttccctttttatctatgaacctgcccttttcaatgttatctagatgcctgaaggtatgaatacccttgatcttggtaaaaaatggtaccacccatcagcaaaatctcactgatcagtgtctatgttacctcactgagttagccttttgtgttgttgtggcccagaatgacaatgttgacacaatccaaaccagtagttggaaagttaatgttggatgcgtctttgacaattgatggaatgacctgaaatcaaatgtgaggcagtggagacacaagaatgctattcaggaagttagtgatctgtggagatactaaatgaaatatctggaagga

SEQ ID NO: 233775 - DNA, 609 bp, Homo sapiens
ggtctttaatttatcaaagtttggagtgcaccccaagttggatcactgaagcacataactatagataagttcactcaaaagcacaaatccaggtaataaatatycactagtagtttatatgcatttagcaatttgaatgctgtgaagtgtagcccagaaaatcaatcgacatggagctattaaagaggcattcatggcacctgcactttgaagctcttcagactcaggttaaacaggagacatggtagctcatatatactgcaaaaacccttcctctttccctttttatctatgaacctgcccttttcaatgttatctagatgcctgaaggtatgaatacccttgatcttggtaaaaaatggtaccacccatcagcaaaatctcactgatcagtgtctatgttacctcactgagttagccttttgtgttgttgtggcccagaatgacaatgttgacacaatccaaaccagtagttggaaagttaatgttggatgcgtctttgacaattgatggaatgacctgaaatcaaatgtgaggcagtggagacacaagaatgctattcaggaagttagtgatctgtggagatactaaatgaaatatctggaagga

SEQ ID NO: 233776 - DNA, 367 bp, Homo sapiens
gcaaaatctcactgatcagtgtctatgttacctcactgagttagccttttgtgttgttgtggcccagaatgacaatgttgacacaatccaaaccagtagttggaaagttaatgttggatgcgtctttgacaattgatggaatgacctgaaatcaaatgtraggcagtggagacacaagaatgctattcaggaagttagtgatctgtggagatactaaatgaaatatctggaaggaattgtaatcttgcaactatgcttttatgtgttttttgacataaacagtttctatttatagtggagctagagtgtccatttcccatgaagttcccatagtgttaactaatacagtcatgtgtcacttaatgac

SEQ ID NO: 233777 - DNA, 367 bp, Homo sapiens
gcaaaatctcactgatcagtgtctatgttacctcactgagttagccttttgtgttgttgtggcccagaatgacaatgttgacacaatccaaaccagtagttggaaagttaatgttggatgcgtctttgacaattgatggaatgacctgaaatcaaatgtgaggcagtggagacacaagaatgctattcaggmagttagtgatctgtggagatactaaatgaaatatctggaaggaattgtaatcttgcaactatgcttttatgtgttttttgacataaacagtttctatttatagtggagctagagtgtccatttcccatgaagttcccatagtgttaactaatacagtcatgtgtcacttaatgac

SEQ ID NO: 233778 - DNA, 367 bp, Homo sapiens
gcaaaatctcactgatcagtgtctatgttacctcactgagttagccttttgtgttgttgtggcccagaatgacaatgttgacacaatccaaaccagtagttggaaagttaatgttggatgcgtctttgacaattgatggaatgacctgaaatcaaatgtgaggcagtggagacacaagaatgctattcaggaagtkagtgatctgtggagatactaaatgaaatatctggaaggaattgtaatcttgcaactatgcttttatgtgttttttgacataaacagtttctatttatagtggagctagagtgtccatttcccatgaagttcccatagtgttaactaatacagtcatgtgtcacttaatgac

SEQ ID NO: 233779 - DNA, 367 bp, Homo sapiens
gcaaaatctcactgatcagtgtctatgttacctcactgagttagccttttgtgttgttgtggcccagaatgacaatgttgacacaatccaaaccagtagttggaaagttaatgttggatgcgtctttgacaattgatggaatgacctgaaatcaaatgtgaggcagtggagacacaagaatgctattcaggaagttagtgatctgtggagatactaaatgaaatatctggaaggaattrtaatcttgcaactatgcttttatgtgttttttgacataaacagtttctatttatagtggagctagagtgtccatttcccatgaagttcccatagtgttaactaatacagtcatgtgtcacttaatgac

SEQ ID NO: 233780 - DNA, 382 bp, Homo sapiens
cttgaacatttctgcagttataaatgagccttgggtcatgattttctgcctttttatcatagacaagatttaatttaggagatgtccttttaatgtgtaatgtgaataataagtgwcacttatgaagcctattttcttccagccattttaattgtcaaatctgtccagtcaagatgcaatgttagaggtttcactgacaacaccgtctgtgtgtgtgtgtgtgtgtgtgtgtgtgtgtgtgtgtgtgtgtgtgtatacatacatatgattgagcaggatttattgtaagtcaaaacagtctcaaatttcttaggacaatacagcttccttggccattcccttggagctctgagttgaggagctggtgatgtgtatttctttt

SEQ ID NO: 233781 - DNA, 564 bp, Homo sapiens
gtatcaaaaggggcaaaatggtagattataaagacctgtactttcttgtcacttcctaaacatagcaagcattggtctatcttgaacatttctgcagttataaatgagccttgggtcatgattttctgcctttttatcatagacaagatttaatttaggagatgtccttttaatgtgtaatgtgaataataagtgacacttatgaarcctattttcttccagccattttaattgtcaaatctgtccagtcaagatgcaatgttagaggtttcactgacaacaccgtctgtgtgtgtgtgtgtgtgtgtgtgtgtgtgtgtgtgtgtgtgtgtgtatacatacatatgattgagcaggatttattgtaagtcaaaacagtctcaaatttcttaggacaatacagcttccttggccattcccttggagctctgagttgaggagctggtgatgtgtatttcttttgcatgttctccacattatccctatgcaggccttccatgggcttggttttggaaccagtgatgaggaagatcattagaattgtttttctcaaaaagattcctc

SEQ ID NO: 233782 - DNA, 382 bp, Homo sapiens
cttgaacatttctgcagttataaatgagccttgggtcatgattttctgcctttttatcatagacaagatttaatttaggagatgtccttttaatgtgtaatgtgaataataagtgacacttatgaagcctattttcttccagccattttaattgtcaaatctgtccagtcaagatgcawtgttagaggtttcactgacaacaccgtctgtgtgtgtgtgtgtgtgtgtgtgtgtgtgtgtgtgtgtgtgtgtgtatacatacatatgattgagcaggatttattgtaagtcaaaacagtctcaaatttcttaggacaatacagcttccttggccattcccttggagctctgagttgaggagctggtgatgtgtatttctttt

SEQ ID NO: 233783 - DNA, 564 bp, Homo sapiens
gtatcaaaaggggcaaaatggtagattataaagacctgtactttcttgtcacttcctaaacatagcaagcattggtctatcttgaacatttctgcagttataaatgagccttgggtcatgattttctgcctttttatcatagacaagatttaatttaggagatgtccttttaatgtgtaatgtgaataataagtgacacttatgaagcctattttcttccagccattttaattgtcaaatctgtccagtcaagatgcaatgttagaggtttcactgacaacaccgtctgtgtgtgtgtgtgtgtgtgtgtgtgtgtgtgtgtgtgtgtgtgtgtatacatacatatgattgagcaggatttattgtaagtcaaaacagtctcaaatttcttaggacaatacagcttccttggccattcccttggagctctgagttgaggagctggtgatgtgtatttcttttgcatgttctccacattatccctatgcaggccttccatgggcttggttttggaaccagtgatgargaagatcattagaattgtttttctcaaaaagattcctc

SEQ ID NO: 233784 - DNA, 444 bp, Homo sapiens
actgacaacaccgtctgtgtgtgtgtgtgtgtgtgtgtgtgtgtgtgtgtgtgtgtgtgtgtatacatacatatgattgagcaggatttattgtaagtcaaaacagtctcaaatttcttaggacaatacagcttccttggccattcccttggagctctgagttgaggagctggtgatgtgtatttcttttgcatgttctccacattatccctatgcaggccttccatgggcttggttttggaaccagtgatgaggaagatcattagaattgttkttctcaaaaagattcctccattcttctgtataagcaatggaaattttcccagaccaatatttcttcttttgaaatggtaaattttgaatattaactggttagtataatcccataaaataacaaagtttgagccctatgatctgtgttttaggctcaagttgtgttttatg

SEQ ID NO: 233785 - DNA, 444 bp, Homo sapiens
actgacaacaccgtctgtgtgtgtgtgtgtgtgtgtgtgtgtgtgtgtgtgtgtgtgtgtgtatacatacatatgattgagcaggatttattgtaagtcaaaacagtctcaaatttcttaggacaatacagcttccttggccattcccttggagctctgagttgaggagctggtgatgtgtatttcttttgcatgttctccacattatccctatgcaggccttccatgggcttggttttggaaccagtgatgaggaagatcattagaattgtttttctcaaaaagattcctccattcttctgtataagcaatggmaattttcccagaccaatatttcttcttttgaaatggtaaattttgaatattaactggttagtataatcccataaaataacaaagtttgagccctatgatctgtgttttaggctcaagttgtgttttatg

SEQ ID NO: 233786 - DNA, 477 bp, Homo sapiens
attgtttttctcaaaaagattcctccattcttctgtataagcaatggaaattttcccagaccaatatttcttcttttgaaatggtaaattttgaatattaactggttagtataatcccataaaataacaaagtttgagccctatgatctgtgttttaggctcaagttgtgttttatgctaaattatcatttactccttgtatgatcttttttttttttttgagacagagtctcacactgtcactcaggttggagtgcagtggcacaattttggcttacggcaagctccgcctcccaggtgcacaccatccttctgcttcagcctcctgagtagctgggactacaggtgccmgccaccacacccagctaattgttttttaagattaaggatgaaataaaagctgctcccctatattacattcataaatcagaattattaaagcaagctatttatttattagaaacacatactccaaat

SEQ ID NO: 233787 - DNA, 481 bp, Homo sapiens
ggcacaattttggcttacggcaagctccgcctcccaggtgcacaccatccttctgcttcagcctcctgagtagctgggactacaggtgcccgccaccacacccrgctaattgttttttaagattaaggatgaaataaaagctgctcccctatattacattcataaatcagaattattaaagcaagctatttatttattagaaacacatactccaaatttagcatctaagacatgacagtctttcaagagacatcaatttactttttagggtctatagctatatttgtattcatgttattggtgtccataatatttcattagatgttctgggtaaattgataaatgaaaataatatatgtgataaggagaacaacctaggcctcctggagggccccttacaactcagctggtgttagcagaaatgcctgggagtaacagtgagaaacaacctttcaaaagtgttgagcaatttttcaggcag

SEQ ID NO: 233788 - DNA, 481 bp, Homo sapiens
ggcacaattttggcttacggcaagctccgcctcccaggtgcacaccatccttctgcttcagcctcctgagtagctgggactacaggtgcccgccaccacacccagctaattgttttttaarattaaggatgaaataaaagctgctcccctatattacattcataaatcagaattattaaagcaagctatttatttattagaaacacatactccaaatttagcatctaagacatgacagtctttcaagagacatcaatttactttttagggtctatagctatatttgtattcatgttattggtgtccataatatttcattagatgttctgggtaaattgataaatgaaaataatatatgtgataaggagaacaacctaggcctcctggagggccccttacaactcagctggtgttagcagaaatgcctgggagtaacagtgagaaacaacctttcaaaagtgttgagcaatttttcaggcag

SEQ ID NO: 233789 - DNA, 481 bp, Homo sapiens
ggcacaattttggcttacggcaagctccgcctcccaggtgcacaccatccttctgcttcagcctcctgagtagctgggactacaggtgcccgccaccacacccagctaattgttttttaagattaaggatgaaataaaagctgctcccctatattacattcataaatcagaattattaaagcaagctatktatttattagaaacacatactccaaatttagcatctaagacatgacagtctttcaagagacatcaatttactttttagggtctatagctatatttgtattcatgttattggtgtccataatatttcattagatgttctgggtaaattgataaatgaaaataatatatgtgataaggagaacaacctaggcctcctggagggccccttacaactcagctggtgttagcagaaatgcctgggagtaacagtgagaaacaacctttcaaaagtgttgagcaatttttcaggcag

SEQ ID NO: 233790 - DNA, 481 bp, Homo sapiens
ggcacaattttggcttacggcaagctccgcctcccaggtgcacaccatccttctgcttcagcctcctgagtagctgggactacaggtgcccgccaccacacccagctaattgttttttaagattaaggatgaaataaaagctgctcccctatattacattcataaatcagaattattaaagcaagctatttatttattagaaacacatactccaaatttagcatctaagacatgacagtctttcaagagacatcaatttactttttagggtctatagctatatttgtattcatgttattggtgtccataatatttcattagatgttctgggtaaattgataaatgaaaataatatatgtgataaggagaacaacctaggcctcctggagggccccttacaactcagctggtgttagcagaaatgcctgggwgtaacagtgagaaacaacctttcaaaagtgttgagcaatttttcaggcag

SEQ ID NO: 233791 - DNA, 548 bp, Homo sapiens
tctcattccctaatttatttattcttatttctcactctattttttattcttttaggcacagctcatgtctcatgactttcaaaaagtttttcttctgatattcccagctcgaattaggtacatcccaatcagtttccttagacttacaactctgcatattattggcttgcaatctgtcttaggctgggaattagctccttgtaggcaggggctagaatttatttactcttatgtccataatgcctgacacaggaactattctcayatacaaattgtaaggccataattcctgagaacatatgtacattgtagtgactcataaaggcttgaaataaatttttaaaatgataaattgggaagtccatgaacttgacatcttgatgtagaagaaaagcaagggcagatgaagaagttatacaggatacttgaaataccagaagaatataatcagagagcaataaattaatcctagatttttagatgtgaagaagttctgagaaatatttgaagacatggctctagggatgagtacataacagagaccatta

SEQ ID NO: 233792 - DNA, 516 bp, Homo sapiens
aaaattgcatttgatattgtatgattcatcaagacagaaagtaatgctgtagttgccctgggagggcggggaatggggagtcactttttaatgggtacaggatttcaattttacaagacaaaaagaattatggagatgggtggtggtgatgcttgcacaacattgtgaatacrtttaatgacactgaattgtatacttaacagtggttaagatgtaaattgttgagtgtgttttgccacagttaaaaaacggaaaacaatagtatttgaagatatagcccatttcatctggtagctagctgtatgtgtctgctcagctgtggatagatatttatgctgtttctgaactggaggttactggtattctctaaggtataggaaaattgatcttatgtggctaactgaggtggatatagttgtatcagtcagacagtaatgatataatcatgatagtttacatttaacacaacttacatgtgttatactttagaaagcacttcattcatattattacttc

SEQ ID NO: 233793 - DNA, 516 bp, Homo sapiens
aaaattgcatttgatattgtatgattcatcaagacagaaagtaatgctgtagttgccctgggagggcggggaatggggagtcactttttaatgggtacaggatttcaattttacaagacaaaaagaattatggagatgggtggtggtgatgcttgcacaacattgtgaatacgtttaatgacactgaattgtatacttaacagtggttaagatgyaaattgttgagtgtgttttgccacagttaaaaaacggaaaacaatagtatttgaagatatagcccatttcatctggtagctagctgtatgtgtctgctcagctgtggatagatatttatgctgtttctgaactggaggttactggtattctctaaggtataggaaaattgatcttatgtggctaactgaggtggatatagttgtatcagtcagacagtaatgatataatcatgatagtttacatttaacacaacttacatgtgttatactttagaaagcacttcattcatattattacttc

SEQ ID NO: 233794 - DNA, 350 bp, Homo sapiens
agcccatttcatctggtagctagctgtatgtgtctgctcagctgtggatagatatttatgctgtttctgaactggaggttactggtattctctaaggtataggaaaattgatcttatgtggctaactgaggtggatatagttgtatcagtcagacagtaatgatataatcatgatagtttacatttaacacaacttacatgtgttatactttagaaagcacttcattcatattattacttcataccattttccccttaccatatttgtctctcctttctctgctgacttcasaaaatgtctcttccacactactcaattcatctccttattttgtcaaaattttaagtct

SEQ ID NO: 233795 - DNA, 350 bp, Homo sapiens
agcccatttcatctggtagctagctgtatgtgtctgctcagctgtggatagatatttatgctgtttctgaactggaggttactggtattctctaaggtataggaaaattgatcttatgtggctaactgaggtggatatagttgtatcagtcagacagtaatgatataatcatgatagtttacatttaacacaacttacatgtgttatactttagaaagcacttcattcatattattacttcataccattttccccttaccatatttgtctctcctttctctgctgacttcagaaaatgtctsttccacactactcaattcatctccttattttgtcaaaattttaagtct

SEQ ID NO: 233796 - DNA, 525 bp, Homo sapiens
taacgctcaccagatcatatgagaggcaaaaatggatgaaactataaaatcaagacacagagagttaagggaaatttcccaagatcacacagccactgaggatatgaactagattttgacttcaggctatttaccccagaacctgtgctttcaaccattatttgtactgcttccctaaattactcttgagtacactgtgacatcatayttcacccatgacactgattatctggggaactttgcaacttattctgaatgtgattcagttttcttttctgtacagagataaagtcagtatatactccatagattcgttataaggattatatgaaatgacacatgagaaggctttaaaaggacatggaaagaaataagcttttttgttttcaatcatttttcaataggttatcagtgttgtgaatggttcatgaaaaatgactttgggctcagtgagtaactgaaatgttgttgcttaatagtgtgtttaatattaatataatagtaacaaatgttgttattgttgag

SEQ ID NO: 233797 - DNA, 525 bp, Homo sapiens
taacgctcaccagatcatatgagaggcaaaaatggatgaaactataaaatcaagacacagagagttaagggaaatttcccaagatcacacagccactgaggatatgaactagattttgacttcaggctatttaccccagaacctgtgctttcaaccattatttgtactgcttccctaaattactcttgagtacactgtgacatcatacttcaccyatgacactgattatctggggaactttgcaacttattctgaatgtgattcagttttcttttctgtacagagataaagtcagtatatactccatagattcgttataaggattatatgaaatgacacatgagaaggctttaaaaggacatggaaagaaataagcttttttgttttcaatcatttttcaataggttatcagtgttgtgaatggttcatgaaaaatgactttgggctcagtgagtaactgaaatgttgttgcttaatagtgtgtttaatattaatataatagtaacaaatgttgttattgttgag

SEQ ID NO: 233798 - DNA, 525 bp, Homo sapiens
taacgctcaccagatcatatgagaggcaaaaatggatgaaactataaaatcaagacacagagagttaagggaaatttcccaagatcacacagccactgaggatatgaactagattttgacttcaggctatttaccccagaacctgtgctttcaaccattatttgtactgcttccctaaattactcttgagtacactgtgacatcatacttcacccatgacactgattatctggggaactttgcaacttattctgaatgtgattcagttttcttttctgtacagagataaagtcagtatatactccatagattcgttataaggattatatgaaatgacacatgagaaggctttaaaaggacwtggaaagaaataagcttttttgttttcaatcatttttcaataggttatcagtgttgtgaatggttcatgaaaaatgactttgggctcagtgagtaactgaaatgttgttgcttaatagtgtgtttaatattaatataatagtaacaaatgttgttattgttgag

SEQ ID NO: 233799 - DNA, 354 bp, Homo sapiens
aatgtatttgtgattggtatgactttgttcccagagggcagttagcaacacaatattaaggctatgtgtacaaggaaaacaaattttaaaaatctcctttaaaaaaaaacagttcccaatcctaaccagtatcatgcacagaatccgtttccacctcttcatatggaagcagctctgggtggacatctagaaagttggataactatttatcacatatgatctgyaaagggagagatttacaagaaagtgttaaatttaatccataggaaagcaaaatcaaaaatcaatgaattttccatttgtagttttccctaggggctccactctctagatggcttaaatgcgttagaatta

SEQ ID NO: 233800 - DNA, 545 bp, Homo sapiens
aatcctaaccagtatcatgcacagaatccgtttccacctcttcatatggaagcagctctgggtggacatctagaaagttggataactatttatcacatatgatctgtaaagggagagatttacaagaaagtgttaaatttaatccataggaaagcaaaatcaaaaatcaatgaattttccatttgtagttttccctaggggctccactctctagatggcttaaatgcgttagaattaaatgactaggcacaattgtttgttagtgacataaaagcaaggtaagcatttctgctttatgagtccaagcacagggamacttggttttctttggaaggatatcataaaggcaatgtttatgagtaatccctcattgtctttccttctgtagcattcaatggtatgtactataatttagaaatgaaaactacttaaagaccacttgctaagtttcatgtatttcaaattctcagatcctgagtgtttaaatatgcctatatttcttcatgaaaaaaacataatctttgccaagttagaaaaagaaagtc

SEQ ID NO: 233801 - DNA, 545 bp, Homo sapiens
aatcctaaccagtatcatgcacagaatccgtttccacctcttcatatggaagcagctctgggtggacatctagaaagttggataactatttatcacatatgatctgtaaagggagagatttacaagaaagtgttaaatttaatccataggaaagcaaaatcaaaaatcaatgaattttccatttgtagttttccctaggggctccactctctagatggcttaaatgcgttagaattaaatgactaggcacaattgtttgttagtgacataaaagcaaggtaagcatttctgctttatgagtccaagcacagggaaacttgrttttctttggaaggatatcataaaggcaatgtttatgagtaatccctcattgtctttccttctgtagcattcaatggtatgtactataatttagaaatgaaaactacttaaagaccacttgctaagtttcatgtatttcaaattctcagatcctgagtgtttaaatatgcctatatttcttcatgaaaaaaacataatctttgccaagttagaaaaagaaagtc

SEQ ID NO: 233802 - DNA, 567 bp, Homo sapiens
tccgtttccacctcttcatatggaagcagctctgggtggacatctagaaagttggataactatttatcacatatgatctgtaaagggagagatttacaagaaagtgttaaatttaatccataggaaagcaaaatcaaaaatcaatgaattttccatttgtagttttccctaggggctccactctctagatggcttaaatgcgttagaattaaatgactaggcacaattgtttgttagtgacataaaagcaaggtaagcatttctgctttatgagtccaagcacagggaaacttggttttctttggaaggatatcataaaggcaatgtttatgagtaatccctcattgtctttccttctgtakcattcaatggtatgtactataatttagaaatgaaaactacttaaagaccacttgctaagtttcatgtatttcaaattctcagatcctgagtgtttaaatatgcctatatttcttcatgaaaaaaacataatctttgccaagttagaaaaagaaagtcatattcccatttttaactcaatgtaatcagaaatttggacagttttta

SEQ ID NO: 233803 - DNA, 545 bp, Homo sapiens
aatcctaaccagtatcatgcacagaatccgtttccacctcttcatatggaagcagctctgggtggacatctagaaagttggataactatttatcacatatgatctgtaaagggagagatttacaagaaagtgttaaatttaatccataggaaagcaaaatcaaaaatcaatgaattttccatttgtagttttccctaggggctccactctctagatggcttaaatgcgttagaattaaatgactaggcacaattgtttgttagtgacataaaagcaaggtaagcatttctgctttatgagtccaagcacagggaaacttggttttctttggaaggatatcataaaggcaatgtttatgagtaatccctcattgtctttccttctgtagcattcaatggtatgtamtataatttagaaatgaaaactacttaaagaccacttgctaagtttcatgtatttcaaattctcagatcctgagtgtttaaatatgcctatatttcttcatgaaaaaaacataatctttgccaagttagaaaaagaaagtc

SEQ ID NO: 233804 - DNA, 531 bp, Homo sapiens
agatgaggttttaccatgttagtcaggctggtctcgaactcctgacctcaggtgatccacccacctcagcctctcaaagtgctgggattacagacatgagccactgcccccagccatcttttttatttatttattttaattgttgttctggagatcctgggatgcatagacagtgaatatcttttttgttttttgagacagaatctcactctgtctcccaggctgcagtgcagtggtgcgatcttggttaactgcaacctctgctttctaggctcaagcgattctcctgcctcagcctcccaggtagctgaaattacaggtgccagctaccatgcccagctaatttttgtatttttattagagaygaggttttgccatgttggccaggctggtcttgaactcctgacctcaggtgatccacccacctttgcctcccaaagtgctgagattacaggcatgagccactgagcccagctgaatatttttttttaaatcaataaccttatttcttagagtagttttaggttcaca

SEQ ID NO: 233805 - DNA, 531 bp, Homo sapiens
agatgaggttttaccatgttagtcaggctggtctcgaactcctgacctcaggtgatccacccacctcagcctctcaaagtgctgggattacagacatgagccactgcccccagccatcttttttatttatttattttaattgttgttctggagatcctgggatgcatagacagtgaatatcttttttgttttttgagacagaatctcactctgtctcccaggctgcagtgcagtggtgcgatcttggttaactgcaacctctgctttctaggctcaagcgattctcctgcctcagcctcccaggtagctgaaattacaggtgccagctaccatgcccagctaatttttgtatttttattagagatgaggttttgccatgttgrccaggctggtcttgaactcctgacctcaggtgatccacccacctttgcctcccaaagtgctgagattacaggcatgagccactgagcccagctgaatatttttttttaaatcaataaccttatttcttagagtagttttaggttcaca

SEQ ID NO: 233806 - DNA, 413 bp, Homo sapiens
ttctggacattttatgtagtatttcatctgatataaaaagtagaattctaatttaattatggttgttaatttatttttatctttttagtcattatgaaaatgtttaactatatgaaaagctaggaaagagttttattttttaaggtagtacttcagaaatatttgtgatacttaatttttaaaaattaactctaaaaaatcttgaaatgtctgtttaatgaaataggacataaatactggtcacattagtgaaaaatatttgtttaaaattaaaatatctgyagcaatcctgtagatattaataatttttaaagcatgacatctttaaaatataaatgttctaaacttataatcagttaaatatgtctctattaatacatatagatacatatatctaaataaatttgaagact

SEQ ID NO: 233807 - DNA, 413 bp, Homo sapiens
ttctggacattttatgtagtatttcatctgatataaaaagtagaattctaatttaattatggttgttaatttatttttatctttttagtcattatgaaaatgtttaactatatgaaaagctaggaaagagttttattttttaaggtagtacttcagaaatatttgtgatacttaatttttaaaaattaactctaaaaaatcttgaaatgtctgtttaatgaaataggacataaatactggtcacattagtgaaaaatatttgtttaaaattaaaatatctgcakcaatcctgtagatattaataatttttaaagcatgacatctttaaaatataaatgttctaaacttataatcagttaaatatgtctctattaatacatatagatacatatatctaaataaatttgaagact

SEQ ID NO: 233808 - DNA, 413 bp, Homo sapiens
ttctggacattttatgtagtatttcatctgatataaaaagtagaattctaatttaattatggttgttaatttatttttatctttttagtcattatgaaaatgtttaactatatgaaaagctaggaaagagttttattttttaaggtagtacttcagaaatatttgtgatacttaatttttaaaaattaactctaaaaaatcttgaaatgtctgtttaatgaaataggacataaatactggtcacattagtgaaaaatatttgtttaaaattaaaatatctgcagcaatcctgtagatattaataatttttaaagmatgacatctttaaaatataaatgttctaaacttataatcagttaaatatgtctctattaatacatatagatacatatatctaaataaatttgaagact

SEQ ID NO: 233809 - DNA, 607 bp, Homo sapiens
ccaggctgcacagcctcattaacactagattttctggacattttatgtagtatttcatctgatataaaaagtagaattctaatttaattatggttgttaatttatttttatctttttagtcattatgaaaatgtttaactatatgaaaagctaggaaagagttttattttttaaggtagtacttcagaaatatttgtgatacttaatttttaaaaattaactctaaaaaatcttgaaatgtctgtttaatgaaataggacataaatactggtcacattagtgaaaaatatttgtttaaaattaaaatatctgcagcaatcctgtagatattaataatttttaaagcatgacatctttaaaatataaatgttctaaacttataatcagttaaatatgtctctattaatacatatagatacatatatctaaataaatttgaagacttcaaattccaggtataatataattcttttctatcctgtgatttgtcattcagtattttgtaatttgaacagaaatattttgccstaaccacatgtctgtattttctcttacctagaaatgttattttatgcaaaattgttttaaaggtcagtttgcatgtttg

SEQ ID NO: 233810 - DNA, 523 bp, Homo sapiens
tctttgcactctcagaggcccagcaagcccccctgcccccgcaggctcagttgtacctggtcccaccacctggcgtctccrctcccagagcccactccaacttcagatccaagttgaggctgaacccgggtacagtcgcaacccagcccagtttgtgcaagctcagggcagtgctgacatgccagccccctgccacctcagccccctccagactttgggcactgacgagcacaggagggaggttgaggtggggctaagagtggctcagcactggcctgaaggcactcctcagctcgaacagcctgggcatcgtgtgcacagctaaccaccgtgcgtctctctcagctgctgagagctgaacagatgttgggatgacctgcctgcagaaaggagctacccactgcaggtctcctctgagctgtactgttgctcaataaagcacctcttcaccttgctcaccttctacttgcccacatacctcattcttcctggactcaggacaagaactcgggacctgccaact

SEQ ID NO: 233811 - DNA, 523 bp, Homo sapiens
tctttgcactctcagaggcccagcaagcccccctgcccccgcaggctcagttgtacctggtcccaccacctggcgtctccactcccagagcccactccaacttcagatccaagttgaggctgaacccgggtacagtcgcaacccagcccagtttgtgcaagctcagggcagtgctgacatgccagccccctgccacctcagccccctccagactttgggcactgacgagcacaggagggaggttgaggtggggctaagrgtggctcagcactggcctgaaggcactcctcagctcgaacagcctgggcatcgtgtgcacagctaaccaccgtgcgtctctctcagctgctgagagctgaacagatgttgggatgacctgcctgcagaaaggagctacccactgcaggtctcctctgagctgtactgttgctcaataaagcacctcttcaccttgctcaccttctacttgcccacatacctcattcttcctggactcaggacaagaactcgggacctgccaact

SEQ ID NO: 233812 - DNA, 523 bp, Homo sapiens
tctttgcactctcagaggcccagcaagcccccctgcccccgcaggctcagttgtacctggtcccaccacctggcgtctccactcccagagcccactccaacttcagatccaagttgaggctgaacccgggtacagtcgcaacccagcccagtttgtgcaagctcagggcagtgctgacatgccagccccctgccacctcagccccctccagactttgggcactgacgagcacaggagggaggttgaggtggggctaagagtggctcagcactggcctgaaggcactcctcagctcgaacagcctgggcatcgtgtgcacagctaaccaccgtgcgtctctctcagytgctgagagctgaacagatgttgggatgacctgcctgcagaaaggagctacccactgcaggtctcctctgagctgtactgttgctcaataaagcacctcttcaccttgctcaccttctacttgcccacatacctcattcttcctggactcaggacaagaactcgggacctgccaact

SEQ ID NO: 233813 - DNA, 523 bp, Homo sapiens
tctttgcactctcagaggcccagcaagcccccctgcccccgcaggctcagttgtacctggtcccaccacctggcgtctccactcccagagcccactccaacttcagatccaagttgaggctgaacccgggtacagtcgcaacccagcccagtttgtgcaagctcagggcagtgctgacatgccagccccctgccacctcagccccctccagactttgggcactgacgagcacaggagggaggttgaggtggggctaagagtggctcagcactggcctgaaggcactcctcagctcgaacagcctgggcatcgtgtgcacagctaaccaccgtgcgtctctctcagctgctgagagctgaacagaygttgggatgacctgcctgcagaaaggagctacccactgcaggtctcctctgagctgtactgttgctcaataaagcacctcttcaccttgctcaccttctacttgcccacatacctcattcttcctggactcaggacaagaactcgggacctgccaact

SEQ ID NO: 233814 - DNA, 345 bp, Homo sapiens
cgtcccagaagtcttcaattggaggctcctgggatgggacctgggaagctggatttccggcacgcttcccaggtgattcttctgctatctacatttttttcaagcaaagcttctagggcagaagcaattctctggacatcactttaataagtcatctaatggatgtgaaatcttttaccgtaggggttggtagggatagggagcactttatctgctctgtaggacatttagcagcttctggatctttcartattaaaaaatctatccaaggggctttattttatatttatcctttcccttcctggatagttttaagatcaacttcaaaaatttgggccaaatttt

SEQ ID NO: 233815 - DNA, 345 bp, Homo sapiens
cgtcccagaagtcttcaattggaggctcctgggatgggacctgggaagctggatttccggcacgcttcccaggtgattcttctgctatctacatttttttcaagcaaagcttctagggcagaagcaattctctggacatcactttaataagtcatctaatggatgtgaaatcttttaccgtaggggttggtagggatagggagcactttatctgctctgtaggacatttagcagcttctggatctttcaayattaaaaaatctatccaaggggctttattttatatttatcctttcccttcctggatagttttaagatcaacttcaaaaatttgggccaaatttt

SEQ ID NO: 233816 - DNA, 514 bp, Homo sapiens
gctaggactggggctctgggggttccttgaactgtgggagggaaggaacaataatgaggacatgygggacttttgcatttgtggcagcattggctgccttttgtttttgtaaattctaatgaaagagcccatccatcaggtagactctgatagagatgctcagtatgcgaaacacccagtgggtcctcagacacaggggtctggggctcagagaccgagcctgagagtgatcagggccctggaagagcccatggggtaaaaatgggaaaggacctgggagaacagcagcagtaagaggtgaccagagaagcaggtgagagagtggaacagagtgggcaggccagcaagaagaagagcaggagagaagggatcatggagcaggctcagaggcctcaacctgcttgaggaaagcctttggttaggatgggggtaggggtagggtggatcatttgtgacatttgctaagtcagtgaagcctaatttcagtgagatgaagtggaaggggtattggaaa

SEQ ID NO: 233817 - DNA, 303 bp, Homo sapiens
tggtaaactagtgaacagacattagtttttattttttctatgtaattctgttagggtttgtcatacctacatcttatttctagtattcacatggyggggggtagagagggaattttaatatagtcatctttgagcatttgttaggattgggccagcacctaggccactctgtaattttttcccacagacctcagtggggtaagtcttacaatatctgctgaaaatgtttataatgctgttgcttaaatagagttctgggtgcatatatcaaggctagatatttgtaatctaccatttgagtga

SEQ ID NO: 233818 - DNA, 432 bp, Homo sapiens
ttattagttctgtcctagttttcacttaatccagagagtttaaaattgtcggctgccttttctcaggcctggaaattcttgtaaatagtgttagtgggcagtgaggcaccaggtctgtagttgcctttgcctcagctgctrtaataaaatagcatttcttcttgtagccccacattctaactatgtgggtttccaggcttgctcaagcaacagacaccaccaaacagtagccctttcaataaatgagccaggacttggataagcgtccactgggatgacagtaggggatgagagtgaggtcctgcaagtcattcttctgcttaatacaagtgaaaggattttcttccttgatgctgcagttgcccttttaatcccttattttgaattgataacagtggggatgagtctttaatctaaagaggaatattgttg

SEQ ID NO: 233819 - DNA, 432 bp, Homo sapiens
ttattagttctgtcctagttttcacttaatccagagagtttaaaattgtcggctgccttttctcaggcctggaaattcttgtaaatagtgttagtgggcagtgaggcaccaggtctgtagttgcctttgcctcagctgctataataaaatagcatttcttcttgtagccccacattctaactatgtgggtttccaggcttgctcaagcaacagacaccaccaaacagtagccctttcaataaatgagccaggacttgsataagcgtccactgggatgacagtaggggatgagagtgaggtcctgcaagtcattcttctgcttaatacaagtgaaaggattttcttccttgatgctgcagttgcccttttaatcccttattttgaattgataacagtggggatgagtctttaatctaaagaggaatattgttg

SEQ ID NO: 233820 - DNA, 432 bp, Homo sapiens
ttattagttctgtcctagttttcacttaatccagagagtttaaaattgtcggctgccttttctcaggcctggaaattcttgtaaatagtgttagtgggcagtgaggcaccaggtctgtagttgcctttgcctcagctgctataataaaatagcatttcttcttgtagccccacattctaactatgtgggtttccaggcttgctcaagcaacagacaccaccaaacagtagccctttcaataaatgagccaggacttggataagcgtccactgggatgacagtaggggatgagagtgaggtcctgcaagtcattctyctgcttaatacaagtgaaaggattttcttccttgatgctgcagttgcccttttaatcccttattttgaattgataacagtggggatgagtctttaatctaaagaggaatattgttg

SEQ ID NO: 233821 - DNA, 179 bp, Homo sapiens
tgttatcaggttatcccctgagttttttcttactcaccatatgtctggtggttctcacagccaggggcactgaggggctctgccctgggatctggaggccagcactgttcacctgatctccaccactgagatacytctggctagagccataatcaggtggcccaaaggactgaacaagg

SEQ ID NO: 233822 - DNA, 179 bp, Homo sapiens
tgttatcaggttatcccctgagttttttcttactcaccatatgtctggtggttctcacagccaggggcactgaggggctctgccctgggatctggaggccagcactgttcacctgatctccaccactgagatacctctggctasagccataatcaggtggcccaaaggactgaacaagg

SEQ ID NO: 233823 - DNA, 540 bp, Homo sapiens
gaattcatgttctcagaccaygtgactgaatagaagtttagtcataggattccagtttaacatatgcagttactatagcaattgaggtttccttagtaacagttgcaaaaataatccggccccaattaataatacattttaaagctctttctactccatgctgaacaacccagtttttttggccaagaaccagataattcaggtggtgtcatttgcactgatatagatatcatttgcatgcggtgaattgggttggaaaggaatgaaaagggagccggttgtttcaagtattataggaatccaatctgaaaagtcgactggcaagcgaatgcaaatctagtttccagagcttgggagcttaatggtaaaccctgtcctggattcctagtgtgccctagaggactttctgcatttgaagaagggagaaggcagaagattggacttgctaacaaaaaagatgaacccgggagggtggggccgtggcacacaggatttctctctaagtggtgcctggtgtgttcttgatggcgtgagaaggtc

SEQ ID NO: 233824 - DNA, 525 bp, Homo sapiens
agaagtttagtcataggattccagtttaacatatgcagttactatagcaattgaggtttccttagtaacagttgcaaaaataatccggccccaattaataatacattttaaagctctttctactccatgctgaacaayccagtttttttggccaagaaccagataattcaggtggtgtcatttgcactgatatagatatcatttgcatgcggtgaattgggttggaaaggaatgaaaagggagccggttgtttcaagtattataggaatccaatctgaaaagtcgactggcaagcgaatgcaaatctagtttccagagcttgggagcttaatggtaaaccctgtcctggattcctagtgtgccctagaggactttctgcatttgaagaagggagaaggcagaagattggacttgctaacaaaaaagatgaacccgggagggtggggccgtggcacacaggatttctctctaagtggtgcctggtgtgttcttgatggcgtgagaaggtctgtgggtttgtgaatt

SEQ ID NO: 233825 - DNA, 525 bp, Homo sapiens
agaagtttagtcataggattccagtttaacatatgcagttactatagcaattgaggtttccttagtaacagttgcaaaaataatccggccccaattaataatacattttaaagctctttctactccatgctgaacaacccagtttttttggccaagaaccagataattcaggtggtgtcatttgcactgatatagatatcatttgcatgcggtgaattgggttggaaargaatgaaaagggagccggttgtttcaagtattataggaatccaatctgaaaagtcgactggcaagcgaatgcaaatctagtttccagagcttgggagcttaatggtaaaccctgtcctggattcctagtgtgccctagaggactttctgcatttgaagaagggagaaggcagaagattggacttgctaacaaaaaagatgaacccgggagggtggggccgtggcacacaggatttctctctaagtggtgcctggtgtgttcttgatggcgtgagaaggtctgtgggtttgtgaatt

SEQ ID NO: 233826 - DNA, 478 bp, Homo sapiens
aacatatgcagttactatagcaattgaggtttccttagtaacagttgcaaaaataatccggccccaattaataatacattttaaagctctttctactccatgctgaacaacccagtttttttggccaagaaccagataattcaggtggtgtcatttgcactgatatagatatcatttgcatgcggtgaattgggttggaaaggaatgaaaagggagccrgttgtttcaagtattataggaatccaatctgaaaagtcgactggcaagcgaatgcaaatctagtttccagagcttgggagcttaatggtaaaccctgtcctggattcctagtgtgccctagaggactttctgcatttgaagaagggagaaggcagaagattggacttgctaacaaaaaagatgaacccgggagggtggggccgtggcacacaggatttctctctaagtggtgcctggtgtgttcttgatggcgtgagaa

SEQ ID NO: 233827 - DNA, 525 bp, Homo sapiens
agaagtttagtcataggattccagtttaacatatgcagttactatagcaattgaggtttccttagtaacagttgcaaaaataatccggccccaattaataatacattttaaagctctttctactccatgctgaacaacccagtttttttggccaagaaccagataattcaggtggtgtcatttgcactgatatagatatcatttgcatgcggtgaattgggttggaaaggaatgaaaagggagccggttgtttcaagtattataggaatccaatctgaaaagtcgrctggcaagcgaatgcaaatctagtttccagagcttgggagcttaatggtaaaccctgtcctggattcctagtgtgccctagaggactttctgcatttgaagaagggagaaggcagaagattggacttgctaacaaaaaagatgaacccgggagggtggggccgtggcacacaggatttctctctaagtggtgcctggtgtgttcttgatggcgtgagaaggtctgtgggtttgtgaatt

SEQ ID NO: 233828 - DNA, 537 bp, Homo sapiens
aatttttcctaatttttttctaatgttctttttctgccagggtatgttttaaaaagggaaatagagtattatggaataagattacccttctatgtccttcgtgcaaatccaaccagtatttatataaatgaatgtatgttccctcatgaggcatgcaatgaaaatgacaatttgcatttatgcaggattgagcagtgttttgctcactacattctgggattcctaagctttgtgggagtagttccaarggtttggcagaaacgagagtcaagacaccagagagtggcatgctaggaagaacagccccggcctcttcagctgccctcttttcttactttctcatccatgattatctacagtgacaagaagataaaactggaccttgcaatactagtcacagcatgaaaaatacatccacccctccttttgatagcaggttctcagtatgtaaagggaatctttttggctgcctgcttaacgcattgcaggtccagcattcctgagctgcttttgattcataaaattaaccaggcattt

SEQ ID NO: 233829 - DNA, 569 bp, Homo sapiens
taaactacttgcaatagagtttcccaacgatgaactgagtatctagaaaataacaaggattctcaaggaattttagtgaaatgatcagtactgtattgaaataccttgaatcagactttggagaatagatttaaaaacactcacagccttaaccgatctagtaagaaccttattccctaaagcatactgtggatctcagctgtatcctatctaaggtgagaacagtcaaagacaaatgtggcctttgagaaaggtgggatgtgagtgtcttgaaacaacaggctaaagaagtgctctcaaatagaagtataatatggaacatgtgaaattaattttaataatatattttagttaacctaatatatccataatattttcatttcgacatgtattaggttggtgcaaaagttattgtggtttttgctatttttttttaatggcaaaaaccggcaattacttttgcactaacctartagttactacaaaaaaatattaacaagagattttatgttccactttttaataccaggtcttcagattctggtgtgtatttgatactcagaacacat

SEQ ID NO: 233830 - DNA, 468 bp, Homo sapiens
gcaatttgcatgcttcttggttcttggacccagatttgagtgaccagtgttamctggtgtgcccagacttcccagtttcagcacccgaatttcatatcccaggaaactcttcagtttcaggaaaaccaggatgattggccaccttcacccagattatggtacctaattatcatttcccatgaaaatgaactagggcctttgggacagttggctgattccatacctggggcatggaatgcattaaaataagccttgagtatcttattttaccacagaacaagaaagctatcaaaaagacttaacatgatggtacgaacaggactcaggagccactctgaagaggttccctctggccaaaaataagacaattggaacatcaataagaataacaacttcagtagattgaaacacatcagttgtgctcagttcatgcgttcataatgtactaaaaacaaatttaaaaactca

SEQ ID NO: 233831 - DNA, 468 bp, Homo sapiens
gcaatttgcatgcttcttggttcttggacccagatttgagtgaccagtgttacctggtgtgcccagacttcccagtttcagcacccgaatttcayatcccaggaaactcttcagtttcaggaaaaccaggatgattggccaccttcacccagattatggtacctaattatcatttcccatgaaaatgaactagggcctttgggacagttggctgattccatacctggggcatggaatgcattaaaataagccttgagtatcttattttaccacagaacaagaaagctatcaaaaagacttaacatgatggtacgaacaggactcaggagccactctgaagaggttccctctggccaaaaataagacaattggaacatcaataagaataacaacttcagtagattgaaacacatcagttgtgctcagttcatgcgttcataatgtactaaaaacaaatttaaaaactca

SEQ ID NO: 233832 - DNA, 578 bp, Homo sapiens
atcgtacatgttacttcttcctatatataaatttcagggtaatataaattttaactattacaaagttaatagttcttcatctgccacctgtaactcctataaataccataccaactgatgtatctccagaaccagaagacagagaagcaagagaaagtaccctatatgtcactgggaagtgattctttattgagcaggaatatccatattaaagctttttgaaaagaaagattggacaaattgactaattcgcctcttcttttacctaaatgcttcagttgttcaaatatttcccacattctaaaatagggactagcttcaacattggcaatgacacaaaccacaaacctttaaagcatgtttcagggacgtatattaagagatatttaaaaaaaaaaaaaagtttttcyttgaggtccagaagatgttacttgtaagaacaaatgtttacggttgcatatgtcagccctcaacaacagatcctgagtgacagaggtgcccatgtgctcttaaataaatctgtctttttgtatttgtggtatgtattatctttcaatacaaggtctagagcagggatt

SEQ ID NO: 233833 - DNA, 544 bp, Homo sapiens
aacttttgtaactccaagggagtccttcatgtgaggtaggtactcaataattgtgtcaaataattaaatttcttttctcttgggggcttagccttctgttagtaggcttgttggtttccattgctgtaaaaagtaatgtgtctttgaaaacagtggttatctttgggaggtaggattgtgactgatttatattttgtgctttcttttgatgtgcattaaacatttattataataaatgaatgacttttataatcaggaaacaacaataattctttaaaaggtgcgtcactagttctcccttaagcaattttcataggtagaaaaagtagaaggctgagggagtttgctttcatggtaacaaaaatgaattccaccctccttctggcagggaagggtggagggaaagactggggtttctagacccaaaatttctaagaatcgaggctagcatagtaactggcatgcagtgagtgttctacacrtatctgttgaatgaatgaatatcagggtggttggtgaagtttattatgccattcattcattt

SEQ ID NO: 233834 - DNA, 592 bp, Homo sapiens
attgagtatagctatgagaggtttaaatgcttttttttttcctgctgtttccttatttttatctcctgctaagaagtcctctttctgatttctgtccagtcacttaactccttttccttggtacacaggatgcaaaaaaacaaaaaaaaaacaaaaacaaaaaaaacaaaaaaaactgctttcatttcaaattggttaagcaaagtacataaaagtgtacagtctgcatttctttgtttctctcccatgacagtccccaaaattgtcgatagagaagacwattcaaaattattaattctctttttcatatagagaagtgggtgcaaacccccatgaaattaaacagggttgaatcatcacagatgaccttcacaatccaggccttcataattttaggtggattagagaaaactaatgaggattttgaaacaggctttggactaaaactctcatcatgcaaatccactgaaagaccccataactttaaagcacaattaacctgatccccagttcgcaccctcctgtatcggactcattttacttcctcttattctactgtcttcacaaaacaatgatgacaacaatgcagcag

SEQ ID NO: 233835 - DNA, 513 bp, Homo sapiens
gttagagaattgttttattcttttggaggtgtcacatttcctcacttttttatatttcttgtatccttgcattgatgtctgcacatctggtataatagttacttcttctaatttttggattcgcatttgtagaagaggactttttcctgaaaatatctatggtgttggttgagtagcatgcttcggctttcattctgggtatgtgcagtactgtagtctccatataacttcttcagctttaaatggtgtcagtcatgtctttggtttcctcagtggcttagggtgtggtttttagtgaaggccattgttatgttttgctggggacagggatcccaggtggacctgtccttaagcctcagtaatggtagcagcaggctgagaatgcctgttcttgggctccagggagcatacactaacaacagtgttagtggctccagaaagactgactgattcttgggcctccaggcagcttgcttaagtgtcarcagtggcagtgatgggccaggcaggtgc

SEQ ID NO: 233836 - DNA, 479 bp, Homo sapiens
tgtggtcctttgtctttcattcaatatttaagaagaaatatcactataggcaatagagccatattcttatataacacttatgctctgaagagtgaggaaactgaggacaaaggacatagctaacaccacagaaagagacacactcagagtggggattaaagtttagttctcctgatttatacacaggttaatatagatttgctggtaatttggtagrgtgtagacaggtttaaagctttggtgtcaattagacccaaatttttatcttgcttccatttcttctaactctgggaccttaaataaggccctctgcaatgagtaacttactacctacttcataacatggttattaagtaaagaattagattatgttgataaatttccttgcctaggattgaataggtttccaggatagccagctctcttcctcatttctctggatgaaatatttcccattatttagggtcaattcaactagc

SEQ ID NO: 233837 - DNA, 490 bp, Homo sapiens
ttagatggctcctcctagaactgttcctctgttgtagatgagaaaatgaggctrtgcaaagtgaggtaacttgttaatttcacatgaccacgtggtgaggttgtattaaaatatttaaatatgcaattgactccagagccaatatgaagtttctcttctttgtcaatttttgtcctactttgcctgcttttactgcaagttaacattcaactctcggttctttccaaagtcaatgaaagacttacagagagcattcaataagaattaagcttaagatgaaagccaaagcaaaagagatttggctttattgtctagaacatagtttgcctgaccccacccacctcagttcttctcaggcctgtgcagtgaaagtggccccttgacctagctcatctccatagccaagagcaaggaaaatgtgccaaaatgagcaaatacctctgtgcctagagtttctcaagatagagatgagtggccaacgactaattcc

SEQ ID NO: 233838 - DNA, 442 bp, Homo sapiens
ctaacgagtcatcgagtattctcagttccgcttcttraatatctctcagctctgtcccttcctcttcatctgcatacacagtgccttagtgtattcaggcccctgtcactgtggcccgttctattgtaataagtccttctcatttcctgactctactcgctgccctcttaattcattcctttcactgaactcagaaatatctttccaaaacacacatcagagtaagttactccattttgcttgacacctttcagtggctccccatggaggtcaggatacaatcctgtcttcatagtcaagctgcctctgcagcttcctggatcggttttctctgctgctcacccttgctccaatcatgctgagctccatgcagtgtcttcctctcatgtagatgtgcctgtggctgctgttacctcctgcttgtccttcaaggcttagttag

SEQ ID NO: 233839 - DNA, 615 bp, Homo sapiens
gaactttgtttttgttcataagcacaatacaaaagcatctaaggcccaaaggaacaacagcttctttgcaggagtccctgagcagcacaggcacyacctgccatcttaaaagattcaagtcttcatttaagacaaatgcccagaattcagctttcctggagtgcttatgcagttaccaaacttctcaggttgcaaacaacaacgaaaaattatatgtataaaataactcctctgttcctggcactgctatgtcctttcatagacataaagacactgtttaaaattcaagactccagcctggattttctccttccagtaagtcaaatacactccacatccctatttcttatcctagaaaggagctctaataatacccatgccaactccattctcaaactgatgcaaggctgaaacatgctcatgttgggtaaagcactttcaaagctgtgaagttctcaactgaatgcgaaggattttgtacaaatgtgacttagtatttatcatttcaaaagtgggagattttcaaagttgagccttagtttatgttttttttttttttttttttttttttttttttttactagctttgatttagcagcactatatcctatttat

SEQ ID NO: 233840 - DNA, 586 bp, Homo sapiens
ttaatattcttccagataaaatatcaatctacacatttaccattcctcatcttgattaatgtaaacttctcctgttggccttacttataaatcactttcactgccaaaaattycaatttcattgccaaaaattattttccatctttgttcttgtaagagcatatctttaccagactcttcttttgttaactgcattcccccttaggatttccattatattatgaatcttgtttgtcttctatgtgttctgcttcctgtcatcttggctaatgttttaactttgaggactttagtctctgcgcagctatccttttgaaatgtaactcctctacccatttcagagagtagcactcatacatccacacgttgaccaacctgggggtttggaagtcaggaaatgtgttctgttttagtcatctgtgtgcccccagcacttagcacaggcctctgcttaaagttgtctcttcacgttccctgatgactgagcatcttctaggcgcctgatgccctgctgcactctggggacagaaaaaggaattagaagctgtccagggctttgatgagctcacactctaacttcgaggat

SEQ ID NO: 233841 - DNA, 550 bp, Homo sapiens
agtaggaactgccatagactgctgaggaattaagaatgcaacaaagaacaacaaaaggatgaacaaaagagaggttaggtgatgtggttaattgagaagctccacaactatmtaataggcatttcagaagcagagaaagaggtatcagtaggaaggcaaagacataatgactattttcccaaagtaaagtcttgactccccagattgaacactcacaccaaggaacaaactgaaaacaaaacaaaacaaacaaaataatacaacaggacatattgtaataaaactacaaagcatcaaggaaaatgagaaaatctgtaaagttatcagagttaaggcagattacctataaagaattacttctccaacaacaaatacaaatgtatgaaaatatagagtactattcaaggagttgaggaaaactgccaacctagaattctatacctagctatcattcaagagtgatggcaaaataaagccatttcagaatacaaacataaagagagttcacttccaacaaagcatttctttcaacaagaatctattactaaag

SEQ ID NO: 233842 - DNA, 577 bp, Homo sapiens
  misc_feature (1)...(577): n = A,T,C or G
aacttcgacagtgatttttaaattactcaggagactaacatcatatttcaacactctaggtactatgaaggcagacagcttaaatggtgtttatttcagtcaccatttccaaattgtaccctgcaggaaagtggaatatatttaactctggtgtaaacaaaagcaatgttttaggagaaaaatataggaaaagaggatcacttggtacctgatcttccaagggaattttaacattatatgaagatatttttaaacatttttttttcyattagaaaaatcaaccatgtaaaaatgcacaagattaaagcttctgttctttcagaaacactccatttgttatttggtgattaaacatgtatttctataattgcagtgaatttgacatcagggtgggatctgctggctccctactactcactgcgtgcaccatttatcatcccacaaagtggaggcctagtgcttgttagaagcctgttatttcactgtgattctcttaataattaaaaatctcataatcacaacaaacatccattgattgttttacacatatcaggcactgggctaagttctttnnnnn

SEQ ID NO: 233843 - DNA, 577 bp, Homo sapiens
  misc_feature (1)...(577): n = A,T,C or G
aacttcgacagtgatttttaaattactcaggagactaacatcatatttcaacactctaggtactatgaaggcagacagcttaaatggtgtttatttcagtcaccatttccaaattgtaccctgcaggaaagtggaatatatttaactctggtgtaaacaaaagcaatgttttaggagaaaaatataggaaaagaggatcacttggtacctgatcttccaagggaattttaacattatatgaagatatttttaaacatttttttttccrttagaaaaatcaaccatgtaaaaatgcacaagattaaagcttctgttctttcagaaacactccatttgttatttggtgattaaacatgtatttctataattgcagtgaatttgacatcagggtgggatctgctggctccctactactcactgcgtgcaccatttatcatcccacaaagtggaggcctagtgcttgttagaagcctgttatttcactgtgattctcttaataattaaaaatctcataatcacaacaaacatccattgattgttttacacatatcaggcactgggctaagttctttnnnnn

SEQ ID NO: 233844 - DNA, 464 bp, Homo sapiens
aatccaactgccaaatgaagtctgagatcagttcagttccaactgaatgtcccaacacacctcaaattaaacatatccccagacaccccaaatctccttttctcccatggtactttgctgatgcctcttcctagcatttgtcacactgtactgctggggttatttcattgaagacatggactatttcttactcaatttaaaattcctagcccctggcaaagcactgccacacagtaggcatctgctaaatatgagtgaggaagtacaaatcttgtgacactgttgaattgaacctgacacagagcatctctgctctgcctagartgtttcctgctttccttggctctatagtttgggttatgttttggttactgtgttgctttgtttttaactttctgattgttgctgggtaatctccttgggactctcttggttgctatgcttcacatgctgtgagatttcca

SEQ ID NO: 233845 - DNA, 547 bp, Homo sapiens
ttgtgacctttctgtaggttgcctgttcactctgatgtaatgttattaagttttacttttgctggaaaatatgatttgacctcctatctcatcctgtgactaagaatgacttaacctcctgggaattcagcccagtaagtcccagccttatttttacccagcccctattcaagatggagtagctcttggtcaaacgcctctgacatatttcacccttcctttttataagagaacccttaatcctaagtgttctagagcagcaaagatccatcttctgtaacttcttcaggckgaataggggtgatgatattcttgcttaactattagggtctcttgtatttggggtagagaggagctcagtcagaaagcatcagtatggccacttataactccaagttccaacaaaaggtgatatctggaagattaataagtgtttgatttaagaaaatgttttgtaagcttatcctgcattcctacacaacgagtacaacaggaatatattgcacaacagtaaagcaaagtaagtaaaattatccccaagtaacta

SEQ ID NO: 233846 - DNA, 547 bp, Homo sapiens
ttgtgacctttctgtaggttgcctgttcactctgatgtaatgttattaagttttacttttgctggaaaatatgatttgacctcctatctcatcctgtgactaagaatgacttaacctcctgggaattcagcccagtaagtcccagccttatttttacccagcccctattcaagatggagtagctcttggtcaaacgcctctgacatatttcacccttcctttttataagagaacccttaatcctaagtgttctagagcagcaaagatccatcttctgtaacttcttcaggctgaataggggtgatgatattcttgcttaactattagggtctcttgtatttggggtagagaggagctcagtcagaaagcatcagtatggccacttataactccaagttccaacaaaagktgatatctggaagattaataagtgtttgatttaagaaaatgttttgtaagcttatcctgcattcctacacaacgagtacaacaggaatatattgcacaacagtaaagcaaagtaagtaaaattatccccaagtaacta

SEQ ID NO: 233847 - DNA, 547 bp, Homo sapiens
ttgtgacctttctgtaggttgcctgttcactctgatgtaatgttattaagttttacttttgctggaaaatatgatttgacctcctatctcatcctgtgactaagaatgacttaacctcctgggaattcagcccagtaagtcccagccttatttttacccagcccctattcaagatggagtagctcttggtcaaacgcctctgacatatttcacccttcctttttataagagaacccttaatcctaagtgttctagagcagcaaagatccatcttctgtaacttcttcaggctgaataggggtgatgatattcttgcttaactattagggtctcttgtatttggggtagagaggagctcagtcagaaagcatcagtatggccacttataactccaagttccaacaaaaggtgatatctggaagattaataagtgttygatttaagaaaatgttttgtaagcttatcctgcattcctacacaacgagtacaacaggaatatattgcacaacagtaaagcaaagtaagtaaaattatccccaagtaacta

SEQ ID NO: 233848 - DNA, 572 bp, Homo sapiens
atacagtatttttgacatgtgtaagtggaaatgtccagtatgaaatttcatatgtaagtctagagttcagaagagagatttgggctagacatataatagcaatttctaggtgctatttcaatacatttgtattcaatacatatgtatgaaagaattaatccactgaatatctgcaggtatctgaggttaattattacctattatttacatttttaatatcaaggcacagagagtttcaataacttccttgaggcatgcgactattaagtggtagagctatgactcaaatgtggggagtctggcttcagagttgggtcacttctcacaaataaatagatttgtgaattatcatgtaggttataattgaagctatctgagaaacacctattagtaacatggaacacatcagtcacatttgcaagagctcttttggtggagtgtgaggcagaggccagattgggttgatgagtgaatgagggttcagaaagtggagatgygagtgtagacaagttttctggaaaatatgtctgtgaagagggaaagagagatagcatcatatcagcaggagaatg

SEQ ID NO: 233849 - DNA, 648 bp, Homo sapiens
agtaaaattattaatgagctattttattccattttttaatactaagtcttgcaaatccagtgtgttttcacacttactgcacatctcatttcagactagccacagttaaagtgctaaatggcctcatgtggctagtggctgaattgggcagtgcagattgagataaattcacaaatattgcatcctatactatgtgttgactatgcaactgaaaggaggatattaggtgaattctaaagtattcagaattttttagggtaaaggaagtaaacagcatttgcaattactttggggcctgtccctacaatctgattttagttcatctttaaacctacacccagaatgcattatttgccctctagtaacaaaacaacctcagrtagtcatttgcttgctttcctttttatcctctttctcccccaactccccaccaccttatatattatggattctgcctaaaagtaagaaggactgaaaaagaactggaaacaaatggcgaagcaggatgccctcaacccacatccggcaaaatgtgatctgttgccctaggcaaccatggtggtcaactcttctgttttcttttttttgcttccacctgctagttcacaagcataacactctcatcgacagccactctctttgtggcgg

SEQ ID NO: 233850 - DNA, 648 bp, Homo sapiens
agtaaaattattaatgagctattttattccattttttaatactaagtcttgcaaatccagtgtgttttcacacttactgcacatctcatttcagactagccacagttaaagtgctaaatggcctcatgtggctagtggctgaattgggcagtgcagattgagataaattcacaaatattgcatcctatactatgtgttgactatgcaactgaaaggaggatattaggtgaattctaaagtattcagaattttttagggtaaaggaagtaaacagcatttgcaattactttggggcctgtccctacaatctgattttagttcatctttaaacctacacccagaatgcattatttgccctctagtaacaaaacaacctcagatagtcatttgcttgctttcctttttatcctctttctcccccaactccccaccaccttatatattatggattctgcctaaaagtaagaaggactgaaaaagaactggaaacaaatggcgaagcaggatgccctmaacccacatccggcaaaatgtgatctgttgccctaggcaaccatggtggtcaactcttctgttttcttttttttgcttccacctgctagttcacaagcataacactctcatcgacagccactctctttgtggcgg

SEQ ID NO: 233851 - DNA, 648 bp, Homo sapiens
agtaaaattattaatgagctattttattccattttttaatactaagtcttgcaaatccagtgtgttttcacacttactgcacatctcatttcagactagccacagttaaagtgctaaatggcctcatgtggctagtggctgaattgggcagtgcagattgagataaattcacaaatattgcatcctatactatgtgttgactatgcaactgaaaggaggatattaggtgaattctaaagtattcagaattttttagggtaaaggaagtaaacagcatttgcaattactttggggcctgtccctacaatctgattttagttcatctttaaacctacacccagaatgcattatttgccctctagtaacaaaacaacctcagatagtcatttgcttgctttcctttttatcctctttctcccccaactccccaccaccttatatattatggattctgcctaaaagtaagaaggactgaaaaagaactggaaacaaatggcgaagcaggatgccctcaacccacatccggcaaaatgtgatctgttgccctaggcaaccatggtggtcaacycttctgttttcttttttttgcttccacctgctagttcacaagcataacactctcatcgacagccactctctttgtggcgg

SEQ ID NO: 233852 - DNA, 606 bp, Homo sapiens
caaaattaatcagaaaaggaattaattttaagcagggggatggtggtagagaaaggtgtaaagtcacaaacagataccccttgagagggagaaaactgcacagtcttattggttctggataactttcatgtctattttacatctatgttcaaaataaaatttttcctttggatgggtgtatcttctttaacagaactgtggtgtcccagatctaaagaacacagagagtaacttttmaaaccatataggggagaaagtttctttattccagcaaaaattttctaaataatttttctaagatctccttttacccacaggtcagcaaattgggctccagaattatttgatgcaatagatatgcaaatagaatcatgtagcgcctgtttcttaggttgagaattcttacaggtagcagaattatcctcataatttccaccaaactaacccaattgtttatggctgaatcctctaaataatctaggatgtcagtctccataaatatatactcaggaaaaataagtagtaatttgtgatcatgtgttaaaataaaaacaatgagacaaattataaagataattggtaacacaaaaagacaaacttgaatat

SEQ ID NO: 233853 - DNA, 611 bp, Homo sapiens
agagtcttcccaataagatccttgttcctttatctgtgacgttcagagtttccatcacattatgtttaggttttattaattttctttatggaatggttttggtgcccattcaattaaaaggctcatatatcttcttctctgtttttttatttttttcatctaattatcttcttcaacttctttctattgataacttctttcacttctcttagatgggcgtgttagtccattttgtgttgcttaaagaaatacctaagactgggtaatttataatgaaaaaaggtttatttggcttatggttcttcaggcagtaaaagcatggcattggcatctgcttggcttctcctgaggcctcaagaagcttttattcatggcagaacgtgaagggggagaaggcgtgtcacagggcaagagakaggtggaggatcccagattctttttagccatagatctcttggtaactcattaccatggggagggcaccaaagcattcatgaggaatccaccttcataacttagctcccattaggcctcacctccaacattggggatcacatttcaacacgacatttgaagggaacaaaacatccaaaatatggcaaaaggtattg

SEQ ID NO: 233854 - DNA, 470 bp, Homo sapiens
gtttgcactgatttgggatgatctatttactagtaaacaaaggttggaatataataaggcaagccaggccacaggacatcaatagcagaattttagagcttcattcacactgcatttcaaacacttttaccagtacatttttaatagtaatggtagaggtgtctactacttattgagttcctactgtatcaggtacttaaatgtgcatagttactcaaggaaacggccttgtaggaagaggytagatcctaactgatacataacatgcttaatcctataaacaataaaggcattctaaaataaatgattcttcgtattcttttaaattatcatgaaaaccctacgagttatgtgtaaaattatccccccttcctttctatttccatcccttctctcttatccttccttccttcccttactctttttccatctttctatctctctctctcttttacattttagttgagaaa

SEQ ID NO: 233855 - DNA, 469 bp, Homo sapiens
gtttgcactgatttgggatgatctatttactagtaaacaaaggttggaatataataaggcaagccaggccacaggacatcaatagcagaattttagagcttcattcacactgcatttcaaacacttttaccagtacatttttaatagtaatggtagaggtgtctactacttattgagttcctactgtatcaggtacttaaatgtgcatagttactcaaggaaacggccttgtaggaagaggttagatcctaactgatacataacatgcttaatcctataaacaataaaggcattctaaaataaatgattcttygtattcttttaaattatcatgaaaaccctacgagttatgtgtaaaattatccccccttcctttctatttccatcccttctctcttatccttccttccttcccttactctttttccatctttctatctctctctctcttttacattttagttgagaa

SEQ ID NO: 233856 - DNA, 476 bp, Homo sapiens
ggtacatgtttgcactgatttgggatgatctatttactagtaaacaaaggttggaatataataaggcaagccaggccacaggacatcaatagcagaattttagagcttcattcacactgcatttcaaacacttttaccagtacatttttaatagtaatggtagaggtgtctactacttattgagttcctactgtatcaggtacttaaatgtgcatagttactcaaggaaacggccttgtaggaagaggttagatcctaactgatacataacatgcttaatcctataaacaataaaggcattctaaaataaatgattcttcgtattsttttaaattatcatgaaaaccctacgagttatgtgtaaaattatccccccttcctttctatttccatcccttctctcttatccttccttccttcccttactctttttccatctttctatctctctctctcttttacattttagttgagaa

SEQ ID NO: 233857 - DNA, 469 bp, Homo sapiens
gtttgcactgatttgggatgatctatttactagtaaacaaaggttggaatataataaggcaagccaggccacaggacatcaatagcagaattttagagcttcattcacactgcatttcaaacacttttaccagtacatttttaatagtaatggtagaggtgtctactacttattgagttcctactgtatcaggtacttaaatgtgcatagttactcaaggaaacggccttgtaggaagaggttagatcctaactgatacataacatgcttaatcctataaacaataaaggcattctaaaataaatgattcttcgtattcttttaaattatcatgaaaaccctaygagttatgtgtaaaattatccccccttcctttctatttccatcccttctctcttatccttccttccttcccttactctttttccatctttctatctctctctctcttttacattttagttgagaa

SEQ ID NO: 233858 - DNA, 613 bp, Homo sapiens
ggcaactattgcccattttaaaacagggttcttagttcttctgttgttatgttgtttgagttccttatatgttttggatattaaacccttatcagatgcagtttacaaaaaatattctcctattctgcaggttgtctctttgctctgttgtttcctttaccatttaaaagcttttttgtttgacgtaatgtcatttatctatatttactttggttgcctgtgcttttaaggttttatctaaaaaaaaaatccttatstagaccaatgtcatgaagcttttcgctatgttttcttctagtgatttcatagttttgggtctcacatttaagtcttcaatccattatgagttactttttgcatacagtaggagataggatagggtctagttttcttgttctgcctgtgtatatccagttttctcagcaccatttattgaagagattgccctttctgcatcgtgtgtacttggcacacttgtcaaatatccactggttgtagatgtattggtttatttctggatttcctattttgttccactggcctatatgtctactttttatgccagtagcatgctgttttggttactaaaactttgtagtatgttttgaagtca

SEQ ID NO: 233859 - DNA, 613 bp, Homo sapiens
ggcaactattgcccattttaaaacagggttcttagttcttctgttgttatgttgtttgagttccttatatgttttggatattaaacccttatcagatgcagtttacaaaaaatattctcctattctgcaggttgtctctttgctctgttgtttcctttaccatttaaaagcttttttgtttgacgtaatgtcatttatctatatttactttggttgcctgtgcttttaaggttttatctaaaaaaaaaatccttatgtagaccaatgtcatgaagcttttcgctatgttttcttctagtgatttcatagttttgggtctcacatttaagtcttcaatccattatgagttactttttgcatacagtaggagataggatagggtctagttttcttgttctgcctgtgtatatccagttttctcagcaccatttattgaagagattgccctttctgcatcgtgtgtacttggcacacttgtcaaatatccactggttgtagatgtattggtttatttctggatttcctatttygttccactggcctatatgtctactttttatgccagtagcatgctgttttggttactaaaactttgtagtatgttttgaagtca

SEQ ID NO: 233860 - DNA, 584 bp, Homo sapiens
tcaggatttccaaatgacaaatgctatttcaaatgggcagccacatagcacacaaaactagacttttggtttataaaaacatttttataacatcttttttaaaaaagaaaaataatcctatttattccttcaataaaataagatttgaaagcatttgaaaatatctagtcaactaagcatctgttagttactttttcaggaatgccactgtttattctgtttggttcagaaaaatatttgagtgctggtttcatcgcaaatactgctttgaaaaccagagaagtttttaaacttctctgatatcccaagcagctcacagtttccaagtggagagtgaaacagaaacaatcatacagcaaaatgatggrggtgctgaataatacagggggttttgcatcttgataagccagaaaagaagactgaatttacctcaggtttaaatatatctgaatataatgcattatttgaccttttttaaggcaaatacttgttgcttcttttgccttgtaccagttgatgtgcttcataatatttgcacatcctcttatatcatccttcctcataccgtgcagtgggtgtgacca

SEQ ID NO: 233861 - DNA, 645 bp, Homo sapiens
agagactaggtctaattttattttatttttttctagagtgtgtttttgccctagggtccatcatattacaatagaactatttcttgctgtgctacaggtatatgcatgttttatttcttgatcttccatcaaaaccacacaagctatcagtttggcaacactggtattactgcagctcagagactacctgaaattgttcataaaattttctgtatatgattacatatttattttttctgaagagaaatgtcatccctttcatcagactctcaaagtggtctgtgatctaaaattatgaaaataaaacaaacaaaaccccactattacagaaaatgccattcaaatgaggaaataagtgatatagtagctacagcatttattacaaaacaattgagataagataccaagttattaatattargaatatttcaaatcaaattcttattgatgaaaatgtaaatttacccatattagtgaataccaaggacaattcgatttttaaaaacttatttatccatttaatatttaaacaagtatttctgtgaagctttctatatgaagagaactaaatctggttaaataaatgtaagatgcaaaaaacaaatcccaatttgacttttctttcatgaatgcaattttaaagtt

SEQ ID NO: 233862 - DNA, 645 bp, Homo sapiens
agagactaggtctaattttattttatttttttctagagtgtgtttttgccctagggtccatcatattacaatagaactatttcttgctgtgctacaggtatatgcatgttttatttcttgatcttccatcaaaaccacacaagctatcagtttggcaacactggtattactgcagctcagagactacctgaaattgttcataaaattttctgtatatgattacatatttattttttctgaagagaaatgtcatccctttcatcagactctcaaagtggtctgtgatctaaaattatgaaaataaaacaaacaaaaccccactattacagaaaatgccattcaaatgaggaaataagtgatatagtagctacagcatttattacaaaacaattgagataagataccaagttattaatattaagaatatttcwaatcaaattcttattgatgaaaatgtaaatttacccatattagtgaataccaaggacaattcgatttttaaaaacttatttatccatttaatatttaaacaagtatttctgtgaagctttctatatgaagagaactaaatctggttaaataaatgtaagatgcaaaaaacaaatcccaatttgacttttctttcatgaatgcaattttaaagtt

SEQ ID NO: 233863 - DNA, 438 bp, Homo sapiens
gtgagtgttatttattcattcctcaaaggattcattaattcatttattaaactaatttattttgctaactctgtgtaaggaatgatgaaatatacaaagagaaactgaaaaacaaaatcaggatgaaaagatggtttggatacaggttgcaggttgttttcagtgactgagaatttagtattatttattctctaggtgaagaggaactgtaacccacataaaaccaaggataagaatattaaacactagcataatgagagaaatttgtctaaaaatgtttaattccatgcatcccaggaggacatgaaaagggactctcctagacaaaaagaattaaacacattctcattctcatggtstatgtaacatgttagaatgattacattaaaaaagatgattgattagatatttaataaaatttagtagaaaactcacaat

SEQ ID NO: 233864 - DNA, 218 bp, Homo sapiens
tttatggaaagcagtcattctgaggctttgtgtattaaaayaatccttttattctctcttaatcatgaaaatttggctagtaatataactctatgctcatattccactagaggtttaaaatagtctctctttcttctagcattaattattgctgaatgagaagttagagtcttcccaataagatccttgttcctttatctgtgacgttcagagtttcc

SEQ ID NO: 233865 - DNA, 616 bp, Homo sapiens
tcaacctacatgtgcctataggtcctcactgcagcaatgacatctctcagctcagtaatggccacttggagcaggaatatgatctttatatggaagactcagtggatccttatcaccttcatagaaaggtactcacctcccacgtcaagagaaaagccaacatgtttttcctccaatgcataaaaggaacttccatagggcaggcaggagtcaggctgttcaagacaactggaaggagttgaataacatctatccagtgagtcctgcaagacttcaggctctactgcctccagcagctccctgctgagcctggaaaaggaggaaaaagtaaagaataagccaggggaaatcagacacaacagagccccaactaggtttcatgggtagcataaggaagtggttraaaaagtaaaaggatagatccattaatgaggtaacaaattattgccttcatgttgggacagaacagggccaaatggaaaagaatgaaagagaaagacagatagacacacacacacacacacacacacacacacacacacacagagagagagaatgagctcagtgaattgtccaggtgacacactgatgagggagtaacaggacactctgagtt

SEQ ID NO: 233866 - DNA, 486 bp, Homo sapiens
gtgcaactgcactctagcctgggtgacagagcaagactccatcgcaaaaaaaaaaaaaaaaaaaaaaaaaaaaaaaaaaatccacgatgctacaaagaaacattggatcagccattgcattgacagggtggagaaccagggtccagccttgctttatggaaatatatcagcaaagtaaagaagaaaagtttccgtmctgatttcagggtgactgtgcagctaagcaagctgacttaaaggagatccggatgaaagctgagagcagtgaagcctggggaacaatatttccaaatacaaaggcaaggctgccagcttcctgaaacaggcatagaaactccatggacattgttcagggacagatgacttaatcacagatgacaagagatactgaatcgaagctaggaggcctgacagatactgcctgtgcacctcctgcactcaggtgactatgagattgtcacacttgcctggggtcgagtaacttga

SEQ ID NO: 233867 - DNA, 486 bp, Homo sapiens
gtgcaactgcactctagcctgggtgacagagcaagactccatcgcaaaaaaaaaaaaaaaaaaaaaaaaaaaaaaaaaaatccacgatgctacaaagaaacattggatcagccattgcattgacagggtggagaaccagggtccagccttgctttatggaaatatatcagcaaagtaaagaagaaaagtttccgtcctgatttcagggtgactgtgcagctaagcaagctgacttaaaggagatccggatgaaagctgagagcagtgaagcctggggaacaatawttccaaatacaaaggcaaggctgccagcttcctgaaacaggcatagaaactccatggacattgttcagggacagatgacttaatcacagatgacaagagatactgaatcgaagctaggaggcctgacagatactgcctgtgcacctcctgcactcaggtgactatgagattgtcacacttgcctggggtcgagtaacttga

SEQ ID NO: 233868 - DNA, 486 bp, Homo sapiens
gtgcaactgcactctagcctgggtgacagagcaagactccatcgcaaaaaaaaaaaaaaaaaaaaaaaaaaaaaaaaaaatccacgatgctacaaagaaacattggatcagccattgcattgacagggtggagaaccagggtccagccttgctttatggaaatatatcagcaaagtaaagaagaaaagtttccgtcctgatttcagggtgactgtgcagctaagcaagctgacttaaaggagatccggatgaaagctgagagcagtgaagcctggggaacaatatttccaaatacaaaggcaaggctgccagcttcctkaaacaggcatagaaactccatggacattgttcagggacagatgacttaatcacagatgacaagagatactgaatcgaagctaggaggcctgacagatactgcctgtgcacctcctgcactcaggtgactatgagattgtcacacttgcctggggtcgagtaacttga

SEQ ID NO: 233869 - DNA, 584 bp, Homo sapiens
aacactttccctttttaggggtctgttcttcatgtctcagtgcctctgatctagtcaacacaactgtcctgaatgtgaaagaacttgctaaatttctagtttcttgttaggtggctaaaatagatttataagacttccttacttacccatgactgctgaagtttgaattcttagcagtacgattcgttttcttgtaaggtgagcagcttaggaaagattggccatcttcctgtgcaaaaagaggcaaacttaatttctactcaaagcatgcttgaatttggaatcagggcttccactcttccgaagttggagtgtcactgcgacaggcatgtgtcccgaagggctcgtgtctctgctatactcaaagtttaaatggagcccagcaagccagatgtcctttacttctaggttccctcaacagtttctcctccgctttagagaccgcattgaaaatattcttgttctgctgttgtgttttggctttggaatgatgtgatgcagctcaatgggtcccacccccaasttgatcaaagtaagaaacagctgggaaagtcagtgcaaatacaagttcattgtcctccttg

SEQ ID NO: 233870 - DNA, 598 bp, Homo sapiens
tgaggaactcacacactgtttactaacttcagtagctacatcattttagattcccaatagtaatatatgagaattccatattctccatcacttttgaaacatgtgttgtctttatttttttcttaagtcatactgctgggtgtgaagtggtatctcattttggtttaaatttacattttcctaatgacgaaaaacattgaacatctttgcatgtgcttcttggccatttgtgtgtttcctttagagaaacctctactcacagctttttttccccattgttaaatgtggttgtcgtttattgctcagttatatgaattccttatayactctaggtactagacctgtgtcaaacatacaatttggaaatagttctcccattatgtggattatcttttcacttccttgacagtgtcctttgaagcatacaagttttttattttaatgaagtccatttatctatttttcggttgtttgtgcctacttaaaaaatgtctaatccaaaatcacaaagatttgtacctaggtttccttcaagacatcgtcttttgaatgagaactttcctgggttttagaggagggtggacattgtttattgatg

SEQ ID NO: 233871 - DNA, 598 bp, Homo sapiens
tgaggaactcacacactgtttactaacttcagtagctacatcattttagattcccaatagtaatatatgagaattccatattctccatcacttttgaaacatgtgttgtctttatttttttcttaagtcatactgctgggtgtgaagtggtatctcattttggtttaaatttacattttcctaatgacgaaaaacattgaacatctttgcatgtgcttcttggccatttgtgtgtttcctttagagaaacctctactcacagctttttttccccattgttaaatgtggttgtcgtttattgctcagttatatgaattccttatacactctaggtactagacctgtgtcaaacatacaatttggaaatagttctcccattatgtggattatcttttcacttccttgacagtgtcctttgaagcatacaagttttttattttaatgaagtccatttatctatttttcsgttgtttgtgcctacttaaaaaatgtctaatccaaaatcacaaagatttgtacctaggtttccttcaagacatcgtcttttgaatgagaactttcctgggttttagaggagggtggacattgtttattgatg

SEQ ID NO: 233872 - DNA, 494 bp, Homo sapiens
tggtctatcttgctgaatgctctatgtgagtttgagaagagttatttgttagctgttcttagatgtattttgcttaaatatcgacctggctaacatgtgtcattgattgtgtgaattaatyttgttctagtgggcagtaaaattactgtctgatcactttggacttatgtggactggtttatgttttattacaacggattcatggaaagcccacagcatttcccaagaccctctaatttggcaggactcaatcaccaatccacccctttgtgaatttgtcagggtttgcttttaggctttagcaggttggtctacaataggccttattgaaaagtgtgacacttattcctaaagcacatccattctagtgtctcagttggatacctgggtgctaatgaggtgtgcatcagttcttcccaccatggatggcagaaactccatcatacattccccaaccctcctccacctcaagtacctctggtccaaactcaatt

SEQ ID NO: 233873 - DNA, 494 bp, Homo sapiens
tggtctatcttgctgaatgctctatgtgagtttgagaagagttatttgttagctgttcttagatgtattttgcttaaatatcgacctggctaacatgtgtcattgattgtgtgaattaattttgttctagtgggcagtaaaattactgtctgatcactttggacttatgtggactggtttatgttttattacaacggattcatggaaagcccacagcatttcccaagaccctctaatttggcaggactcaatcaccaatccacccctttgtgaatttgtcagggtttgcttttaggctttagcaggttggtctacaataggccttattgaaaagtgtgacacttattcctaaagcacatccattctagtgtctcagttggatacctgggtgctaatgaggtgtgcatsagttcttcccaccatggatggcagaaactccatcatacattccccaaccctcctccacctcaagtacctctggtccaaactcaatt

SEQ ID NO: 233874 - DNA, 424 bp, Homo sapiens
caggccaaacgtcttggttaactctccgctgaaaggacgccacatgagatgatctaagaagccagccagccagccagacgcagggaaatcacagcaactctttggagtgcaaacagcaaccccacaatccaatctacccgaaatcctgcggttcatttgaggcttgccccgctagtcaggaggtgattcagcgatggctacaaatgctgctcatgtgcatcctggasctggcacacctggcttgcccatcaccagcctggagacaacgccaggagcagaagcccggaggccagtaaagaccccaactttgcaagtcaggggcgcgagcgcgctcgcctctcaggtccgcagagggaacggatttctggcctggagggtggggtgcggggtcagtgtcctctacaggatataggaggacgtgccc

SEQ ID NO: 233875 - DNA, 424 bp, Homo sapiens
caggccaaacgtcttggttaactctccgctgaaaggacgccacatgagatgatctaagaagccagccagccagccagacgcagggaaatcacagcaactctttggagtgcaaacagcaaccccacaatccaatctacccgaaatcctgcggttcatttgaggcttgccccgctagtcaggaggtgattcagcgatggctacaaatgctgctcatgtgcatcctggagctggcacacctggcttgcccatcaccagcctggagacamcgccaggagcagaagcccggaggccagtaaagaccccaactttgcaagtcaggggcgcgagcgcgctcgcctctcaggtccgcagagggaacggatttctggcctggagggtggggtgcggggtcagtgtcctctacaggatataggaggacgtgccc

SEQ ID NO: 233876 - DNA, 489 bp, Homo sapiens
ggagggattctgtgtccctgttattgtgtgtcaacatgtgttagcctgatatttatatttttaatgagagaaaacgaactctggaatttgcgaactgttttttcggttttgctttatacctcttggacactccttccgaaggattgggtctcaagggcagtggggtgtgactacggtagacagggctgattaattttcatccaaaactctttggcggattcccctgctctccgcttctccggtctaacagtagtttaaaacagaagatcagcaacatttggagagtttttttctttgcattttaatgataaacttgatttattccattccaaaagttttmttattctgaggttgtctttctatattttgagtataaaacaatggccatactatgttggaaccaccaaggttcttctcttcacttgttcatttgtaatgtctctttataatctgagaatttcctgagcaaactgggaactgttatacata

SEQ ID NO: 233877 - DNA, 457 bp, Homo sapiens
cgtgtgtacaaaaaccagggcccggccggacacggtggctcacgcctataatcccagcactttggcaggtggatcacttgaggtcaagagttcaagaccagcctggccaacgtggtgaaaccctgtctctactaaaaatacaaaaattagcygggcatggtggtgcacgcctgtagtccctgctacttgggacgctgaggcaggcgaacagcttaaaccccggaggcagaggttgcagtaagcccagatcgtgccactgcactccagcctgggcaacagagcaagactgtctaaaaaaaagaaaaaaaaaaaaaaaagaaaagaaaagaaaaatgagggtcctcactcagctttggaagtaacagaacccttgtattactctaagcagagaagctgaatatataaaccagacccaaatgcagctgctcagcaggcctcaaggtggagacttgcaccc

SEQ ID NO: 233878 - DNA, 521 bp, Homo sapiens
tgtcaacacagaattaagcatccataattgctcaaagttacctggggcatgatgggtcttggtcttcttccacttcttggtacttttcaatttctgcaataagttcagacatggacagacatattaagctggttctcctacacacataacaatccactgtctaatcctcacacagggacttcaggctcctcagcatgagaataggacackgtgagagatcttcttcaggaggcctgaaggctgatcatgatagagattcctgggtttttgtcccagaaactgtgggtaaaattccctattctggtagatcgttatcccaagatcatttgtcccaagtttgtgcaaatggttatgccatatttttccaatcgatttaaagcaaatgcccccaaatggttgctgggagaaaaactgcaatattcagccctgtctcatcaaatactcagattcttcatggtagcgaggattttagatgctgaaattagagtgaaggatgaaatctacaagatctacaaaattga

SEQ ID NO: 233879 - DNA, 251 bp, Homo sapiens
gatagagattcctgggtttttgtcccagaaactgtgggtaaaattccctattctggtagatcgttatcccaagatcatttgtcccaagtttgtgcaaatggttatgccatatttttccaatcgatttaaagcaaatgcccccaaatggttgctgggagaaaaactgcaatattcagccctgtctcatcaaatactcagattcttcatggtagcgaggattttagaygctgaaattagagtgaaggatgaaa

SEQ ID NO: 233880 - DNA, 414 bp, Homo sapiens
gacaaaatcagagttgtgtgaatttgtcacatctgcccagatccaacatcttgagagtrggattagggtgccacaggcatggcctgagactaggaagagagccctgttcactgacccatcccttgcctgggcttccaagtggaactagagtttcattcaacctacatgtgcctataggtcctccctgtggcaatgacatctctcagctcagtaagggccatttgcagtaggaatatgaccctaaccagaagactcagtggatccttatcaccttcatagaaaggtactcaccatccatgtcaagagcccagccaacacgctgttgctccaatatgtaaaaggcacttctgtagggctggcatgagtcagtcagttcaagataacctgaaggagttgaataacatctatccagtg

SEQ ID NO: 233881 - DNA, 414 bp, Homo sapiens
gacaaaatcagagttgtgtgaatttgtcacatctgcccagatccaacatcttgagagtgggattagggtgccacaggcatggcctgagactaggaagagagccctgytcactgacccatcccttgcctgggcttccaagtggaactagagtttcattcaacctacatgtgcctataggtcctccctgtggcaatgacatctctcagctcagtaagggccatttgcagtaggaatatgaccctaaccagaagactcagtggatccttatcaccttcatagaaaggtactcaccatccatgtcaagagcccagccaacacgctgttgctccaatatgtaaaaggcacttctgtagggctggcatgagtcagtcagttcaagataacctgaaggagttgaataacatctatccagtg

SEQ ID NO: 233882 - DNA, 641 bp, Homo sapiens
gaagactcagtggatccttatcaccttcatagaaaggtactcaccatccatgtcaagagcccagccaacacrctgttgctccaatatgtaaaaggcacttctgtagggctggcatgagtcagtcagttcaagataacctgaaggagttgaataacatctatccagtgagtcctgcaagacttcaggccctttctcatccagcagctccctgttgagcctggaacagtgggaaaaagtaaagaataagccaggggaaatcagaaaccacacagccccagctagatttcatggctaacataaggaagagtttgaaaagaaaaaggacagatccattaatgaggtaacaaattattgtctttatgttgggatagaacagggccaggtagaaaacaatgaaagagaaagacagagagacagagacagagacagagacagagagaaagtgagctagtgaattggccaggtgacatactggtaagggagtaaaaggacactctgagttagtgccctcatgacacacagcaaactgcgatcatgaaaagagtgagctcaatagttttccataaaatatgctcaaaattcgatgcagtggccatgagagtacagcttttgaagtatggtcatcctatggtacgttagta

SEQ ID NO: 233883 - DNA, 641 bp, Homo sapiens
gaagactcagtggatccttatcaccttcatagaaaggtactcaccatccatgtcaagagcccagccaacacgctgttgctccaatatgtaaaaggcacttctgtagggctggcatgagtcagtcagttcaagataacctgaaggagttgaataacatctatccagtgagtcctgcaagacttcaggccctttctcatccagcagctccctgttgagcctggaacagtgggaaaaagtaaagaataagccaggggraatcagaaaccacacagccccagctagatttcatggctaacataaggaagagtttgaaaagaaaaaggacagatccattaatgaggtaacaaattattgtctttatgttgggatagaacagggccaggtagaaaacaatgaaagagaaagacagagagacagagacagagacagagacagagagaaagtgagctagtgaattggccaggtgacatactggtaagggagtaaaaggacactctgagttagtgccctcatgacacacagcaaactgcgatcatgaaaagagtgagctcaatagttttccataaaatatgctcaaaattcgatgcagtggccatgagagtacagcttttgaagtatggtcatcctatggtacgttagta

SEQ ID NO: 233884 - DNA, 585 bp, Homo sapiens
aaggcacttctgtagggctggcatgagtcagtcagttcaagataacctgaaggagttgaataacatctatccagtgagtcctgcaagacttcaggccctttctcatccagcagctccctgttgagcctggaacagtgggaaaaagtaaagaataagccaggggaaatcagaaaccacacagccccagctagatttcatggctaacataaggaagagtttgaaaagaaaaaggacagatccattaatgaggtaacaaattattgyctttatgttgggatagaacagggccaggtagaaaacaatgaaagagaaagacagagagacagagacagagacagagacagagagaaagtgagctagtgaattggccaggtgacatactggtaagggagtaaaaggacactctgagttagtgccctcatgacacacagcaaactgcgatcatgaaaagagtgagctcaatagttttccataaaatatgctcaaaattcgatgcagtggccatgagagtacagcttttgaagtatggtcatcctatggtacgttagtaaatgataaggggaggaagaaatggaaacctaagca

SEQ ID NO: 233885 - DNA, 360 bp, Homo sapiens
cagcttttgaagtatggtcatcctatggtacgttagtaaatgataaggggaggaagaaatggaaacctaarcatctactgcaatgaaaaccaacagcaatgacagtaggagtaattcagccttcgttgaaaacatgaaatcaaacacactctggtttccctgaatctgttgcctccaggtgttaacacagaattaagcatccacaattgctgaaagttacctggggcatggtgggttttgatcttcttccccttcttttcttccccttctccttcttttcttcattgatcttcttccccttcttttcttccccttccccttcttttcaatttctgcaataaattcagacatggacagaca

SEQ ID NO: 233886 - DNA, 612 bp, Homo sapiens
aaaaccaacagcaatgacagtaggagtaattcagccttcgttgaaaacatgaaatcaaacacactctggtttccctsaatctgttgcctccaggtgttaacacagaattaagcatccacaattgctgaaagttacctggggcatggtgggttttgatcttcttccccttcttttcttccccttctccttcttttcttcattgatcttcttccccttcttttcttccccttccccttcttttcaatttctgcaataaattcagacatggacagacacattaagctgattcccctacacacataacaatccactgtctaaccctcacacagggacctcaggctcctcagcataagaataggagactgtgagagatatatttcaggaggcctgaaggctggtcatgatagaaattcctcggtttttctcccagaaactgtgggtaaaatgtccctattctagtagatcgttatcccaatatcatttgtcccgagtttgtgcaaacagttatgccatatttttccaatcaatttaaagcaaataccctcaaatgatttctaggagaaaaactgcaatatttagccctgtctcatcaaatactcagattgttcatgg

SEQ ID NO: 233887 - DNA, 612 bp, Homo sapiens
aaaaccaacagcaatgacagtaggagtaattcagccttcgttgaaaacatgaaatcaaacacactctggtttccctgaatctgttgcctccaggtgttaacacagaattaagcatccacaattgctgaaagttacctggggcatggtgggttttgatcttcttccccttcttttcttccccttctccttcttttcttcrttgatcttcttccccttcttttcttccccttccccttcttttcaatttctgcaataaattcagacatggacagacacattaagctgattcccctacacacataacaatccactgtctaaccctcacacagggacctcaggctcctcagcataagaataggagactgtgagagatatatttcaggaggcctgaaggctggtcatgatagaaattcctcggtttttctcccagaaactgtgggtaaaatgtccctattctagtagatcgttatcccaatatcatttgtcccgagtttgtgcaaacagttatgccatatttttccaatcaatttaaagcaaataccctcaaatgatttctaggagaaaaactgcaatatttagccctgtctcatcaaatactcagattgttcatgg

SEQ ID NO: 233888 - DNA, 614 bp, Homo sapiens
tggtttccctgaatctgttgcctccaggtgttaacacagaattaagcatccacaattgctgaaagttacctggggcatggtgggttttgatcttcttccccttcttttcttccccttctccttcttttcttcattgatcttcttccccttcttttcttccccttccccttcttttcaatttctgcaataaattcagacatggacagacacattaagctgattcccctacacacataacaatccactgtctaaccctcacacagggacctcaggctcctcagcataagaataggagactgtgagagatatatttcaggaggcctgaaggctggtcatgatagaaattcctcggtttttctcccagaaactgtgggtaaaatgtccctattctagtagatcgttatcccaatatcatttgtcccgagtttgtgcaaacagttatgccatatttttccaatcaatttaaagcaaayaccctcaaatgatttctaggagaaaaactgcaatatttagccctgtctcatcaaatactcagattgttcatggttgtgaggactttagacactgaaattagagtgaaaaaggaaatctacaaacccttgagtcaaaatcat

SEQ ID NO: 233889 - DNA, 616 bp, Homo sapiens
tcaacctacatgtgcctataggtcctcactgcagcaatgacatctctcagctcagtaatggccacttggagcaggaatatgatctttatatggaagactcagtggatccttatcaccttcatagaaaggtactcacctcccacgtcaagagaaaagccaacatgtttttcctccaatgcataaaaggaacttccatagggcaggcaggagtcaggctgttcaagacaactggaaggagttgaataacatctatccagtgagtcctgcaagacttcaggctctactgcctccagcagctccctgctgagcctggaaaaggaggaaaaagtaaagaataagccaggggaaatcagacacaacagagccccaactaggtttcatgggtagcataaggaagtggttgaaaaagtaaaaggagagatccattaatgaggtaacaaattattgccttcatgttgggacrgaacagggccaaatggaaaagaatgaaagagaaagacacacacacacacacacacacacacacacacacacacacacacacacagagagagagaatgagctcagtgaattgtgcaggtgacacactgatgagggagtaacaggacactctgag

SEQ ID NO: 233890 - DNA, 466 bp, Homo sapiens
ggaagggttgtgtagctcatgttygatattgattaaaaatgtttcatagttttcccccctttgaactagacacacttctaatatttggtttatacattttaaattatgactttcagcgtcaaatatttccatatgacagtcagttacatgatgtgttttctttttcctacctcctttacctgccacttctcataatggtatttgaacctaaacatatgccagtgacattctgtggttgtcatcttgcccacaccttggtttttggtttagatccacaattaaatatattaatgctcatgagctgttcaaaagtgaatgtcacagtcatcacttgctgagtggtactcatccttaacagagtcctcatgagggaatcaggtctcgctgagtttagcatgtttaataatcttcctcgtggtcttgatacatggatcgcattactggatataaggtgtttgcccaaaat

SEQ ID NO: 233891 - DNA, 514 bp, Homo sapiens
gtgaattcagcaaactttcagcaaacaatycattgtgatggcaatgagctatctgagaagtaaactgacacaatgatttcatttataatagcacctgtaaggataatatgcctgggaataaatttgttcaagaaggtgcagtacttgtacacagacaactacagaacattgctcgaggagactaaggaagacctaaatcaatggaaagacatcttgtgtccatgggttggaagttgtaacatggttaagataaaaatacaactcaaagcaatccacagactcaatacaatcctatcaaaaagtggctttttttacaggaatgcctgagaagaacttcatgttcctaaaaaacagcaagtgtccccccaaaacaaaagcaatcttgaaatgcaagaaggaacgttctctattccaaaggtctttaactgctctcagtaatacgtggtaatcttcaatatataggctttcacacctttttttttttcttcttttgtttctagacacgatctcactc

SEQ ID NO: 233892 - DNA, 514 bp, Homo sapiens
gtgaattcagcaaactttcagcaaacaatccattgtgatggcaatgagctatctgagaagtaaactgacacaatgatttcatttataatagcacctgtaaggataatatgcctgggaataaatttgttcaagaaggtgcagtacttgtacacagacaactacagaacattgytcgaggagactaaggaagacctaaatcaatggaaagacatcttgtgtccatgggttggaagttgtaacatggttaagataaaaatacaactcaaagcaatccacagactcaatacaatcctatcaaaaagtggctttttttacaggaatgcctgagaagaacttcatgttcctaaaaaacagcaagtgtccccccaaaacaaaagcaatcttgaaatgcaagaaggaacgttctctattccaaaggtctttaactgctctcagtaatacgtggtaatcttcaatatataggctttcacacctttttttttttcttcttttgtttctagacacgatctcactc

SEQ ID NO: 233893 - DNA, 626 bp, Homo sapiens
gataaaaacatgaattcagcttgaaacatggtgaatttgagacgcttatcagacattgaagagagatgaagggtgggcaactggatatgccatctgaccttaagaaaagaagcctgggcagagcacggtggctcacacctgtaattccagcactatgggagtccgaggcaggtggatcacctgaggtcaggagttcgagaccaccctggccaacacagtgaaaccccgtctctactataaatacaaaaacatcagctgggcgtggtggtgggcgcctgtagtcccagctacttgggaggatgaggcaggagaattgcttgaaccttggtggtggaggctgcagtgagctgagattatgccactgcactccagcctgggcaacagagtgagactctgtctcaaaacaaaacaaaacamaaaaagaaaagaaaagaagcctgggttcagagataaatttgaaagtatcatgtacgttgtaattaataccaagcaaatggagatcatgtagggatgaaacccgcagctagggaatagcagaaagcctaaggaaatgccggaggaaacaacatttaatggagaggaggtgaacccagcacaggaggctgatgtaatttcagacttactca

SEQ ID NO: 233894 - DNA, 508 bp, Homo sapiens
cccatttcttatatttatttctgagattaagctgctattaaatatgaaagactagttgccttctcatttgtccacccttgtaatattcttagcttctcggcaaagttttatatgaggtggtaaggggctccacatatagagtgttattaggctcattctaattcaatttccctttctaaaatagaaagttgtaggaaggaagtgggtgggtctgggaagatagataacatttattaagtattcattttgttcagatactatgcyaagtgctttattatgtcagctaataataatactctttatttacctcaaggaggttgtcgggctttaaaacataacaaccacttcccagtttcaaggtaacaaaagacactccatgaaacaaattcatgtgtatgtatcatcacattttgataacactaatgtgtttttgtaaccttacttacattactttgtatttatcgggttaacataatttggaaataagaaatccatttgaaagtgggaa

SEQ ID NO: 233895 - DNA, 370 bp, Homo sapiens
catatagctacactgacttagagtagaaacccaccttgagcatcttccaaccctaagactaagcacctatggtttggggcaatcttgaaattggacccactgctaggcatcctgcaccaccatcatgacaaactcctacagcctaggctactgaggcaataacagacatcacyaattcggattacaactgaaaaagcacagggatcacactaatgaatctactcagaaaaaaaagccaacgtcccatacccaaacaacaccctagggagtcatctacaggcaaaagtctctctctataaaagttactctataaaattagaaaaagctactattccactagatgtgcagagatcaatgtagggacataaag

SEQ ID NO: 233896 - DNA, 396 bp, Homo sapiens
tcctactttgaagaatttattcytcatgcacacttgtatatatatgtatgctaagatattcactgtatcattatttgcaatagcaaaaaaatttgaaacaaagtttattagaacattgtgtaataaatttttgtgcattcctataatgtggtactatgacattatcaataaaacaataaagcagatctgtcaggactgaatgggagaattcccaagatacagtgttaaagggataaaagaggtacagaacagtatgtatgtatagtatattactattgtaggaaagagattatacatacagaaaaaatatatgcagttatatgtctagaatagctttggaaggacacatgaaaggaacagagaagagaacaaataaggaagaagcagggttttttg

SEQ ID NO: 233897 - DNA, 621 bp, Homo sapiens
gaattcttttttttgttctctttccctttgagtagtgtaataaaccattcaggtaggttctctgcattccagacatgcaggcttccatggatgaagtccttcctccacaagtcaactgccttgctgtcagctccaatgtcagtcccttcagacyctctgtttccataatataccctgacctggcatgaccacctccttcatggttcaggagtcattgaaaagccagcaaagatcagagctgggtctctcctgaatgaagccactgactgtgcccaatttatataattatagccagacaactgttctcttgggactcagcagaggcaaagagagatggatttctaccacagtgttagaaaataaaggacagtttcttattttgtaagccacccaggtgtaggattggacaacatatcaccacttagcatttggacagcaaactgttcagaaatctataacctgtctcgtgtcacatagctggagagagaactttttttttttttttttcacatctttcagacttgctagctttaaggccatctgtgtaaagtccgtgcagttgaaagcaggcaactttgccctcaatataaagttgccattagctgaatcagcaccggttca

SEQ ID NO: 233898 - DNA, 621 bp, Homo sapiens
gaattcttttttttgttctctttccctttgagtagtgtaataaaccattcaggtaggttctctgcattccagacatgcaggcttccatggatgaagtccttcctccacaagtcaactgccttgctgtcagctccaatgtcagtcccttcagactctctgtttccataatataccctgacctggcatgaccacctccttcatggttcaggagtcattgaaaagccagcaaagatcagagctgggtctctcctgaatgaagccactgactgtgcccaatttatataattatagccagacaactgttctcttgggactcagcagaggcaaagagagatggatttctaccacagtgttagaaaataaaggacagtttcttattttgtaagccacccaggtgtaggattggacaacatatcaccacttagcatttggacagcaaactgttcagaaatctataacctgtctcgtgtcacayagctggagagagaactttttttttttttttttcacatctttcagacttgctagctttaaggccatctgtgtaaagtccgtgcagttgaaagcaggcaactttgccctcaatataaagttgccattagctgaatcagcaccggttca

SEQ ID NO: 233899 - DNA, 495 bp, Homo sapiens
ttttattgttgtgaggatataggcagttgaattatactttattttaacattatcacaaatactgtgagtgctcctcagtactcccatgacaaaggcttaccatgatattaaygctatggtttgttgggggcgggggggagttaaactagaaataatagaaataattctggttccatctcttatgagatgtttaagggtgggtaattcatgtatttacaacttccaaaataataactggcatttattaagcacttatcacgtgtcagcaatgttcccagcacttgacatgtattttcccatttattactcgcaacaaacttatgagcaaagaaccattaatattcccatttcaaagatgacaaattgagacaaagcaagattaagtgatctaaggttaagaccatgacttatatttagagacctctgactcccaacccagcactagttgcaattggacacaaatgtctctcagtcaccattcgcctatctatggaa

SEQ ID NO: 233900 - DNA, 585 bp, Homo sapiens
tgccaatttgtattagcttttagtaatttttctaaatgagagcaattccttaagattttcgttcatatgcggatctgtactagagtcagctagtgttatccttacccggttctgttaaagcttttcccatctcacctgcaccttgtactaaaaccccaagccccacccaacttttttttttttcttctgtttcttttgatctcaagctctcaggagatttggtaatgtaaaccctaacaacttttgatagtaatcaaagcatgatacctccttatagaaataaacataaaccataccatgttacaggcatagattaagaagaataacaactcaaccctacctgactgacttcataggagggcttttcctacattatcccaactacctgcctttattactcccctgccctagtcaagcagggtagaacactctttttacagttyccattccacagatttgtcagctcagattgtttcactcttatttgcaacaatcccagtttcatctttacttttaagcccaacccagagcctttccactctataaatgcctcgatttaatgcaattattctcacctttgaattc

SEQ ID NO: 233901 - DNA, 585 bp, Homo sapiens
acatttattggtgtgtctctgttggctgtcttccatctatatcattctctctccaaacaacatcctcttttcatctcttttctttgcataattggaaataattctcactcttgatctcttcataaatgattctcttggcttcagtgttctggtctatcctacttctaattcttccactcctgctgcggaggcytacccctgcccccaccctggacctgtggggtcagtccctgtcttcagaacatattccggtatggctgccttgccctgggatctcatggagaaacaagcaattctgttttacaaaagcctgcttccaactttcaacttcgctccttcatactaaggggctcttccagggtctctcttccgtattttttgtacactgatcttagaaaggaaattgtgaactgaactttagcttttcctatcagtcctgttccatctatactgaatctaccagaaaagccttggattctgcagcctaggaaagaaagatcctcttcttcctttacctgtgggggtacagatttctcactatgtaagcccttttgatcatttacttgaagtctgagtaggaaagca

SEQ ID NO: 233902 - DNA, 585 bp, Homo sapiens
acatttattggtgtgtctctgttggctgtcttccatctatatcattctctctccaaacaacatcctcttttcatctcttttctttgcataattggaaataattctcactcttgatctcttcataaatgattctcttggcttcagtgttctggtctatcctacttctaattcttccactcctgctgcggaggccyacccctgcccccaccctggacctgtggggtcagtccctgtcttcagaacatattccggtatggctgccttgccctgggatctcatggagaaacaagcaattctgttttacaaaagcctgcttccaactttcaacttcgctccttcatactaaggggctcttccagggtctctcttccgtattttttgtacactgatcttagaaaggaaattgtgaactgaactttagcttttcctatcagtcctgttccatctatactgaatctaccagaaaagccttggattctgcagcctaggaaagaaagatcctcttcttcctttacctgtgggggtacagatttctcactatgtaagcccttttgatcatttacttgaagtctgagtaggaaagca

SEQ ID NO: 233903 - DNA, 573 bp, Homo sapiens
gtaatgacagcaaaagtttggaaggggagaaccattaatgggtggggaggaaggagaaacagcaggcataggctactctttccagaagcttgggttgggaaggaaaggataaaacaagaaataggtacgtaagtcttagaattgagaaaggttgctttcatgtttgcttttgttttttagaagaagaaataggtaggaatggttttaggttgagggcaacacactaaaagataagacaatttaaaagtgtaagagaaagatggatccaaatccaggaggaaatagaagaaggactccaagattcacatacaccagtaaggaatcaacaggcagtttcctgtttcctctaaaaatggaaagaccctggaaagggtcagtgcagaggttggacagtcacaactgacaggaccagtgagaagaaatcttagttcatgatggcctccatcttcytgatgaagcagaaaaaaaggcagcctgttagcactgaaaaggctgaagcttaggaagagggtgttaaatgttcataaaggtcaaaaagttgaaagaaggtgttggagggttttttaaggccgt

SEQ ID NO: 233904 - DNA, 664 bp, Homo sapiens
tttaatctgcctcataaagacttctgagtaaattgatgcaagacttctattatttccctatgggtgtctcactagtaaaataatacctttcaatacagaagatgatttctggtcaaattaatttactataatctcatattaataattatttccagaaaatatctggagcagatgtcactggagcatatttaagaaatgaatggcatttaaaggtttaatttaaactgatcacatttaataaacttttaatacatagatattctttgcttatctctactttgagaaggatgcttttgtctgtgatgaaaacttatctacattttaaaataaaccatttcctaaacctrttctagcacccagtgtttctattccccattggataaaacgtatgtaagcatatagaggtgacaaggttaaagtcgtaccttctctaacattcaataatcagtctcctgagacatgtgaaattcatcatattctaatcaacttgtatattatcagccctgaaacacaaatattatatcagctctgactgcctcaaaccacatcttagcagtcagagactggctctccaggctattccatctcatttgagaagaaaaccaagaaccaaaacaaattttggtcaagtaacttaggaaatatttaaaatggaatacatatt

SEQ ID NO: 233905 - DNA, 543 bp, Homo sapiens
cttctcctccattcttctagttgactaatgcataactttctttttccccaacctccaacacatcttttttcaatcttcaccttcacttaatgagtttcttcctattttactgacataaaataaaatcaaattagaagaaattttcataagcttgtgtcagctaactacccactccctgcctttaggaccttgcactctgccttcttttctgctagtgtgaatgagtggatgaatcacctgccttctagtgcaggccagccctcctttgtccactggatcctatcccactcctctccacaagggcaatgctttctttatttaccagtctttgcattatcatgtyttgcctgtccaccagttcagcataaagtgtactgttatgtctcccaactgtacaaaaaaaaaaaaattctttgatgtacttccttcttcaattgtcacatcatttctatctttccatttacagcaaaactcctttaaggagttgtttatgcagagtgtctccattcacatctgcttggccttgaaactattgtatgccct

SEQ ID NO: 233906 - DNA, 603 bp, Homo sapiens
catatagtctttctccttcaatctcctcagcattctccctctcacactttcacatatgaaaatgacattkaattatggtagattaataatgcatgtgataattcaaaattcagaaaagagatttaatacttcttggggcatttggtagccagtgtcactgtactaaatggtgtaacttaataacaaagtgactgattgcacagtttttatttcagacaacatgtgatcttaaacattttatttaatctttttgaggctcatgcttttatctttagaatggtaagatgatatttgtttattgggagaatttaacaccacacaagaaggatgtagcaattctaaataaatgttagctgtattatcattaccttattttaaaataagaattaagcatataggatgatataagttaaatagatttttaagggcaccccatagatggttgtctgactaggaaaggaatttttatccaggctaatcccattctcttctaaacgccacccctccacccctcccacacacacctcattcattagttgttcttcaaagtcatggctctcttgctaggttgcctagttgactttcatataaagggcagcaccg

SEQ ID NO: 233907 - DNA, 622 bp, Homo sapiens
tttctaaaaactaacaatttaatygatagcccctgagggaaataagactcgtataggccaagtaaggaaacagggtggattatcgctgttcagttggctcagtttcacttaattcctcttttctttcatactgccttctgctgtgtccagtattcctgagtctaaagcctggggtctcaattgggaaagaggtaacttcctatctgaaagatcacaggtgaaaatctgaggtcaaatttctcctgtaagagtatttatacaaatcttcttgttaacctcacacctcacacatcttgtcgctttcagtttttgaatctttgagtcttttctgcattgttgacagaagcacaatgatggagctgtccagctctacagtttccatatgtgagaggcttaatgatgtcaatactgttggaggtagagattagggaactgtcttgaatctgagtgatcagcctctgggaagcctgtcctcttatgcacagggcaagtctcggtgagaggggcagctgtgactcatcagcagttattactgtcatcagcgagatgggtggatacatgggccccggagaggggatctgggaggcaccacaacatccactagggagacagtcagagtcca

SEQ ID NO: 233908 - DNA, 622 bp, Homo sapiens
tttctaaaaactaacaatttaatcgatagcccctgagggaaataagactcgtataggccaagtaaggaaacagggtggattatcgctgttcagttggctcagtttcacttaattcctcttttctttcatactgccttctgctgtgtccagtattcctgagtctaaagcctggggtctcaattgggaaagaggtaacttcctatctgaaagatcacaggtgaaaatctgaggtcaaatttctcctgtaagagtatttatacaaatcttcttgttaacctcacacctcacacatcttgtcgctttcagtttttgaatctttgagtcttytctgcattgttgacagaagcacaatgatggagctgtccagctctacagtttccatatgtgagaggcttaatgatgtcaatactgttggaggtagagattagggaactgtcttgaatctgagtgatcagcctctgggaagcctgtcctcttatgcacagggcaagtctcggtgagaggggcagctgtgactcatcagcagttattactgtcatcagcgagatgggtggatacatgggccccggagaggggatctgggaggcaccacaacatccactagggagacagtcagagtcca

SEQ ID NO: 233909 - DNA, 622 bp, Homo sapiens
tttctaaaaactaacaatttaatcgatagcccctgagggaaataagactcgtataggccaagtaaggaaacagggtggattatcgctgttcagttggctcagtttcacttaattcctcttttctttcatactgccttctgctgtgtccagtattcctgagtctaaagcctggggtctcaattgggaaagaggtaacttcctatctgaaagatcacaggtgaaaatctgaggtcaaatttctcctgtaagagtatttatacaaatcttcttgttaacctcacacctcacacatcttgtcgctttcagtttttgaatctttgagtcttttctgcattgttgacagaagcacaatgatggagctgtccagctctacagtttccatatgtgagaggcttaatgatgtcaatactgttggaggtagagattagggaactgtcttgaatctgagtgatcagcctctgggaagcctgtcctcttatgcacagggcaagtctcggtgagaggggcagctgtgactcatcagcagttaytactgtcatcagcgagatgggtggatacatgggccccggagaggggatctgggaggcaccacaacatccactagggagacagtcagagtcca

SEQ ID NO: 233910 - DNA, 530 bp, Homo sapiens
tatcttttgaatgcactaactttaccatggaagattttactgctgaattatatgtcgtttttttaaaatatktgttttcccccaggacatatttttccctgtctacagataaaagtgtacatattttcaacaagtaatcttgaattacatctttgaaaattattctatgttttctgttctcttcagcaagtgcaccaattttgtttatgttggatttcccttttttccttctatattattttctctctactcattggtgtaacacttgattacttttcattcaattctaatacctttaagcctgtgtttcttgttcccaatgggcctgtgtgcatctattcttcttgtgacaacattcattctaacactgttaattcttagagtatttttacttttttctatatttttctccaaaacaccgccagctcatcttactgttttagaagcagcacagcataggggtggggccaagatggccaaataggaacagctccagtctacagctcccagtgtgagcgacgcagaagatg

SEQ ID NO: 233911 - DNA, 530 bp, Homo sapiens
tatcttttgaatgcactaactttaccatggaagattttactgctgaattatatgtcgtttttttaaaatatttgttttcccccaggacatatttttccctgtctacagataaaagtgtacatattttcaacaagtaatcttgaattacatctttgaaaattattctaygttttctgttctcttcagcaagtgcaccaattttgtttatgttggatttcccttttttccttctatattattttctctctactcattggtgtaacacttgattacttttcattcaattctaatacctttaagcctgtgtttcttgttcccaatgggcctgtgtgcatctattcttcttgtgacaacattcattctaacactgttaattcttagagtatttttacttttttctatatttttctccaaaacaccgccagctcatcttactgttttagaagcagcacagcataggggtggggccaagatggccaaataggaacagctccagtctacagctcccagtgtgagcgacgcagaagatg

SEQ ID NO: 233912 - DNA, 580 bp, Homo sapiens
ctggacccacactgggccagagggaagcccactgccctgaagggagagaccaaggcctggtagcattcaccacaagctgagccttgagtgaacattggtaccaagcctggggtggtaatggccatggatagacactctttctgactgaggaaaggagagggaagggtgggaagaactttgttttgcagcttgggtgccaactcaagtcacarcagaacagtgcactaagtagattattaagtttcctgactccacgcactggctcatggacagcatttctgggccagccttgagccagggagtagcttgctgccctgaagggaggaacacaatcctggctcagtttgcaacctgctgactgaagagcccctgggccttgaacaaaattggcagtagccaggcagtgtggttgctatgagccttgggtgagacctagtaccatgctggctttgggactgacccagagtagtcccagtagtagttgcaacaggggtgcttgtgttacccctcccccagttccaggcagatcagtgtgaaaagagagactacatttgtttggaggaaagtaagggaagagaac

SEQ ID NO: 233913 - DNA, 580 bp, Homo sapiens
ctggacccacactgggccagagggaagcccactgccctgaagggagagaccaaggcctggtagcattcaccacaagctgagccttgagtgaacattggtaccaagcctggggtggtaatggccatggatagacactctttctgactgaggaaaggagagggaagggtgggaagaactttgttttgcagcttgggtgccaactcaagtcacagcagaacagtgcactaaktagattattaagtttcctgactccacgcactggctcatggacagcatttctgggccagccttgagccagggagtagcttgctgccctgaagggaggaacacaatcctggctcagtttgcaacctgctgactgaagagcccctgggccttgaacaaaattggcagtagccaggcagtgtggttgctatgagccttgggtgagacctagtaccatgctggctttgggactgacccagagtagtcccagtagtagttgcaacaggggtgcttgtgttacccctcccccagttccaggcagatcagtgtgaaaagagagactacatttgtttggaggaaagtaagggaagagaac

SEQ ID NO: 233914 - DNA, 580 bp, Homo sapiens
ctggacccacactgggccagagggaagcccactgccctgaagggagagaccaaggcctggtagcattcaccacaagctgagccttgagtgaacattggtaccaagcctggggtggtaatggccatggatagacactctttctgactgaggaaaggagagggaagggtgggaagaactttgttttgcagcttgggtgccaactcaagtcacagcagaacagtgcactaagtagattattaagtttcctgactccacgcactggctcatggacagcatttctgggccagccttgagccagggagtagcttgctgccctgaagggaggaacacaatcctggctcagtttgcaacctgctgactgaagagcccctgggccttgaacaaaattggcagtagccaggcagtgtggttgctatgagccttgggtgagacctagtaccatgctggctttgggactgacccagagtagtcccagtagtagttgcwacaggggtgcttgtgttacccctcccccagttccaggcagatcagtgtgaaaagagagactacatttgtttggaggaaagtaagggaagagaac

SEQ ID NO: 233915 - DNA, 562 bp, Homo sapiens
ttctccccctagctgttgtcaacatcacatctatttattgtctgaatttcaatttctttgttatccctcatatatgaaagtttaaccttgaacctgaaatgaccactaaatatactgccttaaaaactggaatacacatgggtgtggtatgtgtgtaccctcacttattccaacttagatgccttccattccttctatccacctttgctcctgaggtcccaggctaggggaatttgggttgtactaataagcactttaatattggccaccagagggctcccatattccttccrtctaagtatgaaaatacaaagtgcaactaacataaagttcaccatcaaatagaaaatattataggaatttatgatatagttctctctagagtgaaagtgttccaaacccattgtgttcttatataaaatacttacaatgaaccaatttgggatactcaacactttcattaaaataaagttatgaaattatgtttggttttgtctttgttttgggaggttatgataagacttataatacttaattggtgattccacattttaaatattaa

SEQ ID NO: 233916 - DNA, 546 bp, Homo sapiens
ccaacctcaccttgcttctgtctgcccctagctatattttatatttrcatttcaggcaagagaccaaaaaactgaattcccaacacagagagacagtggcgagcgagaggacctgcatcacccagctcttaaatcctacatcagtacctatgcctaaagccaccaatgatatccagagaccttcctatctgaagctattgatgtttatttttttcaagactttaagacctctcaaaaaataaaatataaaatttaacttagaatactggtgcttaattgtgactgcacgttacgctcatctaggggtgctctttaattcctaatactcaggttgcatcactgaccaattaatcagaatgactgggattcaaccagacctcagtagttttgtaagctctctctcatgactgtgactacactatgggttgagaagcactcaaagtttgagaaccactgtcttgtaaaccaggaccactaaatgatatcataatcctacatcctgacatatgtaaaggataaggatcttagactgcaaatccagatgtt

SEQ ID NO: 233917 - DNA, 569 bp, Homo sapiens
gttcataagagaaggccaggcctggatgacaaacacagaaggcttttcatttttcccatgacttccttttttggcaaaccatcctctttgtgagagtccgcctccaagttggattagaagatgtcctggagcgtgcagctcaccacccactatattgtaagctgaaagtgtttttgctaactgaatgtcaaattaatgcggttttgctatctacatggcatgttttgacaaaaatactgtgtacctttattgacagtgaaccttctgctcyggagtaatgctaatccaggactgctggtttttcatgttaaaacccataaacttgttattagagcagatgacttccaaaacgtcaaaactaaagatgttgcttattcactagaggagtttatgttgttcacatttaagatgatttatttttattcacttgacaacacttcgaacttcaaatggatgcacacaagccaattcttggaggggttgtgactgcagaaaaaaaattaaatcttgtgctcatgtgttgctccatcatagtaatcctcagttttgtcccagaagtagcatgtgtc

SEQ ID NO: 233918 - DNA, 569 bp, Homo sapiens
gttcataagagaaggccaggcctggatgacaaacacagaaggcttttcatttttcccatgacttccttttttggcaaaccatcctctttgtgagagtccgcctccaagttggattagaagatgtcctggagcgtgcagctcaccacccactatattgtaagctgaaagtgtttttgctaactgaatgtcaaattaatgcggttttgctatctacatggcatgttttgacaaaaatactgtgtacctttattgacagtgaaccttctgctccggagtaatgctaatccargactgctggtttttcatgttaaaacccataaacttgttattagagcagatgacttccaaaacgtcaaaactaaagatgttgcttattcactagaggagtttatgttgttcacatttaagatgatttatttttattcacttgacaacacttcgaacttcaaatggatgcacacaagccaattcttggaggggttgtgactgcagaaaaaaaattaaatcttgtgctcatgtgttgctccatcatagtaatcctcagttttgtcccagaagtagcatgtgtc

SEQ ID NO: 233919 - DNA, 570 bp, Homo sapiens
atgaaattatatattaacaaaaagttaaatacaacaaaaagatatgattattataaacatttatacatctaataacagacatcaaaatatttgaagcaaaaattaacagaattgaagggagaaataagcagttctacaacgattattggaaactttgatatccccttctcaataagagatagaaaaagcttggcagaagataagtaaggaaatagaggacttaaataacacaataaacaaaatatatctaacagacatgtatagaacactttacccagtaaaaatagaatacatttttctcaagtgctcatgaaacattctccatgacaaaccataggttagatcacaaatcctcagtagattttagaagataggtatcacgcaaagtatattctttgaccacaccaagatgatggtaaaaatcartcgcagaaggaaaactggaaaattaacaaatctgtggaaattaaagcacatattcttaaataactaatgaatcaaagaggaaatcacaaggaaatttagaaaacacttagagataaatgaaaatgaaaacacaacataacaaag

SEQ ID NO: 233920 - DNA, 555 bp, Homo sapiens
atgtttgaaagttaccctgtgggctcccaaaccctctccatctcccagtaaaaacaagagtccatattctagttgtgagactgatatttggctctgcctctgtcaatgtcatatggctgcaattcaagggtctaggygtagaaaaacagtatttaagcaccataagaaaattcttaaagttcactcaccttccttctcctcttcctccttctctgccttccttagtcaattcatattttttcaaaaaacattgtcatttaaatgtcatatggtagtctttggttctttagggccacacacacatattgtggctttctctctctcatactctggttgtaattagggatggtaatttgaatttatttgaccgatgaatttgaacacaagtgatgtatgtattacttttgggctggagtatcagctgaagttagaccttccagaatgctcttttccctctgccacagcaacatcaagtttctttttcagtctgtgtagtgaacacatacaatgaggacacacaggggcatctccagatgatgacattgcatatgcaac

SEQ ID NO: 233921 - DNA, 531 bp, Homo sapiens
cctgttctcaaataaacaagtttcttgaatgttacatgtggagaagtttgcacacttggaagaaaaagaaaccactatacccgtggyttgcgctataccaaattagaatgaaaaggaaaagcatatctgtcttgaaattacatttcagctttcttcgaatgggatagggtcagggaggcaaatggtttggagaaataaagattcaattgtttaatgtgtctttcatacatatattttgtcaaaaagagattcctagaaaccgggaaaagtactagaagccaaagtggcttgtctcaatttatagaattaatcaaataatgttagtctttatccattctcaaaggacagcttcaagaatcaatctaaactttaaatatgctgaagtgggtttgtagttgtagcccaaacagaaagactgggcgatatagttaggatatttgtgcccacccaaatctcatgttgaaatgtaatccccagtgttggaggtggggcctggtgggaggggtttggatcatagaggcagacccctca

SEQ ID NO: 233922 - DNA, 561 bp, Homo sapiens
tagtataacactcaatttctcttttggttgctatgtgcaaggtatatatataattttccatccttttactttcagctatttgtgtctttgaaactaaagtgagtctctttagattttarattgtgactttgaatctaaaaagtatgatagcattaggtttttgagtttcattctatcagtctctaccttttgattgaaatgctttaatccaattacttttaatataactactgctaaggtaagacatttgacattttactgtttgttttctatacatcttacttttttgtttctctatttctccattactcttttcttttatgttaaacatatattttctagtacaccatctaacatcttaacttaaaataatctacttcatgttaacaccagcttaatttcagtgtactacaaaaaactttgtttcaatgtagctccattaaccacttcctttgtgcttttattgtcatacagattacatctttatactttatatgcctatcaacacagttttattattattgctttatctgtgtatcttttaaacttgataataaaagg

SEQ ID NO: 233923 - DNA, 328 bp, Homo sapiens
agtgaaaatagttatgacaagacccacgtgctagtgattcatccccggggcctggagtgcatgtgctccaagtttggtagaaatcctgggaacctgagtttgattaacaattctatagtactacagtcccactgtgtgacctggagcaagccattgccctgccctgggctgaagtgttctctctatatgaagggttagtttggagcacctctttagttcatccagctctgaagttttctggctccacatagggcaaartgatctctgagatcctagaaggccagaattacattattaatccaaggtcaaaagtagccaagttggggat

SEQ ID NO: 233924 - DNA, 460 bp, Homo sapiens
cctgcacttcttttttgagattgaggcttacttaaacttacattgtggtttaagtctgtcttccctccaggccatgagctccaagacagcaggaagaggtctcctctctttgccactatatttttagtgcctagctcagtgcttggcacagggaaaatactcaagacctatgtatgaagtgagcraataaagatcgacccatgacaactactgtatattcattagctggactgacttgtaattctattggctccatttcacagacagggaaagaaagtcagggtgtggcatcgcttgctgagtgcctcacaagaacctagttgggattcagacccagttctgctggcttcaaagcagtgctctttccatgaagacaagatgcacagagcaaggagtctatctgcatgtgatttgtggaataatttgcatatgcctgcatgattttctctctagagaattc

SEQ ID NO: 233925 - DNA, 543 bp, Homo sapiens
aattaataaataaaaatacttgtgtagaagatggtttataaagaaatatcgactcatattatgttttttaatctttatcatgcctctgtgaggtggacagtattaactccattttatgggtgaggaactgaggctcacagaaggaagggacatgcccaaggtcattcagctagcagtggtagagttaagtcccagcacccagccagtgcccctttcactaccctgtttcattctggatccagtaaaaacaatataagattccacttctgctgcatttccatttacaatttacacaagagaatttcattttatcttattgtgatggaaactgagccgctgtcttagtatttatattgctttttcacttaaaaaaaaatcamcaagcccttttaaaagacactgtctaacactgaccccatcttccagcagtccagaaatgataaatggcactaaggaggcccttggtgaaggctaactttatggatgtctcccctgaccccgtatcaagtcaattgcattcagcatttctgctgaccacaggga

SEQ ID NO: 233926 - DNA, 519 bp, Homo sapiens
cagtgcatgcagcatctgttatgccagccagggttgctgagaacagagcagaggctcaagatctgaggtttcagacaagaaggctgaggacaaaggactttcttttctgttaaattcagttcatattttcttacactgaccacatgccaaactttgggctggtctctgagaartcagacactgtccctgccatccaggagctcaactgctctcctgcaagaatactttattcaaactggccagtggaggagaaagatcaagacttgtggttataaatttgaattctagaatcagacagaagaagcattaaatccaagtcctgccacaggtacgtatgtgactttgagctctaggatctttcattttctcatctgcaaaatcaggataataatagtatcaaactcataaggatcttgtaagaattaaatgagacaatgcttcaggtctatgtatatgacttgatgcatagtaagtgttcaaaaggatacttacagacactgagaggtgacttggtccaaa

SEQ ID NO: 233927 - DNA, 519 bp, Homo sapiens
cagtgcatgcagcatctgttatgccagccagggttgctgagaacagagcagaggctcaagatctgaggtttcagacaagaaggctgaggacaaaggactttcttttctgttaaattcagttcatattttcttacactgaccacatgccaaactttgggctggtctctgagaagtcagacactgtccctgccatccaggagctcaactgctctcctgcaagaatactttattcaaactggccagtggaggagaaagatcaagacttgtggttataaatttgaattctagaatcagacagaagaagcattaaatccaagtcctgccacaggtacgtatgtgactttgagctctaggatctttcattttctcatctgcaaaatcaggayaataatagtatcaaactcataaggatcttgtaagaattaaatgagacaatgcttcaggtctatgtatatgacttgatgcatagtaagtgttcaaaaggatacttacagacactgagaggtgacttggtccaaa

SEQ ID NO: 233928 - DNA, 480 bp, Homo sapiens
aacacaagcttcttttatcctcagataccagctcttcactgcttgaacagagaggatccgtagggcccccatctttgtggcctgtaaaccaatctgatacagaacacaaacgatcatagccaatatgtactggctgtgtctactgtgccagtcaggagctttcaaaggtctttaatgtgttaatttatgtgaacttttccgtagccacacaaaaagtatttaatcagaaaaaaattacataaaattgtaatctaaaaacataaaagaacaatcctgaaaagagtgtgttgagcacttacratgcagcaggttctttgagaaagcctatcaagcatagagagtgaaccaaaacacacccagggcaggttccagaggctaccaggaatgctccttgaggaggtgcagtggagaaaggacagcctgcaggactgaggaccagaagaaaggccagaccccagtctccgtctctattccaagatg

SEQ ID NO: 233929 - DNA, 594 bp, Homo sapiens
ggtgctgcagtgctcctctcagatgccaggtcacacttccaggctacagctgaacttgcatcttcacagacaccattaaaactcaacctaccggccgggcacgatggcttacacctgcaatcccaggactttgggaggctgaggcagstggattgcttgaggtcaggagtttgagaccaactcagccaacatggtgaaaccccatctctacaaaaaatacaataaagattagctgggtgtggtggtgcacgcctatagtcctagctactcaggggctgaggcaggagaattgcttgaacctgggaggcagaggttgcagtgagccgagattgtgccactgcactccagcctgggtgacagagtaagactcagtctcaaaacaaaacgaaacaaacaactcaacctaccatgcgtcatatttctgcccacagtagaagcccttagagctatccactttctcccatggggttatcctaactgatgttttcctttcacccagccctttttcactcctttacctcccaaacacttccagtgtcttctctcaagtgtcctttccattgcaacactactcccatgctttctgagtctcag

SEQ ID NO: 233930 - DNA, 594 bp, Homo sapiens
ggtgctgcagtgctcctctcagatgccaggtcacacttccaggctacagctgaacttgcatcttcacagacaccattaaaactcaacctaccggccgggcacgatggcttacacctgcaatcccaggactttgggaggctgaggcaggtggattgcttgaggtcaggagtttgagaccaactcagccaacatggtgaaaccccatctctacaaaaaatacaataaagattagctgggtgtggtggtgcacgcctatagtcctagctactcaggggctgaggcaggagaattgcttgaacctgggaggcagaggttgcagtgagccgagattgtgccactgcactccagcctgggtgacagagtaagactcartctcaaaacaaaacgaaacaaacaactcaacctaccatgcgtcatatttctgcccacagtagaagcccttagagctatccactttctcccatggggttatcctaactgatgttttcctttcacccagccctttttcactcctttacctcccaaacacttccagtgtcttctctcaagtgtcctttccattgcaacactactcccatgctttctgagtctcag

SEQ ID NO: 233931 - DNA, 371 bp, Homo sapiens
tttttgcttcacctgacattttagtgaaaggacacaggcatctaatttttatgtgtctacaggtatattttctggttctgccaaccccatttactgaataatctcttatcctccaatgaaataaactgccagctttataatatgctttgtcccttgtatctagatttagttctgtacyaaatacaactgaccttttgatttggctatgttcatgtaggttctccacctcccactgatttgtgagcttcctaagcacactgtcagggtttgagattttactccctttcccttagaaagtaatgttagcccgtcaccgttaggtggatgctggcagaggatgtaagcctttccggtcagagactcatggcaca

SEQ ID NO: 233932 - DNA, 371 bp, Homo sapiens
tttttgcttcacctgacattttagtgaaaggacacaggcatctaatttttatgtgtctacaggtatattttctggttctgccaaccccatttactgaataatctcttatcctccaatgaaataaactgccagctttataatatgctttgtcccttgtatctagatttagttctgtaccaaatacaactgaccttttgatttggctatgttcatgtaggttctccacctcccactgatttgtgagcttcctaagcacactgtcagggtttgagattttaytccctttcccttagaaagtaatgttagcccgtcaccgttaggtggatgctggcagaggatgtaagcctttccggtcagagactcatggcaca

SEQ ID NO: 233933 - DNA, 390 bp, Homo sapiens
tctgtgtattttaacatttcttcacagtagtccagcatattctgcattttattcattccctactgagggctgtttctgttattttccactttttttcctgctgtaaacactgccrtagtgatcctctaacgtgcctcttctcttgaacatgtaggagtattccctaaggtgtgcacttagaagtgaaatcgtgaaactgatgggtatgaacatttctaattttcataaatattgcccaactgctcttcagagttcctgtggcaattcaggttcagaggctggagctttaaatgtaatattttattaattatgtccagctttcaaatggtcagaatatatggcttatgtgatagagtcatgtggacataacgtatatattaatagttatat

SEQ ID NO: 233934 - DNA, 390 bp, Homo sapiens
tctgtgtattttaacatttcttcacagtagtccagcatattctgcattttattcattccctactgagggctgtttctgttattttccactttttttcctgctgtaaacactgccatagtgatcctctaacgtgcctcttctcttgaacatgtaggagtattccctaaggtgtgcacttagaagtgaaatcgtgaaactgatgggtatgaacatttctaattttmataaatattgcccaactgctcttcagagttcctgtggcaattcaggttcagaggctggagctttaaatgtaatattttattaattatgtccagctttcaaatggtcagaatatatggcttatgtgatagagtcatgtggacataacgtatatattaatagttatat

SEQ ID NO: 233935 - DNA, 597 bp, Homo sapiens
cccggtgtcatgaaggacagcctgcctattacttctgcgaggggaaagaaatactgccactccaccacatctaccccattaattccatgtaaagcttagctcatactttctgctccatgatctgcagatctccgtattygtttatttctactctgtatcattccaactgcatttgggttgtcctctactacccccccaccccccccccccacacacacacaaacacttaacataaaaactaaggatatgcaactttcagctaagcttgacaatgaacggtcacccttatgcgatattgcttgctaatatcctttcgctactactaccttgtttgttgctaatatttgagctggacttaaagctaaactcatagggatcctgcgctgtgtgtttgtgacctgctttccttagagccactcaaagtctgtggcctcacaggtccggtctggcattgcagtgtgaaattctccacgtgcccttgccatgcctaaacacagcccctggagaatgttccagccgacattccctgagacagcctctcacccagcccttcatttagcgagaaggggaggtcactcggggtagaaatatagaccc

SEQ ID NO: 233936 - DNA, 494 bp, Homo sapiens
ctgtaatcccagctactcgggaggctgaagcaggagaatcacttgaacccaggaggcggagattgcagtgagccgagatcgcaccactgcactccagccagggcgatagagtaagactgtctttaaaaaaacaaaaacaaaaacaaacaaacaaaaaacaggatagaagagacagaaactcagagaaagcccaaaaatcctcgaatagttcaaaggatcagcatgatgaggtcctcaaagaagttacctccaagtttgaggaatggagatggctcaccctctaggcaggtaaatcagccgccaggtagacaaatcttgagagtagagtggcagaatttcttttttcatttagtaaaataataacctacatgtctttgtatataattttaactaatcacttttttcaacaataaaatgcttacctttctatttaattaccttaacactgtggagtccattccmcttgctaatgtttttatagagcacagagaatt

SEQ ID NO: 233937 - DNA, 588 bp, Homo sapiens
cacctcattctataaagtagaatgagtgttctgatcagctgagcagaggcggttggttttattggcaaataggggctgaagaaagcagaaaccgaacaaaaagtggactcatcgtttcaaagttacttttagggttaaagcagaagaaacttccttgtttcactgactcagacttaagggaatttcctattttttgggaaactggcccatttcaaagttcagtttgattgtgtggtacttagcacaaacgactccattctggtttggtctggtctgctggggcctagtgcgtgaagctagtccaaaacagtggcttcccaaaaactttcacacaacaaagcaatgaaatgctaatacaatcgtcaaaagtaataaggaagaactctatatrcatctgtggtgtgatctccagaatacattacaaagtggaaaaaaaatggataggaatttatacagtatgcttttacccaaaaagagaaagatggtggtaatttcaatatatatacatattttcttaaattttcaaaataatgggaatgaaaacaattgaggtttttaaagatgctacctatggtggaggaaataaat

SEQ ID NO: 233938 - DNA, 606 bp, Homo sapiens
cctcattctataaagtagaatgagtgttctgatcagctgagcagaggcggttggttttattggcaaataggggctgaagaaagcagaaaccgaacaaaaagtggactcatcgtttcaaagttacttttagggttaaagcagaagaaacttccttgtttcactgactcagacttaagggaatttcctattttttgggaaactggcccatttcaaagttcagtttgattgtgtggtacttagcacaaacgactccattctggtttggtctggtctgctggggcctagtgcgtgaagctagtccaaaacagtggcttcccaaaaactttcacacaacaaagcaatgaaatgctaatacaatcgtcaaaagtaataaggaagaactctatatgcatctgtggtgtgatctccagaatacattacaaagtggaaaaaaaatggataggaatttrtacagtatgcttttacccaaaaagagaaagatggtggtaatttcaatatatatacatattttcttaaattttcaaaataatgggaatgaaaacaattgaggtttttaaagatgctacctatggtggaggaaataaataggatagaggagacagggat

SEQ ID NO: 233939 - DNA, 560 bp, Homo sapiens
aaatgaatattgttttagactactaaatgtttaagacgtcagacaagtgattctgctctactaatatcagaaggataagaagacagtggtagtcaagcccattgtgctccccagatggaaactaatattcaactaaaggtgcagctcaaaactccgtctctggtacactgtgtgtgaccgtctgccctataagtagcaaactccaccatgaattgctgatgccattagtttctgtgtatctccaaaacactgaccagaaaattccacagtagggatttgtaagagaatgccctcgcttgtgcatcttcacagatttttctgatcaacatgagcaagtttgcctccttgtccccttgaaaataataatgtcttgtgtggttgggtgaagctatatatatatatattttttgktttgttttgttttgttttgtttttgctaaaaaaagaatcttacagggagataaagggatttctggaggaattaatttttttttcaattatgtgggacaaatggtgcttaaaatgaagataggacaaaggctcttaaatttttgactgaa

SEQ ID NO: 233940 - DNA, 560 bp, Homo sapiens
aaatgaatattgttttagactactaaatgtttaagacgtcagacaagtgattctgctctactaatatcagaaggataagaagacagtggtagtcaagcccattgtgctccccagatggaaactaatattcaactaaaggtgcagctcaaaactccgtctctggtacactgtgtgtgaccgtctgccctataagtagcaaactccaccatgaattgctgatgccattagtttctgtgtatctccaaaacactgaccagaaaattccacagtagggatttgtaagagaatgccctcgcttgtgcatcttcacagatttttctgatcaacatgagcaagtttgcctccttgtccccttgaaaataataatgtcttgtgtggttgggtgaagctatatatatatatattttttgttttgttttgttttgttttgkttttgctaaaaaaagaatcttacagggagataaagggatttctggaggaattaatttttttttcaattatgtgggacaaatggtgcttaaaatgaagataggacaaaggctcttaaatttttgactgaa

SEQ ID NO: 233941 - DNA, 582 bp, Homo sapiens
aaatttttcccttggtaatacctgctaacattatgagagaccaatattcacaacctaccttggaggacattaaacttagaagttttatgagaatctgtatgaaatacaataaacctgtgtttcccaatcatttcctgtcagtgcacacaaaggaagtaattgttaatatttttgtgcacaaagagataaatggatgaggctccttgtagccaaaaagggtatagccaaaagggtggagtgtgtgaggggatcactatctcagccctcytgttatcctctgatacatatataggtcagacacatagatgaaaaagctgtgaccaaaacacactgacaagtgacctccatgtgtttcccttcctcggagaccaatttcaggtgattaagttaaataaaggcaatgggggatttgcaggtttttctggcttttttttttttttaaacaaagtctcgctctgttgcccaggctggagtgcagtggcatgatctcagctcactgcaacctctgcctcccgggttcaagcaattctcctgcctcagcctcctgagtagctgggataacaggcgcctgctaccacaccc

SEQ ID NO: 233942 - DNA, 657 bp, Homo sapiens
tactggacccaatgtaagtcagacatgagctaaaactccattaattacctgacctccataagcccgtactttacctggaggaccacagtgatgttttgggtcccctggaatcaatgtcagctcagagcctgtatccagtagtccctgaaatgtctaatcatttccctttcctaatgcacagttacctgggtaaaaggccagaggtctcctcagagaaagatgggagaaagattaatagcataaattgtcggtagtgtagygggatccttccttcccaaatgccttcattcaagagattctgggtctgtaaactgactgaactctgttgattgaggggccatgattgtctgtttttataactcaaattactcttttgtccattcaacctggaagttttctgcttatataaattaagtaggaatgcagtaggctgcctatcaatttcacttctacgaacactgtgttaaattagtgaatgccagagctctacatgagtctgactattctgattcctgctttgcctttgctgtccattaaggtagctacaccaaccttaccgttgacagttgagtgccaccacttgacccctgtcacatcaggatccaattattcccattgtatttaaattttgtagttgagtgactgtgattcctacta

SEQ ID NO: 233943 - DNA, 534 bp, Homo sapiens
gcctcattagaacaaaagacactcctatcacccaggaaatcccaagggacttaggagctctgtgtcagaaactgggtgcagagatcaaatatgtatttcttattatttgccagccgcttcattcaccacctacataacataaaacaacctggttggctgccacttcagccaaartcaaatcacacagaggtgaatggaaatacatttttttctgtggtttatcctcttactaaatgtgttctcaatccagcatcttactaagattcttagattttgaattcatctgcatagcttaggctaagctgcattaaaaaaaatcacaaagactcagtgacttaacaaaaaaatgctaatttcttgataaaactgcatgtccaatttggattgctgggaaacctctcctcattatagttactccagaaaaaatgctgatagaggctctatctttagcagagagaagggaacttagtgagcacattttgttcactcaagctaaccctatctttaagtttcaattcaatgttaattgtattc

SEQ ID NO: 233944 - DNA, 638 bp, Homo sapiens
ttggcagcaaacgggcatgaggaggttttgggggtgatggaaatgttctaaaactggattgtggtgatgctagtataactctatcaatatactaaaaagtattgaattacacacttacaataaatgtctgcattacttagagtgggtgctctgtgaacaatgcattcaagtaggtactgtattagtcagggttctctagaggggagaggactaataggattgatgcctatgtgaaggggagcttattatggagtattacctcacaggatcacaaggtgaaatcccacaaaaggctgtctgtaagctgaagagcaagaaagccagtggtggatcagtccaagtcccaaaacttcaaaagtagggaagctgacagtgcagacttcagtctgtggccaaaggtccgagagcctctggcaaaccactggtgtaagtccaagagtacaaaaactgaagaacttggagtctgatgttcaagaayaggaagcatccagcatgggagaaagatgaaggccggaagactcaacaagtgctcttccattttctcctgactgctttattctagccatactggcagctgattagatggtgcccacccagattgagggtaactctgcctctcccagtccactgactcaaat

SEQ ID NO: 233945 - DNA, 603 bp, Homo sapiens
aattgtgcacaagaagttctatatggtttttattagagctaccacaggtagagtccacaagaaataaactacagaaattaaaattactaaatagtacattttgtaaatacactatattcgaaatatattcatgtcaatcaaatttcaataccattgggaaaaaaacacaacaaaatgttatatatttgattatattctgtattatyataaaaaacaattataccagttataagaaatgtattgatacctttttagataagcacgataaatatcacccactttaaaatactgttatagagatgaaataagaaaaaaaaataagtctaggactacgcagtcataaattttgaacacaaatgattacattttactcattctttatgtcactaataaattaatttcttattatgcaaagttgacaattcaaaatagaattattaaaacatatttgatgtgattaacagcatatgtttggtacttcctttatccactgaactattggaattcctggaagagtttgtctgaattatcttcaaactactttaagactttcactgacaacgaaaaattgatgataataacctctgtagctgtccaaacatc

SEQ ID NO: 233946 - DNA, 603 bp, Homo sapiens
aattgtgcacaagaagttctatatggtttttattagagctaccacaggtagagtccacaagaaataaactacagaaattaaaattactaaatagtacattttgtaaatacactatattcgaaatatattcatgtcaatcaaatttcaataccattgggaaaaaaacacaacaaaatgttatatatttgattatattctgtattatcataaaaaacaattataccagttataagaaatgtattgatacctttttagataagcacgataaatatcacccactttaaaatactgttatagagatgaaataagaaaaaaaaataagtctaggactacgcagtcataaattttgaacacaaatgattacattttactcattctttatgtcactaataaattaatttcttattatgcaaagttgacaattcaaaatagaattattaaaacatatttgatgtrattaacagcatatgtttggtacttcctttatccactgaactattggaattcctggaagagtttgtctgaattatcttcaaactactttaagactttcactgacaacgaaaaattgatgataataacctctgtagctgtccaaacatc

SEQ ID NO: 233947 - DNA, 597 bp, Homo sapiens
tgaggctttaggaaagttgatagaaacaagtaacaattcatacttaatattgcaagcatattgttatataatcagatccatcatacagcaggcctgaaacactccagtgcatgctaatgatcaagttctcacaaacattgcagctacatattttatgaggtgacacagcttcatactggacagagtttacataattgacttaactccataaacaacgagactgcatctaaacagtgttcttgacacagcttagcccattacccttgattccactaagattcacaggcctgctgctgaagagcctaagtgccctgaggggtctatagggcttgtggggaacttttcaggtgtgaactgccctagaaacgctctctctgactaccaatttccccttagaaactactccctggtattttaagcaaggtgtttattttatacttaacaggacaaatctgagtacagtcagctttttttaaaaacctcaaatgtagcttaaactcaatacagcagttccttgcacaacatcattttgttcaacatggtttctttataacatcgatacrgaaaaaaatcaattcccagatgaggtgtattagt

SEQ ID NO: 233948 - DNA, 597 bp, Homo sapiens
tgaggctttaggaaagttgatagaaacaagtaacaattcatacttaatattgcaagcatattgttatataatcagatccatcatacagcaggcctgaaacactccagtgcatgctaatgatcaagttctcacaaacattgcagctacatattttatgaggtgacacagcttcatactggacagagtttacataattgacttaactccataaacaacgagactgcatctaaacagtgttcttgacacagcttagcccattacccttgattccactaagattcacaggcctgctgctgaagagcctaagtgccctgaggggtctatagggcttgtggggaacttttcaggtgtgaactgccctagaaacgctctctctgactaccaatttccccttagaaactactccctggtattttaagcaaggtgtttattttatacttaacaggacaaatctgagtacagtcagctttttttaaaaacctcaaatgtagcttaaactcaatacagcagttccttgcacaacatcattttgttcaacatggtttctttataacatcgatacagaaaaaaatcawttcccagatgaggtgtattagt

SEQ ID NO: 233949 - DNA, 600 bp, Homo sapiens
agccttgatgtcatttgttcctgaccctcatacttgaactgaaacattggctcttcttgggccacaagcctgccaggtccgagctggaagttacaccaccagttctcgtggttcacaaaactttgaactcaaactggaattacacattgactctcccaggtctccagtgtgtaccaactgagggtcttggaatttcttagcctccataattgtataagccaattgcgtgtgtgtgtgtgtgtgtgtgtgtgtgtgtgygcccccatttggttctgtttctctgaggaactctaatacatatccctcacaacctccagaaagaaccaatcctgcctaccaacacaccttgaacttagcccagtgaggctcatttcagacttctgaccttcataactataagagaataaatttgtgttaagtcactaaatttgtgctaatttgttacagcaatagttggaaactagtaaccatatgtaattaggtcaaattctgaattgtattgttcagttattcttcctatatgcctactatttcagtctgaggtcatttttcttctatcagaagtattccctttaataactgtgttagatcagacctgat

SEQ ID NO: 233950 - DNA, 600 bp, Homo sapiens
agccttgatgtcatttgttcctgaccctcatacttgaactgaaacattggctcttcttgggccacaagcctgccaggtccgagctggaagttacaccaccagttctcgtggttcacaaaactttgaactcaaactggaattacacattgactctcccaggtctccagtgtgtaccaactgagggtcttggaatttcttagcctccataattgtataagccaattgcgtgtgtgtgtgtgtgtgtgtgtgtgtgtgtgcgcccccatttggttctgtttctctgaggaactctaatacatatccctcacaacctccagaaagaaccaatcctgcctaccaacacaccttgaacttagcccagtgaggctcatttcagacttctgaccttcataaytataagagaataaatttgtgttaagtcactaaatttgtgctaatttgttacagcaatagttggaaactagtaaccatatgtaattaggtcaaattctgaattgtattgttcagttattcttcctatatgcctactatttcagtctgaggtcatttttcttctatcagaagtattccctttaataactgtgttagatcagacctgat

SEQ ID NO: 233951 - DNA, 600 bp, Homo sapiens
agccttgatgtcatttgttcctgaccctcatacttgaactgaaacattggctcttcttgggccacaagcctgccaggtccgagctggaagttacaccaccagttctcgtggttcacaaaactttgaactcaaactggaattacacattgactctcccaggtctccagtgtgtaccaactgagggtcttggaatttcttagcctccataattgtataagccaattgcgtgtgtgtgtgtgtgtgtgtgtgtgtgtgtgcgcccccatttggttctgtttctctgaggaactctaatacatatccctcacaacctccagaaagaaccaatcctgcctaccaacacaccttgaacttagcccagtgaggctcatttcagacttctgaccttcataactwtaagagaataaatttgtgttaagtcactaaatttgtgctaatttgttacagcaatagttggaaactagtaaccatatgtaattaggtcaaattctgaattgtattgttcagttattcttcctatatgcctactatttcagtctgaggtcatttttcttctatcagaagtattccctttaataactgtgttagatcagacctgat

SEQ ID NO: 233952 - DNA, 413 bp, Homo sapiens
atacaaatttatttaatattagttttatatgaaatggaagccttcagaaatgaagattcaaagaaamaagtaaacttgtgtattttcatgcttaggtttgatggagagatggatagttatggagaagtatgattggacaaaatgggtatgacctaatggtaataaaccaaggagaaatcagcaaggtctgtttatttagcttcttcttggtctgtaggtatagagcaggacacttctggaatgaaggtcttatgacctactttctggctaggtaggccagagaattctttatggcttgcttcagagaagaaaggtgagagaaggtgagagagtggccttcctgcttcagttttctcaatttccttcagtttaaaatatttagtataccaagttgctatattttggggtggcat

SEQ ID NO: 233953 - DNA, 493 bp, Homo sapiens
atgcttaaacttctgaaaatcaaagctggtgtcaagctgtgtatcctgttagacctgtccctgaaacactgctagcacacacggactggaggacaattgaaaattgggatacttatatttgccaagctattagcaaatacttatatttgcaaatacttatatattggcaaatacttatatttgccaagctattagataatatttcttttctttttctttttctttttcttttttttttttttttgagacagagtctcactctattctgttgcccatgctggagtgcagaggcrtgatctcagctcactgcaacctccaccccccgggttgaagtgattctctcttgcctcagcctcccaagtggctgggattaaaggcgcctcccactgcacccagctgatttttgtatttttagtagagatagagtttcaccatcttggccaggctggtcttgaactcctgaccttgtgatctacccacctcggcctcccaa

SEQ ID NO: 233954 - DNA, 493 bp, Homo sapiens
atgcttaaacttctgaaaatcaaagctggtgtcaagctgtgtatcctgttagacctgtccctgaaacactgctagcacacacggactggaggacaattgaaaattgggatacttatatttgccaagctattagcaaatacttatatttgcaaatacttatatattggcaaatacttatatttgccaagctattagataatatttcttttctttttctttttctttttcttttttttttttttttgagacagagtctcactctattctgttgcccatgctggagtgcagaggcatgatctcagctcactgcaacctccaccccccgggttgaagtgattctctcttgcctcagcctcccaagtggctgggattaaaggcgcctcccactgcacccagctgatttttgtatttttagtaragatagagtttcaccatcttggccaggctggtcttgaactcctgaccttgtgatctacccacctcggcctcccaa

SEQ ID NO: 233955 - DNA, 560 bp, Homo sapiens
tgacacttaccttttatttttttttaaagtattgaataagacagtgtacaacatatattgttattaatgctgcttttgttgttgctttttataatttcctcatatgtttgaaataacttgaatttcttcttgttttgttgattgcattcatggtttctaaaaacaaaagaaaattaatgacagtgcagatttggtaaactggttaagctactttgccaaataatacctgtcttataaagtttttaaccaaattgagataatacattctacatctgtaatgtcagtaatatacatggctcagtgcctggcacataggatacactcaataaatggcagctattagaatcaccctttcctcaatgcacaaaaaataatacaaatagatgccagggataaaattggcctcatctacccaataacagcttcagcttatctacagtgactttgctaccctstcttgctgtcccttgacaaggcctactttaggctcaagaatcccttagacaagtgaataaatcatttaacagaagcgagctaacattactctggagttggtctct

SEQ ID NO: 233956 - DNA, 610 bp, Homo sapiens
tttattgctgttttttttttggttttttkttcatttttggtaactttcctggaataattctgtaaagtctgtattccttatcatgtgcagccactgacatctcttttccattaacttagtggtccactgatttctacagagattgccttaaatatcttcatcaagtagaactctcttcctttgccaaatattcacatttgtgctggggcaagccttcagtgctccagcagtttacaactctgtaattaccttcacttcttggtttttcaggattcaagatcagacagaggtgagagagtagggcctgctgggatctttcctacccttgtgcacaactctgttcatgcgtataacattgtgaatccctgggaatatgtagagattttcaaagcccagtaggaaatattattccccatattttcatcttaagctttttgacaagcttcttgtttgccccaacttgctttgctgcctcaggcatcagccacgttaaacaattgctgctgattgcttcaacaaactctcttatgatagggctttcctccctgaatgagctttaagtcaggtcagataaagtttaaaaaagtgacagttcttcagtttggaactt

SEQ ID NO: 233957 - DNA, 567 bp, Homo sapiens
gggcacggtggctcacacctataatcccagcactttgagaggctgaggcagcagatcacttgaggtcaggagttcaagaccagcctggccaacatggcaaaactctgtctctactaaaaatacaaaaattagcctggcatggtggcaagcacctataatcccagctactcaggaggctgaggcatgcacaagaatcgcttgaaaccaggaggcagaggttgcagtgagctgagatcatgccacattaacagcctggacgacagagtaagactccatctcaaaaaaaaaaaaaaaaaaaaaraaaaaagaaaaaggaaaataaaactggggaataaaaaggatcagaacataaatcaaatagagaacagaaaaataaaacaaaaaaatcaataaaaccaagagttgtttctttgaaaaagtaaacaaaatcaaaaaacatctaactagactaagaaaaaaagagtgaagactcaagtacataaaatagaaatgaaagtgaagaccttataacagatgcctcagaaataaaaaagaaggatcataatcggctattgtgaacaattatat

SEQ ID NO: 233958 - DNA, 561 bp, Homo sapiens
agatcattgctagatgaaaaagcgagatgtggaacagtgtgtattacgagctgttatttatataaaaagagataaggggattttttgttcattttacttatacgtttatacagtagctttacaaagatttacaaggaattaacggcattgattgcctatcacagaagaactgggtaaatgggggataagggtagaatacattttattgtaaacctctttatgctgtttgatactgaaccatgtgaatgtattactatcctaaaaattaaattcaattaaaataggwttttaaaataaaataaaatatactgttactgtattaattatccataattcttagcaaagtcatagacattgggtgaatactaaataaattttaaagtaggtgtactaaaaccacatttaaaatgggagctagtaaaacatgttaccttaaacaagtctctctttcactcattcaatcaaaattacctgagtgcctgatgtaatggaagcatgaaaggcacttgagatgtagtggtaaccaaatccagcatatttgtcctcaacaagctggtgatt

SEQ ID NO: 233959 - DNA, 561 bp, Homo sapiens
agatcattgctagatgaaaaagcgagatgtggaacagtgtgtattacgagctgttatttatataaaaagagataaggggattttttgttcattttacttatacgtttatacagtagctttacaaagatttacaaggaattaacggcattgattgcctatcacagaagaactgggtaaatgggggataagggtagaatacattttattgtaaacctctttatgctgtttgatactgaaccatgtgaatgtattactatcctaaaaattaaattcaattaaaataggtttttaaaataaaataaaatatactgttactgtattaattatccataattcttagcaaagtcatagacrttgggtgaatactaaataaattttaaagtaggtgtactaaaaccacatttaaaatgggagctagtaaaacatgttaccttaaacaagtctctctttcactcattcaatcaaaattacctgagtgcctgatgtaatggaagcatgaaaggcacttgagatgtagtggtaaccaaatccagcatatttgtcctcaacaagctggtgatt

SEQ ID NO: 233960 - DNA, 561 bp, Homo sapiens
agatcattgctagatgaaaaagcgagatgtggaacagtgtgtattacgagctgttatttatataaaaagagataaggggattttttgttcattttacttatacgtttatacagtagctttacaaagatttacaaggaattaacggcattgattgcctatcacagaagaactgggtaaatgggggataagggtagaatacattttattgtaaacctctttatgctgtttgatactgaaccatgtgaatgtattactatcctaaaaattaaattcaattaaaataggtttttaaaataaaataaaatatactgttactgtattaattatccataattcttagcaaagtcatagacattgggtgaatactaaataaattttaaagtaggtgtactaaaaccacatttaaaatgggagctagtaaaacatgttaccttaaacaagtctctctttcactcattcaatcaaaattacctgagtgcctgatgtaatgraagcatgaaaggcacttgagatgtagtggtaaccaaatccagcatatttgtcctcaacaagctggtgatt

SEQ ID NO: 233961 - DNA, 565 bp, Homo sapiens
ctgatggtgttcctttttttgttgttgttattaattgagaaaaggtctcactacatcacccaggctggagtgcagtggcgcaatcacaactcacagcagcctcgagctcctgagctcaagcgatcctccagcttcagcctcccaagtagctgggactacaggtgcataccgccatgcctggctattttattttatttttttgtctagaaacaaggtcttcctatgctgcccaggctgatattcaactcctgggctcaaggagtacttacaccatggcttcccaaagtgctgagattacaagcgtgagcatccagccaatcctaattttgtaaggcaaatgagtatattgtgtaataaggtatgaatatttaatttctggtacctcagatttgattaagatgtcaatataatgaataatagataatgaagtgtgagacaaaacaccacasgcagaatttataaaggaaataattagataatctagaaccattccataacacttgatctccctctctgactttgaaactataaaaaggacagaggagagatgacagagaggaagtgt

SEQ ID NO: 233962 - DNA, 522 bp, Homo sapiens
gcctgtctctatgaaaaatacataaattagccaggtgtggtggtgggtgcctgttattccggctactcgggaggctgaggcaggagaatcgcttgaacctgggaggcagaggttgcagtgagctgagatctcgccactgcactccagyctgggtgacagagggagacttcctctaaaaaaaaaaaaaaaattgctggtacacctccaggtattgcatctgcattgcaggaggaaagaagggagatcaaaagctttatctttttgcaattgtaccttttgatttgagacaagagctctccccactgaatcatcactgatcagaaataggttgtacagctaatgctaattgcaaaggaggctgggagattaagcattcttagttgaacacagtgctatgcctaacaaaatgctgacaaaggagaagaagcaatggatattgcataggtaaccagcattgtctttcatagagagctatacaaaatttttatgtgcactaataaattgaaatattgtaataaatgg

SEQ ID NO: 233963 - DNA, 522 bp, Homo sapiens
gcctgtctctatgaaaaatacataaattagccaggtgtggtggtgggtgcctgttattccggctactcgggaggctgaggcaggagaatcgcttgaacctgggaggcagaggttgcagtgagctgagatctcgccactgcactccagtctgggtgacagagggagacttcctctaaaaaaaaaaaaaaaattgctggtacacctccaggtattgcatctgcattgcaggaggaaagaagggagatcaaaagctttatctttttgcaattgtaccttttgatttgagacaagagctctccccactgaatcatcactgatcagaaatagrttgtacagctaatgctaattgcaaaggaggctgggagattaagcattcttagttgaacacagtgctatgcctaacaaaatgctgacaaaggagaagaagcaatggatattgcataggtaaccagcattgtctttcatagagagctatacaaaatttttatgtgcactaataaattgaaatattgtaataaatgg

SEQ ID NO: 233964 - DNA, 429 bp, Homo sapiens
ttcagaagaccttcctctggagcctcagtacacttacctaatctaaatgggtccaggtgctgggatgattcccttatcttctcccctgccaaatcatggaggtgtggggagttccttcagacccaataaacttgtttgcagaggcctggggaatttcttcagacccccagtaaaagttgtttaatcttaaacgggtcatgttaagaattccctcattatctcgtcatgcttyaaggcccaggagaggcctaggcaaaattcttgatgggcttttgttacattccagcctttgtataagggcactggctgtctcagcttttaatatttaacttcatcactcagtcagtgctgaaacagttgttgtggagccctgcctgttcagcctttatgaagacctggcctgcagaagttgattgaagcccatccata

SEQ ID NO: 233965 - DNA, 418 bp, Homo sapiens
ttcctctggagcctcagtacacttacctaatctaaatgggtccaggtgctgggatgattcccttatcttctcccctgccaaatcatggaggtgtggggagttccttcagacccaataaacttgtttgcagaggcctggggaatttcttcagacccccagtaaaagttgtttaatcttaaacgggtcatgttaagaattccctcattatctcgtcatgctttaaggcccaggagaggcctaggcaaaattcttgatgggcttttgttacattccagcctttgtataagggcactggstgtctcagcttttaatatttaacttcatcactcagtcagtgctgaaacagttgttgtggagccctgcctgttcagcctttatgaagacctggcctgcagaagttgattgaagcccatccata

SEQ ID NO: 233966 - DNA, 429 bp, Homo sapiens
ttcagaagaccttcctctggagcctcagtacacttacctaatctaaatgggtccaggtgctgggatgattcccttatcttctcccctgccaaatcatggaggtgtggggagttccttcagacccaataaacttgtttgcagaggcctggggaatttcttcagacccccagtaaaagttgtttaatcttaaacgggtcatgttaagaattccctcattatctcgtcatgctttaaggcccaggagaggcctaggcaaaattcttgatgggcttttgttacattccagcctttgtataagggcactggctgtctcagcttttaatatttaacttcatcactcrgtcagtgctgaaacagttgttgtggagccctgcctgttcagcctttatgaagacctggcctgcagaagttgattgaagcccatccata

SEQ ID NO: 233967 - DNA, 418 bp, Homo sapiens
ttcctctggagcctcagtacacttacctaatctaaatgggtccaggtgctgggatgattcccttatcttctcccctgccaaatcatggaggtgtggggagttccttcagacccaataaacttgtttgcagaggcctggggaatttcttcagacccccagtaaaagttgtttaatcttaaacgggtcatgttaagaattccctcattatctcgtcatgctttaaggcccaggagaggcctaggcaaaattcttgatgggcttttgttacattccagcctttgtataagggcactggctgtctcagcttttaatatttaacttcatcactcagtcagtgctgaaacagttgttrtggagccctgcctgttcagcctttatgaagacctggcctgcagaagttgattgaagcccatccata

SEQ ID NO: 233968 - DNA, 567 bp, Homo sapiens
ataaataactttcaatttttgttatagtggttgatccaggacaatgtatcataaattctagaagcttcatgttggtgtcctaggagacaatattgcagcagaggttagatagccactctgcatctttggaataaaacaattgctacttagcagaacccagggttagacaaatcagtcttgtacctatttgaaaggaagaagtattaaaagaaaataaatctttatcaacaaatttcatctcaaatgctattatggaaatgcaagtttcaattcatttatataattgaataaagtaaaatttatagttgttttcaaagctttcatttggctataacrtatgttaaattttttattttagatcttttaaaaattgacttagtaatcaataaattaaaatattttattataatattagtctgatatgtggaaatcatactaatttttggtgagttgtaattgcagttaaaggcagtttgctacatttaatactagaaagtatgcaaaaatctaaaatcaacatgtgaaatgcattctattgtttttgcaaagaaattaatagcataacat

SEQ ID NO: 233969 - DNA, 394 bp, Homo sapiens
cactgcaacctctgcctctcggattcaagtgatttgccttcctcagcctgccaagtagctgcaattacaggcacctgccgccatgcgcaggtaatttttgtatttctagtagagatggggtttcactatgttggccaggctggtcttgatctcctgacctcaagtgatcaacctgcctcggcctcccaaagtgctgggattacaggcctgagccrccatgcccagcctctttctacttcttgatgaaggtgtttagcactaaattttcctctgaacactgctttagctgtaccccaaagataatggtaagttctgtcttggttttcattaattttaaataatgttttttatttctgccttgatttcattgttcatccaagagttattcaggaga

SEQ ID NO: 233970 - DNA, 361 bp, Homo sapiens
ctgtttgcatggtagatctttctccctttactttgggccttgtgtttttatctactttgccaccctgtgcctttgaagtgggacatttaaaccatttacattcaggattaatattgatatgtaaggttatgattatgtcatcatrttgttatctggttgttttgtagacttggttgtataattgctttgtattttctgtgggctatgtacttgagtgtgtttttgtgctggcaggtatcaatctttcatttctatgtttagcactcccttaaggatctctcgtaaggttggtctggtggcaatgaattcccttaatgtttgcttttctgagaagaattttatttctcctttgcttatgaag

SEQ ID NO: 233971 - DNA, 592 bp, Homo sapiens
tttagtctggttaagaactattgcctggggactagtgcatttgtttggaggtaaggggacactctggctttttcagttgccggaaaaagccagagtgtcttgcatttgttctttctcatctgagagagctggtgttcctttaactgtgatgtaagataaatatagtcagttggcttcatttctaggtactttcagagtgcaaggctctatataggatctttatttgtggctggrtttttgcctagggtttcagagacactgtgtactggcaaaatatttttggcattgtaatttggactgtgatccagtagatggcacttaatagtgaaggctggcagataggttctttctcagtcatgtggctcttttgtattttagcacgttctcggtagtgctgtatgatggcgggggagagagatgacatctttacaggtttgctccagagccttggaggagcctcctctgataactggtgccacactcacgtttctttccctcagggagaggccatggttggcagacaggccataccttttcctggatggccctgcagaaggaggcatatcttgttcccccatcggcccatgaattc

SEQ ID NO: 233972 - DNA, 403 bp, Homo sapiens
taagcataatgagccaaaagatgagttttgaatccatgtagcggattagtcaactgtgggggtgtggatgaaaagtggcagaggaggcccagagccaggctctgaagaacccccataccctagcttggggaaaggaggaggtggcagcgaagggagaccagaaaagtggtcaggaggaagaaaggcagaaagtaatgttgccagggaagccacaaagggagcaatttccargaaggagggagtggtaattgtttcccatttgccaaaaggttgagcagaatgaagatgtaaaagtgacctttgggtttagcacagtagtttctgtggtgggggaagaggcagattcctaaggggcttatgagtgaataggacatgaggaagtagagacagtgtgtaaatacaa

SEQ ID NO: 233973 - DNA, 594 bp, Homo sapiens
tatggaaatctacaagtatctcacaaataaattatgtggatgcatttaactatagatttttcttttgtgatttttctatgagatagcacattactgcataattgctgtacttttttggtgctttttcctttttcctttcaatattaatcatcgctgcttgttctcatataaaggtacattmtgatttaagttctccctggtgtttggctaattgggctattcgcttaaagcatactctgttttatgtctttatcttccatggtattttacattttggaatgactgattctaattcctcttccacagtggcataagttcacagtagcataaccttgggaatccattatatttgtcctttagaacactgctttgtttttctccacacagtaatgaaaagcggtggcattttccaacacccacaatgactcttctcctttttttagtaatgctactttttctttgcttagttcaaatcaacacaaagtcttatttcttgagcatctattacgtggcaaattttgtgttaggtactgaatatgtgaagttggataggcataattgctactctcaagctgttcaaagtcaaagtcagtt

SEQ ID NO: 233974 - DNA, 594 bp, Homo sapiens
tatggaaatctacaagtatctcacaaataaattatgtggatgcatttaactatagatttttcttttgtgatttttctatgagatagcacattactgcataattgctgtacttttttggtgctttttcctttttcctttcaatattaatcatcgctgcttgttctcatataaaggtacattctgatttaagttctccctggtgtttggctaattgggctattcgcttaaagcatactctgttttatgtctttatcttccatggtattttacattttggaatgactgattctaattcctcttccacagtggcataagttcacagtagcataaccttgggaatccattatatttgkcctttagaacactgctttgtttttctccacacagtaatgaaaagcggtggcattttccaacacccacaatgactcttctcctttttttagtaatgctactttttctttgcttagttcaaatcaacacaaagtcttatttcttgagcatctattacgtggcaaattttgtgttaggtactgaatatgtgaagttggataggcataattgctactctcaagctgttcaaagtcaaagtcagtt

SEQ ID NO: 233975 - DNA, 594 bp, Homo sapiens
tatggaaatctacaagtatctcacaaataaattatgtggatgcatttaactatagatttttcttttgtgatttttctatgagatagcacattactgcataattgctgtacttttttggtgctttttcctttttcctttcaatattaatcatcgctgcttgttctcatataaaggtacattctgatttaagttctccctggtgtttggctaattgggctattcgcttaaagcatactctgttttatgtctttatcttccatggtattttacattttggaatgactgattctaattcctcttccacagtggcataagttcacagtagcataaccttgggaatccattatatttgtcctttagaacactgctttgtttttctccacacagtartgaaaagcggtggcattttccaacacccacaatgactcttctcctttttttagtaatgctactttttctttgcttagttcaaatcaacacaaagtcttatttcttgagcatctattacgtggcaaattttgtgttaggtactgaatatgtgaagttggataggcataattgctactctcaagctgttcaaagtcaaagtcagtt

SEQ ID NO: 233976 - DNA, 581 bp, Homo sapiens
ataatgatttttaaaagccttttttacctcytaccacattaagtccgtaactttggaaacttactgttgaataaggttgggagctagccatttattgagtatttgtccacgggcaggcgcttctttaaatactagaagtagattgcttcacttaatcctaacaaggccatgaggcaaggactatcattctatcacccccattttactgctgagtgaagtgagtcgcagggaggtgaagggactcaggcccttactctcggtacccggaggagggattgaaatgcaaccccctgaccccaaggatggggcattcatcagtaactctctgctctctgggaagacacatatgttattccaaataagaattaaccattctgtttgtgtatttattgtctgagtaccatttattgagtcatttccccagagatttgcaatgtccctctatcacataacaagttccacacatacatgggactgtttttaggctatatttgttcttagataatctgttttagtttttttgtctattcctaccctatttccacagttttcattgttaggattttatagaagttttagtc

SEQ ID NO: 233977 - DNA, 581 bp, Homo sapiens
ataatgatttttaaaagccttttttacctcttaccacattaagtccgtaactttggaaacttactgttgaataaggttgggagctagccatttattgagtatttgtccacgggcaggcgcttctttaaatactagaagtrgattgcttcacttaatcctaacaaggccatgaggcaaggactatcattctatcacccccattttactgctgagtgaagtgagtcgcagggaggtgaagggactcaggcccttactctcggtacccggaggagggattgaaatgcaaccccctgaccccaaggatggggcattcatcagtaactctctgctctctgggaagacacatatgttattccaaataagaattaaccattctgtttgtgtatttattgtctgagtaccatttattgagtcatttccccagagatttgcaatgtccctctatcacataacaagttccacacatacatgggactgtttttaggctatatttgttcttagataatctgttttagtttttttgtctattcctaccctatttccacagttttcattgttaggattttatagaagttttagtc

SEQ ID NO: 233978 - DNA, 581 bp, Homo sapiens
ataatgatttttaaaagccttttttacctcttaccacattaagtccgtaactttggaaacttactgttgaataaggttgggagctagccatttattgagtatttgtccacgggcaggcgcttctttaaatactagaagtagattgcttcacttaatcctaacaaggccatgaggcaaggactatcattctatcacccccattttactgctgagtgaagtgagtcgcagggaggtgaagggactcaggcccttactctcggtacccggaggagggattgaaatgcaaccccctgaccccaaggatggggcattcatcagtaactctctgctctctgggaagacacatatgttattccaaataagaattaaccattctgtttgtgtatttattgtctgagtaccatttattgagtcatttccccagagatttgcaatgtccctctatcacataacaagttccacacatacatgggactgtttttaggctatrtttgttcttagataatctgttttagtttttttgtctattcctaccctatttccacagttttcattgttaggattttatagaagttttagtc

SEQ ID NO: 233979 - DNA, 581 bp, Homo sapiens
ataatgatttttaaaagccttttttacctcttaccacattaagtccgtaactttggaaacttactgttgaataaggttgggagctagccatttattgagtatttgtccacgggcaggcgcttctttaaatactagaagtagattgcttcacttaatcctaacaaggccatgaggcaaggactatcattctatcacccccattttactgctgagtgaagtgagtcgcagggaggtgaagggactcaggcccttactctcggtacccggaggagggattgaaatgcaaccccctgaccccaaggatggggcattcatcagtaactctctgctctctgggaagacacatatgttattccaaataagaattaaccattctgtttgtgtatttattgtctgagtaccatttattgagtcatttccccagagatttgcaatgtccctctatcacataacaagttccacacatacatgggactgtttttaggctatatttgttcttagataatctgttttagtttttttgtctattcytaccctatttccacagttttcattgttaggattttatagaagttttagtc

SEQ ID NO: 233980 - DNA, 443 bp, Homo sapiens
tttctcccatatgcattcttctagacttttgatagttttagcttatatattagattatatgagttcatttttgtgaggtaagggtccttccttccttctgcatatggttatccaataattctagtatttgatgttgaagaaacttttctttccccatttaattgccttgaaacctttattgaaaatcagttgaccatacatatttaagattattttctcaaactttgttaaagatttttgcatatacatttatgaggggtggtgatttgcactgttctactaatgttgtyacctggagttagtcaaactttgaggtttgagggcatatgcctcctgaccccaaagtcttcccaagatttctaacaccaacagcaagttcaagggtttccccaaatcactttcagatttgacaatcactaggactcacagaactcactgaaagt

SEQ ID NO: 233981 - DNA, 489 bp, Homo sapiens
cttgcttgactgccgctctccaggtcctttggctagagaaaatgagcaggcttttcttggggcttttgtttgtctgcatctgttggtatttttggtttgctggcttctccagcacctaaactggtatatattaagcaaaaagaaaatccacataattaaccaactgttgtgttgttttttggatcccaagaaagtctaccttcttctttccacatttcagtcttcttatgcttgatttacaaataatgcccagggtttcaagctgtatcccgttggaataataggaagaagtgtgtttatacsatcttttcctggaaagagagagcatgcctggtaatttttgaatggatactagacaataagaatttagtgttctttactgttgattttttatattccatcaactattactgggattgattctgggatgaaattaagtaactttgaactagttttattctttgtggtctagcttttaagctttgttag

SEQ ID NO: 233982 - DNA, 558 bp, Homo sapiens
tgctctatactagactgtatctaagtgctttgcaaatttaaatacaggtttgcttttagatctcagccacaatgctatacagaatcttggtatacttaaaaacaagctcaaaaaaaaaaatacccaaaacaaaacacaaacccctcaacaaaatactagccaccagcacctaacagcctatacgaagaaatatataccatgaccatgtgagatttatcccaggaatgcaaagttggcacaacccatgaatatcaatcaatgtaatacaccatattcatagaataaaggagaaaaaacccacatgattatctcaataaatgcagaaaaagcatttgccaaaatctgacmcccttttatggttaaaaaaagagaaaaacaaggcaacatactaggaatggaaagttctataatctgataaagggcacctacaaaaaacccacagctagtaatatgctcaatggtaaaagactgaaaatcttcccccttagatgaggaacaagacaaggatgttcactttcactgcttttgctaaacattgtactagaagttctagctagg

SEQ ID NO: 233983 - DNA, 558 bp, Homo sapiens
tgctctatactagactgtatctaagtgctttgcaaatttaaatacaggtttgcttttagatctcagccacaatgctatacagaatcttggtatacttaaaaacaagctcaaaaaaaaaaatacccaaaacaaaacacaaacccctcaacaaaatactagccaccagcacctaacagcctatacgaagaaatatataccatgaccatgtgagatttatcccaggaatgcaaagttggcacaacccatgaatatcaatcaatgtaatacaccatattcatagaataaaggagaaaaaacccacatgattatctcaataaatgcagaaaaagcatttgccaaaatctgacacccttttatggttaaaaaaagagaaaaacaaggcaacatactaggaatggaaagttctataatctgataaagggcacctacaaaaaacccacagstagtaatatgctcaatggtaaaagactgaaaatcttcccccttagatgaggaacaagacaaggatgttcactttcactgcttttgctaaacattgtactagaagttctagctagg

SEQ ID NO: 233984 - DNA, 591 bp, Homo sapiens
tactctgtggtgttccataaatgactattagtggctgaactatccttgaacctgctctcactccttgatccccrtcctagaactagtttagtactggaggtcttccactggaatcaatccacctccctgttgttctactatatctctaatgatttgtgtgatttggaccaaacccttctgggagtagcagtcaaattctcagacaagccccaagtgaaacaatttaaaggatatgtgataaagaatccaaggacacatttaaataatgtactggtttgtgttttttaagtatcctaactgagcaacaggaagagagttaaaaagaggaggggagctgggcgcagttgctcactgtaatcccagcactttgggaggccaaggttggtggatcacctgaggtcaggaattccagagcagcctgaccaacaaggtgaagccctgtctctactacaaatacaaaaattagccgggcgtgatggtgcgggcctgtaatcccagttacttgggaggctgaggcaggagaatcgcttaaaccctggaggtggaaattgcagtgagccaagacagtgccattgcactccagcctgggtg

SEQ ID NO: 233985 - DNA, 641 bp, Homo sapiens
tggtggagtcttggcagcttccacctagatttcagaggatgtatcggaaagtctggatgcccaggcagaagcctgctgcaagagagcctctgctgtgtctctacacagcttctctgtgtgggggctccaattccacatttccatttccccaaggagtcagcacacagagtacccaccagggcactgcctagtgaagctgtgggaagaggatcactgccctttagacctgagaatgatccagcaccggcagcttgcatcctgagcctggaaaagctaaaggcactcaactccaaccctgtggtgacagsagctacaagggctgcaccctgtaaagccacaggggcagagctgcccaaggctttgggaactcacaccttgcaccagagtgctctggatgtgggacatagagtcaaggattttattagagctttaaggtttagtgtctgccctgctgggtttgggacttctgtggggcctattgctagttttatttggccaatttctctcttttggaatgggaatgtttacccaatgcctgtagcaccattgtatcttggaagtaaataactgaaataactggtttttgactttacagactcataggtggaagcaacttgccttgagtctcagataagactgga

SEQ ID NO: 233986 - DNA, 330 bp, Homo sapiens
gagtttgatggaggttagttttctcttacgcttttctctcctgtggataacaccttttgaaagaggggagaaaacagtcttttgctgcatttcttgggcctcatcccaaaagtctaattactttcttttgtcaatgatttattaattttgctattctcttggcttgcttgataaagcagaagaaaatgatctgaaaacgcagcccaaaggatttagggaaaggcataatttcattagaatctggaatgatcagtrataagattctgtttctcaatgtcctttgaaaacctctgtggggtatttgatgtcaaatgcatccagaaggcagga

SEQ ID NO: 233987 - DNA, 555 bp, Homo sapiens
atacagtatgtagccttttcagatcaggttctctcacttagtaatatgtttttaaggttattcatgtcatgacttgcttcctcatttctctttagaaatgaataatatttcattgtgtggatgtactagagttcagccttttatctactgaaggacatcatgttacccttcaaaatttgtcaattataaataaaagagctataaacatayatgtggatgtttttatgtgcacatggttttcaagtcctttaggtaaaaaccaaggagcacaattgctgaatgttatggtcaaagtgtgttcagttttataagaaactgctaaactgtcttccaaattggctgtaccattttccatttccaccaatagtgaatgggagttcttgttggtccacgttctcacagtatttgatgtcagtatttttggatttggttattataatagttgtgtagtagtagtggaatctcatcattttaatttgtaatttcctaaagacacatgatgtcaagcatcttttcagatggtttttctactatgtgtactttctctgatgtgct

SEQ ID NO: 233988 - DNA, 485 bp, Homo sapiens
agtgaagaacttttgatattttaaatgtgttcacacatgcacacacacacacagaagagagagagagaaagagagagagctaaagatattactggtttaaaaaaagaatgaaccatgtcttttacagcaacatggatggaactggagttcattatcttaggtgaaacaactcagaaaccgaaagtcaaataccacattcttactcataagtggaagctaaaaaatctgcatacatggacatagaaggtggaatgtgcagtgcataacagtgtacaagctcctatgagaatctaatgctgctgctgatctgacaggaggcaggtctcaggccttagtgctctctccctactcacctcctgtgtggcccagtttctaacagaccatgctctgggggtttgggacccttgatgtggactatttatccaacaacccacagtttccattggttgagwcttatccccagggactttaactattttgaattc

SEQ ID NO: 233989 - DNA, 559 bp, Homo sapiens
acataaagattacatgttttccccatggggagactaaaggctggtgccttaagcaagcttattttagttggtcaaaggcctttctagcytacagttcacaaataagacagtgagttttagctgcctgagtctcctttattaggtgatataaggaacaagctatttcaccatacccaggtatccatagtctggaggatcctgtaatgtctaagaagccttgcagtttcttgagggttttggggtcgggaaaggggggtggcgggcaggggagaagatgggtttaatcctgctttgcccaatgccctggttctctctgacaagaccaggtctaggtacttcactaaagtctgacagaactgagctttagattttggaactttatatcctcgattagccagaaaatttagaagagccttactgccctcctgagagatttcctcatttggagcacagaggagaaggtcatccacatgttgcaaacctttaacctgagagtaaaggaactcagagaggtctcttggtaatgcctccccaaacaagtgacggctgtcttggaacc

SEQ ID NO: 233990 - DNA, 559 bp, Homo sapiens
acataaagattacatgttttccccatggggagactaaaggctggtgccttaagcaagcttattttagttggtcaaaggcctttctagcctacagttcacaaataagacagtgagttttagctgcytgagtctcctttattaggtgatataaggaacaagctatttcaccatacccaggtatccatagtctggaggatcctgtaatgtctaagaagccttgcagtttcttgagggttttggggtcgggaaaggggggtggcgggcaggggagaagatgggtttaatcctgctttgcccaatgccctggttctctctgacaagaccaggtctaggtacttcactaaagtctgacagaactgagctttagattttggaactttatatcctcgattagccagaaaatttagaagagccttactgccctcctgagagatttcctcatttggagcacagaggagaaggtcatccacatgttgcaaacctttaacctgagagtaaaggaactcagagaggtctcttggtaatgcctccccaaacaagtgacggctgtcttggaacc

SEQ ID NO: 233991 - DNA, 495 bp, Homo sapiens
tgtggtagcccatcactgggttgtaaagtgccttgcctcctttcctaccccctattttttttgagacacagtcttactctgktgcccaggctcaagtgcaggggcgtgatctctgctcacgcaaccttagcctcctgggtttatgttttttttttgcctcaggctcccaataagctgggactacaggcacatgccatcacacctggctaactttttttatttttagtagagacaggggttttaccatgttggccaggctggtctcgaactcctgacttcaggtgatccacccaccttggcctcccaaagtgctggggttacaggcatgagacactgtgcctgtccacctcctcttttacttgggagaaatgcacagattctgcgtgccatgtgcgtttgttttgggagtgataattgatctaacttatggaaataatactagatagttagcggatggattctctatctgatgagagttttgggcaaaacgaattc

SEQ ID NO: 233992 - DNA, 506 bp, Homo sapiens
atcttaacaccaattacatactaacttttcaaaaagcaagttaagcctgattctaattgtgggatgaaaagttttttccctatgaataaattttaaatatcatcaagcatgttgagaggtgctagcgagggcatggagcaaggaatcaaattccataggtgattgttttctctatctttgtataaaaatgtccttgycccaattaaagcctccagcaagtataaaaagaaagcgtttggtgatattagcaagcaacagtttcccaaatctaccttgcccgcctctttggcctaaactctgcaggtaatttattcaaaaaagagaagggtcctttgggtaacagatgtatcacttcctactctcttaaaccaaactccgatgctgcatcttagataaaagccctcaaatctggcctcctgaagtcatgctgtcatttaacttgactgcaggcccctgatactcccctgcagggagagagtctgctctttgccccagcctttacccca

SEQ ID NO: 233993 - DNA, 506 bp, Homo sapiens
atcttaacaccaattacatactaacttttcaaaaagcaagttaagcctgattctaattgtgggatgaaaagttttttccctatgaataaattttaaatatcatcaagcatgttgagaggtgctagcgagggcatggagcaaggaatcaaattccataggtgattgttttctctatctttgtataaaaatgtccttgtcccaattaaagcctccagcaagtataaaaagaaagcgtttggtgatattagcaagcaacagtttcccaaatctaccttgcccrcctctttggcctaaactctgcaggtaatttattcaaaaaagagaagggtcctttgggtaacagatgtatcacttcctactctcttaaaccaaactccgatgctgcatcttagataaaagccctcaaatctggcctcctgaagtcatgctgtcatttaacttgactgcaggcccctgatactcccctgcagggagagagtctgctctttgccccagcctttacccca

SEQ ID NO: 233994 - DNA, 490 bp, Homo sapiens
tatatatttaggagtgtcacaaaacctgcaccatactctcaaatgtgttggcaaaaaactgtgtgtgtgtgtgtrtgtgtgtgtgtgtgtgtgtgtgtagaaagaaaaatcaaggaaatatggcaaaacattaatgattattcaatctaggtgctcactattctgttcttttctgtatgttagaatttttttcaaaacaaaaagctggggagaaggagaaaaaattctaagagtcaaagaaactgtgtaatccccatttttatcacttttttttgtgaccaagtgatttcactcaccattttattcatcagttccctatctacatacttagagcaaatgagataacatagaatgctttgcaaagtaaaaagcatgatacagaatatataatgtcatcgtaaccaacaagctctgaagtttaatcacatccagacctcttgcttctttttccctaccttcttatggttgtagatttcaccactgtaacaga

SEQ ID NO: 233995 - DNA, 490 bp, Homo sapiens
tatatatttaggagtgtcacaaaacctgcaccatactctcaaatgtgttggcaaaaaactgtgtgtgtgtgtgtgtgtgtgtgtgtgtgtgtgtgtgtagaaagaaaaatcaagsaaatatggcaaaacattaatgattattcaatctaggtgctcactattctgttcttttctgtatgttagaatttttttcaaaacaaaaagctggggagaaggagaaaaaattctaagagtcaaagaaactgtgtaatccccatttttatcacttttttttgtgaccaagtgatttcactcaccattttattcatcagttccctatctacatacttagagcaaatgagataacatagaatgctttgcaaagtaaaaagcatgatacagaatatataatgtcatcgtaaccaacaagctctgaagtttaatcacatccagacctcttgcttctttttccctaccttcttatggttgtagatttcaccactgtaacaga

SEQ ID NO: 233996 - DNA, 490 bp, Homo sapiens
tatatatttaggagtgtcacaaaacctgcaccatactctcaaatgtgttggcaaaaaactgtgtgtgtgtgtgtgtgtgtgtgtgtgtgtgtgtgtgtagaaagaaaaatcaaggaaatatggcaaaacattaatgattattcaatctaggtgctcactattctgttcttttctgtatgttagaatttttttcaaaacaaaaagctggggagaaggagaaaaaattctaagagtcaaagaaactgtgtaatccccatttttatcacttttttttgtgaccaagtgatttcactcaccattttattcatcagttccctatctacatacttagagcaaatgagataacatagaatgctttgcaaagtaaaaagcatgatacagaatatataatstcatcgtaaccaacaagctctgaagtttaatcacatccagacctcttgcttctttttccctaccttcttatggttgtagatttcaccactgtaacaga

SEQ ID NO: 233997 - DNA, 573 bp, Homo sapiens
tttcttatatccaggggaagactagatgataatactcccaacagtacagggtgttacacgccaccccccatgatattgtttctaatattaagttggggagagggtgatattactcccaatagtgcaaagggtgcacaccagccctgtgatattattcctagtatccagaggaggagagaatggtattatttttaatatcacagagagtgcacaccccccttgtgatactgctcctaacatccaaggggtagaggatgaaattactcccaatatcacagtgggtatacagctccccgtggtattgttcctaatatccaggggggataggatgatagtactataaatattgcaaagggtgtacaccccttctgatattgttactaatatccgtggggggagtcgatgatattacttccaatatcacagggtatgtacacyccccttgtgatattgttcctaatatcctgggaggagactacgatattactggcaatatcgcagggtgtgtgcattccagtgatattgttcctaatgtccagcaagggagaaaatattactcccaatatggcgggg

SEQ ID NO: 233998 - DNA, 621 bp, Homo sapiens
gagaatacctgcttggataaggttttaacggttgagatatgctaatgagccccgatttggaggaggaactccaagtcatggagggtcctgaatgaggtatgaagaaagttcatttaaagcagaggaagctggtgtaggatcaatgaagagcaaaccacagcaattagaaactacttgttagagatgctgtttgtttttgcaaagtggcaaacactctcaaacattagaattaagtcttgtatttattttctcctctgtttttagccaatgaaatatgagtctatcttgttcacaatgacctcagtgccagctatatgtgcagaccctgaagagatttaggacatgaaagtgtgacgataggaaggaggccctgcccttgtccctccgtggtgctttgccctccttgcccactctgggctcagcccacgcccctctctgtggcccctctggctctgagcttcatctcacagacctcgtcttacagggcttggcacctgrcccccttcagtgtctcagtcctgaccactgcgcttccctgataagccagcccaggatgagatgccccaccctggccaccagattcctctctccaagtcactgcatggggacacagacagccca

SEQ ID NO: 233999 - DNA, 453 bp, Homo sapiens
actcctattttaaagtgcacagtttgctgagttttgccagatgtaaccatccagktgaataaaattgattaaactgatctttcaaataataaattaaccttgcaatcttgctagaaacttaatttgttcagtttattatccattctatgtactgctacattcaattggttattatgttttaaggacttttgagtctatgtttatgagggataaacatcaaagttgtataatgcctttgtctcgatttggaatcagggcaatactgggttaataaaataagataggaagtgtccctttaaattcttttttttttttttttttttgagatggagattcactcttgttgcccaggctggagtgcaatggcacaatttcggctctccgcaacctctacctcccagattcaagctattctcctgcctctggctcccgaggagctgggattacaggcaa

SEQ ID NO: 234000 - DNA, 453 bp, Homo sapiens
actcctattttaaagtgcacagtttgctgagttttgccagatgtaaccatccaggtgaataaaattgattaaactgatctttcaaataataaattaaccttgcaatcttgctagaaayttaatttgttcagtttattatccattctatgtactgctacattcaattggttattatgttttaaggacttttgagtctatgtttatgagggataaacatcaaagttgtataatgcctttgtctcgatttggaatcagggcaatactgggttaataaaataagataggaagtgtccctttaaattcttttttttttttttttttttgagatggagattcactcttgttgcccaggctggagtgcaatggcacaatttcggctctccgcaacctctacctcccagattcaagctattctcctgcctctggctcccgaggagctgggattacaggcaa

SEQ ID NO: 234001 - DNA, 453 bp, Homo sapiens
actcctattttaaagtgcacagtttgctgagttttgccagatgtaaccatccaggtgaataaaattgattaaactgatctttcaaataataaattaaccttgcaatcttgctagaaacttaatttgttcagtttattatccattctatgtactgctacattcaattggttattatgttttaaggacttttgagtctatgtttatgagggataaacatcaaagttgtataatgcctttgtctcgatttggaatcagggcaatactgggttmataaaataagataggaagtgtccctttaaattcttttttttttttttttttttgagatggagattcactcttgttgcccaggctggagtgcaatggcacaatttcggctctccgcaacctctacctcccagattcaagctattctcctgcctctggctcccgaggagctgggattacaggcaa

SEQ ID NO: 234002 - DNA, 642 bp, Homo sapiens
ctccttcccttcccctttccattcctcaaagaacagtctgagctcatggcttccatttcctcagctgctgccccgctctgtgctctgaaagctcttctttctccagatgagccttcttcatctgctgctcccattttggtattagcaaggtggcaatcgcagttacctttgcactttccatgtcctcccaagcaaactcacatccccattgcctcaattcccagagccacaaggataagcccatgmattccacatggaaatctccaacttaaaactttccttagagctcttggcttattccagctgtctactggacattgctagatggaggtttcccaggcacctcaaactcatctcatctaaagctagatttactgtctttcctctacacttgtcctccttttgccttcagtctagtcactaagggcagtattagccattcagttgtataagtgagagagcctgcagcctcctgaccaggactgacacgtcaggctgtatagcagctcatttaaacatcggtcaacgttttaataattgtttctctgtgcttctccgccatcagcctgtgaaccctgtggagacaggaatcgtgtctcactcatctgcacatctccagaacatcctatcccacaacataat

SEQ ID NO: 234003 - DNA, 501 bp, Homo sapiens
gttgtggcaaatactggttgcaaaatgaatacccactagtgaaggaatgattgaataaatcatggcatatccacagcatgcagccactgaaaagaatgagccctaccattgccaagggtatttctatgacctacattgagtaaggaaagcaacatgtagaaaaaytgatataatgcagtctcatttaaaaatacctataaaacccgtatgtttacatatatatatacattgatatgatgatacattgatacaagcatagaaaaaatatggaggaataaacactggtatggatgagccatctatggtgaattagggctcaacattcattctaccatcctgataaatttgccttctataatgtagaaaaagaaaagctaggaacaagatacacaaacatccctgcaggcaaatagatgcacttgtgggagggatgggaggagaagcatagcaggggccacactgatgctgcctcggcactttctgctgacaagcacctgtgct

SEQ ID NO: 234004 - DNA, 594 bp, Homo sapiens
gtcagccttgaggagctatgggagcttgtccaacagtaattaatgcagatggtcttttggagctgagttttccattgtgattttcaacatttgtatgtttcagaaatctgcctactgtactataaatgcattcttatgcaaattgctaccatcatatggcccaatttcttagtrtgaggagcatgaaacttttaattacatgtcactgttttaaaactttccatttcttttcagacttatatattctactagctatattacattgaagaaatgccaaatactaagagtagtatttgatgtgtttgaagtgaagtcttcaaggggtgtattatttgaagacagtagttcttcatggggtgtagtaaaagacgcaagaataagaaggaaatgaatgcaacctaattcatccatggctggattcactagcacagagcttatcatccataggctttatcttagtctattcaagccactataaaaaaaataagactgagcggcttataaacaacgaacatttatttttcacagttctggaggctggaacatccaagatcaagacactggaagaaggaaacaaatgccagtcatcaattc

SEQ ID NO: 234005 - DNA, 417 bp, Homo sapiens
gaattcattatattctttttttttttttttttttgagtcagagtctcgcttctttgcccaggctggtgtccaayggcacaatcttggctcacttcaacctctgcctgccgggttcaagcaattctcctacctcagcctcccaagtagcttggattacaggcaggtgccagcgtgcctggctaatttttgtatatttagtagagagggggtttcaccacgttggccaggctggtctcgaactcctgacctcaagtgatctgcccgcctccgcctcccaaagtgctgggattacaggtgtgagccaccgcgcccggcctatgttgtttattatatatcataagttttatatatatatatatatatatatatatatatatatatatatatatatctgatacatatacatatataccagat

SEQ ID NO: 234006 - DNA, 417 bp, Homo sapiens
gaattcattatattctttttttttttttttttttgagtcagagtctcgcttctttgcccaggctggtgtccaacggcacaatcttggctcactkcaacctctgcctgccgggttcaagcaattctcctacctcagcctcccaagtagcttggattacaggcaggtgccagcgtgcctggctaatttttgtatatttagtagagagggggtttcaccacgttggccaggctggtctcgaactcctgacctcaagtgatctgcccgcctccgcctcccaaagtgctgggattacaggtgtgagccaccgcgcccggcctatgttgtttattatatatcataagttttatatatatatatatatatatatatatatatatatatatatatatatctgatacatatacatatataccagat

SEQ ID NO: 234007 - DNA, 417 bp, Homo sapiens
gaattcattatattctttttttttttttttttttgagtcagagtctcgcttctttgcccaggctggtgtccaacggcacaatcttggctcacttcaacctctgcctgccgggttcaagcaattctcctacctcagcctcccaagtagcttggattacaggcaggtgccagcgtgcctggctaatttttgtatatttagtagagagggggtttcaccacgttggccaggctggtctcgaactcctgacctcaagtgatctgcccgcctccgcctcccaaagtgctgggattacaggtgtgagccaccgcgcccggcctatgttgtttattatatatcataagttwtatatatatatatatatatatatatatatatatatatatatatatatctgatacatatacatatataccagat

SEQ ID NO: 234008 - DNA, 483 bp, Homo sapiens
acaggaatcttttctgaaacacttccacaaagtgcttggccaaaatttctgaactctttcctgttattataggaaactcactatcctcagwggtaaaccattttcatttgtgtacatttcttccttatttagattaaacttatatctggccagtgatttgctcatacttttactggcagccagataaaaattatatttttttatgaatgaagacgacatcatcaagaacctctaaaaagttttatacacaatgtatagcattcgacttttaaaaattaccaagtattgggccgggcacaatggctcacgcctgtaatcccagcactttgggtggccgaggcaggcggatcacgaggtcaggagaccaagatcatcctggctaacacagtgaaaccctgtctctactaaaaatacaaaaaattagccgggcatggtggtgggcacctgtagttccagctactcgggaggctgaggcaggagaat

SEQ ID NO: 234009 - DNA, 483 bp, Homo sapiens
acaggaatcttttctgaaacacttccacaaagtgcttggccaaaatttctgaactctttcctgttattataggaaactcactatcctcagaggtaaaccattttcatttgtgtacatttcttccttatttagattaaacttatatctggccagtgatttgctcatacttttactggcagccagataaaaattatatttttttatgaatgaagaygacatcatcaagaacctctaaaaagttttatacacaatgtatagcattcgacttttaaaaattaccaagtattgggccgggcacaatggctcacgcctgtaatcccagcactttgggtggccgaggcaggcggatcacgaggtcaggagaccaagatcatcctggctaacacagtgaaaccctgtctctactaaaaatacaaaaaattagccgggcatggtggtgggcacctgtagttccagctactcgggaggctgaggcaggagaat

SEQ ID NO: 234010 - DNA, 483 bp, Homo sapiens
acaggaatcttttctgaaacacttccacaaagtgcttggccaaaatttctgaactctttcctgttattataggaaactcactatcctcagaggtaaaccattttcatttgtgtacatttcttccttatttagattaaacttatatctggccagtgatttgctcatacttttactggcagccagataaaaattatatttttttatgaatgaagacgacatcatcaagaacctctaaaaagttttatacacaatgtatagcattcgacttttaaaaattaccaagtattgggccgggcayaatggctcacgcctgtaatcccagcactttgggtggccgaggcaggcggatcacgaggtcaggagaccaagatcatcctggctaacacagtgaaaccctgtctctactaaaaatacaaaaaattagccgggcatggtggtgggcacctgtagttccagctactcgggaggctgaggcaggagaat

SEQ ID NO: 234011 - DNA, 483 bp, Homo sapiens
acaggaatcttttctgaaacacttccacaaagtgcttggccaaaatttctgaactctttcctgttattataggaaactcactatcctcagaggtaaaccattttcatttgtgtacatttcttccttatttagattaaacttatatctggccagtgatttgctcatacttttactggcagccagataaaaattatatttttttatgaatgaagacgacatcatcaagaacctctaaaaagttttatacacaatgtatagcattcgacttttaaaaattaccaagtattgggccgggcacratggctcacgcctgtaatcccagcactttgggtggccgaggcaggcggatcacgaggtcaggagaccaagatcatcctggctaacacagtgaaaccctgtctctactaaaaatacaaaaaattagccgggcatggtggtgggcacctgtagttccagctactcgggaggctgaggcaggagaat

SEQ ID NO: 234012 - DNA, 608 bp, Homo sapiens
agacctgtacaacaaattacactcttttacagaaaataataaaatatccaagtctctcaccaaattttcaaaaaagaggaaaagtgtaagcttccagatgaaagtttctatagctttccccaawtttagtaccaccatgaaaaagaaattcttcactcattcaaggcatacgactagaaaactaatttccatggcatcaaattaatttcctcctttggagataaaagcatgagatcttttccaaagcattaaaatcgccaagaaaaaaaaaaaaagaaaaaaaagaccattaccagcattttaaaactaagagaatgaagtaaacaaaaaagggaaagaaaaagcttcaaaagttcatttttctcctaatttcttgaactctctattccagaagtacctaatgtttttcttaaaagagaggctttcaatttttccctatgtctaaaggctgctttaagtagcttaagaccaaggacaggagagtgaaaacgaagagggttttggctctccaggtgggggtggaattgcagctactgcttagggatattttccagtggtcatctcttcaaactccagtgagtctcacaaacagggtgcaccagccaatc

SEQ ID NO: 234013 - DNA, 550 bp, Homo sapiens
cccaatagtaagaattctactcaggacatctgatcttcattgaaatggattctaatccaacttcagtcctcatagcaaggaagtactatttcagaaagtccctagattctcagatgcattggcaagaaccatacactgaagaattcacagaagattttagtcacttgctcactcatccacttgaagtaagaaaaatcaatcactgcatgtttattgttctataataaagcaaatgttagaaataaaagttagaaatgtcaaacacactaaattgttacataataaactaatcaagacacaacttttattcaggacatggatatttctgaaatgaaaacaaaagaagagaattgacttaaaatgtttataaatacraatattatgacagaaccaaagctatttatgagcattatttttaaaagcttgtttaagtattatgcacttgtctgtgtgacattttgtaaagcggagaaaaattaaggagaaaggaattgtagaacactaacaggaagaggacagatactgaggaatggctcatggtataagtgag

SEQ ID NO: 234014 - DNA, 549 bp, Homo sapiens
tgttaccatggctttgtaatcttagttttgaagacaggcaaatgtactagtcaaatatgccaaactaacttattaagagcattccaaacaacattttggatccaattctttttaaatgcacttagatctttcttatatcagaatcaagcatatttgtcaattacttaatgtttattattaataactaaaatgatttgttattaataggaatagcttttttaaagtaccttgatctttgtgtttctaagatttgtcctagtccatttatggatctgaaataaataataaatgaggaagacaaagtttaaaagtaaaaattaactttttaaaaaagtatacaaagtatattgtttctaaaacrggaaataagcatacccaaatacatctggaaccagaaaaaaattaaaaacagaaaaacaaaacttgctttaaaaaataattatgattttccttcaaacaataaatcacatatattccactcatacatcaataaaacatatatgcaaaaattcgcacaactgtcagattaagggctactttgtggttaat

SEQ ID NO: 234015 - DNA, 604 bp, Homo sapiens
taatactcaaagcaaacttatgataggcattatgccttttacagaggaggctttaaaagggtaaataagctccctaagaagacaatgagaaacagaccaaggattagaacccaagcagattccaaggtctgtgatcttcaacactacgcaacaatacctaccctccacatggagacattatatttttttatagtaaagtttaaggacattactattaaaataagatgaaatatgtggaaaaaatgtgaatttctttcttccacaatcattaatcatggcaaataatctcctaatgagccttacctttattgattcaatttataatatatactatawgaactgagatgacagattcaaaatctaatgtcagtagaacttataaatactaagaatagtaattttgagccatcacactcaaagcattgtacacattaaagataaccaataataatagctaccgaatgtctctctgtatagggcttttattagttcaggtcttacaaaataattcaaaacaaagtccctgaactataacttcatttgaaaagtccatctttgttttcaaaaggaatgggagtctccagaacagtcagcaaaatgactg

SEQ ID NO: 234016 - DNA, 604 bp, Homo sapiens
taatactcaaagcaaacttatgataggcattatgccttttacagaggaggctttaaaagggtaaataagctccctaagaagacaatgagaaacagaccaaggattagaacccaagcagattccaaggtctgtgatcttcaacactacgcaacaatacctaccctccacatggagacattatatttttttatagtaaagtttaaggacattactattaaaataagatgaaatatgtggaaaaaatgtgaatttctttcttccacaatcattaatcatggcaaataatctcctaatgagccttacctttattgattcaatttataatatatactataagaactgagatgacagattcaaaatctaatgtcagtagaacttataaatactaagaatagtaattttgagccatcacrctcaaagcattgtacacattaaagataaccaataataatagctaccgaatgtctctctgtatagggcttttattagttcaggtcttacaaaataattcaaaacaaagtccctgaactataacttcatttgaaaagtccatctttgttttcaaaaggaatgggagtctccagaacagtcagcaaaatgactg

SEQ ID NO: 234017 - DNA, 535 bp, Homo sapiens
cataatgtcataaaaacatagaagattacagttcagattttaggtattttccttcttacaaaactgttctggttctaaatattcattattacttattttaaaaaaaagataaccactgaaatatagtttcttagaatctaatatacttcccttcacaccaaaccctcatattagaatctaaaatacttccctayaccccagcccacaatcatgcaccacgtgaactcagtactaggcctttcaaacaccctagaaacaaataagtggtgggaaggctgattcagccctgattctagcctaaaagcagtttatcatttagaaacccatacttgctaatctggcctctcagtgcaactatttattttactgacctctccagagtcaggctaactccaaaaaatattttgacactgacttagagcccaagtggtagtttccatctctctggaggcaagttttgttgtctgtttttttttccccccctcataatcctgtttacatccctaacgtcatcaacatcacaagcttcttctct

SEQ ID NO: 234018 - DNA, 535 bp, Homo sapiens
cataatgtcataaaaacatagaagattacagttcagattttaggtattttccttcttacaaaactgttctggttctaaatattcattattacttattttaaaaaaaagataaccactgaaatatagtttcttagaatctaatatacttcccttcacaccaaaccctcatattagaatctaaaatacttccctataccccagcccacaatcatgcaccacgtgaactcagtactaggcctttcaaacaccctagaaacaaataagtggtgggaaggctgattcagccctgattctagcctaaaagcagtttatcatttagaaacccatacttgctaatctggcctctcagtgcaactrtttattttactgacctctccagagtcaggctaactccaaaaaatattttgacactgacttagagcccaagtggtagtttccatctctctggaggcaagttttgttgtctgtttttttttccccccctcataatcctgtttacatccctaacgtcatcaacatcacaagcttcttctct

SEQ ID NO: 234019 - DNA, 505 bp, Homo sapiens
catgcaccacgtgaactcagtactaggcctttcaaacaccctagaaacaaataagtggtgggaaggctgattcagccctgattctagcctaaaagcagtttatcatttagaaacccatacttgctaatctggcctctcagtgcaactatttattttactgacctctccagagtcaggctaactccaaaaaatattttgacactgacttagagcccaagtggtagtttccatctctctggaggcaagttttgttgtctgtttttttttycccccctcataatcctgtttacatccctaacgtcatcaacatcacaagcttcttctctgggaaattacacttttaccctcattacctcaaacctcaatagaggttccctgtcacaataaaaagctggctactgaggtttagaggcaactagattatagtaatactctatatttgaagccaactttacaaatgaattaaatccttgaatctaactttataaattatatacatttttct

SEQ ID NO: 234020 - DNA, 505 bp, Homo sapiens
catgcaccacgtgaactcagtactaggcctttcaaacaccctagaaacaaataagtggtgggaaggctgattcagccctgattctagcctaaaagcagtttatcatttagaaacccatacttgctaatctggcctctcagtgcaactatttattttactgacctctccagagtcaggctaactccaaaaaatattttgacactgacttagagcccaagtggtagtttccatctctctggaggcaagttttgttgtctgtttttttttcyccccctcataatcctgtttacatccctaacgtcatcaacatcacaagcttcttctctgggaaattacacttttaccctcattacctcaaacctcaatagaggttccctgtcacaataaaaagctggctactgaggtttagaggcaactagattatagtaatactctatatttgaagccaactttacaaatgaattaaatccttgaatctaactttataaattatatacatttttct

SEQ ID NO: 234021 - DNA, 495 bp, Homo sapiens
agcttttttaacatatgaaattggggttatctggctatgagtttgtgaggcataaaaatgatatgacagaagaattacagatttgtttttgcatttccatgcctaaatgtaactaatacaatgttagtttcacaaggtaatgtgcaatgttttaaatgcatttacctctccaaaatattagaattcttcactcaaagctaacagtggtagactaacgttttactacttccaggcagtcagaaagtatcaaatataaaaataaatgaaaatcaccccaaatgagagcctgccaatatttacagctgtattaaaattatatgtaatcatatacaattatagcagaagagataaatgtcctcttctatgcccataggaaagctatacaaayatttaaaaaaataagtgcatattaacatttattttctttagacatcagccctgcatttccctcatgtgacttcctaccttcccaagtcaaactctgcaaaaagtata

SEQ ID NO: 234022 - DNA, 495 bp, Homo sapiens
agcttttttaacatatgaaattggggttatctggctatgagtttgtgaggcataaaaatgatatgacagaagaattacagatttgtttttgcatttccatgcctaaatgtaactaatacaatgttagtttcacaaggtaatgtgcaatgttttaaatgcatttacctctccaaaatattagaattcttcactcaaagctaacagtggtagactaacgttttactacttccaggcagtcagaaagtatcaaatataaaaataaatgaaaatcaccccaaatgagagcctgccaatatttacagctgtattaaaattatatgtaatcatatacaattatagcagaagagataaatgtcctcttctatgcccataggaaagctatacaaacatttaaaaaaataagtgcatmttaacatttattttctttagacatcagccctgcatttccctcatgtgacttcctaccttcccaagtcaaactctgcaaaaagtata

SEQ ID NO: 234023 - DNA, 579 bp, Homo sapiens
ccttttaatggagagagtcttcttactaatcctatgtgtatawcctgattttcttcaatatgtactttttaaattttaagttccagggtacatgctcacgatgtgcaggtttgttacataggtaaacgggtgccatggtggtttcctgcacctattaacccatcacctaggtcttcaatattttttaaaaactcatttccagtgtgtgtttaatagtaatttaacaagaaaaataagatctcagatgctttatcaagctcagcttcttctatggaacagaaaaacttaccaatattggggttgaatccttgtgaagagctatacataccaaactctatcctaaccccatatgcttattacaaattataattccaaattttatcaccaaatcaaactcagagtaatagaaaagaaatatttaacacaaactaataattaaaacacaaatttcacctattgttcaggatatctttttgagaaaggtttttgttaaagaaaatttcagatacaaacataaagaaaattaaacaatcaatccccatattcccagctctcaataatgagccactcatagcaatc

SEQ ID NO: 234024 - DNA, 548 bp, Homo sapiens
tgatctatccatgttttaatttgccctgataaaattaacaggtaaacacatatatcttcttatggaaattatagtgatagaagctttaactatttagagcaaaagggaattatagtgatagaaccttttactatttatacccattccatttccatctctcttgttatttcctttaaaaaagaccaattctaaccacatataaacaaaacatcattcttctaccgatgtcataataatttaattaacagatattatcaaacaatttgagcagtatggctttgtgcacatcagacttatttttattttctcacctctttaatatgataatcattcaatcataaatagtgaattatcactctaaaggaaaaggaaaacaaaacatagataattccaaaatcacttgcccaaaaaaawtttacttgtaatctgtgtagaactagaagtaaaattatatactctatgacattactaattattcctcacactatttatttaggactgtataaaacctgggtcttaggaaaaatttttcctaaataataaattaa

SEQ ID NO: 234025 - DNA, 548 bp, Homo sapiens
tgatctatccatgttttaatttgccctgataaaattaacaggtaaacacatatatcttcttatggaaattatagtgatagaagctttaactatttagagcaaaagggaattatagtgatagaaccttttactatttatacccattccatttccatctctcttgttatttcctttaaaaaagaccaattctaaccacatataaacaaaacatcattcttctaccgatgtcataataatttaattaacagatattatcaaacaatttgagcagtatggctttgtgcacatcagacttatttttattttctcacctctttaatatgataatcattcaatcataaatagtgaattatcactctaaaggaaaaggaaaacaaaacatagataattccaaaatcacttgcccaaaaaaattttacttgtaatctgtgtagaactagaagtaaaattatatactctatgrcattactaattattcctcacactatttatttaggactgtataaaacctgggtcttaggaaaaatttttcctaaataataaattaa

SEQ ID NO: 234026 - DNA, 433 bp, Homo sapiens
tggtttcctgatacctattgatttttttcccaaaaacktaatagttttccaatttgactcaaatagcatttgtgagtaacaggggctgaatcaatgtccgttcttttcaaggaaattactttaccatgacaattatttaacttagaactggagagtgtcagtctccaaaacgggaaacaactgaattgccaataagaattttgttcactttcttggctaaaacatgattttaattaatgagggggaaaattaaatctactgtatcactactccaaacaataagtcatttaaaaaagcatgaattttttcactcagtaaaatatctaacatacataaatcattttgtaatttttaaaaattcattgatttttagtctaataaatagtttacaaatcctactgttaatatttgcctcttaagttgaaatgtaaga

SEQ ID NO: 234027 - DNA, 433 bp, Homo sapiens
tggtttcctgatacctattgatttttttcccaaaaacttaatagttttccaatttgactcaaatagsatttgtgagtaacaggggctgaatcaatgtccgttcttttcaaggaaattactttaccatgacaattatttaacttagaactggagagtgtcagtctccaaaacgggaaacaactgaattgccaataagaattttgttcactttcttggctaaaacatgattttaattaatgagggggaaaattaaatctactgtatcactactccaaacaataagtcatttaaaaaagcatgaattttttcactcagtaaaatatctaacatacataaatcattttgtaatttttaaaaattcattgatttttagtctaataaatagtttacaaatcctactgttaatatttgcctcttaagttgaaatgtaaga

SEQ ID NO: 234028 - DNA, 407 bp, Homo sapiens
agttttccaatttgactcaaatagcatttgtgagtaacaggggctgaatcaatgtccgttcttttcaaggaaattactttaccatgacaattatttaacttagaactggagagtgtcagtctccaaaacgggaaacaactgaattgccaataagaattttgttcactttcttggctaaaacatrattttaattaatgagggggaaaattaaatctactgtatcactactccaaacaataagtcatttaaaaaagcatgaattttttcactcagtaaaatatctaacatacataaatcattttgtaatttttaaaaattcattgatttttagtctaataaatagtttacaaatcctactgttaatatttgcctcttaagttgaaatgtaagagtatattaatgcttta

SEQ ID NO: 234029 - DNA, 631 bp, Homo sapiens
atctactgcttagaaaaaaaaagattccttcaaaatattattgctcattgacaacgcacctgatcacccaagagctgtgatggagatgtacaaggagattaatgttgttttcatgcctgctaacacaacatccattctgcagcccactgatcaaggagtaactttgacttttaagtcttatttaagaaatatatttcataaggctatagctaccatagatagtgattcctctgatggatctaggcaaagtaaattcatcattctagatgycattaagaacattcgtgattcatgggagatcaaagtatcaacatgaataggagtttgaaagatgattccagccctcacagatgactttgagggatttcagacttcaatggaggaaataactgcagatatggtggaaacagtaagagaactagaattagaaggggagtctgaagatgtgactcaattcctgcaatctcataagaaaactttaactaatgagaagttgtttcttatggacgggaaaagaacgtggtttcttgagatggaatctactcctggtgaagatgctatgaacactgtcaaaatgacaacaaaggatttaaaatatgacagaagcttaattgataaagcagggtttgag

SEQ ID NO: 234030 - DNA, 631 bp, Homo sapiens
atctactgcttagaaaaaaaaagattccttcaaaatattattgctcattgacaacgcacctgatcacccaagagctgtgatggagatgtacaaggagattaatgttgttttcatgcctgctaacacaacatccattctgcagcccactgatcaaggagtaactttgacttttaagtcttatttaagaaatatatttcataaggctatagctaccatagatagtgattcctctgatggatctaggcaaagtaaattcatcattctagatgtcattaagaacattygtgattcatgggagatcaaagtatcaacatgaataggagtttgaaagatgattccagccctcacagatgactttgagggatttcagacttcaatggaggaaataactgcagatatggtggaaacagtaagagaactagaattagaaggggagtctgaagatgtgactcaattcctgcaatctcataagaaaactttaactaatgagaagttgtttcttatggacgggaaaagaacgtggtttcttgagatggaatctactcctggtgaagatgctatgaacactgtcaaaatgacaacaaaggatttaaaatatgacagaagcttaattgataaagcagggtttgag

SEQ ID NO: 234031 - DNA, 631 bp, Homo sapiens
atctactgcttagaaaaaaaaagattccttcaaaatattattgctcattgacaacgcacctgatcacccaagagctgtgatggagatgtacaaggagattaatgttgttttcatgcctgctaacacaacatccattctgcagcccactgatcaaggagtaactttgacttttaagtcttatttaagaaatatatttcataaggctatagctaccatagatagtgattcctctgatggatctaggcaaagtaaattcatcattctagatgtcattaagaacattcgtgattcatgggagatcaaagtatcaacatgaataggagtttgaaagatgattccagccctcacagatgactttgagggattycagacttcaatggaggaaataactgcagatatggtggaaacagtaagagaactagaattagaaggggagtctgaagatgtgactcaattcctgcaatctcataagaaaactttaactaatgagaagttgtttcttatggacgggaaaagaacgtggtttcttgagatggaatctactcctggtgaagatgctatgaacactgtcaaaatgacaacaaaggatttaaaatatgacagaagcttaattgataaagcagggtttgag

SEQ ID NO: 234032 - DNA, 631 bp, Homo sapiens
atctactgcttagaaaaaaaaagattccttcaaaatattattgctcattgacaacgcacctgatcacccaagagctgtgatggagatgtacaaggagattaatgttgttttcatgcctgctaacacaacatccattctgcagcccactgatcaaggagtaactttgacttttaagtcttatttaagaaatatatttcataaggctatagctaccatagatagtgattcctctgatggatctaggcaaagtaaattcatcattctagatgtcattaagaacattcgtgattcatgggagatcaaagtatcaacatgaataggagtttgaaagatgattccagccctcacagatgactttgagggatttcagacttcaatggaggaaataactgcagatrtggtggaaacagtaagagaactagaattagaaggggagtctgaagatgtgactcaattcctgcaatctcataagaaaactttaactaatgagaagttgtttcttatggacgggaaaagaacgtggtttcttgagatggaatctactcctggtgaagatgctatgaacactgtcaaaatgacaacaaaggatttaaaatatgacagaagcttaattgataaagcagggtttgag

SEQ ID NO: 234033 - DNA, 336 bp, Homo sapiens
aggtatacaacaagccccaggctgacatccagaccccaggaggacaccataccccaggtgaacagcaggcaacagtttggcaccaaggacctaagtgaaacaaagccttaggtgattaccaggccataggtagtcattagtctccagctggacaatagtccctaggtggatacctaggccccaggtggacactagaccccarattaacacaaaaaccaagtaaaaaatcaagccccaagtggacaaccaggccctaggtaaatacacaaatctcaagctgacaccaggccctatttggacacccaagccctatgtggacttcggaccccaggtgaa

SEQ ID NO: 234034 - DNA, 336 bp, Homo sapiens
aggtatacaacaagccccaggctgacatccagaccccaggaggacaccataccccaggtgaacagcaggcaacagtttggcaccaaggacctaagtgaaacaaagccttaggtgattaccaggccataggtagtcattagtctccagctggacaatagtccctaggtggatacctaggccccaggtggacactagaccccaaattaamacaaaaaccaagtaaaaaatcaagccccaagtggacaaccaggccctaggtaaatacacaaatctcaagctgacaccaggccctatttggacacccaagccctatgtggacttcggaccccaggtgaa

SEQ ID NO: 234035 - DNA, 370 bp, Homo sapiens
aaatcacttaattaaattttaatttgaaaatactcatttcaggtgtaaacatttccattcatacctacattatggtcttaacatgtggcaacataaagtcattaaaattattatttcagcagtacagaactatctaycttaaaatatgactctgtgcctaataaaatttcataggtgacacaatgtcttttctcaaagtaaatcatctctcacctctaccttttatttcctagaaatgaggcatgtttctaagctgatatagtaaacacatttttcctttttttattaaaacagctttgttgaaatatagtttacatactatagaatgtatctgttttaacttaaagttaaaagatttttagtccattta

SEQ ID NO: 234036 - DNA, 489 bp, Homo sapiens
agttagaagttcaaaattaccttttcaaatcacacagtcataattactacctgattagaaaaggtcatttacaatcaactaaatttttaaagttactatttattgacaagcgtataagttcactagaaataaattttcatctctatgaaatattgcaggtgtctctycaaatgatttacagagtaagatgtatctcatacaaactatatctgcagatgattgtcatctaaaactaggctaaagagtctaacatctgttaccccacactttttctaattctttcttaatacttccaattcaccttcttattacatatattttatatatttattaagctattgttcattatgtgtaatatataattaatgcccttaataagtgtgtgtatgtttacacaagttatgttttcctgtgaaatctagtcccagaagtggagttgttgagttaaagggatgtcaggttatttgaaatttgataaacagcactaag

SEQ ID NO: 234037 - DNA, 489 bp, Homo sapiens
agttagaagttcaaaattaccttttcaaatcacacagtcataattactacctgattagaaaaggtcatttacaatcaactaaatttttaaagttactatttattgacaagcgtataagttcactagaaataaattttcatctctatgaaatattgcaggtgtctcttcaaatgatttacagagtaagatgtatctcatacaaactatatctgcagatkattgtcatctaaaactaggctaaagagtctaacatctgttaccccacactttttctaattctttcttaatacttccaattcaccttcttattacatatattttatatatttattaagctattgttcattatgtgtaatatataattaatgcccttaataagtgtgtgtatgtttacacaagttatgttttcctgtgaaatctagtcccagaagtggagttgttgagttaaagggatgtcaggttatttgaaatttgataaacagcactaag

SEQ ID NO: 234038 - DNA, 410 bp, Homo sapiens
ctctagaattttgtctatctttagaacacartgtacagaactcagctttctactaaagagtcaaaggttaaatttttagctaagaaattatgcttcttacatgataaaaatcatacatgccaaaacttaccatactttattaaacaacataatgtaaggtctgattcaacagaaatattggagtggtgattttttaaaatatgtggaagtatatatttgttttcaaaatattggaaataaccatgatggaactataaattcaaacagtttgagctaagcagataaacttgcatgcatgaaaacacattaaacagactcatttggctgggaatattcattgcaactctcaaggctagacgtgtatttgtggctcatctcagtcattgcttccctctcattgtactcccatt

SEQ ID NO: 234039 - DNA, 386 bp, Homo sapiens
aacacaatgtacagaactcarctttctactaaagagtcaaaggttaaatttttagctaagaaattatgcttcttacatgataaaaatcatacatgccaaaacttaccatactttattaaacaacataatgtaaggtctgattcaacagaaatattggagtggtgattttttaaaatatgtggaagtatatatttgttttcaaaatattggaaataaccatgatggaactataaattcaaacagtttgagctaagcagataaacttgcatgcatgaaaacacattaaacagactcatttggctgggaatattcattgcaactctcaaggctagacgtgtatttgtggctcatctcagtcattgcttccctctcattgtactcccatt

SEQ ID NO: 234040 - DNA, 378 bp, Homo sapiens
aatgtacagaactcagctttctactaaagagtcaaaggttaaatttttagctaagaaattatgcttcttacatgataaaaatcatacatgccaaaacttaccatactttattaaacaacataatgtaaggtctgattcaacagaaatattggagtggtgattttttwaaatatgtggaagtatatatttgttttcaaaatattggaaataaccatgatggaactataaattcaaacagtttgagctaagcagataaacttgcatgcatgaaaacacattaaacagactcatttggctgggaatattcattgcaactctcaaggctagacgtgtatttgtggctcatctcagtcattgcttccctctcattgtactccc

SEQ ID NO: 234041 - DNA, 223 bp, Homo sapiens
ctttagaacacaatgtacagaactcagctttctactaaagagtcaaaggttaaatttttagctaagaaattatgcttcttacatgataaaaatcatacatgccaaaacttaccatactttattaaacaacataatgtaaggtctgattcaacagaaatattggagtggtgattttttaaaatatgtggawgtatatatttgttttcaaaatattggaaataac

SEQ ID NO: 234042 - DNA, 396 bp, Homo sapiens
ctatctttagaacacaatgtacagaactcagctttctactaaagagtcaaaggttaaatttttagctaagaaattatgcttcttacatgataaaaatcatacatgccaaaacttaccatactttattaaacaacataatgtaaggtctgattcaacagaaatattggagtggtgattttttaaaatatgtggaagtatatatttgttttcaaaatattggaaataaccatgatggaactataaattcaaacagtttgagctaagcagataaactkgcatgcatgaaaacacattaaacagactcatttggctgggaatattcattgcaactctcaaggctagacgtgtatttgtggctcatctcagtcattgcttccctctcattgtactcccatt

SEQ ID NO: 234043 - DNA, 396 bp, Homo sapiens
ctatctttagaacacaatgtacagaactcagctttctactaaagagtcaaaggttaaatttttagctaagaaattatgcttcttacatgataaaaatcatacatgccaaaacttaccatactttattaaacaacataatgtaaggtctgattcaacagaaatattggagtggtgattttttaaaatatgtggaagtatatatttgttttcaaaatattggaaataaccatgatggaactataaattcaaacagtttgagctaagcagataaacttgcrtgcatgaaaacacattaaacagactcatttggctgggaatattcattgcaactctcaaggctagacgtgtatttgtggctcatctcagtcattgcttccctctcattgtactcccatt

SEQ ID NO: 234044 - DNA, 381 bp, Homo sapiens
aatgtacagaactcagctttctactaaagagtcaaaggttaaatttttagctaagaaattatgcttcttacatgataaaaatcatacatgccaaaacttaccatactttattaaacaacataatgtaaggtctgattcaacagaaatattggagtggtgattttttaaaatatgtggaagtatatatttgttttcaaaatattggaaataaccatgatggaactataaattcaaacagtttgagctaagcagataaacttgcatgcatgaaaacacattaaacagactcatttgkctgggaatattcattgcaactctcaaggctagacgtgtatttgtggctcatctcagtcattgcttccctctcattgtactcccatt

SEQ ID NO: 234045 - DNA, 385 bp, Homo sapiens
acacaatgtacagaactcagctttctactaaagagtcaaaggttaaatttttagctaagaaattatgcttcttacatgataaaaatcatacatgccaaaacttaccatactttattaaacaacataatgtaaggtctgattcaacagaaatattggagtggtgattttttaaaatatgtggaagtatatatttgttttcaaaatattggaaataaccatgatggaactataaattcaaacagtttgagctaagcagataaacttgcatgcatgaaaacacattaaacagactcatttggctgggaatattcattgcaactctcaaggctagacgtgtwtttgtggctcatctcagtcattgcttccctctcattgtactcccatt

SEQ ID NO: 234046 - DNA, 390 bp, Homo sapiens
agtcaaaggttaaatttttagctaagaaattatgcttcttacatgataaaaatcatacatgccaaaacttaccatactttattaaacaacataatgtaaggtctgattcaacagaaatattggagtggtgattttttaaaatatgtggaagtatatatttgttttcaaaatattggaaataaccatgatggaactataaattcaaacagtttgagctaagcagataaacttgcatgcatgaaaacacattaaacagactcatttggctgggaatattcattgcaactctcaaggctagacgtgtatttgtgrctcatctcagtcattgcttccctctcattgtactcccattctatcattaaataaatgtaattcatctctaaataaata

SEQ ID NO: 234047 - DNA, 470 bp, Homo sapiens
cacttcatctcactgaaattaggcttcactgacttagcaaatgtcatgaatgatccaccctacccctacccctacccccatcctaaccaaaggctttcctcaagcaggttgaggcctctgagcctgctcyatgatcccttctctcctgctcttcttgctggcctgcccactctgttccactctctcacctgcttctctggtcaccccttactgctgctgttctcccaggccctttcccattttgaccccatgagctcttccagggccctgatcactctcaggctcggtctctgagccccagacccctatgtctgaggacccactgggtgtttcgcacactgagcatctctatcagagtctatctgatggatgggctctttcattagaatttacaaaaacaaaaggcagccaatgctgccacaaatgcaaaggtcccgcatgtcctcattattgttccttccctcccacag

SEQ ID NO: 234048 - DNA, 470 bp, Homo sapiens
cacttcatctcactgaaattaggcttcactgacttagcaaatgtcatgaatgatccaccctacccctacccctacccccatcctaaccaaaggctttcctcaagcaggttgaggcctctgagcctgctctatgatcccttctctcctgctcttcttgctggcctgcccactctgttccactctctcacctgcttctctggtcaccccttactgctgctgttctcccaggccctttcccattttgaccccatgrgctcttccagggccctgatcactctcaggctcggtctctgagccccagacccctatgtctgaggacccactgggtgtttcgcacactgagcatctctatcagagtctatctgatggatgggctctttcattagaatttacaaaaacaaaaggcagccaatgctgccacaaatgcaaaggtcccgcatgtcctcattattgttccttccctcccacag

SEQ ID NO: 234049 - DNA, 470 bp, Homo sapiens
cacttcatctcactgaaattaggcttcactgacttagcaaatgtcatgaatgatccaccctacccctacccctacccccatcctaaccaaaggctttcctcaagcaggttgaggcctctgagcctgctctatgatcccttctctcctgctcttcttgctggcctgcccactctgttccactctctcacctgcttctctggtcaccccttactgctgctgttctcccaggccctttcccattttgaccccatgagctcttccagggccctgatcactctcaggctcggtctctgagccccagacccctrtgtctgaggacccactgggtgtttcgcacactgagcatctctatcagagtctatctgatggatgggctctttcattagaatttacaaaaacaaaaggcagccaatgctgccacaaatgcaaaggtcccgcatgtcctcattattgttccttccctcccacag

SEQ ID NO: 234050 - DNA, 470 bp, Homo sapiens
cacttcatctcactgaaattaggcttcactgacttagcaaatgtcatgaatgatccaccctacccctacccctacccccatcctaaccaaaggctttcctcaagcaggttgaggcctctgagcctgctctatgatcccttctctcctgctcttcttgctggcctgcccactctgttccactctctcacctgcttctctggtcaccccttactgctgctgttctcccaggccctttcccattttgaccccatgagctcttccagggccctgatcactctcaggctcggtctctgagccccagacccctatgtctgaggacccactgggtgtttcgcacactgagcatctctatcagagtctayctgatggatgggctctttcattagaatttacaaaaacaaaaggcagccaatgctgccacaaatgcaaaggtcccgcatgtcctcattattgttccttccctcccacag

SEQ ID NO: 234051 - DNA, 570 bp, Homo sapiens
aaccaaacattatggaagtgacacctttgcaaaagaaaggaggcccagggtgaaagaaaaaactgaataaatggacaggagaatacagtattagtcagagttccctagagggacagaattaatggaatagatatacayatataaaggggagtttattaagtattaactcacacaatcacaaggtcccacaataggccacctgcaggctgaagagcaaggagagtcagtctgagttccaaaactgaaaaactaggagtctgatgttcgagggcaggaagcatccagcacaggagaaagatataggctgggaggctaggccagtctctcttttcacatttttctgcctgcttatattctagctgtggtggcagctgattagattgtgcccacctagattaagggtaggtctgtcttttccatgccactgactcaaatgttaatctcctttggtgacactctcacagacacacccaggaacaatacttcgtattcttcaatccaatcaaggtgacactcagtatcaaccatcacacatctaccccttatcaaattgaacacatacacatctcc

SEQ ID NO: 234052 - DNA, 401 bp, Homo sapiens
ttttttctctttacctacctgcccttttgaggcaacactttctttccagtctctgtccattgcatgaggtgccttgcaaaaatggagagcagagttacttgtttcagaaattcctttgctgggggtcttcagttgttctttgcrggatcctacaagaaagacatttatctttgaatttggtttttaaaacaagataatcactttgattgtaggtctggctgtggcatctttcacagaaggacagagtgaaaaagcccaggctctcgtcactccaaagtccattgcagagagcaggacagagtgaaaaagcccaggctctcgtcgctccaaagtccattgcagagagcagtacagaatcctatccagactgctgacttcataaggttgtcactcaatgagaa

SEQ ID NO: 234053 - DNA, 197 bp, Homo sapiens
tgtactctttagaagttaagcagtgaacatatattgatagtattattttatcagtagtacagtattcttgggactctggctactaattattgggtccattgcaagacaactttttactttatttcccaattaccattcaacatcgctttccatgakatatgtctacttcaagtgagatgcattgcctggagcccata

SEQ ID NO: 234054 - DNA, 197 bp, Homo sapiens
tgtactctttagaagttaagcagtgaacatatattgatagtattattttatcagtagtacagtattcttgggactctggctactaattattgggtccattgcaagacaactttttactttatttcccaattaccattcaacatcgctttccatgagatatgtctacttcaagtkagatgcattgcctggagcccata

SEQ ID NO: 234055 - DNA, 616 bp, Homo sapiens
ttatgtcaccagagaataaacatttgcatttaaatgtattccaattctgtgcccaccaggcaaccacttgatttatgacttaaggttaagtctgggaagacttgcttctgaaagggaagggtcctgattctagatagctacatacctccaatggtaagtgaattggattctggcttacctaccagactcgagcttagttaatgtaagtcagtatccaatgattgctatgtcttgataatagttctggagaagtagatttgaaccagagtggtgaattaaacaatggcgttctctccggaccagatattcttgctctgccattaacttgcagtataattttggtcaagttactcttccccagaagtctggttacttataaaatgaagacattaaacagaggaarctctaatattctttctacctctgtatcattatagttcacgaattaccaaccagagtgacctcagcatggaacttcccaactgggaagctatctggaatcacagccaatcagcctctcaacatgtctgatcatggcaacactaaagtccacagaaagagtacccacgaacacataagaagttagttttctagagcttaacatgcagtgaagcag

SEQ ID NO: 234056 - DNA, 530 bp, Homo sapiens
tattttaggggctgccgagctccaggtggcctgattgcttgtctcasgctccccccaccactggaactccatgcttatagtctcagctaatgtggaacacggtgggtgtctatcctgaaggtgggttccttctgggatgccacctgtgcaaccaggtgagtcccgtctgggtttgatgtaaattctacagtgtcacacagtttgggttataatacaggctgtactgggaagatgaaaaactaacataggccaacggttgttgagagagagaaggcactggtttcctgattccttcattatcccagggacgtgtgtgaggccagggcaccattccagtgtttggaccccacactctaggggattccattttacacagggcatttaaaagaaagtacccatgtcagtggaggaaaacacactcattatctggcagctggcagtctggatttgggctgccaactgtaggtaggagttgtctgggaatgttagctgcccagacctcgagacatggggctgaaggaagttataca

SEQ ID NO: 234057 - DNA, 529 bp, Homo sapiens
gacgcatctattttaggggctgccgagctccaggtggcctgattgcttgtctcaggctccccccaccactggaactccatgcwtatagtctcagctaatgtggaacacggtgggtgtctatcctgaaggtgggttccttctgggatgccacctgtgcaaccaggtgagtcccgtctgggtttgatgtaaattctacagtgtcacacagtttgggttataatacaggctgtactgggaagatgaaaaactaacataggccaacggttgttgagagagagaaggcactggtttcctgattccttcattatcccagggacgtgtgtgaggccagggcaccattccagtgtttggaccccacactctaggggattccattttacacagggcatttaaaagaaagtacccatgtcagtggaggaaaacacactcattatctggcagctggcagtctggatttgggctgccaactgtaggtaggagttgtctgggaatgttagctgcccagacctcgagacatggggctgaagga

SEQ ID NO: 234058 - DNA, 543 bp, Homo sapiens
cagatgacgcatctattttaggggctgccgagctccaggtggcctgattgcttgtctcaggctccccccaccactggaactccatgcttatagtctcagctaatgtggaacacggtgggtgtctatcctgaaggtgggttccttctgggatgccacctgtgcaaccaggtgagtcccgtctgggtttgatgtaaattctacagtgtcacacagtttgggttataatacaggctgtactgggaagatgaaaaactaacataggccaacggttgttgagagagagaaggcactggtttcctgattccttcattakcccagggacgtgtgtgaggccagggcaccattccagtgtttggaccccacactctaggggattccattttacacagggcatttaaaagaaagtacccatgtcagtggaggaaaacacactcattatctggcagctggcagtctggatttgggctgccaactgtaggtaggagttgtctgggaatgttagctgcccagacctcgagacatggggctgaaggaagttataca

SEQ ID NO: 234059 - DNA, 530 bp, Homo sapiens
tattttaggggctgccgagctccaggtggcctgattgcttgtctcaggctccccccaccactggaactccatgcttatagtctcagctaatgtggaacacggtgggtgtctatcctgaaggtgggttccttctgggatgccacctgtgcaaccaggtgagtcccgtctgggtttgatgtaaattctacagtgtcacacagtttgggttataatacaggctgtactgggaagatgaaaaactaacataggccaacggttgttgagagagagaaggcactggtttcctgattccttcattatcccagggasgtgtgtgaggccagggcaccattccagtgtttggaccccacactctaggggattccattttacacagggcatttaaaagaaagtacccatgtcagtggaggaaaacacactcattatctggcagctggcagtctggatttgggctgccaactgtaggtaggagttgtctgggaatgttagctgcccagacctcgagacatggggctgaaggaagttataca

SEQ ID NO: 234060 - DNA, 528 bp, Homo sapiens
acgcatctattttaggggctgccgagctccaggtggcctgattgcttgtctcaggctccccccaccactggaactccatgcttatagtctcagctaatgtggaacacggtgggtgtctatcctgaaggtgggttccttctgggatgccacctgtgcaaccaggtgagtcccgtctgggtttgatgtaaattctacagtgtcacacagtttgggttataatacaggctgtactgggaagatgaaaaactaacataggccaacggttgttgagagagagaaggcactggtttcctgattccttcattatcccagggacgtgtgtgaggccagggcaccattccagtgtttggaccccacactctaggggattccattttacacagggcatttaaaagaaagtacccatgtcagtggaggaaaacwcactcattatctggcagctggcagtctggatttgggctgccaactgtaggtaggagttgtctgggaatgttagctgcccagacctcgagacatggggctgaagga

SEQ ID NO: 234061 - DNA, 514 bp, Homo sapiens
aatgattttctttttatatgtgaaggatacccagtggcctctgagtaacaggaaacctagaaatctattgggtttcttaccttgactgccgtagactgggttatgactttcagcggttggccctgtgcactggcacctggatcgtggggccatattgtcagcagtccatcactgcagccgctggaaagcagcctgccatccggtgaccacttcagagcacacacagcttgcttgtggcgaagtgttccmacatgatgctgggctacccgaacatcgtgatgataaacacgccccagtcttgacccactgcgagtttacataacaaaaaaattaagccctgttgctacataaacatttgaaaacatggaggaaagcatagttcaaagtaaaacttctgaaagacccctaggacagattcaaaacacaggtggagattccttgggttaataaggatggagtgttctgcctggaggattcttttcacaagtgaaattgatttgtctggcagagtttg

SEQ ID NO: 234062 - DNA, 600 bp, Homo sapiens
tatctaacttaagtctaccttaaccttaagaactacaatatgaaaatgaatggctatgattaaaagcaatatatatttagaccagttatgtaggctcataggaaaaagtcccttaatttttctggttaaaaagaagcagtkaaactaaatcactagttctcaaagggatgtatcatcagcatcacttgggaaatgagaaatgccaattatcagcccctcaagacctaatgaatctgaagtccctcaagtgaagccagcaatctgcattttgaggagctctccaggtgattctgatacatgttctagtttgagaactactgaacaggataatctatgaggttccttctgctctaatttctgtgggtctatgaattggaaatgtgtcccagagagcttaacatattccatagtatagatactgacagcaataaatacttgatttcagcaaaatatccctttagtacctattacttagcacagagaaaccttttgcttgaagggattttcacattttatctgaacaatttagtgcatcccatgcagaaggcacacatgatacatgtggccaccaagacacttacatgaccagcagatctgaat

SEQ ID NO: 234063 - DNA, 600 bp, Homo sapiens
tatctaacttaagtctaccttaaccttaagaactacaatatgaaaatgaatggctatgattaaaagcaatatatatttagaccagttatgtaggctcataggaaaaagtcccttaatttttctggttaaaaagaagcagttaaactaaatcactagttctcaaagggatgtatcatcagcatcacttgggaaatgagaaatgccaattatcagcccctcaagacctaatgaatctgaagtccctcaagtgaagccagcaatctgcattttgaggagctctccaggtgattctgatacatgttctagtttgagaactactgaacaggataatctatgaggttccttctgctctaatttctgtgggtctatgaattggaaatgtgycccagagagcttaacatattccatagtatagatactgacagcaataaatacttgatttcagcaaaatatccctttagtacctattacttagcacagagaaaccttttgcttgaagggattttcacattttatctgaacaatttagtgcatcccatgcagaaggcacacatgatacatgtggccaccaagacacttacatgaccagcagatctgaat

SEQ ID NO: 234064 - DNA, 467 bp, Homo sapiens
aataccaattctactcaaactatttcaaaaaattgaagaggagggaacatttttttttttttttttttgagacagggtttcactctgtcgcccaggctggggtgcagttgtgcactcatggctcaatgcagcctctactttccaggctcaagcaatccttccacctcagcctccttaatagctgggactacaggcacatgccactacacctggctaatttttctactttctatagaratggggtttctccaggttgtctaggctggtcttgaactgagctcaggcaatctgcccacctcgacctcccaaagtgctgggattacaggcacgcaccaccgtgcctggcccacttctaaactcattctacaaggccagcattaccctgataccaaaaccggacaaggacataacagaaacagaaaacaacaggccaatatccctgatgaacacagaggcagaatccacaa

SEQ ID NO: 234065 - DNA, 574 bp, Homo sapiens
ttatatgactgtggtctcaaagttaacctctcaactctgacctgcatatcccccgttcttctaaaatccctcactgaagaactaaatatagatcataaaccattaatatcttgccaggtgcggtggttcacacctataatcccagcactttgggaggccaaggagggtggatttyttaagcccaagagttcgagaccagcctgggcaacatggtgaaactctgtctctaccaaaaaaaaaaaaaagaaaaaaaaagaaaagccacacacacacacacacacacacacacacacacacacacacacacacttttagctgggcatggtggtatgcacttggaaggcagaagtgggaaaatcacctgagcccagggaagttgaggctgcactgagccatgatcatgtcactgcactccagcctgggtgacaaagtaagaccctgtctcaaaacaaaacaaaacaaaacaaaacaaaacaagaaaaccccattaatatccacccctccacctcaagtttcaagaagaaaattaaaacagtacccaggtaaaaagggaaaggaaccaaggaaaatccac

SEQ ID NO: 234066 - DNA, 463 bp, Homo sapiens
gttaagttttaacttctcagggataactgtcaagtagtacaaatgccagttatatgttaaatgtatgtttagttttataagaaactgccaagaatattttccacagtggctctactatttcatatctcaccagcaacgtatgagtggtccacttatccaatttctcttgcatcctagcaaaacaactctaaaatttatcatttggaactgycttttctttctgcaatggtattacgtgtccttttagaattgaaatcaagggtagaaaggttagatttagtccagcctcccatttcatattagctgtagtaacaatcccctttacaacatttgatcattattgccacttaacacttccaggattagggagtagtatctttctttctgagggagtttatatcagtttgggtaacagattctcattgttcattttactgctttcctatttcttcctcatcttcca

SEQ ID NO: 234067 - DNA, 466 bp, Homo sapiens
tgtctctataaaattaaaaaaaaaaaaaaaaagaggaaactgtcacttccgtcccccacccccgcccccgcttctttcagacggatgtaagattagctgtgtcaagcgatcttgagacaggagactactacataaagttatgacttctttccaaaatgaggaatctttttcgactacagcccattgtatcacatacatagggtataaaagaacacttgtccttcgtttgatgggtgtgcgtgtgcaaacctacaaacacattgttaattagggccgaaagatgatgttgttaaggtcggtgagtaggatgatgtgcttttctaggtatgcatagtcagtgaagatagccttttttgggtaactactgtaaattgaagttaaggacattcatttgacagtaaatgkcccactaggaaaatgaaaacattttagtatcaaatatattcattgctactgcagaagagtt

SEQ ID NO: 234068 - DNA, 601 bp, Homo sapiens
tgttgtgctactcacgggaatctggatgtaggtgggggaatcttacccttaacacttaatgacttaggctaggtggtgcttttatatttttctgcttttcacatatcttctgttggaatccctatgttaataatccatgtttatttattcatagtgcactgagcagctttctactctcccacatagcttctgaacattattaattaatttgttacaggctggaaagaattaaggctttctgggacaagtaatcacatgaataaagttcaaaccttttacaaaccacagttctgattttttagactatgagggtttgagagtgatttacttctgaaaaaatgtaaatggcttaaaaatattgttcaccactggaaagatatttttttcagtttgttattcttgctttctactttatgaaatataagtggttgagatatttagaaatgtggctgctggataattaagctgtgactataatgtaggctagagtaagttgattattttgtagctstctaattggtcttcacatttccttaacacatgtccagacacaaactgcctggccaaacagcaccgtggttttctgtcaactgagaggtag

SEQ ID NO: 234069 - DNA, 588 bp, Homo sapiens
tcaattgcacacactatgtactaatagtgaacaatgtggaaataaacattttaaaattccatgtataatagtatcaaaaataaaatacctgtgaataaatttaacaaaacaagtgtaaaacttgtatcctgaaactaaaacaaaaaatgttgatggaatttaaagacataaaaaaatggaaagctatcccatgttcatgaattggaagacttaatattgttaagataacattaatccccaaattgatctacagattgcatatggtctctattaagatcgcagttaagttatttatttttttggtcttttttagtttgttttgttttccagaaattgacaagttgattctaaaactcatatgaaaatgcaagcaatccaaaagccaaaaagttcttgaaagagaaaaacaaatttggaaaagttatattctcaatttcagatatgactataaagttacagtaatcaagaatgtgtgattctgatataaakatgtatagatagatagatgtagatatagataaatggaataaaacagaaagtctagaaataaaaccttatgttataggttgactgatttttgacaagggt

SEQ ID NO: 234070 - DNA, 629 bp, Homo sapiens
ttggcctctgcaccatggtctaggagctcctgcaggatagcaacagcaccatcacgggcagctgtgagcacgggagaacagttgttgtagatgctaccaccaggagaggcaccagcttccaaaagcacacgtacacagtccagatggccatgactgacagcagtgaaaagtggcgtctgtgccttgacatccaagctgtcaacatcagcaccatgggctaagaggacttgcaaacagctcaagtggccataagaagcagccaagcgcaagggtgtcccaggaacaccccagccactcctgctgttgatgaaacgtttgtaacgctcctggcgcaaaagctggtccaaagtataggagtcgttgtcatacactgcttgattgagagcctgcttctcctctgtgtcagtgtcctcctcctccttgtcrggctgcaggagggagaagatcttggtgatgtccatgaggttcatcttggctaattggagaactattctcattatgagcacaaggaaatgccagatctgtgggtgacaaacaagtgggagagaatgagggtacccatcaaaagcctgaccatgcacgctccttgaaatctccctccatttcaccatcaggctactcattcatgg

SEQ ID NO: 234071 - DNA, 578 bp, Homo sapiens
ttgtcttacctcactttgctgtagtttattaatcaaagagttactatgtgcctgttatgtgcacgtagctccttcctgatcctaaagatgtaggagttttaaacctttttttttgtgatattggttcctgtgacaaactagcraagtctgtaaacacctttcagaatggtttttgctacataaaacacataaaattaaaggaaaccaattatattaaaatgtgactgtcaaaatatttttaaatgcatgatatagtaagagatgttctttagtaacacattaaataaaaaggtctagtaataatttctaagtggtaataaatgacatttcaagatctctgccacaactgtaatatgatatgaaatatctgtggtttcttctggtaaccaaattacatgaactggttatgctactgccatttgatacctgcattcatccttgaaggaaatagtacattttagttagaggttagggggaaaaaaggtaattgtctattcatccaagtttctggaccccttgaattctatctaaggccctcttggtgtctgtcaatccaggttaagtactcccacaggaaa

SEQ ID NO: 234072 - DNA, 578 bp, Homo sapiens
ttgtcttacctcactttgctgtagtttattaatcaaagagttactatgtgcctgttatgtgcacgtagctccttcctgatcctaaagatgtaggagttttaaacctttttttttgtgatattggttcctgtgacaaactagcaaagtctgtaaacacctttcagaatggtttttgctacataaaacacataaaattaaaggaaaccaattatattaaaatgtgactgtcaaaatatttttaaatgcatgatatagtaagagatgttctttagtaacacattaaataaaaaggtctagtaataatttctaagtggtaataaatgacatttcaagatctctgccacaactgtaatatgatatgaaatatctgtggtttcttctggtaaccaaattacatgaactggttatgctactgccatttgatacctgcattcatccttgaaggaaatagtamattttagttagaggttagggggaaaaaaggtaattgtctattcatccaagtttctggaccccttgaattctatctaaggccctcttggtgtctgtcaatccaggttaagtactcccacaggaaa

SEQ ID NO: 234073 - DNA, 626 bp, Homo sapiens
catacctaagactggctgatttcagagcccaagttcttcaccactattctgccacctgtccacttcacctaaattcctgctcatccttcagtgcactttcagattccaccctctttctgaagaaacttagctcgctcccctcccacactcttctgtttatcttgtcaacttctgttacacttctaggctacaccataatatttagtactaactagctgctttcttgtttggtggatggtgtgtttgtttttgtgtgtgtgtgtgtgtgtgtgwgagagagagagagagagagagagggagagacagagccacaaactgtgggaatcttgagggcaaggggctgtttcttttccctctgcccacagtagaacctagtctggcctgggcagagagcggtaacccatgaatagaaccctactattttagatacagtggtcagggaaggcctctctgagtttgtgatgtgtgcccagagatctaaatgaagagcagaaatgagccatgtacatgctcttctgcacatgttgctcccaatacacaagtctaaaaatagctacatgggctgagaggtcacttttcattagattttttgccaagctcagggtttttgaactctggatttggtg

SEQ ID NO: 234074 - DNA, 525 bp, Homo sapiens
gaaagtaatcaacactttgcagaataatccccgctttttcactttacttattcatggtagacagtgaggttctaagaaaaacttagaaacttagatagttagaggttaataacacttgctctgtgctgatcctggctaaaattgtgacttgggacagttattacttgtacttatctatcaaattttggttcccctcctctttaaaattgtatctagaaatgtcatagcattggagtgtgtacaagtttctggtgagggccaagaaagaaattgtgattgtcttcattttgcctggtaaatcaagtggatattttctcccaatccttttaatacttattcaaatcaatctctctttctctcacatgcacatacactgtagacagatacttagatatttgctatgtgtgtgtatatatatatatakagagagagagagcatgctatatatacacaccaaagtatgtatacatttctatatatgtatatttattttagtatgtatttttgctatatatattgacacaa

SEQ ID NO: 234075 - DNA, 632 bp, Homo sapiens
aagttgtttccactcttaatttttcaatttcttttttgccctctcttggccaaatttcaaagcctaactcaacattttagaaataatatcataaaatagttacatcacactaagtctccatattccaatgctccttgaaatggagaatctaattctctaaataatttaaacaataaaatattatacttttgacatcgatggaaagataggagaagttgcttgtgtagtaaagtagtaaacaacaagtttttgaccagttaggttgatttaaatatagatactaacccaagtttctacacctgtgctaaaacctagtgacaggccacaaatggtttctaaayggataattcggtgaattcagccaaattcattctacaaaatgggttattagtagtagtagcaaaagacagggtttgactggccaactaggacatatatgaagaccccaagatagacagtatcaaagacaaattatatagagtaagatattgcttccattatcagtccatggaatgggtcatccaggatagaagaagaaacagatctgttgccaagtatgtgaagccagagccatgaagaaatgagtggtaggtggttagaatagaccagttctgagaaccacagggagcagc

SEQ ID NO: 234076 - DNA, 517 bp, Homo sapiens
tattattatatgtatgtataaatgcatatttatatgttacttctctatgtttttacacaaatgcactataccctataatccccaagtgkttttttttttgtttgcttgcttgtttgttttgtttttcctgagaccaagtctcactctgccacacaggctggagtgcaatggtgcaatctcggctcactgcaacctccaccacctgggctcaagcaaatctactgccttagcctcctgagtagctgggaatacaggtgtgtgccaccatgcccagctaatttttgtatttttagtagagattgattttgctatgttgcccaggttggtctcgactcctgggctcaagtgatccacctgcctcgccctcccaaagtgctgggatttcaggtgtgcttttatattttggaggtatttttttcaaaagtaaactaaatagttgttgattttactggggagccaaattattccattagtgaatacacccacaattatttaagcagccttctattttggatac

SEQ ID NO: 234077 - DNA, 517 bp, Homo sapiens
tattattatatgtatgtataaatgcatatttatatgttacttctctatgtttttacacaaatgcactataccctataatccccaagtgtttttttttttgtttgcttgcttgtttgttttgtttttcctgagaccaagtctcactctgccacacaggctggagtgcaatgktgcaatctcggctcactgcaacctccaccacctgggctcaagcaaatctactgccttagcctcctgagtagctgggaatacaggtgtgtgccaccatgcccagctaatttttgtatttttagtagagattgattttgctatgttgcccaggttggtctcgactcctgggctcaagtgatccacctgcctcgccctcccaaagtgctgggatttcaggtgtgcttttatattttggaggtatttttttcaaaagtaaactaaatagttgttgattttactggggagccaaattattccattagtgaatacacccacaattatttaagcagccttctattttggatac

SEQ ID NO: 234078 - DNA, 536 bp, Homo sapiens
ctttgaaccattgtacattatatttacctctattcatgtgccagtatatactgtttatataatgatgctttgcagtctattttaatatattttactgtaaattargattcctattacacttttaaaaaatatttttttctttgaacttttttatatttctatgtgagctagacagtgtttttgtttcaaaatattatactttatatttatttagacaccataaaaattgtagtttaccttaggggaactgacatatatgtaaagtagtatcaaggcacatattatgctttcccatttgtgcaggtttaccttgaaactctttaagactatttcatgattttcttaatatagattaatttatatcctacaactactttccccaagaaatatttttattcacattgtaaaatactttagcatctcctaacagttatttaaatatatgaattaaatttctacatgttaattgaatatcctgccatcttattgaagttcttggtattttgatgttttccaggaataaaattatatcatac

SEQ ID NO: 234079 - DNA, 536 bp, Homo sapiens
ctttgaaccattgtacattatatttacctctattcatgtgccagtatatactgtttatataatgatgctttgcagtctattttaatatattttactgtaaattaggattcctattacacttttaaaaaatatttttttctttgaacttttttatatttctatgtgagctagacagtgtttttgtttcaaaatattatactttatatttatttagacaccataaaaattgtagtttaccttargggaactgacatatatgtaaagtagtatcaaggcacatattatgctttcccatttgtgcaggtttaccttgaaactctttaagactatttcatgattttcttaatatagattaatttatatcctacaactactttccccaagaaatatttttattcacattgtaaaatactttagcatctcctaacagttatttaaatatatgaattaaatttctacatgttaattgaatatcctgccatcttattgaagttcttggtattttgatgttttccaggaataaaattatatcatac

SEQ ID NO: 234080 - DNA, 486 bp, Homo sapiens
agctcagtgtgttttaaggattgacagatacaatcatctgaaattttcttcccttaaattagtgtttttmaccagatacacatctttcatattggataatatattctttaagttcaagatagttggacaaaaagaaaagaaaaaaaaggcaaccaacacattttaaagtaataatgcaatattatagctatcacacttcctggagaattcagcctactttatgggcacaatttagcacaaacccataagaaagctaacaaagctcaaaaccacttaacaatagcctggagaggtaaaggtcaaaaatgatcattgccaggcccaagatacagcagacctacaaaaaaaagcacagcacaggaaaatctggaaacttgtgctctaattacagttatttcagtaatcattagtgtgatctgagtgaactcaatctgccctactttttcaattataaaatcctatatcatcctctcagtagaataaaat

SEQ ID NO: 234081 - DNA, 590 bp, Homo sapiens
cttattcggtatcacaagaacagaacaggaaggaccaactcccatgattcaattacctcccccatgggtcccaatggaattctgggagatacaattcaagttgagattttgatgggaacacagccaaaccatatcaccctggtaatacatatcaccaaatacctgaggaacatgtgtagtaatggactctaatggtgttaaaacaaggagggtgtaatataacactgaaacaagcaaattcattgatacatgtgtatttctcagtgatttctgtttaatgtattattttgtatagctgaaggtgcctctaatcacttgtttgtttgactgaaacttttatgcattgctggcctacatttagagaattttgaatgccattgcttagctggcatgacaagaaggagagaattgaaaatgttagataggaaagttggagtggatttatcatatgtgacatacatacccacttmttccccaactacgtaccataacaaggtacaaaagatacttcatttactaagagattgagaaatacactagagggcaacaactcctttatatttcagcaacaatataggataacctggctt

SEQ ID NO: 234082 - DNA, 597 bp, Homo sapiens
aagccaggtttaagttaaggcaaagaggcatgaggaaagaataaactggtatagtgtttaaaagatcatcaagaatcatatctgtcggtggctcaggcctgtaatcccagcactttgggaggctgaggtgggcaaatcatgaggttaggagtttgagaccagcctggccaacatggtgaaaccccatctctactaaaaatacaaaaatagctgggcatggtggtgggcacctgtaattccagctactcaggaggctgaggcaggagaatagtttgaacccagaaggcagaggttgcagtragcttagattgcaccactgcactgcagcatgggcaacaaagtgaggctctgtctcaaaataaaaaataaaaataaaaatcatatccatgatgtaatgtgtactgcaatcttctgaaactaatggtttttatattggaaagaaccataaagtttgggataacaatccatttgaagttggattatttcaaggaaaggatgtatcgtgataaccctttactacaaatatcttgataactccctcccatactctgttgtagaaactgctggtttaatgacagcttgagatgcacactgtca

SEQ ID NO: 234083 - DNA, 619 bp, Homo sapiens
ttaatgacagcttgagatgcacactgtcagccagaatttatcattcatttagtcattcaacaaacaagtagtggtcattttctattgccagtcactcttctaggctttggggattcatcaataaaaactaaaatgaataaaaccaaaagtcaaagatcctggtcttcatgaagattatattgcaggtcccatgatagatggttagttaagagagatgtacataagttttaaccatattgtgtcatctctgtaatataaatgcagcaaggtaattttttaaaaatgtatttggagwgtggggcccagatggccaacttagatgcagtgtgattggaggctctcaccgaaaagaaccaaaacagtgtgtgaatcctgcaccagcaaccaagataaccaggttctgtcatcagaactgattaggtggctggtgtgacttaccgtgaggagcaggatggtgggtcagcccacctgtaagccacacagggcaggggagcccatacctccagacaagggaggcggtaagtgagcatgctacccagcctggaaaaccgtgcttcttccatggaactgtgcaacccatggatcagaagatcccacagatgaacccatgccactgggg

SEQ ID NO: 234084 - DNA, 451 bp, Homo sapiens
cctcagtttccatggtaccttctttcccactgagagcttcgagccctccctccatcagaagcctcctctgttaggctgtctgtaccatagagggcaatgaggcaggcctacagacctccccagaggagttttcacatgcagatataacttgtggaaaggacagaccagcactggacaagcctgtgaaatcaaccaaccaagaaatgaataatggatgctaattaatattacatgtttagcctargagaacaggagggtggtggtagcgctgtgggttcccttttgttccatccaacatgaaaggcttcaaggaggaggtggggttttgaggagtttctctattcttaccacatctctggttaaaaagaaaggacatggatttttttcccgaattttggcagagcaggactctgaagcccagagagggaaagtgactcattcaaggtcacac

SEQ ID NO: 234085 - DNA, 511 bp, Homo sapiens
ttttggggaacaagatgttttaggcaagcacaccttgtatatttcctactcaggcctggaatcagaatatttttatccccagagttccctggttcgttttcatgatgaatgaaatttggagacgccagtctgggtgccaagaacactttttgcttctgggcatttttagtgagcaccaccagcacctgcatttattcaaaacacaaagatatcatgagatmgtactgacattccccgttcaaacttacctttatatggattttatttctttggttttataatggtatctctctttttacactaaaaatctgacaccttagcaatatacacataattaatgaacttgcttattttttatataagacttttaaaatgtaataagactttcaaacaaaatttaagattgctttgcatcactacttgtgctttgaatgtgttgataaaggatagtcagtgaaataattctatttgctatgtaatgacctcactttgttttcaattatcatttatc

SEQ ID NO: 234086 - DNA, 603 bp, Homo sapiens
tggactcataaagcagaaatgcttaccttgcttttatgtcactaacaaacaattgtgcctagtcattgaattctaatgcatttaagccatcttgagagtagagcccctagggaaaactacaaatggaaaattcattgatttttgattttgctttcctatggatcaaatttaatactttcttgtaaatctctccctttgcagatcatatgtgataaatagttatccaactttctagatgtccacccagagctgcttccatatgaagaggtggaaacggattctgtgcatgatactggttaggattgggaactgttttttttaaaggagatttttaaaatttgttttccttgtacacatagccataatattgtgttgctaactgccctctgggaayaaagtcatgtcaatcacaaatatattgcctaaagtgggaggcttattactctgctgtgaattccatctcctattatgttttaaagatgctacaaacttgagacattactatgtagatgacattcccagcaaatccccaaacaacacttaatgagatttcaaataccaggatcatacaacagtaaaagattaagggaaataaagaaaagc

SEQ ID NO: 234087 - DNA, 333 bp, Homo sapiens
  misc_feature (1)...(333): n = A,T,C or G
atttaagaaatgtgtacacacttgaggagacttaagaagtctctgattaaaacactagaaaagaaaagcagcgaaaagccaaataactattactcaacaataacaacatttgttactattatattaatattaaacacactattaaacaacaacatttcagttactcactgagcccaaagtcatttttcatgaaccattcacaacactgataacctattgaaaaatgattgaaaacaaaaaagcttattgctttccaagtccttttaaagccttctcttgtgtcatttcatataatccttataacraatctatggagtatatactgactntacc

SEQ ID NO: 234088 - DNA, 514 bp, Homo sapiens
ccaccaccctgggacttggcggtggagctgactgactttaacctgctgggctatcctggaagctccagctctggccttggctccctatctgtcacctgaggactatggactagatctgccacctccctccatcctccaataagaatttatccacaacattttcatggagaccctgtgtcctgagcagggaaaagaccaggcctttggttctaggtctctatctaaatgtagataatagtaatatttatatacagacacatttccaragaagacacacatgcagccaataattatatgggaaaaaaagctcaacatcactaatcattagagaaatgcaaatcaaaacacaatgagataccatctcactcaatgagataccaatcagaatggccattattaaaaaagttagaaagcaacagatgctggcaaggttgtggaaaaaaaggaacacttttacactgttagtgagagtgtatattcgttcaacaattgtgaacgacagtgtggtgattcc

SEQ ID NO: 234089 - DNA, 485 bp, Homo sapiens
gggacttggcggtggagctgactgactttaacctgctgggctatcctggaagctccagctctggccttggctccctatctgtcacctgaggactatggactagatctgccacctccctccatcctccaataagaatttatccacaacattttcatggagaccctgtgtcctgagcagggaaaagaccaggcctttggttctaggtctctatctaaatgtagataatagtaatatttatatacagacacatttccagagaagacacacatgcagccaataattatatgggaaaaaaagctcaacatcactaatcattagagaaatgcaaatcaaaacacaatgagataccatctcactcaatgagataccaatcagaatggccattattaaaaaagttagaaagcaacagatgctggcaaggttgtggaaaaaaaggaacacttttacactgttagtgrgagtgtatattcgttcaacaattgtga

SEQ ID NO: 234090 - DNA, 740 bp, Homo sapiens
atgggacatttgccaaaattgaccatatagtatcctgtagagcagccttaacaattttcaaaggattgaaataattcagagtatgttctctgaccacagtgcaattaagctagaaatcaataacgaaaagataattgaaaatctccagctgattattaattaagccacacaccacacacttctaagtaacctgtggttcaaaaaggaaatcacacgggaaacttggaaattagaaaatattttaaacgataatgaaggtacaccatatcatactagtatgttaaagtagtgcttagagagaaatttatagccttatatataaaaaagaagaaaggctaaaaataaatatcttaagctttcatttcaagaagcaagaaaaagaaaaccaagccaacttcaaaaatataaaaggaaagaaatgatgaccaatgcaaaaataaatgccatagaaagcaagcatgcaatagagaaaaacaagaaccccaaaagtagattatttgagaagatcaatacaattgacagactcctaataaaactcatcaagaacaaaaaagagaactcattatcaacaacagaaatgaaaaaggaaataggaacaactctacagatgtttcaaacattagatagataataagatattatgagagtatgwctgctaaagattgtacaccgagaatatataatgattttttttttttgagatggagtcttgctctgttgctcaggttggagtgcagtga

SEQ ID NO: 234091 - DNA, 527 bp, Homo sapiens
acaggcatacgccaccatgcctggtgaatttttgtgtttttagtagagacaggatttcactagattggctaagctggtcttgaactcctgacctcaggtgatccacccrccttgacctctgaaagtgctgggattacaggtgtgagccaccacactgggccttattttcctttttcgcaattgttttggctactctagtacctttgtcttttcacatcaattttattttatttatttatttttgagactgggtcttaccttgtcacccgggctgaagtgcaatggcgtgatcttggctcactgcaacttctgcctcccggattcaagcgattctcctgcctaagcctcctgagtagatgggattacaggcacacacagccatgcccggctaaatttggaataatcttatctatatctataaaaagtctcactgggcttttgatgggaattgtgttaagcctgtatgtaaatccacttagggagaaatggcatctttactattttgagtcttccaatccatgaacatg

SEQ ID NO: 234092 - DNA, 562 bp, Homo sapiens
aaaccctgatagcctgggcactccaagggcccgtctggccacctctacccagaaggtgaattctccaacagagtgagtttccatgtggaaggatgacagtgaaagtgcactgagccccgaggtgtgctgggcaccacacgcattccctcctttaactgtgcagcaacagtgggattcttcccattctagaygaggaaacaaagctggagatgccacgtcactgtgcagaaggccccacggtgagccagtgtggggcggggtcagagctcagcagtctctgcctcctcccatgctgcctctccacactgggtcacctttggggacagtgttggtctcaggtcattgcttcggtactgtcagttgactttgggtgcacgtgcacacacatgttcacacactcacactcacacatgtgcacacacacattctcacactcatgggaacacacatgccttcacatacactcacacacacactcgtgcccgtacatggacgcccacgctcgcgtaggcaggtgctctgctgggccctctccacggtttatgactgtctgggagacgac

SEQ ID NO: 234093 - DNA, 567 bp, Homo sapiens
aaaccctgatagcctgggcactccaagggcccgtctggccacctctacccagaaggtgaattctccaacagagtgagtttccatgtggaaggatgacagtgaaagtgcactgagccccgaggtgtgctgggcaccacacgcattccctcctttaactgtgcagcaacagtgggattcttcccattctagatgaggaaacaaagctggagatgccacgtcactgtgcagaaggccccacggtgagccagtgtggggcggggtcagagctcagcagtctctgcctcctcccatgctgcctctccacactgggtcacctttggggacagtgttggtctcaggtcattgcttcggtactgtcagttgactttgggtgcacgtgcacacacatgttcacacactcacactcacacatgtgcacacacacattctcacactcatgggaacacacatgccttcacatacactcacacacacactcgtgccygtacatggacgcccacgctcgcgtaggcaggtgctctgctgggccctctccacggtttatgactgtctgggagacgacaaggc

SEQ ID NO: 234094 - DNA, 553 bp, Homo sapiens
agggaaactataatttctctaacccgttgtcttcttatgttgaacaaagatatcattagttctatttttaatcagcaaatgctatatttccaaatataaatataaagaggctgtgccagctactagcccacttggggaagaacccaggagcctcctgcttgctggctgggtctgctccgggatctctagtgaggcacagtggcctctgcattgggtctggacatggcacctccttctcaggtatccaggagctgaaaagacaaattacctgcactcccggcccccagaagtacagaaaagggacagggtggccaccccattcagaaagggggagagcaggggcccacagcactcaccagtcggctaggtaaacatttccaggcctgactctcctgctgggtggggaatgttctttaatctagtgctgattctacgccccggcagcagctcccttggtcctctgcagcccttggctccattctctggggggtttgctttctccgttctcytcttagccacatgtgaagtaggcatggggacagctcttcctggg

SEQ ID NO: 234095 - DNA, 488 bp, Homo sapiens
  misc_feature (1)...(488): n = A,T,C or G
cttctgcttctggggggcctcagaaatcttttaatcattgtgcaaggtaatgaaagagtgaattgtctcayatggcaagaggaaatcacggagagtagggagtgatatagagttttcagtggccagatctcacgagaattcactcatgattgtgaggagagtaccaaggggatagtgctgaaccactcatgagaaatttgccttcatgattcaatcaccttataccangatccacctccacattaggaagcataactcaacatgagatttggtggggacacatattcgaattgcctcatcagtctttgagtataaagacatccatagcaggctttatccagccagcttctttgggattctttatagggtttcaggtctatagcatatccactaaaatattcctacttcaaaaggcaataaagtaagtggtattatcattcttcaaaaagttataatggtagtgtaggcattcatagtatgatttagtt

SEQ ID NO: 234096 - DNA, 488 bp, Homo sapiens
  misc_feature (1)...(488): n = A,T,C or G
cttctgcttctggggggcctcagaaatcttttaatcattgtgcaaggtaatgaaagagtgaattgtctcatatggcaagaggaaatcacggagagtagggagtgatatagagttttcagtggccagatctcacgagaattcactcatgattgtgaggagagtaccaaggggatagtgctgaaccactcatgagaaatttgccttcatgattcaatcaccttataccangatccacctccacattaggaagcataactcaacatgagatttggtggggayacatattcgaattgcctcatcagtctttgagtataaagacatccatagcaggctttatccagccagcttctttgggattctttatagggtttcaggtctatagcatatccactaaaatattcctacttcaaaaggcaataaagtaagtggtattatcattcttcaaaaagttataatggtagtgtaggcattcatagtatgatttagtt

SEQ ID NO: 234097 - DNA, 559 bp, Homo sapiens
tttactcatttaacaaacatttatggagtgtctgccatatgtcaggttttgctaggtatttgggatacaccaacagatgagaaaaacaaggtccctgtttttatagggcttagattccagcacgtgacactggcatattttgctacatgtcacgcaggaaatgaacaacataatgagatggagccacagggtaggggctgctgcagaaagggctgtccttgttgacttacccatctgratttgatggtgcccttcttccccaggcccactcatttttctgagacctagcaccacctgaaaggaggtccttaaatgccctgtgtttcctgaggcaaactagaaagcagagacttcttcagggaaggactgatagaagaggcaaactctgcaaaacaccttttccagtcttcttgaaaatgattgtgatgtcaggcacctctggacatttgtagacagattgaaggtgggcatttttagaaaacaattaaggatgatggtgagcttagctctcctttctaggaatcataaatcactagcaggggagttatacatccttgat

SEQ ID NO: 234098 - DNA, 559 bp, Homo sapiens
tttactcatttaacaaacatttatggagtgtctgccatatgtcaggttttgctaggtatttgggatacaccaacagatgagaaaaacaaggtccctgtttttatagggcttagattccagcacgtgacactggcatattttgctacatgtcacgcaggaaatgaacaacataatgagatggagccacagggtaggggctgctgcagaaagggctgtccttgttgacttacccatctgaatttgatggtgcccttcttccccaggcccactcatttttctgagacctagcaccacctgaaaggaggtccttaaatgccctgtgtttcctgaggcaaacyagaaagcagagacttcttcagggaaggactgatagaagaggcaaactctgcaaaacaccttttccagtcttcttgaaaatgattgtgatgtcaggcacctctggacatttgtagacagattgaaggtgggcatttttagaaaacaattaaggatgatggtgagcttagctctcctttctaggaatcataaatcactagcaggggagttatacatccttgat

SEQ ID NO: 234099 - DNA, 334 bp, Homo sapiens
ttttctcacatattaaggttttttaargccttcttctttttttgtttttggttttgagatgagttcttgctctgtcacccaggctggagtgcagcggcacaatcatagctcactgcagcctcacactcctgggctcaggtgatcctcccacctcagcctcctgggactacaggtgtacgccaccacacctagttaattttttaatgtttttgtaaagacagggtctcaccatgttgcccaggctggtattaaactcctggtggtcttcttgaagttggtttctgggactcctcaggccggatctatgacaaaagaaatagtcatgtattttact

SEQ ID NO: 234100 - DNA, 334 bp, Homo sapiens
ttttctcacatattaaggttttttaaagccttcttctttttttgtttttggttktgagatgagttcttgctctgtcacccaggctggagtgcagcggcacaatcatagctcactgcagcctcacactcctgggctcaggtgatcctcccacctcagcctcctgggactacaggtgtacgccaccacacctagttaattttttaatgtttttgtaaagacagggtctcaccatgttgcccaggctggtattaaactcctggtggtcttcttgaagttggtttctgggactcctcaggccggatctatgacaaaagaaatagtcatgtattttact

SEQ ID NO: 234101 - DNA, 334 bp, Homo sapiens
ttttctcacatattaaggttttttaaagccttcttctttttttgtttttggttttgagaygagttcttgctctgtcacccaggctggagtgcagcggcacaatcatagctcactgcagcctcacactcctgggctcaggtgatcctcccacctcagcctcctgggactacaggtgtacgccaccacacctagttaattttttaatgtttttgtaaagacagggtctcaccatgttgcccaggctggtattaaactcctggtggtcttcttgaagttggtttctgggactcctcaggccggatctatgacaaaagaaatagtcatgtattttact

SEQ ID NO: 234102 - DNA, 508 bp, Homo sapiens
ccttgggaccctgttgttggcaaagtggtttcacgattgccagttgttgagagagttatcytttatgtcctaaaagaaaagactctttttcaaatgtaacttcacttctcacgttctgcctagccaaaatgtattgctattctgttagtcactagtgaattgaaagggttgtttaaaaaagaaccaaaatctgcataaatacgcagataagtttagagatcaagtaaaagctctcagaatcattcattgtgatgcctgagagctgagatttcccccataggcaatccaataaaagaaacttgactactgagataaagcccagacctgtgtcctgtgccggctcctgaaatcagtgggactggcattctcactctctggcattgatgggaaagagaaaactcaacctagattatcatgaaattattcctgatgcctggtcacatgaactcctgagccaacagataccgttaacaaagagggttgctgaagctgggacttgtgccatcag

SEQ ID NO: 234103 - DNA, 606 bp, Homo sapiens
tgggcacggtgactcacgcctgtaattccagcactttgggaggccaagccaggtggatcacctgaggtcaggagttcctgaccaacctggccaacatgacgaaatcctatctctaataaaaatactaaattagctgggtgtggtggtgtgcacctgtaatcccagctacttgggaggctgaggcaggagaatygcttagaacctgggaggcggaggttgcagtgagccgagatagtgccactgcactccagcctgggcaacagagggagactttgtctcaaaacaaaaaaagttagagtttcacacattcgaagagctgagagcttagtaggcagtgaagcaggagagttagacagatatctccaagggccttacttatattttaaagattcagagttttatgctaatgacattagggaaactactaagagttttaagtagtgaagtgacatgacaaatatgggttttgaacagatggccttggctaccctgtggagaaggcactaagaagaaccagaatagatacagagagaacagttaggaggtgttaatttaaaaaaaattacaagatctataaatttggaagaggagagagattttatttct

SEQ ID NO: 234104 - DNA, 606 bp, Homo sapiens
tgggcacggtgactcacgcctgtaattccagcactttgggaggccaagccaggtggatcacctgaggtcaggagttcctgaccaacctggccaacatgacgaaatcctatctctaataaaaatactaaattagctgggtgtggtggtgtgcacctgtaatcccagctacttgggaggctgaggcaggagaatcgcttagaacctgggaggyggaggttgcagtgagccgagatagtgccactgcactccagcctgggcaacagagggagactttgtctcaaaacaaaaaaagttagagtttcacacattcgaagagctgagagcttagtaggcagtgaagcaggagagttagacagatatctccaagggccttacttatattttaaagattcagagttttatgctaatgacattagggaaactactaagagttttaagtagtgaagtgacatgacaaatatgggttttgaacagatggccttggctaccctgtggagaaggcactaagaagaaccagaatagatacagagagaacagttaggaggtgttaatttaaaaaaaattacaagatctataaatttggaagaggagagagattttatttct

SEQ ID NO: 234105 - DNA, 606 bp, Homo sapiens
ctccaaaatacttcacagtttcctagttaattctgatgaacagaaaggcttgggaaccactggtgaggggacccatatttcagcacattgtccgggtaatttttatgcrtgtgaaagctcgagagtctctgctttggagaaaagtcaaagtcaactctgttagtacaaggagaaactgcctgcaaggacttcagttatagctctatgagcagccttagaactataactaaaccttcagatgtctgttggattcactggatgcaggaggactcaggtatgcaagaggcaaacgaggtggaagaaaaagtattacacgtgccatgactcttccaaagcaatgtaccccaatatggttgtacagcatagctgttagattgctaagagttattgatatgatagaagattcattcaaaaataatttattataagtaggtacttttatttttttcaatcatcagattggaggtattgatctttagtgattatatgttatttgtttagtaaagagctctgtttttagaggcgaaaaatgaggccatagaaattgtggtatacatcaatctttttttctgacaggtcagcagaaattgtgcacttcttttgaaa

SEQ ID NO: 234106 - DNA, 606 bp, Homo sapiens
ctccaaaatacttcacagtttcctagttaattctgatgaacagaaaggcttgggaaccactggtgaggggacccatatttcagcacattgtccgggtaatttttatgcgtgtgaaagctcgagagtctctgctttggagaaaagtcaaagtcaactctgttagtacaaggagaaactgcctgcaaggacttcagttatagctctatgagcagccttagaactataactaaaccttcagatgtctgttggattcactggatgcaggaggactcaggtatgcaagaggcaaacgaggtggaagraaaagtattacacgtgccatgactcttccaaagcaatgtaccccaatatggttgtacagcatagctgttagattgctaagagttattgatatgatagaagattcattcaaaaataatttattataagtaggtacttttatttttttcaatcatcagattggaggtattgatctttagtgattatatgttatttgtttagtaaagagctctgtttttagaggcgaaaaatgaggccatagaaattgtggtatacatcaatctttttttctgacaggtcagcagaaattgtgcacttcttttgaaa

SEQ ID NO: 234107 - DNA, 606 bp, Homo sapiens
ctccaaaatacttcacagtttcctagttaattctgatgaacagaaaggcttgggaaccactggtgaggggacccatatttcagcacattgtccgggtaatttttatgcgtgtgaaagctcgagagtctctgctttggagaaaagtcaaagtcaactctgttagtacaaggagaaactgcctgcaaggacttcagttatagctctatgagcagccttagaactataactaaaccttcagatgtctgttggattcactggatgcaggaggactcaggtatgcaagaggcaaacgaggtggaagaaaaagtattacacgtgycatgactcttccaaagcaatgtaccccaatatggttgtacagcatagctgttagattgctaagagttattgatatgatagaagattcattcaaaaataatttattataagtaggtacttttatttttttcaatcatcagattggaggtattgatctttagtgattatatgttatttgtttagtaaagagctctgtttttagaggcgaaaaatgaggccatagaaattgtggtatacatcaatctttttttctgacaggtcagcagaaattgtgcacttcttttgaaa

SEQ ID NO: 234108 - DNA, 606 bp, Homo sapiens
ctccaaaatacttcacagtttcctagttaattctgatgaacagaaaggcttgggaaccactggtgaggggacccatatttcagcacattgtccgggtaatttttatgcgtgtgaaagctcgagagtctctgctttggagaaaagtcaaagtcaactctgttagtacaaggagaaactgcctgcaaggacttcagttatagctctatgagcagccttagaactataactaaaccttcagatgtctgttggattcactggatgcaggaggactcaggtatgcaagaggcaaacgaggtggaagaaaaagtattacacgtgccatgactcttccaaagcaatgtaccccaatatgsttgtacagcatagctgttagattgctaagagttattgatatgatagaagattcattcaaaaataatttattataagtaggtacttttatttttttcaatcatcagattggaggtattgatctttagtgattatatgttatttgtttagtaaagagctctgtttttagaggcgaaaaatgaggccatagaaattgtggtatacatcaatctttttttctgacaggtcagcagaaattgtgcacttcttttgaaa

SEQ ID NO: 234109 - DNA, 608 bp, Homo sapiens
ataccctgactcattgtcctatctgtataatctgaaaatactaagaggttatataccatgatcctcaaactaaaattctgcagttaggcaatacatggctctagccatgatcttgtacctaattagggggtgtggagaaaaccgaaccaaaccaaaccaaaccaacaaaaaacccaaaagcttgttctttttctagctgcttagagcaaggttctatttgtaagttgaagttcttgaacttctcaccatggtatgcaaaatttggttatatgtgaaagtgagtgcatctcctgggaaaaagtcctggctttccccagtggctcaaagtctgtggcacataaagtgttaagaaacagtgtttggggaagctgtgtaatctggtagaaataactacatcttcttctgtgctgcactatcaaagcatctatctcagagccccagccagccrtttacttccctccctttctgccacaaaaggtctttgagaaaatagaatgttttaattcattttttgtgtcctaacagcactaagcctaagcctggtaaattgaagcatctcaataagtcagaaaaaaggaatggcctttacagtacagatgtttcagttt

SEQ ID NO: 234110 - DNA, 569 bp, Homo sapiens
ttgacatgtcaataagaacaaaatgagaataaaatcagtataaaaatgaaaagaggaggatgaggcaattttaggaagatatgggaatccgaaagccaattatgtaaatgattaaactaatgagatacaatttttcatatactaagtttggttaaagttgaaaagtcgtttctatattaaactggaacagatgtgcgaagcaatgggagtgcaaactagtacagcctcttaggagaattatttggcattatcaattaaaatgtaatatgtgcatactcaaggcttaacaattccactcattagtatcctaccctaagaaatttctacacaygtgcacaaggaatcacaaagaagctcactgcagcattgtttatattaataaaagattgacagcaacaaaaacggccactgtggaaataaactaatgctacaaaaatatccccaacatatgttgatgagtgtaaaacattaagttgaagaacaataagtaataagaaactatttatgtaaaataaaacagaaagcataaaacatgagtatacatttacatagacagtgctacagttgga

SEQ ID NO: 234111 - DNA, 239 bp, Homo sapiens
ccaaatgaaacaaacaggtaacacaaaatcttcctcaatcctttctcctttatcttttaaatttctgwttcaatttcctaaaagactttatttttgtctaattacactatcgaaactgttcctttctaaatcaccatcctcttttcagcttccaggaaggggcagactttcctaagccataaaatagttccagtttcaaccacccaccaggggaacggagacctactcaccttacagcc

SEQ ID NO: 234112 - DNA, 421 bp, Homo sapiens
cctggccaatatgaaaccccatctctactaaaaatacaaaaattagctgggcgtggtggcacgtgcctgtaatcccagctactcgggaagctgaggcaggagaatcgcttgaacccrggaggcagaggttgcagtgagccaagatcgtgccctgcactccagtctggtgacagagcaagactccatctcaaaaaaataaaaataaaataaaatcaaagcttgaagttcttacaccatggcaccagcaaagacatgtgctgtcttgtcactgtgcccaacagaacagatgacttctttcccatatcccacccgatgatgttctgagatggttttgaaatgttgtctagaccacagtgggcctgtcttacaaaccgcacctctgtcagtggtgtacccacacccgtgtcactctatccgtggc

SEQ ID NO: 234113 - DNA, 498 bp, Homo sapiens
cctgctcatactcaagcccggagtaatatctgtaacttttgtttgcctgtatgcccctcctctctcccctcctcttgcctcccccatcaagagtagccaggattcaagtcatgcattttatcattctcttacttatttttgttttaaatacatgtatgcatacaatctacttaatcaaggtaaaaaaaaaataaaataaacttttttactatttgcccagttgtgcctgccctggaagtctaagaaaaggataatataaaagattcagtagaagcctataaataattgcattatctagagaaacaccaattgtttttgagggagtaagaggaaaccagtgtttcacagagaaattagaaatagctaacttagtttccttttggtctaaaaaatcaacgatctttcttttccacttatctttawtttttttttttttttttttttgtcacaccaagggtttgaacccagttgttgaattgcactgtagaatggaccaag

SEQ ID NO: 234114 - DNA, 559 bp, Homo sapiens
gatagtgattgtaatggtgggttttgtttgtatttgagggctgatcacatttataaacatataagctgtattattgtgaaattcatggtccttcattaaaataaagtttacaaaacatccttttattattatctcaattattttttatattgttgccatggttacagtcagtaacattaatagttaaacaaaggaaaaactaggctttcctttgtaaatggagaaaggaatagtattttctttgttgctttcaatacgcaggtttgaaaaaatcttggttatgaagtcagggaattacattacacttaagagcaaacatcatatataaatcttcttatgtcttcttggttattaattaatgtgctaatgatgccaggaagtttcttagctgaarcttgtggtttaaagtagctgttcttgggggaagaaatttggccagattccctttatagacctaaagattttagtacttactatacaatgaaggatttgtcctcatttttggaaaactaatgaaattagtaatttgtgatgcatgtctggtatggaaggaaatcac

SEQ ID NO: 234115 - DNA, 487 bp, Homo sapiens
ttttgtaaattttaatgtaatgaactattgttatttggcccaaaattagctagctgatctgcctgaattctgctatcaagggcataactctatcagcagatgaagatcacattgtattttgctatttggsaaattctttattatattctgtaaggaaagtgttgaagttattaaagatatgtcactatctctttctaaccttccataaagggaaaactgtcctttttgtttttcagctagaattcaaaagacagacatagagctgccttttcccccaggccacttagtgatagaattagtaatcccaccgagggctaatgatagctaaataggcgtttgcctggataagctgctgctgttttgattttcttgaagttttttttttttttcctgaggaaagtagcatgaggaactcaggtaatttaatagtaccctatacctgttgtaaaaataaggtgcttgcctccagaggagagtgagcccgggg

SEQ ID NO: 234116 - DNA, 467 bp, Homo sapiens
tattgttatttggcccaaaattagctagctgatctgcctgaattctgctatcaagggcataactctatcagcagatgaagatcacattgtattttgctatttggcaaattctttattatrttctgtaaggaaagtgttgaagttattaaagatatgtcactatctctttctaaccttccataaagggaaaactgtcctttttgtttttcagctagaattcaaaagacagacatagagctgccttttcccccaggccacttagtgatagaattagtaatcccaccgagggctaatgatagctaaataggcgtttgcctggataagctgctgctgttttgattttcttgaagttttttttttttttcctgaggaaagtagcatgaggaactcaggtaatttaatagtaccctatacctgttgtaaaaataaggtgcttgcctccagaggagagtgagcccgggggaaag

SEQ ID NO: 234117 - DNA, 467 bp, Homo sapiens
tattgttatttggcccaaaattagctagctgatctgcctgaattctgctatcaagggcataactctatcagcagatgaagatcacattgtattttgctatttggcaaattctttattatattctgtaaggaaagtgttgaagttattaaagatatgtcactatctctttctaaccttccataaagggaaaactgtcctttttgtttttcagctagaattcaaaagacagamatagagctgccttttcccccaggccacttagtgatagaattagtaatcccaccgagggctaatgatagctaaataggcgtttgcctggataagctgctgctgttttgattttcttgaagttttttttttttttcctgaggaaagtagcatgaggaactcaggtaatttaatagtaccctatacctgttgtaaaaataaggtgcttgcctccagaggagagtgagcccgggggaaag

SEQ ID NO: 234118 - DNA, 467 bp, Homo sapiens
tattgttatttggcccaaaattagctagctgatctgcctgaattctgctatcaagggcataactctatcagcagatgaagatcacattgtattttgctatttggcaaattctttattatattctgtaaggaaagtgttgaagttattaaagatatgtcactatctctttctaaccttccataaagggaaaactgtcctttttgtttttcagctagaattcaaaagacagacataragctgccttttcccccaggccacttagtgatagaattagtaatcccaccgagggctaatgatagctaaataggcgtttgcctggataagctgctgctgttttgattttcttgaagttttttttttttttcctgaggaaagtagcatgaggaactcaggtaatttaatagtaccctatacctgttgtaaaaataaggtgcttgcctccagaggagagtgagcccgggggaaag

SEQ ID NO: 234119 - DNA, 559 bp, Homo sapiens
cctaacatgtgatctatgctggagaaagttccatgtgacttgagaagaatgtgtattctgctgctgttaggtggtatgaactatatatatctgttaggtacatttagcctatagtgttgttcaaatcttttgtttccttatttatcttctatctagatgttttatccattactgaaagtgggatttttgaagtatyctattattttattgctatctatttctcctttcagctcagtcaatgttagctttatatatttaggttctctgaagttgggtacatatacatttataattgttatatattcctggcagattgacccttttatcattatgtaatgtccttttttctctcctgacagtttttggcttaatgtctaattttttttttctgatatgacaatgcttgctctctttggttaccatttataagaaatatcttttttcttcctttcactttcagcctatgtaggtccttaaatctaaagtgagtttcttgtagaccgcatatagttgtgttttgatttttaatccactcagccactgtatgcctccctcaact

SEQ ID NO: 234120 - DNA, 559 bp, Homo sapiens
cctaacatgtgatctatgctggagaaagttccatgtgacttgagaagaatgtgtattctgctgctgttaggtggtatgaactatatatatctgttaggtacatttagcctatagtgttgttcaaatcttttgtttccttatttatcttctatctagatgttttatccattactgaaagtgggatttttgaagtattctattattttattgctatctatttctcctttcagctcagtcaatgttagctttatatatttaggttctctgaagttgggtacatatacatttataattgttatatawtcctggcagattgacccttttatcattatgtaatgtccttttttctctcctgacagtttttggcttaatgtctaattttttttttctgatatgacaatgcttgctctctttggttaccatttataagaaatatcttttttcttcctttcactttcagcctatgtaggtccttaaatctaaagtgagtttcttgtagaccgcatatagttgtgttttgatttttaatccactcagccactgtatgcctccctcaact

SEQ ID NO: 234121 - DNA, 497 bp, Homo sapiens
caacatggatgaaactggaggacactaagagaaataagccaggcacaaaatgacaaatactgcacgttcttacttatatgtggaagctaaaaaaaacctcgacacatagaaacagagagaataattgtggttaccagaagctgggagcagggggaatcgagagatgctgatcaaagggtaaaacatttcggttagacaggaggaataaatactttaaaaaaacacgtgcaagccttatattacatgcatagtatctaatttgctatactgaagatgatcttggggatatataaaaggccacactaaaaaaacacacacacacrtaacaaaacaaaaacctgaataagttctgataacatgcattagtctctcaggaccaagaaagaaatttctcagttaaaggacccagtttctgatgtctcacaacttaaatataggactagtacacaaggttaaggcagactgctagtgataaagacttcaaagactagtaagca

SEQ ID NO: 234122 - DNA, 524 bp, Homo sapiens
atcacgagaacagcatggaaaagacctgccccccatgattcaattacctcccacgggcccctcccacaacacgtgggaattcaagatgagatgtgggtgggaacacagccaaaccatatcagttaggaacattcaatatcctccttctagctatttgaaactacatattagtgttaactacagtcattstacagatatagaacactaggagtttcttcctcctatctagctataattttgtgttgttaaacaaacctttctctatccccttccccctacccttcccagcctctagtattatctgttctactttttacttctatgaatcaacttttttttagcttccacgtataagtgagaacacatagcatttaactttctgtgcctggtttatttcacttagcataatgccctccagttccatccatgttgctgcgaatggcaagacttcattcttcagggccgaatagattcccgttgtgtatatatgccacattttctttatccattcatctgttgttgga

SEQ ID NO: 234123 - DNA, 365 bp, Homo sapiens
cagatctggtgtcttcaagtacaggtagtttttgagcctcctctgctgaaaaactctcagtggctctttttttttttttttttttttttgagatagggtctcactctgccacccaggctagagtacagtgatgtaattatagctcactgcagcatccctgggctcamgtgatccgcttcagtcctccccaagtggctgggactacaggtgcacaccaccacacctggctaatttttttattttttgtagagatggggtgatacggtttggctgtgtccccacccaaatttcatcttgaattcccacatgttgtgggagggacccagtgggaggtaactgaatcatggggacaggtatttgctgtt

SEQ ID NO: 234124 - DNA, 618 bp, Homo sapiens
tggacctttacaaaagaatttttttttcactcaatgtgaacagacaggctgggctaatagtttttatgaattaacaaaaatcaaaagcccagagagtcttcaagagcaaaatgttaaaaagcgctatggcaataatttatcctaatcatctttggataggttcctcatccaggcagaaccaagcagtgctaagggaargctcaatggtgttcctgtctgtttagaagtgcaatcctgtcagtgctgccatgcacactgcacatttgtgcactgcacaacctgttcaactgtgcatggcagccctggactaggaactcctttgtcaagattggcccttgggacatttgagaagttgtgaagttggtcttcatcagactttcatttcaattcctttctcttttattttcctctccttttcttccttttctttttaaatagccaacatgtaaagtgtgtatcttgtactaatccctgtgctaaatactttgcatgcattatttcatttgatcctcacaggcatcctgtgatataagtgatgctctctcaccatgttacagatcaggagttcaggggctgcttgagcttagagagttgataagtggttgagggtgagccact

SEQ ID NO: 234125 - DNA, 532 bp, Homo sapiens
gggcctctgggcagacttggaaaagatgcaaaactgccccagcccactaaattgccttgcattccctctatcagaagtctttgaagggattcacaccctggtgccacyaatacaaagtggtagtataaagtgcggattgtgaacttggtggccaaggcagcagataagcatatctgatagaaaataagccacttcccaggagctgatccttggagctccacttgggaccttgcattctctttcaaaactactttcgtcaagataggggttcttagctctggctacacattagaatcaccagagtcattttaaatttttttgatgcctgagccccatctacataaaaattagacttttcagagaaatcaccccaagtaggattgagaactactgagccaagaaagaaccattcttctatctgctttctgtcacttccaaggcacctcagtaaaactggcccagatatatctaacatgacatcagggtcccccttcctcaatatgctctctccttcctcaggacactcaggttt

SEQ ID NO: 234126 - DNA, 567 bp, Homo sapiens
gaggagtaaggacaattctgaggtgtgttccatacagtttcccagagagtcagcaacagggctgagtccagatgcctacagtagtcccactcatgagctcaccctctattggatcgcctcccttccttggctcacttcctgtattagtctgttatcacactgctaacaaagacatactgaagattaagtagttataaaggaaagaggtttcattgactcacagttccacataactattgggaggcctcacaatcatgatggaagacaagaagtagcaagtcacatcttacatggcggcaggcaagagagaactcgtgcagggaactcccatgtataaaaccatcagatctcatgagacttatttacaatcatgagaataatatggggaaaactacccccatgattcaattatctacacctggacctgcccttgacacatgggtttattacaattcaaggtgagatttgggtggggacacagccaaaccatatcacttcctcaactccttcttgagattgcctyccaaataaactgactgcaccaaatcctttctcagggtctacact

SEQ ID NO: 234127 - DNA, 603 bp, Homo sapiens
aagtacacataagaggtcaaggttcacagacagctgtcttcatttcagggtaggcctgtgaccaatgtggagaagagccaggggacatgcttctcatcatgaatggaaacacacaaaggttggcttcattccaaatwtgaagccctcaaagccagtaatttagtttaatcatctacatgaattgaatgtttagttccggaaaagatgcacagcgcctggagtttggttccagtgccccctgttggctgggctggatgactttggggaaggcctctgactcttcaggtaccgcaaacgtgcttgtctattacttgtcaaatgtaattgtcaaatgtagctgccctcacaaggatgctgcaagcatcacggcaggtgattaacaggaaagcacttgggaagccatggggtgcttagaaacagaggggttgcaggagtggctgctgtgggaggccccccatccctccaccccaggtgctgagagtctcggccttgagggtgcacagctgtggccttctcctgagacctgtcctcaggggtacaggtgtctcatcacagagcatcccctccactctccctacctctgacagccccaggcatggcaga

SEQ ID NO: 234128 - DNA, 419 bp, Homo sapiens
ctagagctatctaaagatggcaaatctgggaaatgtgcattcagcttggcaaaactgatacattacaaatccaccacagtccacttcttctcaaagtggcatcaatgtgcaccttcctcctcctccttttttcttcctcttcctcatcctcttctttctcttcttcctcctttttcctccttgtaaagccatacttaaggttcarataaagacaataggaaaatcatactttttctcattcagtgaaaatatgccaaccctttccccaacaggataaagtcttttatttgtctttgaatgatgttcactccttttttagctagatcacattccatatttgctatcctgtaacctaaatattgagatttctaaaagttaattattaatgaatatgatagcgaggatgatggaagacgaga

SEQ ID NO: 234129 - DNA, 449 bp, Homo sapiens
aagtgtctcctgttgcccaggctaacctagagctatctaaagatggcaaatctgggaaatgtgcattcagcttggcaaaactgatacattacaaatccaccacagtccacttcttctcaaagtggcatcaatgtgcaccttcctcctcctccttttttcttcctcttcctcatcctcttctttctcttcttcctcctttttcctccttgtaaagccatacttaaggttcagataaagacaataggaaaatcatactttttctcattcagtgaaaatatgccaaccctttccccaacaggataaagtcttttatttgtctttgaatgatgttcactccttttttagctagatcacattccatatttgctatcctgtaacctaaatattgagatttytaaaagttaattattaatgaatatgatagcgaggatgatggaagacgagaattc

SEQ ID NO: 234130 - DNA, 492 bp, Homo sapiens
cctacaagggaggtaactcatctatcattcattcacactggtacaacaatgacaccagtatactgtgtggtaagatagagatgcacagacatatgaatgtctggaaaaactaagagggctatgcaaacagatatactcaaaaacactatgggtaaggcaaaacaccattctgaaaaatgttcaagtcaccttaggaaggtaaggaaaagaaagcatatccagaaaacgacaccagagagaacaaacacaaaaggaaaaatataatggcagrcttaagccctaccctatcaatcatcgtattaaatatcaatgatctaaatataccaattacaagacacagattggcagagtaggttaatggacgcgacacaactacatcctggctacaaagagactaccttcaaatatgatgatacaggcaagttgaaatccaaaggatgggaaaagatgtatcatgcaaaccttagacaaaggagagcaagactggttata

SEQ ID NO: 234131 - DNA, 633 bp, Homo sapiens
agtgtgcatatgtttactcatttagtccttacctcaggccgaggtcacatcatcaccttcatcttccatatgagaaaactgagatgcacaaagatgttaagtgacctgtccagggtcactcagccagcaaagaagaatttgaaagcaggaatttgaagtgaagrcagcctggctccagaagacattctcagaaccactgtgtttatactgctcctaacaaaatcacccttgcaaaaattatgacagtgagaaaaacctgacataggaaaactatgactgtgaaagaaatctgacctaactgactgcatcttgcttctaatctctgagctgcccttgtccattcctgggaataggccaggctaactatgagaggagtttagtttagtctaactctgaaacaaagatgattgtcgctcctgagacaaaccccttcctttcttggggatcagacctccttagcaaagctaacaaattaggcacgagattggaatttatggctcaggagccgtgcagccagaagtcacatgattcctaagctccccaattgtgcctatatatagtattattagtgtcaaacctaatattggtgtttaagatatttttcagaccctgccttgtgatggactagctggt

SEQ ID NO: 234132 - DNA, 474 bp, Homo sapiens
tctccttccttcttttacctgattgttattggaagtggagatgatgtaatgttatgggtcacttctattagcgtccctggactacagttctaycatctattttttaagctgttttaccttgttatataagatctgcatatttagtagcatcatttatgttattaatagttaacatctatggtagtcacttctttggttaggtcagagactaaaatctgaaaattagaaatccattctttatttcaggtgtgtgcatgctgttgtgttgatccctctcctctcccagaaaagtcattgtaggcccaagttgatgaagggacagactgtgaaagaatggatgcagagcatggactaagtatgcagtgcccactgagtcgaaaatgttgctaaagttgcttttctgcgattgtctaacattcctctgagtcacctcgtctgctgcttaagaaccccaaagcattttcttcactgttt

SEQ ID NO: 234133 - DNA, 474 bp, Homo sapiens
tctccttccttcttttacctgattgttattggaagtggagatgatgtaatgttatgggtcacttctattagcgtccctggactacagttctatcatctattttttaagctgttttaccttgttatataagatctgcatatttagtagcatcatttatgttattaatagttaacatctatggtagtcacttctttggttaggtcagagactaaaatctgaaaattagaaatccattctttatttcaggtgtgtgcatgctgttgtgttgatccctctcctctcccagaaaagtcattgtaggcccaagttgatgaagggacagactgtgaaagaatggatgcagagcatggactaagtatgcagtgcccactgagtygaaaatgttgctaaagttgcttttctgcgattgtctaacattcctctgagtcacctcgtctgctgcttaagaaccccaaagcattttcttcactgttt

SEQ ID NO: 234134 - DNA, 425 bp, Homo sapiens
aaaacagctgaccacaccatacaatcactgagactgagcctgtgactataggtgaagaaaaaaaggctgtctattattcataccatgaaggaccaggggaaagtgcgaacacagtcccctactactgttgtgggaatcaggagaacagagagaccaatgggtggaacaggaggactttattgagtgtactcaggcccagcatattaaaatccaaaggctgagccctgaacaaagacaaggcttggcttttacacacacttctgaaagggggttggctagtttgaatggygcagtgggaatttgaaggtgcaaaactcacggtgcaggcaagagggcttacagaagcagaacaaaggcagctaatcaaactgtgaccggtcttgcaatgcaagcatagctggtgaccttgcagctgcactgacagg

SEQ ID NO: 234135 - DNA, 526 bp, Homo sapiens
cttttgttgaatgcaaacgatctatggactgttctccctcctagacaagggtgaattagcatgctaaaaactacctctgtgttattccttccttgacagtgtttgttttgttttgattttttgtragactcatctcactggagacaaatctctggagccataggatcctgcacctgaccatgcttcttatgcagacctggatccttggagttattggccccctttgccttggttcttttgttgactctcttcagcaaaactgaactccaacttttacaccctaaatctggctcttggacatataggtccttttgcttcccaactcctccttgatccagccctgcctttccaacctctccatctgtgtctgtgtgcctgtgtcttgtctgtctgtctctcatactccaggctgcccccagtattacccactttcttctcctcctcttcaatgttcagggttcagcttcctctctacctacagagtcccacagactgaaggtgtttccccttacagagaggggagctc

SEQ ID NO: 234136 - DNA, 420 bp, Homo sapiens
atggatggagtcatttggaatgctttcaattgtaagtagtagaaactgatttaaaagtactgacttactggcttatataactgcaatatgtagagatgaggctggattcaggcaaagctcagtaaactctygaggggactgctttctgtttggctctctattttaccttttgccatatgtgttttatcttaaagggacttcccccatgccccatgctcccaaggtagctgccagtggctccaaggctacatgcttctttcttttcaccctatttgaaagaaagcatctttgttccagcattctcagcaaaagtctcaagtctcactctaattggaccaatttaaatctcatgcacatttctgagcaaattattgaagctagaaagatggaattctctgattgacttagctcaagtcatga

SEQ ID NO: 234137 - DNA, 556 bp, Homo sapiens
aattctttttagatctgtcaggaagtgaggttacagggtaaaccattgcccttaaaaccggggaaacagacagacagataagagaatgacaacttaccgaagtagaaamccacaagcagaaacctttatagaaaccaatgctgggataggaaaaactgaactgtaattgattaattactaaaagctcagtgtggacaaatctgtcaattaaaaaacgtgggcggctcccaagactttttcgagtcttaccgcattcagctctactatgttctcacagtgaacatctcctcatggttctggcagggggatggagaaaaagtggccatcttgaagtatgccagagcattctgttctctttaacaaggcttgccctcaagagaaattattttaccagatcctaacctatcaggggtttagacagactaaccaaactggggaaagggaaatacctaactccagcaacctctatccaccctgtcccatctaatatggggggaaactgagagtcacttgtgaagttcacaacctagaggcacaggctcactaaaagactaag

SEQ ID NO: 234138 - DNA, 556 bp, Homo sapiens
aattctttttagatctgtcaggaagtgaggttacagggtaaaccattgcccttaaaaccggggaaacagacagacagataagagaatgacaacttaccgaagtagaaaaccacaagcagaaacctttatagaaaccaatgctgggataggaaaaactgaactgtaattgattaattactaaaagctcagtgtggacaaatctgtcaattaaaaaacgtgggcggctcccaagactttttcgagtcttaccgcattcagctctactatgttctcacagtgaacatctcctcatggttctggcagggggatggagaaaaagtggccatcttgaagtatgccagagcattctgttctctttaacaaggcttgccctcaagagaaattattttaccagatcctaacctatcaggggtttagacagactaaccaaactggggaaagggaaatacctaactccagcaacytctatccaccctgtcccatctaatatggggggaaactgagagtcacttgtgaagttcacaacctagaggcacaggctcactaaaagactaag

SEQ ID NO: 234139 - DNA, 444 bp, Homo sapiens
ttcacaaacaataaatatgaatcatagcattgctatacagtgtgaatagatttcagatctctgagaaaagaaccaaaataattctaaaattatctccacctctggacaataataaccagtggtctttttttaatctacaagtttaaaacatattttaatgttgtttctcctaagccttaacacagtaaaagaaagttgaaacatagtcttcyttgtgataaacatgtagtatctgtgaagcacaacattaatcccatttgtaccataaaaagtatgatccacttgagccttgctctcctgtgaattatgaatcattgtaatactcgggggatagtcatcacatctctaaggttcctgctttgttcctacaatgtttttcctcggatatctaaagtatctaggaaatttgaaatccccatatgaaatatcttaacatattctttc

SEQ ID NO: 234140 - DNA, 461 bp, Homo sapiens
aacattaatcccatttgtaccataaaaagtatgatccacttgagccttgctctcctgtgaattatgaatcattgtaatactcgggggatagtcatcacatctctaaggttcctgctttgttcctacaatgtttttcctcggatayctaaagtatctaggaaatttgaaatccccatatgaaatatcttaacatattctttcaacatacattccaccctttccataccacaaattatgtagcacaagagaaccagattcaccaaataaagtgatagtaggtgtatcttattctttggaagaaaaggctacttattacagtcatattcctttggtaagtagctaaaatatccaattaatagggtttaaccatcagacagaatttgtttttagaataatgaaaatgtgttgtcattacattgttattcccttgagtgtatttttttgagatgtgactcattata

SEQ ID NO: 234141 - DNA, 523 bp, Homo sapiens
agatctggagctctgtcccttaccctctgatgaccattggcaatttactcaacctctacccccagtctctgtttcttcatacagaaacttgtatgaataacttatacagaataaccccacctgtaccttgtaaagaataacctcacctgccagggttgttaagaggattaaaagagaaggtatgtgtgtagcaaggagcacatttcctagcacatggtctgggtacttatgttcaaatgataggcctgatcttggaaaccacatgtcacttatgtgttgtaatgtagacagattgtttctatggattcttcgcaaagactaagtagatgttcaaatgagaaaatcacaggcattttctgygcattcaccactacacacatagggctgtgctgtgtattaggaaagatttataagaagtagaagagttagtttttactcaggagtagcttaaagtcaaccctgaagaacagtaataccactcttaattcaagacctgatgtccagcaaccccatgcctttaccc

SEQ ID NO: 234142 - DNA, 563 bp, Homo sapiens
aataataatgaaaaagtctgaaatattatgataattactaaaatgggacacagagacacaaagtgagcacatgctgttggaaaaatggtgctgatacactttctggtgcaagacttcctggtgcagaattgccacaaaacttcaatttctttaaaaaaaaaaaaatgtagtatctgtgaagcacaataaagggaaggacaataaaatgaagtgtactagtatttggtttcctgttaaaatttrtatttttgccctttcttgatccttatcctatcaccattatctagttctttgtacataattgcagaaattttatggctttattttgattagactataatgcaagatgatgttcccatagcaattttttgaaaagcaagcacacctgtccagacagagggaaaaattgatccagatgctgaggagaaaattgtgttgatccctaacagatatctattatactgaggttacaatcagttcctgggtttgtggtcaaggtgaaaagccaaaaacctctaatctacggcaggattcaattttctgtatgaattcattccttctag

SEQ ID NO: 234143 - DNA, 569 bp, Homo sapiens
gctagtattctgttgagaatttttgcatctatgtttatcagggatattgccccatagtgtttttttgtttgtttgtttttatgtccttgtttggttttggtatcaaagtaatgctggcctcacagaatgacttataaagaattatctcctctccaattttctggaatagtttgaagagaagtggttttaattcttctctgtaagtctggtaaaattcagcagtgaaaccatctggtcctgaacttttctttgtttggaaactttgtatcactgatccaatctcattatttgttattggtctgtttggtttttctatttcttgattcaaccttggtaggttatatgtgtccatgaatttatccatttttctagtttgttggtgtacagtttttcataacagtctctgatagcgtttttcatttctgtggtatcagttgtaatgtctcctcttttatttttgattttatttatttgggtcttctctctttttwtcttggttagcctagctagcagtttatcagttttatttttttcaataaaaactttgttttgttaattgtttccattgt

SEQ ID NO: 234144 - DNA, 590 bp, Homo sapiens
tgtaatatttttttctctcaaaaaagatattgaaggtaataataaagtatagttcagatactatctcaactagggaagcatatccctgaatcatgcattggattcacaggccttatatcagcatagtgataaattcaactgcatgawgtaaaagtactttagagagggcaatgtagacacaaggtttgggattgcaaagaagcagcttagtaaataataaaataatctacctaccataatataggcatttctgtttaaaaactttattgcattttccaaacaccagaagcagcatctcaggcagcattgtaggaatttagacaatgtgttctgggtacctatgagaaggagatatttaaatctattaatgatttgcagctgaaccttatcagtcaaaataaatataatacaacatttaaaatgagatttaaaattttttattgttataaaatatacataatataaaatttgccattttaaccatttttaagtgtacagttcagtggcactgagtaatttataatgttgtacaaccatcactgctgtttccagaactttaaaatctcaaacacaaattctatgcccttcaa

SEQ ID NO: 234145 - DNA, 590 bp, Homo sapiens
tgtaatatttttttctctcaaaaaagatattgaaggtaataataaagtatagttcagatactatctcaactagggaagcatatccctgaatcatgcattggattcacaggccttatatcagcatagtgataaattcaactgcatgaagtaaaagtactttagagagggcaatgtagacacaaggtttgggattgcaaagaagcagcttagtaaataataaaataatctacctaccataatataggcatttctgtttaaaaactttattgcattttccaaacaccagaagcagcatctcaggcagcaytgtaggaatttagacaatgtgttctgggtacctatgagaaggagatatttaaatctattaatgatttgcagctgaaccttatcagtcaaaataaatataatacaacatttaaaatgagatttaaaattttttattgttataaaatatacataatataaaatttgccattttaaccatttttaagtgtacagttcagtggcactgagtaatttataatgttgtacaaccatcactgctgtttccagaactttaaaatctcaaacacaaattctatgcccttcaa

SEQ ID NO: 234146 - DNA, 596 bp, Homo sapiens
atcaacctgcttcgttactctgccactggctataattttcagcagagagaaagtatcacttaattcatttatgttttttcagattaccaaagtaatgtatatttattttatgaaatccataaargcacaaaaaataaactaagcaatataatcccaacattcagatgtaataatgtttcttcatgttatatttgtttttaataaaattaaaatcaaaccatatgttaatactctttagtaacctgcttcctaaaattgacatattgtaaatttcaccatccattaaattagttctttagcattattttcaatggcaatgtaatgttctaccttatgggtatacaaatctatttaagcaatctcctgttgatggatagtttgattgtttcaacattttactattaaaaaaaaagatactttaaaggttaggtacctaagggagagggagaatatatttcagcctctgtagataatgaaaccaatttttaaaggttatttataaaaagtgttcagggtctgaaatgatatggaacatttccatggtcactaaaaagattatgttttctttcttaacaggaacaagaccattttgtttt

SEQ ID NO: 234147 - DNA, 599 bp, Homo sapiens
tggacttttgggttaatgatgaaatgagttaagactttaaggaactgttgggaaggcataattgtgtattgaaatatgagaagcatgtgagatttggaaggggccaggggtggaataatatggtctggttctgtgttcccaccaaaatttcatcttgaattataatctgagtgtaatccccacgtgttgggagtggagcttcatggaaggtcactagatcatgggtgcagtttcgccgtgctgttcttgtgatagtgaacagcaagtgaaccatacagatcatgagatctaatggttttataasgggcttttccccctttgctctgcacttcttcttcctgccaccatgtgaagaaggatgtgtttgcttccccttccaccatgattgtaagtttcctgaggtctccccagccatgctgaactgtgagttaattaaaccacttccctttataaattacccagtcttgggtatgtttttattagcagtgtgagaatgggctaatacaccatatttttgcatttgcgaatcgggtgacggtaaacatgcgtgtgcaagtatctttttcgtataatgatttctttttctctgggtagatacc

SEQ ID NO: 234148 - DNA, 554 bp, Homo sapiens
aggttttttcatggcccagtaataagtagcgaatgcaccagcaagggcgcactgacctaatgcaatgacgaagtttataagccagagaaagacaaataagttgtatacatggaaggtagggatgtactgatggtacaagctctttccaccatagaaagcaaagttacacagagccccagggcaagctttggcaatttcagttgtattaaaaatctgcattgagaaaaaggaacacaaggacataatattaaatatcactccaagataacaactccctgtgttttcctcttccccttaattgcatrtcctgttgtttctctgttagctcctgctcttactcctctattttctgttatatcactttatataattatctaatgagtgctggaaagtatcccatttttcatcaaatgctcataatctgcacccactataatttcacatttatcagtgttgttgttgaccatacctactttctatggtcttgggtatatggtagggcaggcaagctcaggaaatacagtgctttctctccattccacccactgttttcc

SEQ ID NO: 234149 - DNA, 622 bp, Homo sapiens
tctgcttcgggacaattcctaccacaactacaaaatgaattgcagcagaagtctatattgaagtaagtaaatgaaagagtttcttgtacttacctctgggtcacaggtttgattttcatgtatacaatgcccccctggagctatgactttgtatacaggtacccccgatgtcgccaagaaactgaataaactccattaaggataaaccatttgctggtagattgaaaataaatggacaagaaaacaatactgacaactcaaaagtgcatgagaaattaacttaaaaaatgcctaatattttaataatattcatctatttttcaggcctagattaatgtaatgtgggccagctgcactgagtggccccttaaaaacagtaaaatgtataggagctttcttggcttattgctaaggagcagtatcatgtggagacaaaataaaacaaatctacaatatgaactatttgaggggaaattcaatcggtagattgaaacgtttttagagcttgggaaaaaaatagttatttcttagtacattcctcatcttcccagggayagaaaacactgaacacaaactcctggttcacgagtagtcatgtgaacctgaggtttaaagaggccaa

SEQ ID NO: 234150 - DNA, 648 bp, Homo sapiens
tctcctaaaatgctgggattacaggcatgagttactgcacccagccaaccttacacattttaatgaaaccatttttttttcttctcccttacaattaccagaatctggaggtttgtttatcaacattgtgtgcatggccataatattaggtccagtgaagcactccacatatttcagaatctaagaaagcaaaaaaaaaacaaaaacaaaccttgtgggaaatcagaagtattgacaactggtacaaagtacagtagctatccacacaagaaccaagaaggcaatagtttaagaaccaagcggtatttcacaacattgcaaacaaggcatgaaaaacccagccattggaaatcattctaaatctataacacggaatgaaatgggctttttctgagctagctggkaatgaaaccattttttctctacaagaaacataggagttccgatgagatattaatatagctttcttgtcaacccaagcaacagaaggttgctcagtgggagggcagtttcctcttcctcattggagcctctgcatacgaagagtcccatacaattcacagctgtcatgaatagcccggaagaaagcagaatggtggcttggaggacatttgacaatcggggacgcttggcacttgacaactcatt

SEQ ID NO: 234151 - DNA, 648 bp, Homo sapiens
tctcctaaaatgctgggattacaggcatgagttactgcacccagccaaccttacacattttaatgaaaccatttttttttcttctcccttacaattaccagaatctggaggtttgtttatcaacattgtgtgcatggccataatattaggtccagtgaagcactccacatatttcagaatctaagaaagcaaaaaaaaaacaaaaacaaaccttgtgggaaatcagaagtattgacaactggtacaaagtacagtagctatccacacaagaaccaagaaggcaatagtttaagaaccaagcggtatttcacaacattgcaaacaaggcatgaaaaacccagccattggaaatcattctaaatctataacacggaatgaaatgggctttttctgagctagctgggaatgaaaccattttttctctacaagaaacataggagttccgatgagatattaatatagctttcttgtcaacccaagcaacagaaggttgctcagtgggagggcagtttcctcttcctcattggagcctctgcatacgaagagtcccatacaattcacagctgtcatgaatagcccggaagaaagyagaatggtggcttggaggacatttgacaatcggggacgcttggcacttgacaactcatt

SEQ ID NO: 234152 - DNA, 548 bp, Homo sapiens
tcgcctgggcaacatggtgaaaccctgtgtctacagagaatacaaaaattagctgggcgtggtgatgcgtgcctggagtcccagctactcaggaggctgaggtgggaagatcaattgagcctgggaagttgaggctgcagtgagccttgataatgccactgtactccagcctggttgacagaacaagaccttgtctcaaaaaaagagaaataaccagaaaggatatatgacaataacgtctgtcagcattatttgtaaatgttaacccaatgtccagcaattggacaatggttaggtaaataagatgaaacaccrcgcaatattatcatgcagacattcgacatgtaagtgaatcatggttcatgttgttgggaaatgagcatgagagaaaaaagcaagattctgatttcagtataaagaaggttgtcaacaaagtaaaataccgatggacagaaaagaaatcaagggaataccccagatattctcatttgttatttcttggtgaaattatcaatgatgaaattatcagtgatgttatttcaacaaag

SEQ ID NO: 234153 - DNA, 548 bp, Homo sapiens
tcgcctgggcaacatggtgaaaccctgtgtctacagagaatacaaaaattagctgggcgtggtgatgcgtgcctggagtcccagctactcaggaggctgaggtgggaagatcaattgagcctgggaagttgaggctgcagtgagccttgataatgccactgtactccagcctggttgacagaacaagaccttgtctcaaaaaaagagaaataaccagaaaggatatatgacaataacgtctgtcagcattatttgtaaatgttaacccaatgtccagcaattggacaatggttaggtaaataagatgaaacaccacgcaatattatcatgcagacattcgacatgtaagtgaatcatggttcatgttgttgggaaatgagcatgagagaaaaaagcaagattctgatttcagtataaagaaggttgtcaacaaagtaaaataccgatggacagaaaagaaatcaagggaataccccagatrttctcatttgttatttcttggtgaaattatcaatgatgaaattatcagtgatgttatttcaacaaag

SEQ ID NO: 234154 - DNA, 503 bp, Homo sapiens
acacatttggagataaggtctttaaactggtgattaagttaaaataagccccttcccttttccttagcaaactaatgcaggaacagaaaatcaaatagcccatgttctcacttataagtgggagccaaatgatgagaacacatggacacagaggggaacaacacatactggggcccacttgaggttagagggtggaggagggagaggagcagaaaagataactattgggtactaggcttagtacctrggtgacaaagtgatctgtaaaaccaagccctatgacatgagtttacctatatagcaaacctgcacatgtacacttgaacccaaaataaaagtttaaaacaacaacaacaaaaatgaggcccttagggtgggccctaaccaaaatgcctggtgtccttatacaaagaggcaattagaacacaggcacacccagaggaaaggccatgtaaggaccctgtgtgtttctgagctgcaggtctggagtagccacgacttgg

SEQ ID NO: 234155 - DNA, 514 bp, Homo sapiens
tagtgtgataaaaatcagcctgtcttcacagactatggctttttattgagtgagatttcatttttgcagcaggaaagatctggtgcctccatgacccgcctctgtgaggtctgctgctgtcatgagaccgagtgaggcagtgcttcacggccctttcacttacgcagaatattaaaggtcgttttagtgcgattcagatatgatttaaacttgtttgaaattctgaatttatagggtagattcaggcacataatttgcttccttttgtcctaattctggctttttccctgcttttggctattgggctgcaaagtagaagtacagcatccccctctgtatctgcagaatcctcgtgggggattcaaccaaccacagactgaaaatatgcagggaaagaagtggatggttgcatctcaacatgcacagactttttttkgtcttgtcattattccctaaacagtacagcataacaaatatttacatcgcattcacatcgtattgggtgtcataggtg

SEQ ID NO: 234156 - DNA, 398 bp, Homo sapiens
aacgctgacaccctagacccccggacccaggacccagacacgcggcgccggtccgcgcatctctcggtcctgctttctgcgcggcttccagcagagggcgcgcggccctcatgtctggggccgccccagcgtcggccctgaggttcttctgtttcagctgatgcctcgctccttcctggggacaggcggaaggtgcggggcgctccgtgggacatsgctggggcccacgcagcctctggtttaatgcagagctccgagctctgctgctttcctctttaaatatgcggctgtgccacctggagtcagggaccacggtataggccaccacagcggttaagggcaaaacagctgggcgcggacactcataatcccagcactttgggaagccgaggtgggcg

SEQ ID NO: 234157 - DNA, 414 bp, Homo sapiens
ctgcccaacgctgacaccctagacccccggacccaggacccagacacgcggcgccggtccgcgcatctctcggtcctgctttctgcgcggcttccagcagagggcgcgcggccctcatgtctggggccgccccagcgtcggccctgaggttcttctgtttcagctgatgcctcgctccttcctggggacaggcggaaggtgcggggcgctccgtgggacatcgmtggggcccacgcagcctctggtttaatgcagagctccgagctctgctgctttcctctttaaatatgcggctgtgccacctggagtcagggaccacggtataggccaccacagcggttaagggcaaaacagctgggcgcggacactcataatcccagcactttgggaagccgaggtgggcgggattgcctg

SEQ ID NO: 234158 - DNA, 407 bp, Homo sapiens
gtcctgcccaacgctgacaccctagacccccggacccaggacccagacacgcggcgccggtccgcgcatctctcggtcctgctttctgcgcggcttccagcagagggcgcgcggccctcatgtctggggccgccccagcgtcggccctgaggttcttctgtttcagctgatgcctcgctccttcctggggacaggcggaaggtgcggggcgctccgtgggacatcgctggggcccacgcagcctctggtttaatgcagagctccgagctctgctgctttcctctttaaatatgcggctgtgccacctggagtcagggaccacggtatargccaccacagcggttaagggcaaaacagctgggcgcggacactcataatcccagcactttgggaagccgaggtgggcg

SEQ ID NO: 234159 - DNA, 457 bp, Homo sapiens
atagaatggcatttcatggtgcagagagacttatctggctacaacggagaatgcgcatgcaacagattcaaattaaacatttcttgagtacctgccatatgccagggactaggctgagcatcttttacatggattatcttatttattctcacaataacccatgggtttaaatttattatgtctatyttatgatggagaaatacagaggttaagtaacatgcccattcacacagctgttaagcagcaaagccaacatattaagctgtaagtttgggcaatgatgcaaccacagtggattttagaggatttgggagcacagtttttgaagacctttttttgcctggcctgtccccaatttgagtgccaactgtctgccaattggcattggcaaatgtcgatttccaactttttatgaccaaccctgatcttcagttaagggtttttgaccaaagcctga

SEQ ID NO: 234160 - DNA, 560 bp, Homo sapiens
tcataagcaaaggagaaataatcttttacaaacaagcaaatgctgagggaatacattaccaccagacctaccttacaacagctcatgaaggaaacactaaatatggaaaggaaagcattaccagcactacaaaaacacactgaggtacatagaccagtcacactataaaacaatcacataaacaagtctgcaaaataaccagttaacattatggtgacagtgtcaaatcctcacatatcaatattaaccttaaaggtaaatgggctaagtgccccaggtaaaagacactgagtggcaagctggattagaaaaccaagactcattgayatgctgtcctcaagagaccatctcttatgcaatgacacacataggctcaaaataaagggatggagaaaaatctaccaagcagaaaaaagcaagagttgcaatctcagtttcagacaaaacagactttaaaccaacaaagataaaaagacaaagaagggcattacatatgataaagggttcaattcaacaagaagatctaactatcctaaatagatatacacccaacacaggaa

SEQ ID NO: 234161 - DNA, 592 bp, Homo sapiens
  misc_feature (1)...(592): n = A,T,C or G
gtatatgggatgtattaggtctttagaactctacattgagactgcaatttgaccaatcttctttctttatgcccttgaaccgataggctggaatttactatactggcttcaattaattaatgctgattgtcaagaggaaataagggtgctactgtgcaatgggggcagggaggagtaaatytggaaccaacgggctcctctatggttcctcctagtaccactttttccagtaacaaaagttaggaaaacgacagaaacccaatatcaggagacactttcatcccaagaaggactggctaaggacaaacaaatnnttttttttttttttttttttttttttttctgagagggagtctcactctgtcacccagactagagtgcagtggcgcgatctcggctcactgcaacctccgcctcccaggttcaagtaattctccttcctcagctgaggacaaagaaattttaaaatggataaagttagggtaggaaagggagtccacctcctttattcattaaacaatttcttttttttttttttttggtttcctcctttccatttcccttactattttaagttggatgagctagtgat

SEQ ID NO: 234162 - DNA, 356 bp, Homo sapiens
agattttttttccagggcaactatggtggtaccagcattcacatrcagcacagagatgacagttctaaaccttaagtaggtgtcagctgctgtgaggcaccagaagaatccatggccgggtgttaaagatccagtgtgatccatctgccaaacgagcctgctgatacccctcacgataggtcatcattctcgtcatactgtttgggctgattggtgggaattgcactgcattcttggcttctgtgtcttctcggattacacccatggatttggcccattcctgcatttgagatgggattccatgactggttcattaaggcacccagcgtgtggcccttccaacttgttttggacag

SEQ ID NO: 234163 - DNA, 566 bp, Homo sapiens
ttgttgctttatatctgttgctcttgaaaagaatgaatggcttttccayaggggacattcccctttacgtttgtctgttccaccttcacgcaggtgtgctgggagcagcttgatacatattgacattgttgggcacaataacaataccttgtgtttcaggggttgtgtgagaatgtattcaggtgacttctttttggaccttttttctttgcattggatgatgtttttcttctaccttttctacaatagttcagaaatagatacaaacaggagggttcggggagattcctggaaggggatggtattgacacgaagaattagcaaaaatcatagctctctccagagggtttgtgagggctagaccattagaggaaaaaaatggttcaggcaaaataaactgcagcagaaccccaactgttaggccctctcccctgggtgttcccatcagtcctgcatggatgcatttcaaataccaactttccattctaatcttttagggcagcatgtaaccaggcctcactgagaggagaaatccaagaagagtgtagagaaacacacatgagagg

SEQ ID NO: 234164 - DNA, 500 bp, Homo sapiens
ttgttataaatgtgcctttatttctagctgtttgacataacttttggatgttaataaaaaaaataacaccttgggaagtatggacatgggtggatagaaatgtaattgagaaagccatatccaagtagattgagggaattagtaaaggcctcatcacggcatacccaagtcataacatgttaaaagtttgctccgttggtgttcatcctccygagacacccaaggctgatggcaattatcctattcatcttctcccacaagtctgtctttagcggaagatttttttctttacataaagagctatcatataaaaagtgctcatagtgccagaaattgaggtaaatgcaatttgcaaacattattatctcatttaattctcttgaggatagataatattagataaggtaaggattaaagagaggttaagaaacttgatcaaggacacccagcagggaagtacttagcagggctgttcactagggcctgctgtttctctttcc

SEQ ID NO: 234165 - DNA, 500 bp, Homo sapiens
ttgttataaatgtgcctttatttctagctgtttgacataacttttggatgttaataaaaaaaataacaccttgggaagtatggacatgggtggatagaaatgtaattgagaaagccatatccaagtagattgagggaattagtaaaggcctcatcacggcatacccaagtcataacatgttaaaagtttgctccgttggtgttcatcctcctgagacacccaaggctgatggcaattatcctattcatcttctcccacaartctgtctttagcggaagatttttttctttacataaagagctatcatataaaaagtgctcatagtgccagaaattgaggtaaatgcaatttgcaaacattattatctcatttaattctcttgaggatagataatattagataaggtaaggattaaagagaggttaagaaacttgatcaaggacacccagcagggaagtacttagcagggctgttcactagggcctgctgtttctctttcc

SEQ ID NO: 234166 - DNA, 422 bp, Homo sapiens
acaacgccagaggaatctgcaaactaacctcacttcatcagttttctcctrtatatttaccttcccacagtttcccatccttggaagcccaaaacctcacttctttgtcctgtcttttcttgacaactttattgttctttgttgaacatgccacataagccagatgccacataagccagagttctaagctgctgctgtgggttacctttcattgaggtttctcctgtgtgatgtacactgcatgcattcataagttgtttgttttacttctgttaatctgtcttttattacgggagttcatcccaactaagaacttatgaggcttgggggaaaagttatttttcctccctgacagtcactgcagggcaactgacgttctgacagagggaggcatctgccacaggaacacgaggaaagcagct

SEQ ID NO: 234167 - DNA, 533 bp, Homo sapiens
gtgttcataaatgtatgattcagctctgtttagagacactcccttctctcttaccggaattcactgggttgagttacaaaggtaaagtgtatttccttaccatagtatctatgaagattaagcctttcaatacctgtctgatgcttttaattgcagctgagcaagccattacactgggaatgagttgaccagtaagtgtggacttagagacagtagtattctggaatcctaacatttccttgagttcaaatgaagcatttgaatgttctcaagattagttttacaaatgcagacttaaaaatctcacattttgtaagagacaagccatttagctcttgttttattgccagcaatttaaagctattattgagacagaaaatatgacctgtgaggtttcatggcatatgtaaaaccttacccatttttcacattaycctaatctgtttggtcatttagtgaaacaggatttcttgggagataaaacaccacagccaacacatgtacaaataaataaatcaataactaactcttcc

SEQ ID NO: 234168 - DNA, 507 bp, Homo sapiens
aattttaggtggaagatatatttctgcaacaagcattacatatttgttaatcactgtggactcagcattgtgctaagccctctggagactcataatacaaaatcagggctcttcagtgaattttcaatcaatttgatgactcaggaaagatacataaaacttcaagaacaacttttaaaatcatataactaagtgttgatctatatagcactgactaaaatactataaggttttagagtagattggaatcagttctgagttagtcaaaggaagcttcattaaaaagagaaaaagacttaaggtaggcactcaagctgctttaggattcagcaccctgagagggaatctagaataatgacagttgccattgattgaacacctacaagacccacgcaggacttttctcagctcttcaaaacakagcgcatgctctccggtctctgagtccacacacatgctattcccctgccttggacagtctttccccagctctgggcctggtcacct

SEQ ID NO: 234169 - DNA, 566 bp, Homo sapiens
tgtgatttgctatttctggcatcctgattctatgtggctacagtgagtattcttgtggtcttcgctgatctgaagcaattttaatttgacgaggaggaggccatttctaagagagtgcctattttttccccaaagcaggtcaatttaaaaggacaaagttctcattttaactttggtgcaatatgcatgaaaataaacagatattaaaaggaacaggtcatctctttcattggcaaatttcactgtaatattgaattctatttgtgggggcacaaagaaaataatggtgtaatttacaattgagagagagagggagggagggggagacagagagagagagagaaagaccattactgccacctctcgctcacttcttcagaactgagaaaatgttgaagaaagttggcatttgctggccaaagtttcacacagacagtctgacttttgtttttacttccatgacctttaatggcyttcagtgcagtcagaccaactctgcatatatattgacactatgaaaaccacacagataagcagttttgggttttcatgctttatttactttg

SEQ ID NO: 234170 - DNA, 622 bp, Homo sapiens
cccagctaattttttgtattttttgtagagacagggttttgccacattgcccaggctggtcacaagttcctggactctagtgatctgcccacctcggcctcctaaagtgctgggattgtataggcacaagcaaccacacccagcctaaggccagctttgatttaaaaaacatttttttttctcattttttcactcttaggatagaaccaaaatatctaagctcgaaatgatggaaatgtgcgtctctaatcagtgattaaggaaaagtaaaaggaacttaacaccttcaagaaaagacagacaaataacaaaacagcagtttgatagaatgagatatcaggggatggcatagaggaaagtttggwtatagttttatctttgttacatgttaatgtgaccttggacaagtcctttaactttagtgtcttttttaaatggggtaaaaaacatctactttaggtgttcagcataattcttagcataggttcttaactatggtatatggcacaaaactgttcagaaatagaaattgtcaatgttcacatttccaaacttctctgaacctcagtttcttcatttgtcaagtggcaattaccagttggagggttatgtagtgttttat

SEQ ID NO: 234171 - DNA, 400 bp, Homo sapiens
tagccatcactctgtgaatgagggtttctattagggtaagaatatgaaaaacattgctttttatgctataagatgcagggagttcttgttttactttacattaaacagctcaaataaacatgacatacacagacataaaaacaaatgaacacttaaggacagacacaaataataagattataaaatagcaaaagattttataaatagattagcaaggactgaaaaatcatatctgagatagtttacttggtaactaagttgttgggarttttgtaagaaaaacagttaaaggaattttaaaacataatacatttttatttctttaaaaacgtatgacaaaatttcttctgccatcggccatgctcagatttatacattataaaatgatttaattccctaa

SEQ ID NO: 234172 - DNA, 528 bp, Homo sapiens
aagtaagttcaaatttaaattaacagtattctacattcagtgtaataatgtttaaaactatgtagaaatggatccttaaaaacctctcatttagtctttctagagctgtcataatatttgatgactataaatgtaaattccatttaatggtgaaatttcaacaaaactggaatgagctatgggatttttcttttgcaaccagatagacaaataaataggcaaagagagttgagattattactcacttttgaaaatcatttgaaatacttttgcactcccttcccaaaaagccttttgagagctagagttatttatttttggagcatcacattttgacagatttttgcacattcttcagtggtcatcacatgaagagatttagcttaattccttgcacaactaacttgaagtcgtatgatacctagttgaccttaattgtgtcttgttcagtccaacaaatgcttactatgtctcatgcataargctatgtgctctttattctcagggataaaaagaagcataaatcac

SEQ ID NO: 234173 - DNA, 602 bp, Homo sapiens
ctctttacatgtcacctcggtgaagaagacttccctgaccaccctaactaaactagcacccccgtcactccctattctttaaagcatttgtctcccttaccttatatatttctttgtttgtttgcttattgtgagaatctagcatcatacctgataattttttttttttttgatatggtgtctcgctctgtcgcccaggctggagtgcagtggcgcgatctcagctcactgcaagctccgcctcccgggttcacgccattctcctgcctcagcctcctgagtagctgggactacaggtgcccacaaccacgccaggccactttttttgtatttttagtagagacagggtttcaccgtgttagccaggatggtctcgatctcctgaccttgtgatctgccmgcctcagcctcccaaagttctgggatcacaggcatgagccaccgcgcctggcccatacctgataatttctacaacacatttttgtttgctgctgtatccccagcactgagaacagtacctggcacataggaggtgctcagtaaagatctgtggactgaatgaatggatggatgaatgatccatgtgggcaagaccagtgttt

SEQ ID NO: 234174 - DNA, 638 bp, Homo sapiens
ttgtggtggcctcagactggagggtcagagaggagctagcaccaaggagagaaggagagtagggcagaggccaggggttgggggaaaagagggaatgcacctgctttgcctctgattccttaccatttctgagttctagaggcccagccattcttccagcttctggggttcatgggcaacctacagcttgacaatcaaattccctggacttaagtgaagctagcgtggcctccagtttcttgtccccaaataatgccagccygagggcaggtgagtggataggttggtgctggccagaggaaacgggaaagggcgtccctggaagggagaggggctcaagcagaggcctggacacctgcaggctgcagaggggtgtgagggggccgtggcagggtttttgggaacagatagctcagagcctttgggactttctgcctcagagtttgtgccctccgccttgtcacagaggcccagtaactcattttcaatcaggccccatccccagcacacaggcagagttaattaaacatagccttcccttcagtaaggaaataaaaagcaacctcctgatacaacaattagtatttacagccccgcccctctcttccttctcctgccttctcctaataccgtgcctt

SEQ ID NO: 234175 - DNA, 580 bp, Homo sapiens
tccaaaaatttaaaatttctyttctagttatataccttaaagaattgaaagccaaatctgaaagagatatttgtacacccatgtccataccatcaatagtcacagtagctaaaatgtagaagcaacccaaatgtccatcaagagatgaatggataaacaaatatacacatgcaatggaatattattcagccctaaaaaggaagaaaactctgatatatggtgtaccatgaatgaaccttgaagacattatgctaagtgaaataagccagtcacaaaaagacaaatactctatcatttccctaatatgaggtacttagattagtcaaaatcagagagatagaaagaaagtagaatggtggttgccagaggctttggatgggagtaaagaggagttattgtttaatgggtatagagtttaggttttgcaagatgaaaaaattatggagattaataatggttatggctaaattatgaatgtatttattaccactgaactgtatacttaaaaatgatcaagatggtaaattttgtgttatgtgtacacaatttaaaaaatggaaaaaaaagaaatctgagcttg

SEQ ID NO: 234176 - DNA, 575 bp, Homo sapiens
catgtgtgatatagggcaacagaatggtaaaccaacgaccaccatagagaggttattattacctataggagggaaaaattctcagtcaggaaaatataaatctcttaaccagcagacagtgttttctagaagtaacaaataacctaccaaacaaaaaacaggtatcactttagtaatgaatattgtcactgaaatgaaagaaaagaaacaaagatacaaagccataagtagccactactaaacaccccaaaactgagaagaaaatacaatgcatccttacggaagtaagcaacaaaatgaacaccaagagggcagaataaaaaaaaaaarggattaatagctttagattcaggaagaaatgtggtactttaaaagaaggaaaaaaagagtcaggagacaaattaaatgaacaattaaagtttttgttctaagatacctgtaatgatttggttaatatttaccaactaaccaaatggccaaaattgactgataaattttcgctttgttggattgacttaaactcttttaaatacatttaatggactatatttgcattattaaaatgatcaaaatca

SEQ ID NO: 234177 - DNA, 575 bp, Homo sapiens
catgtgtgatatagggcaacagaatggtaaaccaacgaccaccatagagaggttattattacctataggagggaaaaattctcagtcaggaaaatataaatctcttaaccagcagacagtgttttctagaagtaacaaataacctaccaaacaaaaaacaggtatcactttagtaatgaatattgtcactgaaatgaaagaaaagaaacaaagatacaaagccataagtagccactactaaacaccccaaaactgagaagaaaatacaatgcatccttacggaagtaagcaacaaaatgaacaccaagagggcagaataaaaaaaaaaaaggattaatagctttagattcaggaagaaatgtggtactttaaaagaaggaaaaaaagagtcaggagacaaattaaatgaacaattaaagtttttgttctaagatacctgtaatgatttggttaatatttaccaactaaccaaatggccaaaattgactgataaattttcrctttgttggattgacttaaactcttttaaatacatttaatggactatatttgcattattaaaatgatcaaaatca

SEQ ID NO: 234178 - DNA, 477 bp, Homo sapiens
acaccccaaaactgagaagaaaatacaatgcatccttacggaagtaagcaacaaaatgaacaccaagagggcagaataaaaaaaaaaaaggattaatagctttagattcaggaagaaatgtggtactttaaaagaaggaaaaaaagagtcaggagacaaattaaatgaacaattaaagtttttgttctaagatacctgtaatgatttggttaatatttaccaactaaccaaatggccaaaattgactgataaattttcgctttgttggattgactyaaactcttttaaatacatttaatggactatatttgcattattaaaatgatcaaaatcaagacagcctattgattcattatatcattatctcttaggatggatcaaatatagtgagtgatatattagaattttaaacataaatttaggatcaaaaaatgtgtacttgaattctagaaccattatttcacagcttaaatgaag

SEQ ID NO: 234179 - DNA, 461 bp, Homo sapiens
cttcaccatgttgaccaggctggtctcaaactcctgaactcaggtgatccgccctcctctgcctctcaaagtgctgggattagaggcgtgagccaccactcccagtcttattattcttaaaaacaaactaccaaaaatcatcttgaaggctataccacagtcttatgtatcattcattcatgaatttattgaaaatatgtttgtagaatatgaccacgtacaatgtgacttaccatataaacaaatacccagagtttctgttcttatggaaattatattgtttgggaggagacataataaacagatatgcaaattaatctataacatagcttgtgactgtgagaataaaaagaataatcaactagggkaatagaacagaaaatgactgtgtgtgggaggcactgctgtatttgatagggtgtttagagtagggccaactgcttagatgacattaaaataga

SEQ ID NO: 234180 - DNA, 609 bp, Homo sapiens
tctagataatttataaagaacagaaatttatgtcttacagtactggaggatgggaaatttaagatcaaggtgccaacaggctcagttgtctggtgagggctgctctctgcttccaagatggcaccttattgctacatcctccagaggsaaggaacactgggtcatcatatggcgcaaggcaggaggaaaagagaatctggggctgtgtgaagcttctttaccaatggctctaatcccattcatgagtgagaaacccttatggcctaatagctccataaaggtaccacctgttaatactatcaaattggcaacacctgaattttggagggaactcattcaaaccatagcactaaggaaatctaataaagtatgtactttataatcatttagtaatgttggtttattgtttatgacaaatgtaccatgtttatggcaaatgtactaaaggaagatgctaataaaatgagaaaactggtgtgggtatataggaattgtttgtgttacatttacagattttctgtaaatctaaaagtattctaaaattaaaagattatttagaaaaaaacctgcataaaaataaaaaggttaaaaaaaacccttctttttata

SEQ ID NO: 234181 - DNA, 614 bp, Homo sapiens
atgcacacaataatttctcagatcaattatgacatcttctgtatgtgctttcaatattatggtaaaagaaatgccccatgtatcattttggtttgactcctaatttactatggtgtaactgtagcttttacttcccataggcaaagatctgttaacagtgaattctgcaactgagaaagttttgtaaaattaatctttccaagatccagtgaataatattttggcactctttttgatgtttgtaaatctccttggtaagacaatatggatctaaacttttaatcctctctcagagacaacagagtatcacagtgtattatttgtagtgattatttagagaaataaccttggtattaacaggatgtattttgtctgaggcttaaattgtcgatcagtctctcatgacctttttcactattctagcatcatagtatcttgactataatctcaatgttcttttactcaaattccattctcttgcataatgatgaaacatattcagccaccttgtaactgaagcattctacttagcacctactgagaagaatttttrttcctgcatctaggtattacagaaacagagtgacaatcactgtgattgaaaagcagcatat

SEQ ID NO: 234182 - DNA, 475 bp, Homo sapiens
gcttttctcttttacctcattaggcctgaataaattgcaacgtcttcaagtaaagctgtagggaaggcatttttgcgattggcctgatggtgatccacaggtgcagggargtgcaaacgcattgagacaagctctagcatcacacatgtgctgacagaatgtgagcttgcaggatggtgaagcagaaaatgaaaagtttgtccaccaggtggatttgctaagtccatggcttaacttctgtttttcctttgcttctttttgctccaattgatgatccacataaagtcctgcatgactaaaaatatctcccatcttatatttgtgtctaaaaggtgtattttaaaataagcctatatctcttagggaatatatcataaaactgttatgttaaaattatctctcttgtattggaaagtaatgttagcagatgacttagatgtttcttcatcattttttaatcactgatagtgcccca

SEQ ID NO: 234183 - DNA, 563 bp, Homo sapiens
tctaaaaaatccttacagcatgctaatragaaagtaaagaccaaaattcagattgactgtactgatgcaacagaaccgcctgttaaatctctctgcttctctatatcatctattccctaattattctgaaactactaactgttgatcctttgctgtttcctccaaaccgtttcaccataaaatgccctttaaaataagactttctaatgaacctggggtaccaatctcagcagaatttaaacttttatctctagctgaactccaagccacataattttccagaccttaaaagagactaaactaaatttaaacaagaattttaaattcctttgggtgcttatgatccaggaatccctgatttatatcaatttgtttacgtggtactcagccctggaggtattcaaaaatggcttcaagaaatggattggaagaatcccattaaagattttgaagattctgttaagcatgcttctaagagtagactaaaaagaaaccatgtctgaggctttttctaagagaacagattggtccatgtcttagtccattttctgctgctgtaactg

SEQ ID NO: 234184 - DNA, 584 bp, Homo sapiens
ctgcctctcagtactgtttaatagcrggttaagatgaaacatgagtttcagaggggacaaactatattcaaaccatagcaaggccataaaccaatcttgcaaacagaaaaaagacgaatctgctgtggattattgtttctgcttagaaaaaaatacttaaacagtacaaaatatttaaacattttggccatagtggccaaaatgatgaagtggctatgtcagcccattttgttaatgggctgcacatacagataagtgacgtatgaaagaaacataaagtagaaagcgaagtgactcccatgacagtattacaatatttagcaaaacattttgggaaaaacttagaacaaataaagtaaccaccagacaaataaattgatgattttgtaattacagtcattgcaggggcctcagcctaactttaaaatacctttatccaacaactctttcaataaagacatttttcattattgtaaacaaataggacattggaagaattacccattaaaccccttaacacagcaatctagactatcagactggaaacaaaagggagattctgaactttctgactcctatgataa

SEQ ID NO: 234185 - DNA, 584 bp, Homo sapiens
ctgcctctcagtactgtttaatagcaggttaagatgaaacatgagtttcagaggggacaaactatattcaaaccatagcaaggccataaaccaatcttgcaaacagaaaaaagacgaatctgctgtggattattgtttctgcttagaaaaaaatacttaaacagtacaaaatatttaaacattttggccayagtggccaaaatgatgaagtggctatgtcagcccattttgttaatgggctgcacatacagataagtgacgtatgaaagaaacataaagtagaaagcgaagtgactcccatgacagtattacaatatttagcaaaacattttgggaaaaacttagaacaaataaagtaaccaccagacaaataaattgatgattttgtaattacagtcattgcaggggcctcagcctaactttaaaatacctttatccaacaactctttcaataaagacatttttcattattgtaaacaaataggacattggaagaattacccattaaaccccttaacacagcaatctagactatcagactggaaacaaaagggagattctgaactttctgactcctatgataa

SEQ ID NO: 234186 - DNA, 584 bp, Homo sapiens
ctgcctctcagtactgtttaatagcaggttaagatgaaacatgagtttcagaggggacaaactatattcaaaccatagcaaggccataaaccaatcttgcaaacagaaaaaagacgaatctgctgtggattattgtttctgcttagaaaaaaatacttaaacagtacaaaatatttaaacattttggccatagtggccaaaatgatgaagtggctatgtcagcccattttgttaatgggctgcacatacagataagtgacgtatgaaagaaacataaagtagaaagcgaagtgactcccatgacagtattacaatatttagcaaaacattttgggaaaaacttagaacaaataaagtaaccaccagamaaataaattgatgattttgtaattacagtcattgcaggggcctcagcctaactttaaaatacctttatccaacaactctttcaataaagacatttttcattattgtaaacaaataggacattggaagaattacccattaaaccccttaacacagcaatctagactatcagactggaaacaaaagggagattctgaactttctgactcctatgataa

SEQ ID NO: 234187 - DNA, 536 bp, Homo sapiens
agaacaagtagaagaaagaacatcagagctcaaagacaaggcttttgaattaacccaaacagagaaagacaaagaacaaagaattttaaaaaatgaacaaagtatccaaaaaattagggattatgttaaatggccaaacctagtgttcctgaggaagaagagaaatctaaaagtttggaaaatttatttgagagaatgattgagatgaactttcctggccttgctagagatctagacatccaaatacaagaagctcaaaaaactcctgataaatccgtcataaaaatggttattacctaggcacatagttatcaggttaactaaagtcaagatgaagaaaataatcttaagagctgtgagacaaaagcatcaagtaacccataaaagaaaatctatcagattaacagctgatttctcagcagaaaytttaccaaccagaggaatcagagtcctatctctagcctcttaaacaaaataattgtcagctaagaattttatattcagcaaaactaagcttcataaatgaagaagggata

SEQ ID NO: 234188 - DNA, 564 bp, Homo sapiens
aggcaaaactatagagaatataaaaagagtagtggttgccagcgtttgggtttgggatacagagggaggaatgawtaagaggaatgaataagcacagaggatttttagggcagtgaaactattctgtgtaatacagtaatgatgaacacatgtcatacatttgtcaaaattcatagaattgtataatacaaaagtgaaccctaatattaactatggacgtcagttaataataatgtatcaatattggttcatcaattgtaataaatttaccacactaatgcaaaatgtagtaatagggaaactatgtgtggggaggagggtagagggagtaaatgagaactctgtatttctgctcaatttttctgtaaacctaaaacttctcaaaaaagaaagtctattaattaaaaaaattgaatcaagggttgtgcatgacaatagcaggtaatttagggatgaatacaatttgcttgacttagagcccaactagctctgaaactctcttagaaaccaaaacacactgggtttccaaagcttactgcaaatgagaactttgcatacgtggag

SEQ ID NO: 234189 - DNA, 564 bp, Homo sapiens
aggcaaaactatagagaatataaaaagagtagtggttgccagcgtttgggtttgggatacagagggaggaatgattaagaggaatgaataagcacagaggatttttagggcagtgaaactattctgtgtaatacagtaatgatgaacacatgtcatacatttgtcaaaattcatagaattgtataatacaaaagtgaaccctaatattaactatggacktcagttaataataatgtatcaatattggttcatcaattgtaataaatttaccacactaatgcaaaatgtagtaatagggaaactatgtgtggggaggagggtagagggagtaaatgagaactctgtatttctgctcaatttttctgtaaacctaaaacttctcaaaaaagaaagtctattaattaaaaaaattgaatcaagggttgtgcatgacaatagcaggtaatttagggatgaatacaatttgcttgacttagagcccaactagctctgaaactctcttagaaaccaaaacacactgggtttccaaagcttactgcaaatgagaactttgcatacgtggag

SEQ ID NO: 234190 - DNA, 491 bp, Homo sapiens
  misc_feature (1)...(491): n = A,T,C or G
tctctcagcttcccagacatgctaagctctttgctgtctcaaaggcttctctctttctattccatctacctagaacctcctccaattcctgattcctttgcctatttcagattcagcctaaataacacatcttgttagcaactttctctggccatgttatttaaggcaggttgccttcttttgtactagagctattttgttttgttcatatcacttactatgttatttagtaatttcatttgttgttgttttctgccatcctcaccaaaatgcaagttctgtgaatccagtggcatgaatattgtgctcattgttggatcactggtacmtaacacagtgcattgcacataagtgctcataaatatttactgaatgaatgaaatgaacaattgctaggccagtcttgacttccagaagaaagtcaagtataagccagaatttaagctctgcannnnnnnnnnnnnnnnnnnnnnnnnnnnnnnnnnnnnnnn

SEQ ID NO: 234191 - DNA, 626 bp, Homo sapiens
ggtcaggaagtcagcacaagaggggaattgagatgcttctattacttctttgctatccctctttcccccaaaacagtttatcttgttctccagcaaatgctgtcctgtcttcctctaggggactgtgctctctaaaagctttttctttcgcttagtgaaatgttagatctctgtatcagtttaagaagaatcactagaagaaaaatccatctatttctttatattaagagatttgttaggggattcaaacctacacgttgaatgagctggttaaacagtctctgtagggcagctgtcttcctgtctgatgcctgagtttgaagtttgcagggaaggcaatcagaaaggaaaaatggatgtaaagttagggagagcgaggaaaaactagaacacatgagcatgagtggtaacccacagtgatggactggaactcacaccagttctcactgccttcaaccttgaagtaggaagaagctgaaacccttcatcatggagctaaacgcatttggaccatgagtcagagaaggtgaaggagggtgcaggtcaagttggaccttttgcatctccatgaaataagcyagcaaaatgacaatgtgcatgagtttcagaagttcctggttatcatg

SEQ ID NO: 234192 - DNA, 604 bp, Homo sapiens
atggagctaaacgcatttggaccatgagtcagagaaggtgaaggagggtgcaggtcaagttggaccttttgcatctccatgaaataagccagcaaaatgacaatgtgcatgagtttcagaagttcctggttatcatgccctgtgttactggggattaaatacaarcacacacagaacaaaaagaaaccgggcactgtggctcacacctttaatcccagcactttgggaggctgaggcaggcagatcacgaggaggtcaggagtttgagatcagcctggccaacatggtgaaaccctgtctctactaaaaacacaaaaattagctgggtgtggtggcgcacacctgtaatcccagttactcaagaggctgaggcaggagaattgcatgaacccaggaggcagaggttgcagtgagccgaggtcatgccactgcactccagcctggctgacagagagagactctgtctcaaaaagcaagcaagcaagcaaacaaacaaacaaacaaacaaaaccagcctgagtgctacttcactttcattctccaatattgcacaaaaaaagtctttaaccctaactagaaatacaaggaaaggaatccttggaaa

SEQ ID NO: 234193 - DNA, 529 bp, Homo sapiens
gggattctctctgctacagcagttaggagctgctccggaaacattcactgacaggcctagccagtcgcccttaatgacctcattgtggcattttgataccaacctgtggttggctcagtgggtactaggtctctaacaatgcatcaatgatgcctctyataatttctccagaggagaaattcagggtcagcaatctggtgggaagaaagactccaagatgtgccttggggacagggtgtatatgggaagtctgtaatttccactcaacttcactgtgaacctaaaacttctctaaaaataaagtcttttaaaacacacacacacacaaccggcatggtggctcatgcctgaaatcccagcactttgggaggccaaggcgggcagatcacttaaagccaggggttcaaggctagcctggccaacatggtgaaaccccatctctactaaaaatacaaaaatgagccaggagtggtggcacgcgcctgtattccagctactcgggcgcctgtaattccagctactcaggggg

SEQ ID NO: 234194 - DNA, 607 bp, Homo sapiens
catctacaatctgtttaatccagtaactctacatttctgcatatttattttcagtttggtccaaatcattattttggccctaatttctctactaagcaacaatttaaaagtatctttgagacataaagactcaggaattaccctgtgtttcacagtggacaggtctgtacgaacctacctcaaaatccgaggaagtcaatagccgaggaaagatgctgacaaatccggtttcttaggaagaaacatttaaccgagacttttgaacagaatttaggtctgtgtcttgagcagcagcaagtaaagatggtggaccccatgtcattaaccccagacctagggcatagatgccataggtgagggttggttcagaagggtaggacaattgaagtacaatagcatcaaggctgtttgacctaaaagcagaatttagtgtaagtacctgctctaacataaggaacaatagataaatggaaatctcagagaccttcacrtaacacgtgttaattagaagccaacatggtggattagcatagaagatggagttgctttagcctccatatcttgtcctccaaaaagatcaaaactgaaataatttttgtttaagctt

SEQ ID NO: 234195 - DNA, 536 bp, Homo sapiens
agaaaggaagagagagaggctggctgatgatattttattaaactgctttgagtggtgaatgtcagaaagaagcaagataacaaatgacagggctaaagtgccctatacgaggaaatcagagattcacatttgctcctttagatgataggacataaaagaaagtgttcagaggaagaaagaaacaggaaatgatggaaaacttggtgtgctgagtaaagtgatgtatcccatgagaatccccaggatggggaaaggattctgatttggaaatatatatatgtcgtttctttttttaatttttatgagtacattgtaggtgtatatatttatggagtacatgagatattttgatattggcatacaaagtgtaataatcacatcagggtaaatggggtatccattacctcaagcatttatcatttttttgtgttataaacgttatgattatacttttttacttgttttaaagtgtacagyaaattatcgttgactgtatgttacttcatgtagaatgtgttttgttacctatcccgatg

SEQ ID NO: 234196 - DNA, 534 bp, Homo sapiens
ggtctgtagattgttgttgttgttgtaatgtcctttctgggctctggtatcagggcaatagtggcttcacagaatgagttaggaagggttccttccttctcaatcttttgtaatagtttctttagaattagtccctattcttcctgaaayatctagtagaatttggctgtgaatctctctggctctgtgatttttcttgctggtagattttttttttgttgtttaaattactgatttaatcttactgcttgttatttgtcagttcaggatttctatttcttcctgatgaaagctaggggagttgtatgtttccaggaatttatcaatttcttctagattttctagtttgtgttcctagaggtgttcgtagcagagttgaatgatcctttgcatttttcaggtgtcagctgtaatgtctccatttttatttctagttgaacttatttgaatcttctcttttcttgcttaatctagctagtggtctatcaattttgtttatctttttgtttcattgatttttttgtattgtttgtt

SEQ ID NO: 234197 - DNA, 534 bp, Homo sapiens
ggtctgtagattgttgttgttgttgtaatgtcctttctgggctctggtatcagggcaatagtggcttcacagaatgagttaggaagggttccttccttctcaatcttttgtaatagtttctttagaattagtccctattcttcctgaaatatctagtagaatttggctgtgaatctctctggctctgtgatttttcttgctggtagattttttttttgttgtttaaattactgatttaatctyactgcttgttatttgtcagttcaggatttctatttcttcctgatgaaagctaggggagttgtatgtttccaggaatttatcaatttcttctagattttctagtttgtgttcctagaggtgttcgtagcagagttgaatgatcctttgcatttttcaggtgtcagctgtaatgtctccatttttatttctagttgaacttatttgaatcttctcttttcttgcttaatctagctagtggtctatcaattttgtttatctttttgtttcattgatttttttgtattgtttgtt

SEQ ID NO: 234198 - DNA, 534 bp, Homo sapiens
ggtctgtagattgttgttgttgttgtaatgtcctttctgggctctggtatcagggcaatagtggcttcacagaatgagttaggaagggttccttccttctcaatcttttgtaatagtttctttagaattagtccctattcttcctgaaatatctagtagaatttggctgtgaatctctctggctctgtgatttttcttgctggtagattttttttttgttgtttaaattactgatttaatcttactgcttgtwatttgtcagttcaggatttctatttcttcctgatgaaagctaggggagttgtatgtttccaggaatttatcaatttcttctagattttctagtttgtgttcctagaggtgttcgtagcagagttgaatgatcctttgcatttttcaggtgtcagctgtaatgtctccatttttatttctagttgaacttatttgaatcttctcttttcttgcttaatctagctagtggtctatcaattttgtttatctttttgtttcattgatttttttgtattgtttgtt

SEQ ID NO: 234199 - DNA, 611 bp, Homo sapiens
ctggttgccatcagcagcagtaaataaaaatttagattggcttaacctcagagttaacttttaaaaatatttgaggtttttagaatcttatgttttgtgaaaattataggaaaatagctggttaaaatgttagactacatcatcaagtataagagggagaaacaagaaaataagcaggatatatttcatgtttttaaaatttgtgttgaagacctgagttgcaagttgcatgaaaagtttycctgtttttccctactctctgactttcaaaaccttttctacatttcttgaaagtctcaacaaatcttatttttgaactgagatattgaaaacaattatttacaaatataagttattagacagacaaatatatttatatccatttatttaccagattccaactttcttaattctatagaagggtctagaacactcagcgggttcaacaaggaaaatgtccatacataataaagaggaatatttatgagaatgagacagcatgtggtcatgatggggcccttcagtgaagaacctggctgggttggaggagaaagtgtagtttgaggaccctgaagagttgatgagtgtggcaacaaaagaaaagaagacac

SEQ ID NO: 234200 - DNA, 611 bp, Homo sapiens
ctggttgccatcagcagcagtaaataaaaatttagattggcttaacctcagagttaacttttaaaaatatttgaggtttttagaatcttatgttttgtgaaaattataggaaaatagctggttaaaatgttagactacatcatcaagtataagagggagaaacaagaaaataagcaggatatatttcatgtttttaaaatttgtgttgaagacctgagttgcaagttgcatgaaaagtttccctgtttttccctactctctgactttcaaaaccttttctacatttcttgaaagtctcaacaaatcttatttttgaactgagatattgaaaacaattatttacaaatataagttattagacagacaaatatatttatatccatttatttaccagattcyaactttcttaattctatagaagggtctagaacactcagcgggttcaacaaggaaaatgtccatacataataaagaggaatatttatgagaatgagacagcatgtggtcatgatggggcccttcagtgaagaacctggctgggttggaggagaaagtgtagtttgaggaccctgaagagttgatgagtgtggcaacaaaagaaaagaagacac

SEQ ID NO: 234201 - DNA, 618 bp, Homo sapiens
aaagtgaatttttaaagatttatatttttgtggttctttttaaaatccaccagaaaaattctggtagaaaataatcagtggggaatgaatcattatctatattttttcactgtgggtaggacactgatgtaacagagatttctggatgtcatgtctccaagcaaaataaagttgtcaataggaacttttcatgacattcatttcccctttctttttagtgctgtttcctacttcacagtgacctgaccctaaggtaytcatgctgccctgtatctgcctgggaatatcagaataatttatcaccctccatcctttccccatgaaacacaaaatttcgtccaacaaataaaacaagtttagacgtggtttctgtttcttactggaactttcataaaagctttgacaaatttcaccaattattattaataaccaataatggctaatgtgttacatttcccacagaaatttgcaccaaactatgtctcccaatttcccagcgccccccccacccaaacacacacatacaatatgtattagggttcagaacttcaagtgggtagactatgctaaagctggaaatggaaactcaaagttgttcacaggaagaggaaaagtaac

SEQ ID NO: 234202 - DNA, 618 bp, Homo sapiens
aaagtgaatttttaaagatttatatttttgtggttctttttaaaatccaccagaaaaattctggtagaaaataatcagtggggaatgaatcattatctatattttttcactgtgggtaggacactgatgtaacagagatttctggatgtcatgtctccaagcaaaataaagttgtcaataggaacttttcatgacattcatttcccctttctttttagtgctgtttcctacttcacagtgacctgaccctaaggtactcatgctgccctgtatctgcctgggaatatcagaataatttatcaccctccatcctttccccatgaaacacaaaatttcrtccaacaaataaaacaagtttagacgtggtttctgtttcttactggaactttcataaaagctttgacaaatttcaccaattattattaataaccaataatggctaatgtgttacatttcccacagaaatttgcaccaaactatgtctcccaatttcccagcgccccccccacccaaacacacacatacaatatgtattagggttcagaacttcaagtgggtagactatgctaaagctggaaatggaaactcaaagttgttcacaggaagaggaaaagtaac

SEQ ID NO: 234203 - DNA, 577 bp, Homo sapiens
aatgttacaaatttgcgtacttgagtagtgacagatcttaaatatttgccagcattgcttaatctcagttatctttgttttcctctcaaatttctagcagctgctgtctgataaaccttttgtactcttgttctccatattggaagcccagtcttaggtcaaggtctcatggttaacttctaggtagattgtttccacccccatggggctgatttctctctggtgacctgccccatgcagtctggttacttcagcttccccartcactgataactgctttttttagcttggtggtactgtcatgctctcattagtttccagctcactgcactgtggtcaggaagctgtgtccagggagacctggtatgaccatgggccttgatttatgaatttttaatccctaaggaccaaaatcttcaaggttatctcctctacaaggcttaaaatgaattaacttatgtatttcatacactatgataaagaaaagtagctgagagcggtctgaaaaatgtgaggtatacagcatttctcaggcccagaaaacaagagaaggagtcttcaccgcctacccccaact

SEQ ID NO: 234204 - DNA, 577 bp, Homo sapiens
aatgttacaaatttgcgtacttgagtagtgacagatcttaaatatttgccagcattgcttaatctcagttatctttgttttcctctcaaatttctagcagctgctgtctgataaaccttttgtactcttgttctccatattggaagcccagtcttaggtcaaggtctcatggttaacttctaggtagattgtttccacccccatggggctgatttctctctggtgacctgccccatgcagtctggttacttcagcttccccaatcactgataactgctttttttagcttggtggtactgtcatgctctcattagtttccagctcactgcactgtggtcaggaagctgtgtccagggagacctggtatgaccatgggccttgatttatgaatttttaatccctaaggaccaaaatcttcraggttatctcctctacaaggcttaaaatgaattaacttatgtatttcatacactatgataaagaaaagtagctgagagcggtctgaaaaatgtgaggtatacagcatttctcaggcccagaaaacaagagaaggagtcttcaccgcctacccccaact

SEQ ID NO: 234205 - DNA, 577 bp, Homo sapiens
aatgttacaaatttgcgtacttgagtagtgacagatcttaaatatttgccagcattgcttaatctcagttatctttgttttcctctcaaatttctagcagctgctgtctgataaaccttttgtactcttgttctccatattggaagcccagtcttaggtcaaggtctcatggttaacttctaggtagattgtttccacccccatggggctgatttctctctggtgacctgccccatgcagtctggttacttcagcttccccaatcactgataactgctttttttagcttggtggtactgtcatgctctcattagtttccagctcactgcactgtggtcaggaagctgtgtccagggagacctggtatgaccatgggccttgatttatgaatttttaatccctaaggaccaaaatcttcaaggttatctcctctacaaggcttaaaatgaattaacttatgtatttcatacactatgataaagaaaagtagctgagagcggtctgaaaaatgtgaggtatacarcatttctcaggcccagaaaacaagagaaggagtcttcaccgcctacccccaact

SEQ ID NO: 234206 - DNA, 337 bp, Homo sapiens
tggtattcagaaattttactgtgttaaatccaagtgctttgcatttgtcaattgctttaaatttttcaatttgagaactcttgtttttcagcaatcagttttttgcatattgccttttaactatttcttttattttgtctacttcaaggtgtactctttgtactatgctgaattttagacatctaaactttaattatctttatttcccattccttatatattagtgctgtagttggtggtatcctctaaatttgtcttaatttatttatacacttttcacctatgcatagtcttgtcrttttgaaaataaatgtaattatctccaaaattagttctt

SEQ ID NO: 234207 - DNA, 596 bp, Homo sapiens
tcactgcacctcacttgtattttgccattttaggtgcgagcagctagacttgcattgaattataattgaacattttggaaattagatgattctgaagcaactgataaaattaagctttgtagaatgaacactacaaaaaatgcaaagaacgacttattcataaatgaattatgtactgttattctgatttcttacaaataatttattattctataaaaatagggttgctctaatttaaatgtgacaatttagattttccaacatatagaattcattttcttaaggtaaaatgtcagtacaatccaaactgtttaattctcaccctttaaaaaaattaagctgctctacaattttacagtaaatttttattagttttttctcacaatggaagtacaagatatcttgtattgaaacttaaagagaacataagagtcaaggyttttcagccaggacctaaagtgtccattctagaaaaaaattcagtttgaggttattaccacagatccatataattttctttcaaagctatgtttaattaattttaataattttctacaaaatttttccatcttctcattatcagaatccattatttc

SEQ ID NO: 234208 - DNA, 539 bp, Homo sapiens
tacctttccacttaactaagcacttgtcatatactgtggccacaacttaacttttgtagtttgagttgtgacagcaaagctagcaagaatttatttttccttcttcacaatttttgagatagaagattcatgcatactgtagatcttagcaaccacgccatacatttttttctttgcttattaggtaatgaactttcaccttttcaattgaaggaagcattttatggcttatctttggcatatcagaattgccagcatcactactcttgcattttggggccattattaagtaaaacaagggttacttgaatacaagtgctgtgatattgtgacagctggtaaccaacatgtctattaagtgacyaatggacaggcagcctagatagcatgaatatgctggacaaaggaataagtcacgtcctgcgaaggatggagcagaatggcagcaaaatatttcattacaatactcagattggtgtgcaatttaaagctacaaattttttggtaatttttatttaatattttgggaacaaggttga

SEQ ID NO: 234209 - DNA, 581 bp, Homo sapiens
atgaatatgctggacaaaggaataagtcacgtcctgcgaaggatggagcagaatggcagcaaaatatttcattacaatactcagattggtgtgcaatttaaagctacaaattttttggtaatttttatttaatattttgggaacaaggttgactgaaggtaactgaaaccatggaaagcaaaacctcagataagaggggggtttagcaaaaggggttccagcaatatccttcatgaagacagccaggacagtacctggtgcaagactcccccttagccacatccttattccctcctcaatctcggggtgggtgtcttttgattccagagctcattgttgaaatcacttatgtgctgttactagaggtatacagatggtcgaagtataaccacaggtgatttgtaaggcatagtacagttgacccttgaacagtatgagttgtgcaggtctacttayatgcagattttttttcaataaatacaggtaggtctccatgtctgtattctgcatcagcaacaaaaggcagatcaaaaatacaatacgataggatgtaaaacttacagataagagggcctactttt

SEQ ID NO: 234210 - DNA, 410 bp, Homo sapiens
ttgcttccagaagttaagactagagcctrcacttccagctattccaaaaaagttttaatcacctgatgcttgcttatgtatccctgtctttccaaattatctattctgttatataccatgaaatctgaaccaagaaaccatgtctttatggtgcagctcaaattcccactcctataaaaggcacatctgaattgactcaattggaaattttatcttccttggtcagctatcacatagtacttaaattctacctttcaaaaacacttattatattattctcatgcgtgttagtgttcttattttattgagatggtgagcactgctcctaatagaatctcctacataaacgtagtcatattagttcagcataatgatacccaatactgtatcaaaatatgtctaatttcata

SEQ ID NO: 234211 - DNA, 594 bp, Homo sapiens
ttttaaatggaaaacaatctgtatttcaattcatattcttaastcctgcttaatttattacgattgtcaaactcataatctagttatttatcttatctgtattcccaccagacctcatatggaaataaactccaaggtggcaagatattagtctttttgttaatttttgtctccttactgcacagaaaatttcctggtatataaatattcaataactatttgttgaatgaattaatagaataatattgaaatggcaaacacaggaggcataagtatttgaatgtgaagacaggggatatgaatgagataaaatgttgagtttttggcctgatgtaagatgctaatgggaaggtggttctgagtatgagcaatcatatctggacgcaagataaatatttcaaaattcataccttagaaatattcattaaagtcattggaacaaagtagataattaaccatagcgctacaatggggaagaaagggaaatgagcttcgaactctgaagaatgctattatttgaaaaatccattgaaaaactgcttacaacttttccacaaaggaagatagcacgatattataaaattcaattaaaaa

SEQ ID NO: 234212 - DNA, 445 bp, Homo sapiens
ttcctgttgctaagtgttctgatagtttcatttttgtgcagttccagcctacaatcaattcgtggtccctcaatatacatccaatacataaaacttttgcttaaaatagccagagcctatttctgttrctgtgaccaagaatacaaatttttatttttattattgttttattaacattatctttattagtcattgcttttcagcctttatataaggggaagaagaaaaaaaatacaacagaatatagcaagaatagcaaaaattctcccctagtttttgaaaaaaaaaaccccgaaaacagaatgtatcactcccagatacaccttggcatattttgagatggctgttcagagagcctgcaaacctaagtagccacttaaagtagtcttttgtggggaagatttctatcagtagagaaaatctgcattgatgcagctaggcttta

SEQ ID NO: 234213 - DNA, 448 bp, Homo sapiens
acattttcctgttgctaagtgttctgatagtttcatttttgtgcagttccagcctacaatcaattcgtggtccctcaatatacatccaatacataaaacttttgcttaaaatagccagagcctatttctgttactgtgaccaagaatacaaatttttatttttattattgttttattaacattatctttattagtcattgcttttcagcctttatataaggggaagaagaaaaaaaatacaacagaatatagcaagaatagcaaaaattctcccctagtttttgaaaaaaaaaaccccgaaaacagaatgtatcactcccagatacaccttggcatattttgagatggctgttcagagagcctgcaaacctaagtagccacttaaagtagtcttttgtggggaagatttctatcagtagaraaaatctgcattgatgcagctaggctt

SEQ ID NO: 234214 - DNA, 501 bp, Homo sapiens
tttctttttaatccagacatcttgtctgcaattttcttcatgataacctcagaaagaaacttattatttttctacatattctattctgttattatttaacttctttcattatcccctggttgtccagagtcttctattatggatcatattatctttcaagaaatagtgaaagaatcttctgttgttttattcgctttcagtacagtacatcatctaccatcaactgtgcttttttagtcaatgtattttactctttcagttttacttcattatttactctwttcagtgcatgaaatattttcccagatttaagcaaattaggcattgatgcaaaatatatgcctagtaaaacatatataaagaaattctatgcatctctgggatatgtttgtgcaccttctttgacatgtaatgcccctgctggtccagttttgatccctcctcattggagcctgtcaatcactctaaattgtatgtggattttataatatgaggatattt

SEQ ID NO: 234215 - DNA, 501 bp, Homo sapiens
tttctttttaatccagacatcttgtctgcaattttcttcatgataacctcagaaagaaacttattatttttctacatattctattctgttattatttaacttctttcattatcccctggttgtccagagtcttctattatggatcatattatctttcaagaaatagtgaaagaatcttctgttgttttattcgctttcagtacagtacatcatctaccatcaactgtgcttttttagtcaatgtattttactctttcagttttacttcattatttactcttttcagtgcatgaaatattttcccagatttaagcaaattaggcattgatgcaaaatatatgcctagtaaaacatatataaagaaattctatgcatctctgggatatgtttgtgcaccwtctttgacatgtaatgcccctgctggtccagttttgatccctcctcattggagcctgtcaatcactctaaattgtatgtggattttataatatgaggatattt

SEQ ID NO: 234216 - DNA, 613 bp, Homo sapiens
ttttaaaattatttgacctacactctgatttacttgcaagtatttatattatacttcagtaaacagctttaaaggcaaatttaaaaaatctcaaaaataaggccgggcatggtagctcttgcctgtaatcacagcacttygggaggccgaggctagtaaaaatacaaaaaattagccgggcatggtggcagacacttgtaatcccagctactcgggaggctgaggcaggagaattgcttgaacctgggaggtggaggttgcagtgagccgagatcacgccactgcactccagcctgggcaacagagtgagactccatctcaaaaacaaaaacaaaaacaaaaaatcagatacaatttatactcaaaagtacatgctgagcatattttctttccttcaaatagaaccacaaacagagagggaactgctagagaaaagaaatcaaatagattgttcttctattttaagtggtagtaggggtcagaggttgggaggcaatataagtacaaacgcagcgatttcatctttccatgttccgtttttttgttgcatgattgggactacttttggttacattagggtaggcatggccacgtctaccatcacatttttcct

SEQ ID NO: 234217 - DNA, 285 bp, Homo sapiens
aaactatgcggtttagcctattgttcctggcctacaaacccatataacatgttactttactgaatgctaaaggcatttgtaacacattcataggtatctgtgtttctaagcatagataaggtagagtaaaaatatggtattttaatctaatgggaccactgttaaatatgtggttcattgtaaatggaagcattgttaygtggtacatgactctgtgtgtgtgtgtgtgtgtgtgtgtgtgtgtgtattacatataataatttttacattctagctccagttaag

SEQ ID NO: 234218 - DNA, 605 bp, Homo sapiens
attctttcattcttgcttctacaagttaataagatcaccatggtcaatagagattaaatgtgctgtacaaaatacttatattttatttgggttatcagatatgttacacagtttgaaatgatatttttaaaaataatgatacaataaacatgccaacaaagttgcattyattttattaaaaattgcgatacttgatatttccctcttactttacaattttttgtagttttttgaacataaggccatgcattacttttgcattacttttctccttagatttattctgtctttaagtatgtttgaccttggctacgtaatctaaatccaagtagtcatcagaatagccttgatagcttgggcccaaatccaggaattttgagtcagtagttttgttttggggtgggtcccattaatttgcatttctaacaatttcctaattgatgctaatgatgctggttttcagagaacacttttaaatagcaccagctatagtgtaatttttatgccatatcaacaatgtacaacatatttactcaaagattctaaaatgttttatattaaataattaaagaaaaactatcctaatatatagctatgtattaaac

SEQ ID NO: 234219 - DNA, 605 bp, Homo sapiens
attctttcattcttgcttctacaagttaataagatcaccatggtcaatagagattaaatgtgctgtacaaaatacttatattttatttgggttatcagatatgttacacagtttgaaatgatatttttaaaaataatgatacaataaacatgccaacaaagttgcatttattttattaaaaattgcgatacttgatatttccctcttactttacaattttttgtagttttttgaacataaggccatgcattacttttgcattacttttctccttagatttattctgtctttaagtatgtttgaccttggctacgtaatctaaatccaagtagtcatcagaatagccttgatagcttgggcccaaatccaggaattttgagtcagtagttttgttttggggtgggtcccattaatttgcatttctaacaatttcctaattgatgctaatgatgctggttttcagagaacacttttaaatagcaccagctatagtgtaatttttatgccatatcaacaatgtacaacatatttactcaaagattctaaaatgttttrtattaaataattaaagaaaaactatcctaatatatagctatgtattaaac

SEQ ID NO: 234220 - DNA, 560 bp, Homo sapiens
agtggcaatgagcaagaaaacggaataatgtgcaggtgggggacagggaataattcattcacatatccactggcacaatgttctaggcattgcaaatgtccatgtttggagtggcctctgtgtattcctgttttcagagggttaatacagatagaaatagagggtgccctgatagagagggagataactagatcaaaaataagaactcttaatgaaatcagagaacacaaataatgaattggaagacaaagaaaaaaagaacaagaagagtatgtgctcagaatgtgaaatagtaaaagtgatgatttcacagagcaaatatgctgcaataaccagtagctgcaatattgtatatatacacaatattgtgtgagtgtgtatatatatatacacacacacacacatatatatacacamacacgaagggaaaacactagtcctatataaaaatctgatcaaatatcactttaattatttttaccaaaaaattttaattaacaaaatgtcattccttttacatgtatatgaccaaattagcatcatatagatccatattgtat

SEQ ID NO: 234221 - DNA, 457 bp, Homo sapiens
atacaaaaagaataatgataacatttgtatgcacatgtagatcaaaacagatatagatacagaaaaaagaggaagagagrgagaatgaaagaaaataagagatgaagaaagcccagtaaagtgttaacatttgaggaattttgctgaagtttcagggcaatttttgtactatttttagaactttgaaagtctgaaattatttcaaaataaatatttgaaaaataaaatatattatcttaaggaaacaacaaaaatgtgtatatataaatatatccagaatccatattttttcttagtctattcactgctaaccgtcttgactaagcaatcatcactctcacaattatagcaatggttttcttacttgtttcttcagacctgtttatccttccccgacaattgctacagtttattatcaacatagctaccataatgatctttcaaaagtataattgac

SEQ ID NO: 234222 - DNA, 449 bp, Homo sapiens
tattttatttctaatggcagaagttattagacatttgtttagtctgtgtttttggtttttggtttgggtttttattttatagatgggttctcattctgtcacccaggctggagtacagtagtgtgatcatagcttactgtagcctggaactcctggtctcaagtgatcctcctgcctcagcctctcaagtagttggaattacagggtcgagtcaaaggcacacccagcgcatttagtctgttttaaaatgagtggctgtttcaacttatcttgataggagggcttcaataattcattatttccatacaccttatacatctgtttttctggcttaaattttcctcacctagttccctatttctcactttctaataaaattcatctrctttcaataattcagtttaaatctcttattttttttccaaaatctctattatcctctcattgtg

SEQ ID NO: 234223 - DNA, 602 bp, Homo sapiens
ttaaatatttttattattttattaaaatggtggtcttcatctttcatgatatatttcccttaatgtctcaaatgtctcatatcattataggaatgctagctttctttcagttagtgtctatacattctatctttttctatcttattatatcaatattactgcrcctgaataattgaaatgtctcatttgtaaagtgtatatatttattattttactgaagagtctgtcttctaaatgtattagtctatttacatgaacacaatttgtactgaatatgttttagtcatatgccatttattttctatttatccagtctgatctatattcttgctgtctttttgacttagagtttttaaaatattattattacatttctctatgtatgagcttgatagttgtattagtccattttctcactgctgtaaagaactgcctgagacacagaggaaagagagcaaggtagctctctgatgtcatcttatgaaggcacgaaccttattcattagggcagcactctcatgacctaattacttcccaaaggccccatctccaaataccatcacattgggattaagatttcaacatatgaaatttgggggagc

SEQ ID NO: 234224 - DNA, 602 bp, Homo sapiens
ttaaatatttttattattttattaaaatggtggtcttcatctttcatgatatatttcccttaatgtctcaaatgtctcatatcattataggaatgctagctttctttcagttagtgtctatacattctatctttttctatcttattatatcaatattactgcacctgaataattgaaatgtctcatttgtaaagtgtatatatttattattttactgaagagtctgtcttctaaatgtattagtctatttacatgaacacaatttgtaytgaatatgttttagtcatatgccatttattttctatttatccagtctgatctatattcttgctgtctttttgacttagagtttttaaaatattattattacatttctctatgtatgagcttgatagttgtattagtccattttctcactgctgtaaagaactgcctgagacacagaggaaagagagcaaggtagctctctgatgtcatcttatgaaggcacgaaccttattcattagggcagcactctcatgacctaattacttcccaaaggccccatctccaaataccatcacattgggattaagatttcaacatatgaaatttgggggagc

SEQ ID NO: 234225 - DNA, 495 bp, Homo sapiens
gtttacagtctccaagaagcagatgccaaggaaggactagatgtgtgaaggagttatgagagagaatgcccagtaatattaaagagaaagaagataaataggtagagatagcctttggactacaaaccagttccaatatcagttttttttcagtgagagggaaagaactttgaataaaaaacatctcagatggcagggcatctcaaagacaacttcagccaaacggatgaggacaaagtcacctgttagagcagttccagtttgtgaagaaatgggtctccacttgtatcctgctgtgctcagttttgtggctaggagcatctcagttaagtgtattctttgtgtgtacataatggtggattcagaaagataatgattagtttcatcaggcaatttttctccctgcagtaggagatcagagttatatatatatatatacacacacacacatacacayacacacacacacatatattcatattcccaccacaccaa

SEQ ID NO: 234226 - DNA, 540 bp, Homo sapiens
tttacctttatttgcattcattcacttattcattaaaaatactttttatgagaagctacaatatgctacagactgttgtaaattctaaagatatagcagtaagcaaaacacaaaaaagctgtgtgttggaaattatatttctagtaggagatacaaaatacatagcattagtttcctattgatactataaaaactaacaccaattattttagaacaaaacttttattaatttacagttttggagcttataattccaackgaggtctcattgagttcaaataaaaacactggctgtaaggcattgtttttcagaatcccagggcaaaatcaattatcttgccatttccagcttctaacaggaaagctgttcacattcactggattatgtccccctttcatcttcaaacccagcaacattcaatttaatcttttacacgttgcatcactctgacatcttaacacttgtgccttccctttttgcttgtaaaagacccttgtgattgtattcggcccacccacaaaattcagggtacactcttt

SEQ ID NO: 234227 - DNA, 603 bp, Homo sapiens
ttgtgttgtccacacatcaaacatgagacttcttccttaaaatttatcttgtttcaacttatagatcttcaggaacaaagaagttcccatttttagtaattttatgaaataaagttgggttgcaggaatctagaataattcactatgtattctagtgtataggtaaataacaagaactcaaaaagaatgctcagagctacattctatatacaatcaggtatattatactttctcttttgaaaacttacctacattgatcacatagaaatctcatatttgaaaacatctggatgctagcaagccaaaccaaggcagaatttagattttacttatagtctcaaggttcctgggcctattagaaagtgacaacttttactgactgtaaggctgagagcccttgaaaccagatattgcatgcacattctcaagcgctatatttcagtcaaagtgttggtagcataatcratgtttccaattgtacctgctataaagagagagttaactttagtgaacttatacaaataaccatattgccatataaaacaagaatactgacaaataatttctgcattttgtagaaatcaagcagaaagaaaaaacaat

SEQ ID NO: 234228 - DNA, 447 bp, Homo sapiens
tggcttctggggaggcctcaggaaacttacaatcatggcrgaagtccacgaggaaaccagcactttacatggctaaggaggaggaataggaagagaagcaggaggtgctacacacttttaaacaaccagatctcatgagaactcactcactattgcaaggacagtaacaagggaaatggtattaaaccattcgtgagaaactgccctcatgatccaatcgcctcccaccaggcctcacctcccactttgggaattacaattcaagatgagatttggtggagacacagatccaaaccatatcaagacctaaacacatatatacacacacgaagatcttgtagctttccatttagaattttagtcaaggcgtagtaatacaactctcttgcatataaaatacacttgaatccaaattacatttctgataaaatgaggcctgttcacaga

SEQ ID NO: 234229 - DNA, 447 bp, Homo sapiens
tggcttctggggaggcctcaggaaacttacaatcatggcagaagtccacraggaaaccagcactttacatggctaaggaggaggaataggaagagaagcaggaggtgctacacacttttaaacaaccagatctcatgagaactcactcactattgcaaggacagtaacaagggaaatggtattaaaccattcgtgagaaactgccctcatgatccaatcgcctcccaccaggcctcacctcccactttgggaattacaattcaagatgagatttggtggagacacagatccaaaccatatcaagacctaaacacatatatacacacacgaagatcttgtagctttccatttagaattttagtcaaggcgtagtaatacaactctcttgcatataaaatacacttgaatccaaattacatttctgataaaatgaggcctgttcacaga

SEQ ID NO: 234230 - DNA, 443 bp, Homo sapiens
gtggtagtatcattaggaggaatagggaggaatattatttgtttttatgaaaatggcaacactttggcttttaattttttttattgaatcagtttgatataaaggaaaaacatcttaaagaaaatttcccatgaaatactgaacatatgaaaatgtagagctctgggaggataaaatatacaatagtaaagctgagaatcacaagaattaagttatgatgaaacaatattacaagataaaaaatatataggaatatagaaaaatatagaagaaaattttccaacacttagggaatattttacacatggggtttacacaagcgagaaatgttcacccagtaaaaaggtaygcttgttttgtttttaattcggagttgtaaaagtctctgacaacaaattttatttaatttgtctaaaggtgtattaactaaaaatgtgtagtaa

SEQ ID NO: 234231 - DNA, 497 bp, Homo sapiens
ttatcattatataatgaccttctttctctctttgcactgtttttgacttatattctgttttatctaagtatagctcttcctgctttcttttggtttttgtttgtgtggactatattttccatgcctttactttcagtctgtatgactacggttagatgagttcattgtaggcagcatatggttggatcttgtttcttacacattcagctagtttgtatattgtaagtgggaattttaatcatttyacatttaaggttatttttgatatatgaaggcttttttctgtcatattattatttgatttctgattgttttatgattctttcattcttttcattctcttttattgtttatcttcatggtttggtggttttctgtagtggcaacatttgagtcctttctcttttttacttgtgtgtttgctgtatcagtgagttttatattttcatgtgttttcataacggtaggaagttttctttcacttccaagtatgagtt

SEQ ID NO: 234232 - DNA, 601 bp, Homo sapiens
ctttttaatgatttctgtctctttggtaagtttctcatgtatgcactgaattgcttttctgacttatttgtattatttttctgtgttcttttgtatctcactgagctttgttaatatcattttttttctggaatttcataagtttctttttcattggaatctattgctagagaaacaccgtttccttgaaaggtatgatatttccttaatatttttatgttgtttgtgttcttacactgatttctgtgcttctagtgtaagggttgcttcttccaatgttttgaagttgctttcataggggcgggctttattctgaagatgtatctattatgttagttggtgtgttaatccatttgtgttgctataaaggaatacctgatactgggtaatttataaaggaaagatgtttatttatctcattgttctgtagctgtacaaggagcatggcactagcatctgcttctcgtgagtacctcaggaaacttccaatcatgacagaaggcaaatggygggggggcgggtgtgggaggtgtcacatggcaaaaaagggagcaagatagagcagtagaaagtgtgagatactcttctgagcatccagctc

SEQ ID NO: 234233 - DNA, 616 bp, Homo sapiens
gggccaggtgcacctgtcctcaggtcccacgttggcgggtgtaggtactggctgtggtagacaggtgcagggttatccccattccctcagtggaatactcaggttggggtgacagtgrctgtgctatggctctgctattgaggaaggtgagcaacgttccttccaatggcagcaaccataggtaggtgactagggagcacgtactaagaccccagttggtgactacaggtgaggtaacctgttcccaggtcccttgtttatgcacaatggctctgttgctgcaggggtcactgcaagtggctcacgattcagccctggcagcagcagccaaccacaatggtggctgcaggtaactaatgtcaatggggctcccaggatgtgaagatgcagaaatttttagtccccagggcaaaatgaagtatggtgggggcttatttctcaaaatggtgccttgctgtagctgcttatgactatggagatatgtgggacccagtgtgagcttcctctctgaagcaatgtcattgcatggttcccatgcaccttcctatgttaagtctcagggaccagaagagtcaaggggcactcccatggcaggaattgcaggagttttccatgg

SEQ ID NO: 234234 - DNA, 580 bp, Homo sapiens
aaaaataatcccttgggccaggcacagtggctcatgcctataatgccaacactttgggaggccgaggtaggaggataacttgagcccaggagtttgagaccagcctggcaacatagcaaagccccatttctacaaaaaggaaaaaaaataggtggtgtggtgatgcatgcctgtggtccagctgtttaggaggcttaggtggaaggattgcttgaccctgggaagttgaggctgcagtgagacatggttgttccactgcactttagcctgggcaacagagcaagactctctcaaaataaataaataaataaacaaacaaaaagaatcccttgaacctctatttgatttttttgtggtatacctacttttcctcccaacaatattgtttaggctgtcacacaaagaataaaataaagtagctaggtaggactaactaccaatatgtacctgcggtggaaagactgctgtattgatttggaacrtcttctacctcacttccattccctaattgtgcaaccttcaacaagttccctcaacgcactaagcctcagtttcttcatctgtaaaataataataataa

SEQ ID NO: 234235 - DNA, 218 bp, Homo sapiens
ttgcatttctaccaagctcctaggtgagaccagtgctgcgggtctgtggatgctctttgagtggcaaggtcctaactaaacrgctccatagtggggaggcactggctctgctgtcttccaaagccaatcttcaccctcactcctatgtctttaaataaagccccgaatcagaggccaagggtagagccccctctttttttggagatgggcttagctag

SEQ ID NO: 234236 - DNA, 570 bp, Homo sapiens
cacagctcactacagccttgaactcctgggctcaaatgatcctcctgccccagtctcccaagttgctagagctacaggttcatgccaccacgcccagctatttttttaatttttttgtcgagatggggtctgtgtatgttgcccaggctggtcttgaattcctggcctcaagcaatcctccctcctaggcctcccaaaatkttgggattgcaggtatgagccatgttgttaaacaatttaaaatatgttagtaatccaaaaagtacaaattaaagtgatatatcatctggagacagagattattaaattagtaaagaattcgtaagtgctaatacccagtgtttgggtgagtataggaaaacagatactgagtgggagtaaaaattaagtgtaacctttctgaatggcaatttggcaatatcatcaaaaaaaaatctaaatgtgcatccttcttacccaacaattttacttctaagaatttaccctaaggaaatattcagaatcattcaagaaatatatgtacacaaatgtttattgctgcatttcttatcattgaacaattgggaacaa

SEQ ID NO: 234237 - DNA, 314 bp, Homo sapiens
gaattctatgtgactgacaaacattcagactccagcagcagtgttctgtaatcctatgtgagggacaaacattcagaccccaagagcagtgttctgaaatcctatgttaagggaaacattgagaccccagcatgaatgttctggaatcctatgtgagggacaaacattcagaccacggcaggagtattctggaatcctatgtgaggarcaaacattcagaccacaacaggagtattctggaatcctatatgagggataagcattcagaccctcgtagcagtgttctggaatcctatgtgaaggagaagcattca

SEQ ID NO: 234238 - DNA, 314 bp, Homo sapiens
gaattctatgtgactgacaaacattcagactccagcagcagtgttctgtaatcctatgtgagggacaaacattcagaccccaagagcagtgttctgaaatcctatgttaagggaaacattgagaccccagcatgaatgttctggaatcctatgtgagggacaaacattcagaccacggcaggagtattctggaatcctatgtgaggaacaaacattcagaccacarcaggagtattctggaatcctatatgagggataagcattcagaccctcgtagcagtgttctggaatcctatgtgaaggagaagcattca

SEQ ID NO: 234239 - DNA, 426 bp, Homo sapiens
atggcaaaagttggaacaagacagagagacgaaagaggttccacagccttttaaactactagatctcatgagaactcactatcaggaggatggcattaagggcttggtgctttgccatttgtgaaggatccactcccacacctttatgattaaagctttttccacctaggccccgactctaacattagggagtgtactttcacatgagctttggaaggggcatagagaaaaaccgtattattctgtccctgaccccacaaatctcatgtccttctcacattgcaaaatacagtcatgccttgccagcagtctcccaaaktcttaactcatttcagcattaactcaaagttacaaagtccaaagtctcatctgggtcaaggctacattctcttttgcctacgagtctctgaaataaaaagcaagttc

SEQ ID NO: 234240 - DNA, 420 bp, Homo sapiens
aggccccctcagcctggccttcactgtccatgtttttgtcagcatycttgtcacagccatttaaccagtctctaagatggtccaaaaatgttctcatctgtctgtcttctttggagccctccaaactcttccaacctctacccattacccagttccgaagttgcttccacattttcaggtatctttatagcaatgctccagtcctcatttgccatttttggtaagatttattttgaaaaagaggtttaattggctcatggttctgcagagtggacaggaagcttagtgcttctgcttctggggggcctcagaaatcttttaatcattgtgcaaggtaatgaaagagtgaattgtctcatatggcaagaggaaatcacggagagtagggagtgatatagagttttcagtggccagatctca

SEQ ID NO: 234241 - DNA, 420 bp, Homo sapiens
aggccccctcagcctggccttcactgtccatgtttttgtcagcattcttgtcacagccatttaaccagtctctaagatggtccaaaaatgttctcatctgtctgtcttctttggagccctccaaactcttccaacctctacccattacccagttccgaagttgcttccacattttcaggtatctttatagcaatgctccagtcctcatttgccatttttggtaagatttatttygaaaaagaggtttaattggctcatggttctgcagagtggacaggaagcttagtgcttctgcttctggggggcctcagaaatcttttaatcattgtgcaaggtaatgaaagagtgaattgtctcatatggcaagaggaaatcacggagagtagggagtgatatagagttttcagtggccagatctca

SEQ ID NO: 234242 - DNA, 420 bp, Homo sapiens
aggccccctcagcctggccttcactgtccatgtttttgtcagcattcttgtcacagccatttaaccagtctctaagatggtccaaaaatgttctcatctgtctgtcttctttggagccctccaaactcttccaacctctacccattacccagttccgaagttgcttccacattttcaggtatctttatagcaatgctccagtcctcatttgccatttttggtaagatttattttgaaaaagaggtttaattggctcatggttctgcagagtggacargaagcttagtgcttctgcttctggggggcctcagaaatcttttaatcattgtgcaaggtaatgaaagagtgaattgtctcatatggcaagaggaaatcacggagagtagggagtgatatagagttttcagtggccagatctca

SEQ ID NO: 234243 - DNA, 420 bp, Homo sapiens
aggccccctcagcctggccttcactgtccatgtttttgtcagcattcttgtcacagccatttaaccagtctctaagatggtccaaaaatgttctcatctgtctgtcttctttggagccctccaaactcttccaacctctacccattacccagttccgaagttgcttccacattttcaggtatctttatagcaatgctccagtcctcatttgccatttttggtaagatttattttgaaaaagaggtttaattggctcatggttctgcagagtggacaggaagcttagtgcttctgcttctggggggcctcagaaatctttyaatcattgtgcaaggtaatgaaagagtgaattgtctcatatggcaagaggaaatcacggagagtagggagtgatatagagttttcagtggccagatctca

SEQ ID NO: 234244 - DNA, 435 bp, Homo sapiens
gtaaaattataacttggcatagaggttatgcttgtgtttctccaggaccgaatcaactactgacttagataccatcaagacacctgatattttatcatgagccagatgctgaggaagagagaaaaagcacaatcatcattgaaattagagcttctggctgggcgcggtggttcacgcctgtaatcccagcactctgggaggctgaggtgggyggatcacaaggtcaggagatagagaccatcctggctaacacggcgaaaccccgtctctactaaaaatacaaaaaattagctgggtgaggtggcgggcgcctatagtcccagctactcaggaggctgaggcaggagaatggcgtgaacccgggaggcaaaacttcaggttttgccaagaatgacactgtaaatgtaacaaagcttctgtgcttgttagtgaaca

SEQ ID NO: 234245 - DNA, 435 bp, Homo sapiens
gtaaaattataacttggcatagaggttatgcttgtgtttctccaggaccgaatcaactactgacttagataccatcaagacacctgatattttatcatgagccagatgctgaggaagagagaaaaagcacaatcatcattgaaattagagcttctggctgggcgcggtggttcacgcctgtaatcccagcactctgggaggctgaggtgggtggatcacaaggtcaggagatagagaccatcctggctaacacggcgaaaccccgtctctactaaaaatacaaaaaattagctgggtgaggtggcgggcgcctatagtcccagctactcaggaggctgaggcaggagaatggygtgaacccgggaggcaaaacttcaggttttgccaagaatgacactgtaaatgtaacaaagcttctgtgcttgttagtgaaca

SEQ ID NO: 234246 - DNA, 503 bp, Homo sapiens
ttcagaactcaaatagttactatttttaaaaaccctaaagtgaaaaagtctcagttcttttgcctatctattttttttccctgcctactttgaatctgctgatttgtctactggtgttgagataagacttactgtctgtggtgttactaattcaaggttacttggctgaagaaaaacaaaagaatgaaacaattcttttttttttttctctttttgagacaaggtctcactctgttccccagactggagtgcagtagtgggatcrtagctcactgttatctcaacctgccaggctcaagcaatcctcctgcctcatcctctctagtagctgggacaataggcatgcaccaccatgcctggcaattttttatcttattcttagtagagattggttctcactatgttgcccaggctggtctcaaactcctgagctcaagtgatcctcttgcctcagcctctcaaagtgctgggatacaggcatgaaccactgtgcccagacaaaa

SEQ ID NO: 234247 - DNA, 503 bp, Homo sapiens
ttcagaactcaaatagttactatttttaaaaaccctaaagtgaaaaagtctcagttcttttgcctatctattttttttccctgcctactttgaatctgctgatttgtctactggtgttgagataagacttactgtctgtggtgttactaattcaaggttacttggctgaagaaaaacaaaagaatgaaacaattcttttttttttttctctttttgagacaaggtctcactctgttccccagactggagtgcagtagtgggatcatagctcactgttatctcaacctsccaggctcaagcaatcctcctgcctcatcctctctagtagctgggacaataggcatgcaccaccatgcctggcaattttttatcttattcttagtagagattggttctcactatgttgcccaggctggtctcaaactcctgagctcaagtgatcctcttgcctcagcctctcaaagtgctgggatacaggcatgaaccactgtgcccagacaaaa

SEQ ID NO: 234248 - DNA, 503 bp, Homo sapiens
ttcagaactcaaatagttactatttttaaaaaccctaaagtgaaaaagtctcagttcttttgcctatctattttttttccctgcctactttgaatctgctgatttgtctactggtgttgagataagacttactgtctgtggtgttactaattcaaggttacttggctgaagaaaaacaaaagaatgaaacaattcttttttttttttctctttttgagacaaggtctcactctgttccccagactggagtgcagtagtgggatcatagctcactgttatctcaacctgccaggctcaagcaatcctcctgcctcatcctctctagtagctgggacaataggcatgcaccaccatgcctggcaattttttatcttattcttagtagagattggktctcactatgttgcccaggctggtctcaaactcctgagctcaagtgatcctcttgcctcagcctctcaaagtgctgggatacaggcatgaaccactgtgcccagacaaaa

SEQ ID NO: 234249 - DNA, 503 bp, Homo sapiens
ttcagaactcaaatagttactatttttaaaaaccctaaagtgaaaaagtctcagttcttttgcctatctattttttttccctgcctactttgaatctgctgatttgtctactggtgttgagataagacttactgtctgtggtgttactaattcaaggttacttggctgaagaaaaacaaaagaatgaaacaattcttttttttttttctctttttgagacaaggtctcactctgttccccagactggagtgcagtagtgggatcatagctcactgttatctcaacctgccaggctcaagcaatcctcctgcctcatcctctctagtagctgggacaataggcatgcaccaccatgcctggcaattttttatcttattcttagtagagattggttctcactatgttgcccaggctggtctcaaactcctgagctcaartgatcctcttgcctcagcctctcaaagtgctgggatacaggcatgaaccactgtgcccagacaaaa

SEQ ID NO: 234250 - DNA, 486 bp, Homo sapiens
gtgatcttctggaggagaagaggcattctggcttttggagttttcagcctttttgcactggtttctccccatctttgtggatttatctacctttggtctttgatgttggtgatgttgatactattcctttatgtttgttagttttccttctaccagtcaggtccctctgctgcaggtttgctcgagtttgctggaggtccactccagaccctgtttgcctgggtatcaccagtggaggctcagttggaaatgcatgaaccacctgcyttctgtgttgatctcactgggtgctgcagaccggagctgttcctattcagacatcttgccagctctcctgtaatacttttatgaatgggtgtagtcctatcttctcaaggtccccaaataacttgaggttcctgggcccgtcagaaagtgtcattctttacttcttaccacaaggacagcaactttgtaaaggacccttgtagacaagacaccaagcca

SEQ ID NO: 234251 - DNA, 486 bp, Homo sapiens
gtgatcttctggaggagaagaggcattctggcttttggagttttcagcctttttgcactggtttctccccatctttgtggatttatctacctttggtctttgatgttggtgatgttgatactattcctttatgtttgttagttttccttctaccagtcaggtccctctgctgcaggtttgctcgagtttgctggaggtccactccagaccctgtttgcctgggtatcaccagtggaggctcagttggaaatgcatgaaccacctgccttctgtgttgatctcactgggtgctgcagrccggagctgttcctattcagacatcttgccagctctcctgtaatacttttatgaatgggtgtagtcctatcttctcaaggtccccaaataacttgaggttcctgggcccgtcagaaagtgtcattctttacttcttaccacaaggacagcaactttgtaaaggacccttgtagacaagacaccaagcca

SEQ ID NO: 234252 - DNA, 486 bp, Homo sapiens
gtgatcttctggaggagaagaggcattctggcttttggagttttcagcctttttgcactggtttctccccatctttgtggatttatctacctttggtctttgatgttggtgatgttgatactattcctttatgtttgttagttttccttctaccagtcaggtccctctgctgcaggtttgctcgagtttgctggaggtccactccagaccctgtttgcctgggtatcaccagtggaggctcagttggaaatgcatgaaccacctgccttctgtgttgatctcactgggtgctgcagaccggagctgttcctattcagacatcttgccagctctcctgtaatacttttatgaatgggtgtagtcctatcttctcaaggtccccaaataacttgaggttcctgggcccgtcagaaagtgwcattctttacttcttaccacaaggacagcaactttgtaaaggacccttgtagacaagacaccaagcca

SEQ ID NO: 234253 - DNA, 486 bp, Homo sapiens
gtgatcttctggaggagaagaggcattctggcttttggagttttcagcctttttgcactggtttctccccatctttgtggatttatctacctttggtctttgatgttggtgatgttgatactattcctttatgtttgttagttttccttctaccagtcaggtccctctgctgcaggtttgctcgagtttgctggaggtccactccagaccctgtttgcctgggtatcaccagtggaggctcagttggaaatgcatgaaccacctgccttctgtgttgatctcactgggtgctgcagaccggagctgttcctattcagacatcttgccagctctcctgtaatacttttatgaatgggtgtagtcctatcttctcaaggtccccaaataacttgaggttcctgggcccgtcagaaagtgtcattctttacttcttaccacaaggacagcaastttgtaaaggacccttgtagacaagacaccaagcca

SEQ ID NO: 234254 - DNA, 576 bp, Homo sapiens
gtaccgacaataacagagccctttttctgctgtgtgatggaatttagtgtttactaaggaagaaaaaaaatgcaagatatcttaaatttggtactttccaacaaatttaagaaatgtgtacacacttgaggagacttaagaagtctctgattaaaacactagaaaagaaaagcagcraaaagccaaataactattactcaacaataacaacatttgttactattatattaatattaaacacactattaaacaacaacatttcagttactcactgagcccaaagtcatttttcatgaaccattcacaacactgataacctattgaaaaatgattgaaaacaaaaaagcttattgctttccaagtccttttaaagccttctcttgtgtcatttcatataatccttataacaaatctatggagtatatactgactttacctctgtacagaaaagaaaactgagtcatattcagaataagttgcaaagttccccagataatcagtgtcataggtgaaatttgatgtcacagtgtactcaagtgtaatttagggaagcagtacaaatgacggttgaaagca

SEQ ID NO: 234255 - DNA, 594 bp, Homo sapiens
ggtatagataagttgagagttaaataatttccaagtataccaaggaaacaacaagcacaagaaatcttatgtggctatattaatataagaaaaagtaggacttccaaacaagcaatattacaacagaaagctatttcataatgataaaatgtcaagtaattatgaagacataatgctgtattgctgatagaataactaaagaaagttaaggtaaaataattttgacaacaccctgacctaatcgatattgaccaagaaaatagaatatatgttctattatgctacacatgaaacatttatcaataggctatagaccacaaaatatctstcaagaagtttcaaaacactgtaatcatagaaagtatactttctgaccataatgaaaatgagttgaaatgggtgaaaacaagctacccaggaaagtctacactattggaagatttaaatacaccttaaaatgccctttagctcaaggaagaaatcataagaaacaccttaaaatacattgaactgaatacaaataaaaatatactatatcaaaatatgtgggataagttaagcagacccagagtaaattttttgtataaatgctta

SEQ ID NO: 234256 - DNA, 312 bp, Homo sapiens
atttaagaaatgtgtacacacttgaggagacttaagaagtctctgattaaaacactagaaaagaaaagcagcgaaaagccaaataactattactcaacaataacaacatttgttactattatattaatattaaacacactattaarcaacaacatttcagttactcactgagcccaaagtcatttttcatgaaccattcacaacactgataacctattgaaaaatgattgaaaacaaaaaagcttattgctttccaagtccttttaaagccttctcttgtgtcatttcatataatccttataacaaatctat

SEQ ID NO: 234257 - DNA, 576 bp, Homo sapiens
gtaccgacaataacagagccctttttctgctgtgtgatggaatttagtgtttactaaggaagaaaaaaaatgcaagatatcttaaatttggtactttccaacaaatttaagaaatgtgtacacacttgaggagacttaagaagtctctgattaaaacactagaaaagaaaagcagcgaaaagccaaataactattactcaacaataacaacatttgttactattatattaatattaaacacactattaaacaacaacatttcagttactcactgagcccaaagtcatttttcatgaaccattcacaacactgataacctattgaaaaatgattgaaaacaaaaaagcttattgytttccaagtccttttaaagccttctcttgtgtcatttcatataatccttataacaaatctatggagtatatactgactttacctctgtacagaaaagaaaactgagtcatattcagaataagttgcaaagttccccagataatcagtgtcataggtgaaatttgatgtcacagtgtactcaagtgtaatttagggaagcagtacaaatgacggttgaaagca

SEQ ID NO: 234258 - DNA, 312 bp, Homo sapiens
atttaagaaatgtgtacacacttgaggagacttaagaagtctctgattaaaacactagaaaagaaaagcagcgaaaagccaaataactattactcaacaataacaacatttgttactattatattaatattaaacacactattaaacaacaacatttcagttactcactgagcccaaagtcatttttcatgaaccattcacaacactgataacctattgaaaaatgattgaaaacaaaaaagcttattgctttccaagtccttttaaagccttctcwtgtgtcatttcatataatccttataacaaatctat

SEQ ID NO: 234259 - DNA, 537 bp, Homo sapiens
aatggacaaggaagaggccagcagcagcttgtggggacaagatgtcaagccccaaattttaaacccaccaaccatcctccaaagtctggctctgtttaacaaggctgtggtctgacactagatgccgcctcagtgactaaagcataatttcccgtctcctgggagtgttgacagctgactcctggcaacaatactcacagcacagtaaagttccttcatccaagttcatgtccmttctcagggcatcccacatccgagaactgcttggtacagaaatataatggcctggttttcttgctccaattcgaggtcattaggtaaactcaccaagatccctgtagagtggactgcagccatgatagtgattgcattctagccgacttcctgctccgcccaatcctattgctttcactcttccacaggtgttgggaatatcatttcaacctccttgcatgcaaatctccaactcggagtcggcttcctaggacacctgactggtgatatctctatcattatcacggtacttagagaggagca

SEQ ID NO: 234260 - DNA, 537 bp, Homo sapiens
aatggacaaggaagaggccagcagcagcttgtggggacaagatgtcaagccccaaattttaaacccaccaaccatcctccaaagtctggctctgtttaacaaggctgtggtctgacactagatgccgcctcagtgactaaagcataatttcccgtctcctgggagtgttgacagctgactcctggcaacaatactcacagcacagtaaagttccttcatccaagttcatgtcccttctcagggcaycccacatccgagaactgcttggtacagaaatataatggcctggttttcttgctccaattcgaggtcattaggtaaactcaccaagatccctgtagagtggactgcagccatgatagtgattgcattctagccgacttcctgctccgcccaatcctattgctttcactcttccacaggtgttgggaatatcatttcaacctccttgcatgcaaatctccaactcggagtcggcttcctaggacacctgactggtgatatctctatcattatcacggtacttagagaggagca

SEQ ID NO: 234261 - DNA, 458 bp, Homo sapiens
agttcatgtcccttctcagggcatcccacatccgagaactgcttggtacagaaatataatggcctggttttcttgctccaattcgaggtcattaggtaaactcaccaagatccctgtagagtggactgcagccatgatagtgattgcattctagccgacttcctgctccrcccaatcctattgctttcactcttccacaggtgttgggaatatcatttcaacctccttgcatgcaaatctccaactcggagtcggcttcctaggacacctgactggtgatatctctatcattatcacggtacttagagaggagcatcttaaaatgattgaaggctaactgccctaacagcacaggcagatggtggcttaaaatagaatttaagtggacttaaaaaaacatgaaagaagttgacattgcacgctcatatgagcttatggatcaaaccatgtgtatgatt

SEQ ID NO: 234262 - DNA, 373 bp, Homo sapiens
ctatgagggaagaaaacagagtgaatatagactattagtgaacaaggatattttcccatgtatattcaaattaaggtgaacttctttagagaattgtgccttagaaagaaaaagtatttccctatatttgagtcctcacaagttttcctacgatgagtgcttttgtgattattttgaataacaaagtaatatttaaagaaactctcttaccctgaatgtactttacatcaattgatgttgcatatagagagcatcagartcaagccacaagaaaaggaggaacataacttagcaaagacttagaggattagtcctaatagtgtgaaatcaaaagttcaagtgagggaataaatgcagcttttaatgattactt

SEQ ID NO: 234263 - DNA, 373 bp, Homo sapiens
ctatgagggaagaaaacagagtgaatatagactattagtgaacaaggatattttcccatgtatattcaaattaaggtgaacttctttagagaattgtgccttagaaagaaaaagtatttccctatatttgagtcctcacaagttttcctacgatgagtgcttttgtgattattttgaataacaaagtaatatttaaagaaactctcttaccctgaatgtactttacatcaattgatgttgcatatagagagcatcagaatcaagccacaagaaaagraggaacataacttagcaaagacttagaggattagtcctaatagtgtgaaatcaaaagttcaagtgagggaataaatgcagcttttaatgattactt

SEQ ID NO: 234264 - DNA, 338 bp, Homo sapiens
gggaatatgcatgacaaagcaaactgtgtagattcaaatggtaaaggaagacaaggtctttaaaagaaaagygatcaacctggaattatgggggagtagaaaaaaataaataaaggaaaaatgaagaggcttatataattgttttgttatagttatctttgactataaagatcaacaacaaggtcgatgtcagttgaagtttgagcaggtggttgctggatagatgtcctcacagaagtgtattttgtgtaaggttgctatggcctttgtgcaaggttgtggattttgtgacagtttgtatcaggcctagaagcatgagaaccctctcttcaaggcct

SEQ ID NO: 234265 - DNA, 567 bp, Homo sapiens
tatttactgtctagtataatgcagataatttctccstcttgggaagggtacagccaagtgaacttcccataatacaagttggggtttcttgagcttgggtttttcttccacagcgtaatgtgcaggtgccacttggctctctttgtgttatcctgggaaagctgatggctgtaggtgcatgtttattttcgggttctctattctgtttcactggtctttgtgtctgttttcatatcgctaccatgttattttgtctattgtggccttagggtatagtatgaagtcaagtaatgtgatgtctccagctttgttcttcttgcttaggtttcctttggttgtctgggctctttaaaaatccatatgaaatttagaatatatttttttctaattctgtgaaaaacgacattggttgtttcataggaatagtgttgaatgtgtagattgcttttggcagtatagccattttaacaatattgatctttctaatccatgagcatggaatagttttacatttgctttgtcatctatgatttctttctgcagtgtttcttagttctccttttagat

SEQ ID NO: 234266 - DNA, 567 bp, Homo sapiens
tatttactgtctagtataatgcagataatttctccgtcttgggaagggtacagccaagtgaacttcccataatacaagttggggtttcttgagcttgggtttttcttccacagcgtaatgtgcaggtgccacttggctctctttgtgttatcctgggaaagctgatggctgtrggtgcatgtttattttcgggttctctattctgtttcactggtctttgtgtctgttttcatatcgctaccatgttattttgtctattgtggccttagggtatagtatgaagtcaagtaatgtgatgtctccagctttgttcttcttgcttaggtttcctttggttgtctgggctctttaaaaatccatatgaaatttagaatatatttttttctaattctgtgaaaaacgacattggttgtttcataggaatagtgttgaatgtgtagattgcttttggcagtatagccattttaacaatattgatctttctaatccatgagcatggaatagttttacatttgctttgtcatctatgatttctttctgcagtgtttcttagttctccttttagat

SEQ ID NO: 234267 - DNA, 567 bp, Homo sapiens
tatttactgtctagtataatgcagataatttctccgtcttgggaagggtacagccaagtgaacttcccataatacaagttggggtttcttgagcttgggtttttcttccacagcgtaatgtgcaggtgccacttggctctctttgtgttatcctgggaaagctgatggctgtaggtgcatgtttattttcgggttctctattctgtttcactggtctttgtgtctgttttcatatcgctaccatgytattttgtctattgtggccttagggtatagtatgaagtcaagtaatgtgatgtctccagctttgttcttcttgcttaggtttcctttggttgtctgggctctttaaaaatccatatgaaatttagaatatatttttttctaattctgtgaaaaacgacattggttgtttcataggaatagtgttgaatgtgtagattgcttttggcagtatagccattttaacaatattgatctttctaatccatgagcatggaatagttttacatttgctttgtcatctatgatttctttctgcagtgtttcttagttctccttttagat

SEQ ID NO: 234268 - DNA, 578 bp, Homo sapiens
ggaggatgagtgtaaaaaactaacttcaaattctgagtgtggggagcagctaccagaggagattaaacaaaagaaagaaaaactttaaaaagtatgttytactagcctgttggctccacctgctgaattaagtgaatggccacctcctctctctcttctaaatgggtgagaaaataaattagctgaaaaacttactgctcctgtagttacaacattaaaacctggagcaattggtggtggtagacaaaattctattcaaaaagctaaagccaagggagaccttgaagcatggcaatttcccgttactataatccagcaagtaggacagaatatagctaattaggctgctttctcttttaagttactaaagaatttaagcaagccattagtcaatatggactgaactctctttttgtgcaaactttatttaaaaatatggctcttgataatagattactaccatataattaggatactttgacaaaacctgttctcactccatctcagtacttgcagtttaaaacttggtaggctgatgaagctcaaactcaggcaaaagaaaacacacaagtgcagcc

SEQ ID NO: 234269 - DNA, 578 bp, Homo sapiens
ggaggatgagtgtaaaaaactaacttcaaattctgagtgtggggagcagctaccagaggagattaaacaaaagaaagaaaaactttaaaaagtatgttctactagccygttggctccacctgctgaattaagtgaatggccacctcctctctctcttctaaatgggtgagaaaataaattagctgaaaaacttactgctcctgtagttacaacattaaaacctggagcaattggtggtggtagacaaaattctattcaaaaagctaaagccaagggagaccttgaagcatggcaatttcccgttactataatccagcaagtaggacagaatatagctaattaggctgctttctcttttaagttactaaagaatttaagcaagccattagtcaatatggactgaactctctttttgtgcaaactttatttaaaaatatggctcttgataatagattactaccatataattaggatactttgacaaaacctgttctcactccatctcagtacttgcagtttaaaacttggtaggctgatgaagctcaaactcaggcaaaagaaaacacacaagtgcagcc

SEQ ID NO: 234270 - DNA, 578 bp, Homo sapiens
ggaggatgagtgtaaaaaactaacttcaaattctgagtgtggggagcagctaccagaggagattaaacaaaagaaagaaaaactttaaaaagtatgttctactagcctgttggctccacctgctgaattaagtgaatggccacctcctctctctcytctaaatgggtgagaaaataaattagctgaaaaacttactgctcctgtagttacaacattaaaacctggagcaattggtggtggtagacaaaattctattcaaaaagctaaagccaagggagaccttgaagcatggcaatttcccgttactataatccagcaagtaggacagaatatagctaattaggctgctttctcttttaagttactaaagaatttaagcaagccattagtcaatatggactgaactctctttttgtgcaaactttatttaaaaatatggctcttgataatagattactaccatataattaggatactttgacaaaacctgttctcactccatctcagtacttgcagtttaaaacttggtaggctgatgaagctcaaactcaggcaaaagaaaacacacaagtgcagcc

SEQ ID NO: 234271 - DNA, 323 bp, Homo sapiens
ttgtcttgatgaatcatacaatatcaaatgkaatttttaagatatttaaaatcttttgtctggaagcaaagtggaagttaatatcaatggctatgccttcagtgagttctcagaccacattacaatgtagttaactatttatcttttattacattctagacctatcatttcgttctggcacaaaaatatcttctttgtagattatggcatttacctctatctccacaccattttggtctctcatccacagatcatcagcctcttgcttagtcttccatttaatgacaatttctatttagtatacaacagtccttccccctgca

SEQ ID NO: 234272 - DNA, 402 bp, Homo sapiens
gttccagcataagaagacaccttctactcaagtcctttttccaccttttcaaatctcactgttctatttcccagtgggtttctaaaccaaataagtacacttgcaasggtaatagtgacaccagtgactgcagttttggccaatctctcaaaattgagaaaataaccaaagggaaggcattgttaaagtgaactaagtatgtcctgagaaggactccataattatatacatgagtccttgtggatgacctgcaacctaccttaataggtaaacaagaatgaaaacctaacttgagtgtatgcacctcaaacaacagtttgcaatcccaatggccaaacttcaaccactcaggcactgccaaatgttcaaactgtgctcaaacaaggcaaacactgagttgtt

SEQ ID NO: 234273 - DNA, 402 bp, Homo sapiens
gttccagcataagaagacaccttctactcaagtcctttttccaccttttcaaatctcactgttctatttcccagtgggtttctaaaccaaataagtacacttgcaacggtaatagtgacaccagtgactgmagttttggccaatctctcaaaattgagaaaataaccaaagggaaggcattgttaaagtgaactaagtatgtcctgagaaggactccataattatatacatgagtccttgtggatgacctgcaacctaccttaataggtaaacaagaatgaaaacctaacttgagtgtatgcacctcaaacaacagtttgcaatcccaatggccaaacttcaaccactcaggcactgccaaatgttcaaactgtgctcaaacaaggcaaacactgagttgtt

SEQ ID NO: 234274 - DNA, 402 bp, Homo sapiens
gttccagcataagaagacaccttctactcaagtcctttttccaccttttcaaatctcactgttctatttcccagtgggtttctaaaccaaataagtacacttgcaacggtaatagtgacaccagtgactgcagttttggccaatctctcaaaattgagaaaataaccaaagggaaggcattgttaaagtgaactaagtatgtcctgagaaggactccataattatatayatgagtccttgtggatgacctgcaacctaccttaataggtaaacaagaatgaaaacctaacttgagtgtatgcacctcaaacaacagtttgcaatcccaatggccaaacttcaaccactcaggcactgccaaatgttcaaactgtgctcaaacaaggcaaacactgagttgtt

SEQ ID NO: 234275 - DNA, 323 bp, Homo sapiens
ttgtcttgatgaatcatacaatatcaaatgtaatttttaagatatttaaaatmttttgtctggaagcaaagtggaagttaatatcaatggctatgccttcagtgagttctcagaccacattacaatgtagttaactatttatcttttattacattctagacctatcatttcgttctggcacaaaaatatcttctttgtagattatggcatttacctctatctccacaccattttggtctctcatccacagatcatcagcctcttgcttagtcttccatttaatgacaatttctatttagtatacaacagtccttccccctgca

SEQ ID NO: 234276 - DNA, 323 bp, Homo sapiens
ttgtcttgatgaatcatacaatatcaaatgtaatttttaagatatttaaaatcttttgtctggaagcaaagtggaagttaatatcaatggctatgccttcagtgagttctcagaccacattacaatgtagttaactatttatcttttattacattctagacctatyatttcgttctggcacaaaaatatcttctttgtagattatggcatttacctctatctccacaccattttggtctctcatccacagatcatcagcctcttgcttagtcttccatttaatgacaatttctatttagtatacaacagtccttccccctgca

SEQ ID NO: 234277 - DNA, 362 bp, Homo sapiens
tgtccacttccaacaatgttactcaacatagtactggaagtcctagctagagcaatcaagaaaattgaaaaacrgtaaagggcatccaaattgaaagaagtaaaattattattgttttcttgtttgcaggtgatttgatcttatatttggaaaaacctaagaactccaccaaaaaactatcagaactgatcaacaaattcagagtcacacgatacaaaatcaaaatgcaaaaatcagtaacatttctaaatgccaaaactgaacaatctaaagaagaaaatcaagaacgtaatcccatttacaatagctacaaataaaataaaatatctaggaataaatgtaacaaaagaagtgaaagatct

SEQ ID NO: 234278 - DNA, 362 bp, Homo sapiens
tgtccacttccaacaatgttactcaacatagtactggaagtcctagctagagcaatcaagaaaattgaaaaacagtaaagggcatccaaattgaaagaagtaaaattattattgttttcttgtttgcaggtgatttgatcttatatttggaaaaacctaagaactccaccaaaaaaytatcagaactgatcaacaaattcagagtcacacgatacaaaatcaaaatgcaaaaatcagtaacatttctaaatgccaaaactgaacaatctaaagaagaaaatcaagaacgtaatcccatttacaatagctacaaataaaataaaatatctaggaataaatgtaacaaaagaagtgaaagatct

SEQ ID NO: 234279 - DNA, 515 bp, Homo sapiens
ttacattggacttctgtttagaatccatgcaagtaagaagtgttgaaaaaattagaatacagtgggtattttttatccaagtattcattatttaaaactgcaaagtgaaaataattgtaacaagaacatattcactagcaatctgagcactcatgatattartgtctgttctggagagaattatgtccccccagaattcctaacctgaagccctatctcccagtgtgactgtatttggagaaggagcttttaagaagttaaaggttaaataggggcaaaagggtaaggccctaatctgttaggactggggtcatcatccaaaaaggaagagacaccagagatacatatctctctcttctctctctctctgcctcccttcttctctctctctccctctctccctctccccacatacatttgttaaattgaggttttttgttagaacatatatagtggcattttaatatagtattactctacttaaaacatacacacacacacacacacacacacac

SEQ ID NO: 234280 - DNA, 515 bp, Homo sapiens
ttacattggacttctgtttagaatccatgcaagtaagaagtgttgaaaaaattagaatacagtgggtattttttatccaagtattcattatttaaaactgcaaagtgaaaataattgtaacaagaacatattcactagcaatctgagcactcatgatattaatgtctgttctggagagaattatgtccccccagaattcytaacctgaagccctatctcccagtgtgactgtatttggagaaggagcttttaagaagttaaaggttaaataggggcaaaagggtaaggccctaatctgttaggactggggtcatcatccaaaaaggaagagacaccagagatacatatctctctcttctctctctctctgcctcccttcttctctctctctccctctctccctctccccacatacatttgttaaattgaggttttttgttagaacatatatagtggcattttaatatagtattactctacttaaaacatacacacacacacacacacacacacac

SEQ ID NO: 234281 - DNA, 515 bp, Homo sapiens
ttacattggacttctgtttagaatccatgcaagtaagaagtgttgaaaaaattagaatacagtgggtattttttatccaagtattcattatttaaaactgcaaagtgaaaataattgtaacaagaacatattcactagcaatctgagcactcatgatattaatgtctgttctggagagaattatgtccccccagaattcctaacctgaagccctatctcccagtgtgactgtatttggrgaaggagcttttaagaagttaaaggttaaataggggcaaaagggtaaggccctaatctgttaggactggggtcatcatccaaaaaggaagagacaccagagatacatatctctctcttctctctctctctgcctcccttcttctctctctctccctctctccctctccccacatacatttgttaaattgaggttttttgttagaacatatatagtggcattttaatatagtattactctacttaaaacatacacacacacacacacacacacacac

SEQ ID NO: 234282 - DNA, 515 bp, Homo sapiens
ttacattggacttctgtttagaatccatgcaagtaagaagtgttgaaaaaattagaatacagtgggtattttttatccaagtattcattatttaaaactgcaaagtgaaaataattgtaacaagaacatattcactagcaatctgagcactcatgatattaatgtctgttctggagagaattatgtccccccagaattcctaacctgaagccctatctcccagtgtgactgtatttggagaaggagcttttaagaagttaaaggttaaataggggcaaaagggtaaggccctaatctgttagkactggggtcatcatccaaaaaggaagagacaccagagatacatatctctctcttctctctctctctgcctcccttcttctctctctctccctctctccctctccccacatacatttgttaaattgaggttttttgttagaacatatatagtggcattttaatatagtattactctacttaaaacatacacacacacacacacacacacacac

SEQ ID NO: 234283 - DNA, 649 bp, Homo sapiens
tagctgggcgtggtggcgggcacctgtaattccatttactcagaatgctgaagcagragagtcccttgaacccaggaggcggaggttgtggtgagccgagattgcaccattgcactccagcctgggcagcaagagcaaaactccgtctcaagaaaaatacaataaaataaaaataaaaaaacacaaaaccgggatgtgtccctgtcttttaggcagatatactttaccattactaaaattgagcttcagaaacattaagcatgctacacaaacttagctggaaatgaatactgaaatggaagtttgaatccaagatgatttcttttgaatcccatgctaatgctgttaactcctatagacccttctcaggtgcagccagagagacactagcccactgatggacggacagacgtgggcagggtccgtgtcactaaaccacccaccactgccacagctgcctacaacagacacatcagatgacactccgggcaaataaatgattttcactgaggacttactggttttaataataggtcctggtgtagagaagtccctcaacctattgtgcaacgagttttgagaagcgggtaagctgtatgttttgtggttttgtttcataaattcatctacaggaagaccaatattgact

SEQ ID NO: 234284 - DNA, 649 bp, Homo sapiens
tagctgggcgtggtggcgggcacctgtaattccatttactcagaatgctgaagcaggagagtcccttgaacccaggaggcggaggttgtggtgagccgagattgcaccattgcactccagcctgggcagcaagagcaaaactccgtctcaagaaaaatacaataaaataaaaataaaaaaacacaaaacygggatgtgtccctgtcttttaggcagatatactttaccattactaaaattgagcttcagaaacattaagcatgctacacaaacttagctggaaatgaatactgaaatggaagtttgaatccaagatgatttcttttgaatcccatgctaatgctgttaactcctatagacccttctcaggtgcagccagagagacactagcccactgatggacggacagacgtgggcagggtccgtgtcactaaaccacccaccactgccacagctgcctacaacagacacatcagatgacactccgggcaaataaatgattttcactgaggacttactggttttaataataggtcctggtgtagagaagtccctcaacctattgtgcaacgagttttgagaagcgggtaagctgtatgttttgtggttttgtttcataaattcatctacaggaagaccaatattgact

SEQ ID NO: 234285 - DNA, 649 bp, Homo sapiens
tagctgggcgtggtggcgggcacctgtaattccatttactcagaatgctgaagcaggagagtcccttgaacccaggaggcggaggttgtggtgagccgagattgcaccattgcactccagcctgggcagcaagagcaaaactccgtctcaagaaaaatacaataaaataaaaataaaaaaacacaaaaccgggatgtgtccctgtcttttaggcagatatactttaccattactaaaattgagcttcagaaacattaagcatgctacacaaacttagctggaaatgaatactgaaatggaagtttgaatccaagatgatttcttttgaatcccatgctaatgctgttaactcctatagacccttctcaggtgcagccagagagacactagcccactgatggacggacagacgtgggcagggtccgtgtcactaaaccacccaccactgccacagctgcctacaacagacacatcagatgacactccgggcaaataaatgattttcactgaggacttactggttttaataataggtcctggtgtagagaagtccctcaacctattgtgcaaygagttttgagaagcgggtaagctgtatgttttgtggttttgtttcataaattcatctacaggaagaccaatattgact

SEQ ID NO: 234286 - DNA, 356 bp, Homo sapiens
tactgtatagatataagtaagtatagatatacttaactgttgtgttacaattgtctacagtattcagtacagtaacatgctgcacaggtttgtagcctaggaggaataggctataccacctaacctagatatgtaatcagctatagcatctaggtttgtgtaagtaaactctgtgatgttcayacaataataaaatcgtccagcaatgcatttctcagacacacccctgtcattaagtgacacatgactgtattagttaacactatgggaacttcatgggaaatggacactctagctccaccataaatagaaactgtttatgtcaaaaaacacataaaagcatagttgcaagatta

SEQ ID NO: 234287 - DNA, 356 bp, Homo sapiens
tactgtatagatataagtaagtatagatatacttaactgttgtgttacaattgtctacagtattcagtacagtaacatgctgcacaggtttgtagcctaggaggaataggctataccacctaacctagatatgtaatcagctatagcatctaggtttgtgtaagtaaactctgtgatgttcacacaataataaaatygtccagcaatgcatttctcagacacacccctgtcattaagtgacacatgactgtattagttaacactatgggaacttcatgggaaatggacactctagctccaccataaatagaaactgtttatgtcaaaaaacacataaaagcatagttgcaagatta

SEQ ID NO: 234288 - DNA, 264 bp, Homo sapiens
tttgatactgttatcattctgctgtagaaagtacccgtgaactggaaaaagtccacaatcgaatagctagtcattcaacactatcaaattttaggtgactttttgaaaaaatagtatctcttgttgcaagaaatggtccatctgtgatttcaagtctctcrcttgagtgaattggatggaagtggtgaatttcagccaaagtggccaaagaaatcctgttcctgtgataatgacgccatcagcctctgcatctctgtcttccct

SEQ ID NO: 234289 - DNA, 264 bp, Homo sapiens
tttgatactgttatcattctgctgtagaaagtacccgtgaactggaaaaagtccacaatcgaatagctagtcattcaacactatcaaattttaggtgactttttgaaaaaatagtatctcttgttgcaagaaatggtccatctgtgatttcaagtctctcgcttgagtgaattggatggaagtggtgaatttcagccaaagtggccaaagaaatcctgttcctgtgataatgackccatcagcctctgcatctctgtcttccct

SEQ ID NO: 234290 - DNA, 418 bp, Homo sapiens
tagggccccagtgccatctgcttttcctcaggactctgctccatcagccatcaggtggcagctactcatgctrttggaacctggccatctgggcttccttgagtgggtgaggttgctggcttgtccacctgcttaaaggtactatggggatagaacacaaataataataatgcatttttcaaacaaattaattccttgattttcaaacaaattgaagacaaaggaaactcatgattcaaatgaatacatatggctcattttattcaatatttatgcttacagaatatatgtaaataagacattcccatgattaatattagtatttaagactgataaacttttgggtgggcagttaaagcttatcttctactattttctaacttcagaaatgcttttgtttgaaagttgggtgacaaag

SEQ ID NO: 234291 - DNA, 555 bp, Homo sapiens
gtgggccaatcaccaacctcacatgctgccagtcacagtacatcagttcttctgccctagagttagggccccagtgccatctgcttttcctcaggactctgctccatcagccatcaggtggcagctactcatgctgttggaacctggycatctgggcttccttgagtgggtgaggttgctggcttgtccacctgcttaaaggtactatggggatagaacacaaataataataatgcatttttcaaacaaattaattccttgattttcaaacaaattgaagacaaaggaaactcatgattcaaatgaatacatatggctcattttattcaatatttatgcttacagaatatatgtaaataagacattcccatgattaatattagtatttaagactgataaacttttgggtgggcagttaaagcttatcttctactattttctaacttcagaaatgcttttgtttgaaagttgggtgacaaagtttcaaggagattaagtcccaatattcctattttaaatctctcagcttgtgcagcagggcaggtaaacatgaag

SEQ ID NO: 234292 - DNA, 418 bp, Homo sapiens
tagggccccagtgccatctgcttttcctcaggactctgctccatcagccatcaggtggcagctactcatgctgttggaacctggccatctgggcttccttgagtgggtgaggttgctggcttgtccrcctgcttaaaggtactatggggatagaacacaaataataataatgcatttttcaaacaaattaattccttgattttcaaacaaattgaagacaaaggaaactcatgattcaaatgaatacatatggctcattttattcaatatttatgcttacagaatatatgtaaataagacattcccatgattaatattagtatttaagactgataaacttttgggtgggcagttaaagcttatcttctactattttctaacttcagaaatgcttttgtttgaaagttgggtgacaaag

SEQ ID NO: 234293 - DNA, 418 bp, Homo sapiens
tagggccccagtgccatctgcttttcctcaggactctgctccatcagccatcaggtggcagctactcatgctgttggaacctggccatctgggcttccttgagtgggtgaggttgctggcttgtccacctgcttaaaggtactatggggatagaacacaaataataataatgcatttttcaaacaaattaattccttgattttcaaacaaattgaagacaaaggaaactcatgattcaaatgaatacatatggctcattttattcaatatttatgcttacagaatatatgyaaataagacattcccatgattaatattagtatttaagactgataaacttttgggtgggcagttaaagcttatcttctactattttctaacttcagaaatgcttttgtttgaaagttgggtgacaaag

SEQ ID NO: 234294 - DNA, 432 bp, Homo sapiens
tgaaagaattccctgtcaaatgaaaatgtacttttcatctaatgtgtatatataactgatatatatgacatattatatctggtatatatgtatacgtatcagtaatatatatatayatatatatatatatatatatatatatataacttatgatatataataaacaacataggctgggcacggtggctcacacctttaatcccagcactttgggaggcggaggtgggcagatcacttgaggtcaggagttcgagaccagcctggccaacgtgatgaaaccccctctctactaaatatacaaaaattagccaggcacgctggcacctgcctataatccaagctacttggaaggctgaggtaggagaattgcttgaacccggcaggcagaggttgcagtgagccaagattgtgccattggacaccagcctgggc

SEQ ID NO: 234295 - DNA, 299 bp, Homo sapiens
ctagatcacgccactgcactccagcctgggtgacaaagcaagattstgtctcagagaaaaaaaaaagaagatttagtgttacttatcttttggcaatgcttcccatacaatgttatcaactaagatttagcaaagatgtcaaaaaattgaaaacatttgaccaaaacagaatgactgtttattgttttttattttatttttttttttgagacagggtcttaccctgttgcccaggctggagtgcagtggtgaaatcatggctcactgcagcctcaacctcccaggcccaggtgatcctc

SEQ ID NO: 234296 - DNA, 299 bp, Homo sapiens
ctagatcacgccactgcactccagcctgggtgacaaagcaagattctgtctcagagaaaaaaaaaagaagatttagtgttacttatcttttggcaatgcttcccatacaatgttatcaamtaagatttagcaaagatgtcaaaaaattgaaaacatttgaccaaaacagaatgactgtttattgttttttattttatttttttttttgagacagggtcttaccctgttgcccaggctggagtgcagtggtgaaatcatggctcactgcagcctcaacctcccaggcccaggtgatcctc

SEQ ID NO: 234297 - DNA, 299 bp, Homo sapiens
ctagatcacgccactgcactccagcctgggtgacaaagcaagattctgtctcagagaaaaaaaaaagaagatttagtgttacttatcttttggcaatgcttcccatacaatgttatcaactaagatttagcaaagatgtcaaaaaattgaaaacatttgaccaaaacagaatgacwgtttattgttttttattttatttttttttttgagacagggtcttaccctgttgcccaggctggagtgcagtggtgaaatcatggctcactgcagcctcaacctcccaggcccaggtgatcctc

SEQ ID NO: 234298 - DNA, 299 bp, Homo sapiens
ctagatcacgccactgcactccagcctgggtgacaaagcaagattctgtctcagagaaaaaaaaaagaagatttagtgttacttatcttttggcaatgcttcccatacaatgttatcaactaagatttagcaaagatgtcaaaaaattgaaaacatttgaccaaaacagaatgactgtttattgttttttattttatttttttttttgagacagggtctyaccctgttgcccaggctggagtgcagtggtgaaatcatggctcactgcagcctcaacctcccaggcccaggtgatcctc

SEQ ID NO: 234299 - DNA, 435 bp, Homo sapiens
ttaattcttaccgttttattaaccagagtccttatgccctgacttcattggtacccctttgacattaaacagaacacttaatttaaaattctgataaataaattaattacaycatttacttgaggtactctttcacctttcaagaaatattttgagaattcattagctaaacattgctataatgcaggctagtaataaatggaaataatgatttcattgtaaagtttaaactaatgatggtatgatctggaatttttgttaacctagaagacataattagctctagaggtgaaatgaaagacaaaatcacttcacatattagtaaaaaacaaataatataactttataagctactgctgttcttttgctattaagaaccaatgacatctctaattagggaagattatggaaaggttaaaggtgagaatacatgca

SEQ ID NO: 234300 - DNA, 435 bp, Homo sapiens
ttaattcttaccgttttattaaccagagtccttatgccctgacttcattggtacccctttgacattaaacagaacacttaatttaaaattctgataaataaattaattacatcatttacttgaggtactctttcacctttcaagaaatattttgagaattcattagctaaayattgctataatgcaggctagtaataaatggaaataatgatttcattgtaaagtttaaactaatgatggtatgatctggaatttttgttaacctagaagacataattagctctagaggtgaaatgaaagacaaaatcacttcacatattagtaaaaaacaaataatataactttataagctactgctgttcttttgctattaagaaccaatgacatctctaattagggaagattatggaaaggttaaaggtgagaatacatgca

SEQ ID NO: 234301 - DNA, 435 bp, Homo sapiens
ttaattcttaccgttttattaaccagagtccttatgccctgacttcattggtacccctttgacattaaacagaacacttaatttaaaattctgataaataaattaattacatcatttacttgaggtactctttcacctttcaagaaatattttgagaattcattagctaaacattgctataatgcaggctagtaataaatggaaataatgatttcattgtaaagtttaaactaatgatggtwtgatctggaatttttgttaacctagaagacataattagctctagaggtgaaatgaaagacaaaatcacttcacatattagtaaaaaacaaataatataactttataagctactgctgttcttttgctattaagaaccaatgacatctctaattagggaagattatggaaaggttaaaggtgagaatacatgca

SEQ ID NO: 234302 - DNA, 435 bp, Homo sapiens
ttaattcttaccgttttattaaccagagtccttatgccctgacttcattggtacccctttgacattaaacagaacacttaatttaaaattctgataaataaattaattacatcatttacttgaggtactctttcacctttcaagaaatattttgagaattcattagctaaacattgctataatgcaggctagtaataaatggaaataatgatttcattgtaaagtttaaactaatgatggtatgatctggaatttttgttaacctagaagacataattagctctagaggtgaaatgaaagacawaatcacttcacatattagtaaaaaacaaataatataactttataagctactgctgttcttttgctattaagaaccaatgacatctctaattagggaagattatggaaaggttaaaggtgagaatacatgca

SEQ ID NO: 234303 - DNA, 565 bp, Homo sapiens
tgcaggctagtaataaatggaaataatgatttcattgtaaagtttaaactaatgatggtatgatctggaatttttgttaacctagaagacataattagctctagaggtgaaatgaaagacaaaatcacttcacatattagtaaaaaacaaataatataactttataagctactgctgttcttttgctattaakaaccaatgacatctctaattagggaagattatggaaaggttaaaggtgagaatacatgcagtctgtcgacaggaaacttaaacagtttaggttaaggaaaggtctgcgaaagtcatattaattagcaggttcacaggaaactgacatttattgtataaattccatggtcaaatgtattagggctccacacacacaaatgtgcaccatatatgttaccacacagtgcttacttctttcagtctttattcatttctctcctaatggtctgtatggtattattacatagttctaaaaaccttccatgaggcagaaatttcatttaatgatatagctttgaaaataatgaaaaacagtagaaactttctacttttt

SEQ ID NO: 234304 - DNA, 449 bp, Homo sapiens
aggctgctgcagtctcgccagatcttcaggctctttctctgattctagtgctcttgttatttccaccatatctgcagttacytcctccacagaagtcgtgaacccctgtgtcatctgtgagggttggaataatcttcccaacttctctctctttttttttttttttttttgagatgaagtcttgcctgggctggagtgcagtgatgcgatctcagctcactgcaacctccacttcccgtgttcaaggaattctcctgcctcagcctcccaagtgtttgggattacagtcacccccgaccaggcccagctaattttttgtgtgtttttagtacagacaggatttcactatgttggccaggctggtctcaaattcctgatctcgtgatccacgtgccttggcctcccaaagtgctgggattacaggcgtgagccaccaagcccagccccaa

SEQ ID NO: 234305 - DNA, 413 bp, Homo sapiens
tatagctttatgaaatatatttttaagtgataagacttgaaagttgaaattattctttgatccaagggcaccagaatgaatgttgggttagtaggcatgaaaacaatrttcagctctttatacatctctgtaaaagcccttgagtaccagcggcattgtcagtgagcggtaatactttgaaaggaatcttatttcttgagcagtagttgtcgacagtgggcttaagatattcagtaagccatatttgtaaaccgatagtctgtcatccaggctttgttcccatttgtagagtataggcagagctgtgttttatcataattcttcagggaccttggatttcagaatagtaaatcatcattggtttcaagttaacatcaccaattgcattaggccttaacaaaagagtcagcatg

SEQ ID NO: 234306 - DNA, 494 bp, Homo sapiens
acttgaaagttgaaattattctttgatccaagggcaccagaatgaatgttgggttagtaggcatgaaaacaatattcagctctttatacatctctgtaaaagcccttgagtaccagcggcattgtcaktgagcggtaatactttgaaaggaatcttatttcttgagcagtagttgtcgacagtgggcttaagatattcagtaagccatatttgtaaaccgatagtctgtcatccaggctttgttcccatttgtagagtataggcagagctgtgttttatcataattcttcagggaccttggatttcagaatagtaaatcatcattggtttcaagttaacatcaccaattgcattaggccttaacaaaagagtcagcatgtcctttgaagccttaaagccaggcatcaactcctctctagctgggaacttcctggatggcatctccttctagtagaaggctgttttgtctccattgcaaatctgtttagtgcagc

SEQ ID NO: 234307 - DNA, 494 bp, Homo sapiens
acttgaaagttgaaattattctttgatccaagggcaccagaatgaatgttgggttagtaggcatgaaaacaatattcagctctttatacatctctgtaaaagcccttgagtaccagcggcattgtcagtgagcggtaatactttgaaaggaatcttatttcttgagcagtagttgtcgacagtgggcttaagatattcagtaagccatatttgtaaaccgatagtctgtcatccaggctttgttcccatttgtagagtataggcagagctgtgttttatcataattcttcagggmccttggatttcagaatagtaaatcatcattggtttcaagttaacatcaccaattgcattaggccttaacaaaagagtcagcatgtcctttgaagccttaaagccaggcatcaactcctctctagctgggaacttcctggatggcatctccttctagtagaaggctgttttgtctccattgcaaatctgtttagtgcagc

SEQ ID NO: 234308 - DNA, 494 bp, Homo sapiens
acttgaaagttgaaattattctttgatccaagggcaccagaatgaatgttgggttagtaggcatgaaaacaatattcagctctttatacatctctgtaaaagcccttgagtaccagcggcattgtcagtgagcggtaatactttgaaaggaatcttatttcttgagcagtagttgtcgacagtgggcttaagatattcagtaagccatatttgtaaaccgatagtctgtcatccaggctttgttcccatttgtagagtataggcagagctgtgttttatcataattcttcagggaccttggatttcagaatagtaaatcatcattggtttcaagttaacatcaccaattgcattaggccttaacaaaagagtcagcatgtcctttgaagccttaaagccaggcatcaactcctctctagctgggaacwtcctggatggcatctccttctagtagaaggctgttttgtctccattgcaaatctgtttagtgcagc

SEQ ID NO: 234309 - DNA, 512 bp, Homo sapiens
tcagctttcttattcctggctctttccagtgtcctttrgagaatgtcaaccctggggactagaaagggaaggcaatgttgtttgggagctaagccaaggctgcaaattctgtgtgaagcctgtccctgccatgactggtgcacgacctgaggtgagttacataatcctggtcacctcaatttcttcatgtatgaaatggttaagttcttccttcataggcttgttgtcaggaaaaatgagatactgcatgaaaagctcttattccaatgtctgaccaccagtgtagaagatgcaggtaagcagtcatcagtcctgaggcgggctgccctgtgtggtggagatgccccatgcaccaggatccctgaggcattgcccctccccaccatggaattattgcatccacccctgtgcattatatcgtcatagaacagccttagtgccctacccagggaaactgagtgagaaaggacaaggcatagccccacaatgttttcagttcctggatcccaggt

SEQ ID NO: 234310 - DNA, 458 bp, Homo sapiens
agctttcttattcctggctctttccagtgtcctttagagaatgtcaaccctggggactagaaagggaaggcaatgttgtttgggagctaagccaaggctgcaaattctgtgtgaagcctgtccctgccatgactggtgcacgacctgaggtgagttacataatcctggtcacctcaatttcttcatgtatgaaatggttaagttcttccttcataggcttgttgtcaggaaaaaygagatactgcatgaaaagctcttattccaatgtctgaccaccagtgtagaagatgcaggtaagcagtcatcagtcctgaggcgggctgccctgtgtggtggagatgccccatgcaccaggatccctgaggcattgcccctccccaccatggaattattgcatccacccctgtgcattatatcgtcatagaacagccttagtgccctacccagggaaactgagt

SEQ ID NO: 234311 - DNA, 570 bp, Homo sapiens
tctaactttcataaattaaaatttttatggaaataaacatggattcacatgcagttgtaacaaataatagggacagagcccatgtactttttattcattttaccccaatgttagcttctttcaaaaccatagtacaatattacaacaaggatgctaatattgagacaatccacctgtcttatgcagatttccccaggtttacttgtactctstgtgtgtgtgtgtatgcgtattaattctatacagcttcatcacatctatatttgtacacccatgaccatagtcaagacacagagctgctccacaccacagggatcccctgggctgacttgcttctggctcccaaattgcaagccatgtaacctatcattagccaacttgtgtactcacctctgcagtgcataattcacattatgcattctcctattacagtcagagcttgtgaaatctctgatatctaacatcctaaaacacggaaagtattattaaagaaaaaaatcagtggaagtacagggatgtaactttttctccatggctgtaaccacacacagtggaaaagatgctgaatct

SEQ ID NO: 234312 - DNA, 504 bp, Homo sapiens
tggctgcgtccagagcaggtcaycaaagccaggacatggtcaccaaagtccatgggtgtctttgggtggtgagcatggctgcctttagtgattgctgtacatcattccaaaacatctgtgtcaatatttgcaagagattaaaaagagaaaattacctggattaaagaaaatgagggaaattaatatcccctataaaaaaaaagtatatgggtaactctgacttcatacatggctggattcagggcccaatttatgtcatcaagatgcagtttcttgatatctcttggatctattatgcccaatgttggcttcattttcagatttgtgcagtgaaaacaggaccaccaccggctttgcccattcaaatctcacagagcaaagagagtgccccgtctctcagcagcctcagtaacactttcatttgctgtgcatgagtcagagtgaatcatggtggtcctagccatggccgagggaaggcaatctgcccattgggaaggaatgaat

SEQ ID NO: 234313 - DNA, 504 bp, Homo sapiens
tggctgcgtccagagcaggtcaccaaagccaggacatggtcaccaaagtccatgggtgtctttgggtggtgagcatggctgcctttagtgattgctgtacatcattccaaaacatctgtgtcaatatttgcaagagattaaaaagagaaaattacctggattaaagaaaatgagggaaattaatatcccctataaaaaaaaagtatatgggtaactctgacttcatacatggctggattcagggcccaatttatgtcatcaagatgcagtttcttgatatctcttggatctatyatgcccaatgttggcttcattttcagatttgtgcagtgaaaacaggaccaccaccggctttgcccattcaaatctcacagagcaaagagagtgccccgtctctcagcagcctcagtaacactttcatttgctgtgcatgagtcagagtgaatcatggtggtcctagccatggccgagggaaggcaatctgcccattgggaaggaatgaat

SEQ ID NO: 234314 - DNA, 620 bp, Homo sapiens
tgcctttttctggaatgttatataaatggaatcatgcagtatggagtcttacatactggctgcattcatttaggaatatgtatgtaagagtcactgaygtcgtatggattaataaactgttcctttctatcactgactagcattccattatatgagtgtgtaataatagtatgtttatccatttacctattgaaggatatcttggttgcttccggttttggcaattatgaataaagttgctataaacatttttgtgccaacatttgtgtgaatattgcatctattttaaaaattaaaattggcttatgtttttattttctcacattgccatctggttttggtatcaagtatatattaaaaataaagtgaatagggtacttccaccttttaaaatttttttaaaaaacaacttgtttaaattagaatatttatttcttaaaaaatgaaatcttaaaaaatttctttaaaatactattttattgtgttatctggaaaattgtctaggttcgtgaatttttagaatagcagaaggttttggttaccatttcattaaaaaagattaccaatctatttaaattttttaatttttcatgtgccaatcttggcactttatatttttc

SEQ ID NO: 234315 - DNA, 620 bp, Homo sapiens
tgcctttttctggaatgttatataaatggaatcatgcagtatggagtcttacatactggctgcattcatttaggaatatgtatgtaagagtcactgatgtcgtatggattaataaactgttcctttctatcactgactagcattccattatatgagtgtgtaataatagtatgtttatccatttacctattgaaggatatcttggttgcttccggttttggcaattatgaataaagttgctrtaaacatttttgtgccaacatttgtgtgaatattgcatctattttaaaaattaaaattggcttatgtttttattttctcacattgccatctggttttggtatcaagtatatattaaaaataaagtgaatagggtacttccaccttttaaaatttttttaaaaaacaacttgtttaaattagaatatttatttcttaaaaaatgaaatcttaaaaaatttctttaaaatactattttattgtgttatctggaaaattgtctaggttcgtgaatttttagaatagcagaaggttttggttaccatttcattaaaaaagattaccaatctatttaaattttttaatttttcatgtgccaatcttggcactttatatttttc

SEQ ID NO: 234316 - DNA, 620 bp, Homo sapiens
tgcctttttctggaatgttatataaatggaatcatgcagtatggagtcttacatactggctgcattcatttaggaatatgtatgtaagagtcactgatgtcgtatggattaataaactgttcctttctatcactgactagcattccattatatgagtgtgtaataatagtatgtttatccatttacctattgaaggatatcttggttgcttccggttttggcaattatgaataaagttgctataaacatttttgtgccaacatttgtgtgaatattgcatctattttaaaaattaaaattggcttatgtttttattttctcacattgccatctggttttggtatcaagtatatattaaaaataaagtgaatagggtacttccaccttttaaaayttttttaaaaaacaacttgtttaaattagaatatttatttcttaaaaaatgaaatcttaaaaaatttctttaaaatactattttattgtgttatctggaaaattgtctaggttcgtgaatttttagaatagcagaaggttttggttaccatttcattaaaaaagattaccaatctatttaaattttttaatttttcatgtgccaatcttggcactttatatttttc

SEQ ID NO: 234317 - DNA, 548 bp, Homo sapiens
aatatatgtaatgtgaatgttgttkctctgagcaggaagatttaatcatgttggggatctgaggcattagctaagatatggagaaagggattgcttggaaagtgaattccaggcacaggaatagcatgaacaaagaccccgaggcaagatatactgagaaatgtgcaggaaggcagggttttccagttaagtaggagcaacgtcatataggatcctaaatttctattgagaaccttgaaaccattcaaacattggcaagttgctcattgttatccttcctgtgcttcaaattcctcattcacatcatagaataataatgatgcctacccaacttttttattgctagccatggagcaagcaagcattcattaaaagttatgcattattaggcatcaggaagtcatgaagtattctcagtggcagagtgacatggtcagatttatgccattggtgtagagaatggattggagggcatgagggtcagatgcagagagactagttatttgttgatataatattgtaatagccccagggggtgatggtgacct

SEQ ID NO: 234318 - DNA, 499 bp, Homo sapiens
gtttatgatactaaatattttctagttgcacttaaccacacccttaccggttttcttgggaataattctaaataaatcactttcccatgagtccttgttacagggtctgcttctggggaacctaatctgagagatttctccaaggaaaagttgggtaccttaattagtcagttattgctgcactagagctaaataaaagacataaatatctaaggcacttactggaataaacatcttatttccgctaagaggttggctagggaagctctgcttcagagtatgggttgagtataagcctgttccacatgtcttttgctctgggaccaggmgttgtgcagcccatccttttctcaagacaaaagccaagccaagcaaggacatttaaagcttcacttctgctcacatcatatctattggccaaacattccattggccaaagcaaatcacatggccaagtcaagcatcagtagtctggggaatattcttcctctactctaga

SEQ ID NO: 234319 - DNA, 499 bp, Homo sapiens
gtttatgatactaaatattttctagttgcacttaaccacacccttaccggttttcttgggaataattctaaataaatcactttcccatgagtccttgttacagggtctgcttctggggaacctaatctgagagatttctccaaggaaaagttgggtaccttaattagtcagttattgctgcactagagctaaataaaagacataaatatctaaggcacttactggaataaacatcttatttccgctaagaggttggctagggaagctctgcttcagagtatgggttgagtataagcctgttccacatgtcttttgctctgggaccaggcgttgtgcagcccatccttttctcaagacaaaagcyaagccaagcaaggacatttaaagcttcacttctgctcacatcatatctattggccaaacattccattggccaaagcaaatcacatggccaagtcaagcatcagtagtctggggaatattcttcctctactctaga

SEQ ID NO: 234320 - DNA, 499 bp, Homo sapiens
gtttatgatactaaatattttctagttgcacttaaccacacccttaccggttttcttgggaataattctaaataaatcactttcccatgagtccttgttacagggtctgcttctggggaacctaatctgagagatttctccaaggaaaagttgggtaccttaattagtcagttattgctgcactagagctaaataaaagacataaatatctaaggcacttactggaataaacatcttatttccgctaagaggttggctagggaagctctgcttcagagtatgggttgagtataagcctgttccacatgtcttttgctctgggaccaggcgttgtgcagcccatccttttctcaagacaaaagccragccaagcaaggacatttaaagcttcacttctgctcacatcatatctattggccaaacattccattggccaaagcaaatcacatggccaagtcaagcatcagtagtctggggaatattcttcctctactctaga

SEQ ID NO: 234321 - DNA, 398 bp, Homo sapiens
actaattctatatcaggagagaatgaggaattgggaactgtaacccaatccgcaacatttcaattggaagaaattactccgcaggcaagaaatatttttcctccaggagatactctgcaggcataaccagcagatgtctaccctgatttacagtaagtcatgtgtgataggctgagtaatggctcacaaagatgatcgtgttgtaattcccagaacctgtggatatgyaccttgtgtggcaaaaggaactgcacggatgccattaaaatatggatcttgagatggggagattttcctggattataggttggcacaatgtaattataagcgtccttataagatgaaggcaggaagtcagaaaggagagaagatgttgctctgatggctttgaagttgaa

SEQ ID NO: 234322 - DNA, 632 bp, Homo sapiens
acaagtactcactaacaacaagtgaatgaaagtgatgtacgtcacacctgagccaaaatggttaaaagtgggtatagttttttaccctcttatttgcttacagcggaaggccctgggacatggaagaacccctaaataaaggaacctggggttctgaatgactgtatagaatgcttccttcctcatttatcaagactacctgcattttactgcaggtgaactggaataaacttttattgtgtttgtcaacaaaatgttggaatggccttgctacagtggctaagatcgctcaaacaaatattcatggcctcatctgaaagcaagagatgatggtaaatatgatctcaggttggccaaccacttctcattgaaagctgtttcaatactttggaaacaggagtgcagcttttaggtgctcagttagctgactctacacaaacacctttcacagtgcctgactttactgaatgaataaatgaatggcccacatttaagtggatgccytcctctgggaagctctgtgcacgttgatgtagctattaaaaattgactacaggactttttacaaacatgttaagctatttatatacgttattttattaatactggtgataatccagttaattaaattt

SEQ ID NO: 234323 - DNA, 419 bp, Homo sapiens
aattcaataacagaaaggtagagatgaaaaatttaagagaagaaaaaatggaggctacattaaaaacacctcaacatatgtctaataaaactgtcagaagagaaaataaaagatgagaaagaagcaattttcaaagtgaaaatggtgagaatattacagaactcaagtggttccatactggttcctgaatatgataagtagataataaaataaaaatataaactcacccaagacctacaactgtgaaaatgtataatattaacagcataaagaaaattttatcagcttccagagaggaaggcaaatccgtaacaaggaagggatgttagataatacacttggcatctgcaacaggacatgatgtaagacagtraaatatcttcaaggtacagaggaaaataattgtcattgtagaatac

SEQ ID NO: 234324 - DNA, 558 bp, Homo sapiens
ggcaaaatggggttagcagtatcaacctggggtggtggggaggaatgtgatgcagattaaatgagattgctgagaaataaccagcccagtttctggtacacagagataaaaaattgttagttaccatctccttgcctcctggggtggccagtatgctagtatgttaacctcagcctctgcatccaactttaacctgaaccctaaytttgtgatgtaagagtgagttgagtctatctagatttaacattcttttatattgcactagttatgtttgaatttttttttcagttacaccctccaggtctactaaaaaaaagtgtaagtagttaatatgattattttctaaagcaataataaaaatgctttttaaaaagattagaaatttgaaattttataacaggtttagaaaacagtagcatcttattatttacattagatttgacatgtcaatagcaaatgatactttattgtagttcaaaggttttaccactaagaacttgataattattcttctcaaaagtaagctgggcatggtagcatgtgcctgcagtcatagct

SEQ ID NO: 234325 - DNA, 558 bp, Homo sapiens
ggcaaaatggggttagcagtatcaacctggggtggtggggaggaatgtgatgcagattaaatgagattgctgagaaataaccagcccagtttctggtacacagagataaaaaattgttagttaccatctccttgcctcctggggtggccagtatgctagtatgttaacctcagcctctgcatccaactttaacctgaaccctaactttgtgatgtaagagtgagttgagtctatctagatttaacattcttttatattgcactagttatgtttgaatttttttttcagttacaccctccaggtctactaaaaaaaagtgtaagtagttmatatgattattttctaaagcaataataaaaatgctttttaaaaagattagaaatttgaaattttataacaggtttagaaaacagtagcatcttattatttacattagatttgacatgtcaatagcaaatgatactttattgtagttcaaaggttttaccactaagaacttgataattattcttctcaaaagtaagctgggcatggtagcatgtgcctgcagtcatagct

SEQ ID NO: 234326 - DNA, 558 bp, Homo sapiens
ggcaaaatggggttagcagtatcaacctggggtggtggggaggaatgtgatgcagattaaatgagattgctgagaaataaccagcccagtttctggtacacagagataaaaaattgttagttaccatctccttgcctcctggggtggccagtatgctagtatgttaacctcagcctctgcatccaactttaacctgaaccctaactttgtgatgtaagagtgagttgagtctatctagatttaacattcttttatattgcactagttatgtttgaatttttttttcagttacaccctccaggtctactaaaaaaaagtgtaagtagttaatatgattattttctaaagcaataataaaaatgctttttaaaaagattagaaatttgaaattttataacaggtttagaaaacartagcatcttattatttacattagatttgacatgtcaatagcaaatgatactttattgtagttcaaaggttttaccactaagaacttgataattattcttctcaaaagtaagctgggcatggtagcatgtgcctgcagtcatagct

SEQ ID NO: 234327 - DNA, 558 bp, Homo sapiens
ggcaaaatggggttagcagtatcaacctggggtggtggggaggaatgtgatgcagattaaatgagattgctgagaaataaccagcccagtttctggtacacagagataaaaaattgttagttaccatctccttgcctcctggggtggccagtatgctagtatgttaacctcagcctctgcatccaactttaacctgaaccctaactttgtgatgtaagagtgagttgagtctatctagatttaacattcttttatattgcactagttatgtttgaatttttttttcagttacaccctccaggtctactaaaaaaaagtgtaagtagttaatatgattattttctaaagcaataataaaaatgctttttaaaaagattagaaatttgaaattttataacaggtttagaaaacagtagcatcttattatttacattagatttgacatgtcaatagcaaatgakactttattgtagttcaaaggttttaccactaagaacttgataattattcttctcaaaagtaagctgggcatggtagcatgtgcctgcagtcatagct

SEQ ID NO: 234328 - DNA, 557 bp, Homo sapiens
tctgtaggggttttgttgagtaattaaggtaaggcaaattgaaagtatataaaatgccccagattaaacaggaaaaaagatattaccctcttacttctgtcctatgacatacattgatatatgcaaaatcccttttcctaagcacttttgcttaaggatgccagataaagggataaggaaatataacactattcaatttggcaggaatcacagctaaggttgaatatcacattactttgctgcaaagagcattttcagatacattggctgtaggaagattatgattctgcaaaacaaaatgtggaagaataggatgaaattgattgagttatgaaaacaattattatatctattcacttatcatctaatttcccgttacctggataattactggacacttgaatcacagtctacacactaaccaactgatggcccacagaacytagaggaaggcaaactctcagctctgttattcgtcttctccatgggaaaaatattgacactgctttggtgaaaacttacagttcaaatatacaaaaggagaaaactgcagaaac

SEQ ID NO: 234329 - DNA, 589 bp, Homo sapiens
tatcagtcatcacagtcatttgatatgattcagttatatcctattatttaaacaatcctctactgactgccttctgtgtactcagtattacatacgtaatctttttgtacatgtggtaatcttggatagcaaggggttaacaatgccttgcatagttgttaggcatttcaaaatatttatagtgaagatatgaatgcacatgacctcttagtaaatagaaattaattgagctcatgttgtgaaactaaataaattagtgggaagaaaaatggtagggcttactagcggaagtaattagatcaaagaattctctgttgtactaagttgcctctgtttgtttctgaatggctgctaatgtttaaatctctgggctgccaaatttgtgctattttgccaacaacattttctctactccaagtgttactggaaagctaatcagaggcagtaattgatttaatgacagaatgattcaatagttgcaatcttccataaaatatccccttttttgggtaaggtaaattatcaatttatagatcttctcagaaaagcagttctttttgctyccttaaaaagaagaattctttgcagt

SEQ ID NO: 234330 - DNA, 571 bp, Homo sapiens
ctttctgccacacctttaatgtcttcagtaagtgttccttttatcttctagcctcacctgggtcaccattaagaatatgattttttttttctatcccatttcacatatagccaagttggcggtgaaattgatgtctcatcacaccacactgccatgagaagtcatttctccttcctttatgagtatttcatttgctatatctccctctgttcctcctagtttttgttgtttwttaagctcctcctgggaactcctgttatgggatggattgtgtccccccaaaattcatgttgaagtaaccctcagtaccataagaatgtgactgagttggatatagggtctttaaagaagttactaagttaaaatggggtcattattgtctactttcattcaatgtatttctattattcttggaaattcttacatactgtacttcaaatgttgctttagtagtctttccctagattctggaatttctattagataagtgatataacctatcagtctgtgcctttttgtttttaaatgtatattttttatttctaatatgtcaaaacagatcttttaaaaa

SEQ ID NO: 234331 - DNA, 683 bp, Homo sapiens
tcaactcgaaatagtcctacccccaaagtgggttctacaaacaagacagttatttctttctaatatctaagcctttttccaactcccagtgctaatagatgatttttatcctaaaataatctcaacagagatgacttaaaaatcaatccctgttcctccctgccttcctctctgatcctgttctcccaagtgttttcagccagtttccagaagtgcaggtctactacttggtgctctttaacrtcttaccatttgacgaggacctgttccattggtccctccagatccactctgtccttcctaattctgctctctacttggaatggctaatttcagttgggtttggccaatggtgatacccagcaagaaatcagagagaaggaggatactgggataagatctttgttgactatgttcttctgtataggcagggtgataatggttgacctgttcccttggcgaaaacctatgtaagtttctttgggtcttttttcttgaactggtcagatttccaaaagaaaattcaaccgatctcttcctaaccaggcaaacttggttaaaatacaatatacatcaaggaagagggcttgagggtcttaacattccgtaaataacctttgatttaattctccattattcagcatggtaccttatctttagtggtgtatggagtccaccagtct

SEQ ID NO: 234332 - DNA, 638 bp, Homo sapiens
tttattttaaatcatctttagattacttataatacctaatacaaggtaaatgctatgtaaatagttgttatgctgtgtttgttttaaaattcrtattatttttgttgttatgtttttttttctgaatattttctatctggggttggttgaatctgcatatgcagaaaccgtgggtatagtacccgccagatagagagggcctcctgaattgtagtatatggcacctataggattttaagtgcctgcacttaactgtataatagctgacactagattattaaaaatgtgttaatttgcagtaacttactgcttcaattatcatttttggttgttagaaagactgaatctttgtccttgtatattttccagttgcattttgtcttttataaattgttctttgttacttggcagtttactgcattttaaatatttttcagtatatctatatattcctgattgttccttatcatgataaggaaaaacacattttttctttcatatgtttttatcatgtaacatttaatatgaaacattgatgtagacatgtgaattataaaaataattctttattattataatgccaacttcactggaacctcccaacttagtaggaacccaacttaatgagaacatcagca

SEQ ID NO: 234333 - DNA, 638 bp, Homo sapiens
tttattttaaatcatctttagattacttataatacctaatacaaggtaaatgctatgtaaatagttgttatgctgtgtttgttttaaaattcatattatttttgttgttatgtttttttttctgaatattttctatctggggttggttgaatctgcrtatgcagaaaccgtgggtatagtacccgccagatagagagggcctcctgaattgtagtatatggcacctataggattttaagtgcctgcacttaactgtataatagctgacactagattattaaaaatgtgttaatttgcagtaacttactgcttcaattatcatttttggttgttagaaagactgaatctttgtccttgtatattttccagttgcattttgtcttttataaattgttctttgttacttggcagtttactgcattttaaatatttttcagtatatctatatattcctgattgttccttatcatgataaggaaaaacacattttttctttcatatgtttttatcatgtaacatttaatatgaaacattgatgtagacatgtgaattataaaaataattctttattattataatgccaacttcactggaacctcccaacttagtaggaacccaacttaatgagaacatcagca

SEQ ID NO: 234334 - DNA, 638 bp, Homo sapiens
tttattttaaatcatctttagattacttataatacctaatacaaggtaaatgctatgtaaatagttgttatgctgtgtttgttttaaaattcatattatttttgttgttatgtttttttttctgaatattttctatctggggttggttgaatctgcatatgcagaaaccrtgggtatagtacccgccagatagagagggcctcctgaattgtagtatatggcacctataggattttaagtgcctgcacttaactgtataatagctgacactagattattaaaaatgtgttaatttgcagtaacttactgcttcaattatcatttttggttgttagaaagactgaatctttgtccttgtatattttccagttgcattttgtcttttataaattgttctttgttacttggcagtttactgcattttaaatatttttcagtatatctatatattcctgattgttccttatcatgataaggaaaaacacattttttctttcatatgtttttatcatgtaacatttaatatgaaacattgatgtagacatgtgaattataaaaataattctttattattataatgccaacttcactggaacctcccaacttagtaggaacccaacttaatgagaacatcagca

SEQ ID NO: 234335 - DNA, 638 bp, Homo sapiens
tttattttaaatcatctttagattacttataatacctaatacaaggtaaatgctatgtaaatagttgttatgctgtgtttgttttaaaattcatattatttttgttgttatgtttttttttctgaatattttctatctggggttggttgaatctgcatatgcagaaaccgtgggtatagtacccgccagatasagagggcctcctgaattgtagtatatggcacctataggattttaagtgcctgcacttaactgtataatagctgacactagattattaaaaatgtgttaatttgcagtaacttactgcttcaattatcatttttggttgttagaaagactgaatctttgtccttgtatattttccagttgcattttgtcttttataaattgttctttgttacttggcagtttactgcattttaaatatttttcagtatatctatatattcctgattgttccttatcatgataaggaaaaacacattttttctttcatatgtttttatcatgtaacatttaatatgaaacattgatgtagacatgtgaattataaaaataattctttattattataatgccaacttcactggaacctcccaacttagtaggaacccaacttaatgagaacatcagca

SEQ ID NO: 234336 - DNA, 622 bp, Homo sapiens
gttttggggaatatcctaacacttatgaaatggacatcagggcagggggtaaaaatctttcatataataacttggcttgtgagataagttgattcgtaaggaaaccgacccatcctgttctactctctatctatttccaattgtaggggactaagcaaagctcaagttttcactaaagaatgacacgtttttccctcaggcttttggcttttgcttacaaaagcagagaaagctgttgttaatattttcatttagctgacaaaattgcagttatctcttttagcgaggttttgatatttgttaacaactgtgaatcatttcatagataattcaagccttggctttcatcctgtcagatttcagaacaaaattttagatttcctgaaataaatgtggaatgcatgctttgctcaaggtagaatraacctaacctctatgaagtcaattaaataaatgtgtaatggatcaccttaacctgggaggctgggatctctaaaagtgtctgatgattttaacgtgtatacgtgtgtttcttttggtggtaaatatataaagatacatcttttatctgattgtcaaaaggcatttggctatcacttgattttaccacttgcaacagaga

SEQ ID NO: 234337 - DNA, 516 bp, Homo sapiens
tggcttacgcatgtaatcccaacactttgggaagccaaggcgggtggatcatttgaggtcaagagttcgagactagcctggccaatatggtaaaaccctgtctctactaaaaatataaaaattagctgggtgtggtggcacacatctgtagtcccagctactcaggaggctgaggcagaatcacttgaacccaggagatagaggttgcagtgagccaagatcatgccwctgcactccagcctgggtgacagagggagactccatctaaaaaaaaaaaaaaaaaaaaaaaccgagctggaactcatagctttcactgtacatggttgtttattttttaaatgttcttatgtttttcatagattaccctgattagttttaggatttctcttagagatttttacttttttacaaagaaatgttaacatttaaaaaatactctaatttttgctttcttgttttttgtcctattttattttattttgattttatttacgacttgattctttagtttttaaa

SEQ ID NO: 234338 - DNA, 459 bp, Homo sapiens
ccacctttggagacaactgcaaaaatgatagaaagagtgggaactgtcttgtttcctctttgtccccagtgtctgcacaagggtaggacacaataggcatttgctaaatgttgattgaatgaagcagagctaacaaagctattttgtcggtcgggcgtygtgacagcactttgggaggccgaggtggatggatcaactaaggtcaagagtttgagaccagcctgaccaacatggtaaaacccagtctccactaaaaatacaaaattagctgggcatggtggcaggggcctgtaatcccagctactcgggaggctgaggcaggagaattgcttaaatccgggaggcagaggttgcactgagccaagattgcgccattgcactccagcactccagcctgggcaacaagagtgaaactctgtcaaaaaaaaaaaaaaaaaaaaaaaagctattttgtcccat

SEQ ID NO: 234339 - DNA, 444 bp, Homo sapiens
aactgcaaaaatgatagaaagagtgggaactgtcttgtttcctctttgtccccagtgtctgcacaagggtaggacacaataggcatttgctaaatgttgattgaatgaagcagagctaacaaagctattttgtcggtcgggcgttgtgacagcactttgggaggcsgaggtggatggatcaactaaggtcaagagtttgagaccagcctgaccaacatggtaaaacccagtctccactaaaaatacaaaattagctgggcatggtggcaggggcctgtaatcccagctactcgggaggctgaggcaggagaattgcttaaatccgggaggcagaggttgcactgagccaagattgcgccattgcactccagcactccagcctgggcaacaagagtgaaactctgtcaaaaaaaaaaaaaaaaaaaaaaaagctattttgtccca

SEQ ID NO: 234340 - DNA, 459 bp, Homo sapiens
ccacctttggagacaactgcaaaaatgatagaaagagtgggaactgtcttgtttcctctttgtccccagtgtctgcacaagggtaggacacaataggcatttgctaaatgttgattgaatgaagcagagctaacaaagctattttgtcggtcgggcgttgtgacagcactttgggaggccgaggtggatggatcaactaaggtcaagagtttgagaccagcctgaccaacatggtaaaacccagtctccactaaaaatacaaaattagctgggcatggtggcaggggcctgtaatcccagctactcgggaggctgaggcaggagaattgcttaaatccgggaggcagaggttgcactgagccaagattgygccattgcactccagcactccagcctgggcaacaagagtgaaactctgtcaaaaaaaaaaaaaaaaaaaaaaaagctattttgtcccat

SEQ ID NO: 234341 - DNA, 447 bp, Homo sapiens
aatgggacaaaatagctttttttttttttttttttttttttgacagagtttcactcttgttgcccaggctggagtgctggagtgcaatggcrcaatcttggctcagtgcaacctccgcctcccggatttaagcaattctcctgcctcagcctcccgagtagctgggattacaggcccctgccaccatgcccagctaattttgtatttttagtggagactgggttttaccatgttggtcaggctggtctcaaactcttgaccttagttgatccatccacctccgtctcccaaagtgctgtcacgacgcccgaccgacaaaatagctttgttagctctgcttcattcaatcaacatttagcaaatgcctattgtgtcctacccttgtgcagacactggggacaaagaggaaacaagacagttcccactctttctatcatttttgcagtt

SEQ ID NO: 234342 - DNA, 431 bp, Homo sapiens
gggacaaaatagctttttttttttttttttttttttttgacagagtttcactcttgttgcccaggctggagtgctggagtgcaatggcacaatcttggctcagtgcaacctccgcctcccggatttaagcaattctcctgcctcagcctccygagtagctgggattacaggcccctgccaccatgcccagctaattttgtatttttagtggagactgggttttaccatgttggtcaggctggtctcaaactcttgaccttagttgatccatccacctccgtctcccaaagtgctgtcacgacgcccgaccgacaaaatagctttgttagctctgcttcattcaatcaacatttagcaaatgcctattgtgtcctacccttgtgcagacactggggacaaagaggaaacaagacagttcccactctttctat

SEQ ID NO: 234343 - DNA, 392 bp, Homo sapiens
cttgttgcccaggctggagtgctggagtgcaatggcacaatcttggctcagtgcaacctccgcctcccggatttaagcaattctcctgcctcagcctcccgagtagctgggattacaggcccctgccaccatgcccagctaattttgtatttttagtggagactgggttttaccatgttggtcaggctggtctcaaactcttgaccttagttgatccatccacctcsgtctcccaaagtgctgtcacgacgcccgaccgacaaaatagctttgttagctctgcttcattcaatcaacatttagcaaatgcctattgtgtcctacccttgtgcagacactggggacaaagaggaaacaagacagttcccactctttctatcatttttgcagtt

SEQ ID NO: 234344 - DNA, 447 bp, Homo sapiens
aatgggacaaaatagctttttttttttttttttttttttttgacagagtttcactcttgttgcccaggctggagtgctggagtgcaatggcacaatcttggctcagtgcaacctccgcctcccggatttaagcaattctcctgcctcagcctcccgagtagctgggattacaggcccctgccaccatgcccagctaattttgtatttttagtggagactgggttttaccatgttggtcaggctggtctcaaactcttgaccttagttgatccatccacctccgyctcccaaagtgctgtcacgacgcccgaccgacaaaatagctttgttagctctgcttcattcaatcaacatttagcaaatgcctattgtgtcctacccttgtgcagacactggggacaaagaggaaacaagacagttcccactctttctatcatttttgcagtt

SEQ ID NO: 234345 - DNA, 447 bp, Homo sapiens
aatgggacaaaatagctttttttttttttttttttttttttgacagagtttcactcttgttgcccaggctggagtgctggagtgcaatggcacaatcttggctcagtgcaacctccgcctcccggatttaagcaattctcctgcctcagcctcccgagtagctgggattacaggcccctgccaccatgcccagctaattttgtatttttagtggagactgggttttaccatgttggtcaggctggtctcaaactcttgaccttagttgatccatccacctccgtctcccaaagtgctgtcacracgcccgaccgacaaaatagctttgttagctctgcttcattcaatcaacatttagcaaatgcctattgtgtcctacccttgtgcagacactggggacaaagaggaaacaagacagttcccactctttctatcatttttgcagtt

SEQ ID NO: 234346 - DNA, 396 bp, Homo sapiens
aatctaatcaatcttttctgctttgctggaaacacatgcattttctctttgtcgttattggtcatggaaaatatgcygtgactagtcacagactaatgataaataaataaatgtgtaactttttaaaaagaatcttgcttgaatcaaatgcacaactgattaggtgagaggtgccgtgtgtatataggctatcatgaaattcaaacctcgtcaggaaagaaaatgactgaacatgaaaaaactgtagcacatcatcaactgtgtaatagtttggaggattatattcaccagagctaaaaacagaaagagcagtggtagttcttggaagattctgtggacttttctctgtgtagagaaaggaaaggtaggggccattgggcatatggaactaccagg

SEQ ID NO: 234347 - DNA, 396 bp, Homo sapiens
aatctaatcaatcttttctgctttgctggaaacacatgcattttctctttgtcgttattggtcatggaaaatatgctgtgactagtcacagactaatgataaataaataaatgtgtaactttttaaaaagaatcttgcttgaatcaaatgcacaactgattaggtgagaggtgcygtgtgtatataggctatcatgaaattcaaacctcgtcaggaaagaaaatgactgaacatgaaaaaactgtagcacatcatcaactgtgtaatagtttggaggattatattcaccagagctaaaaacagaaagagcagtggtagttcttggaagattctgtggacttttctctgtgtagagaaaggaaaggtaggggccattgggcatatggaactaccagg

SEQ ID NO: 234348 - DNA, 396 bp, Homo sapiens
aatctaatcaatcttttctgctttgctggaaacacatgcattttctctttgtcgttattggtcatggaaaatatgctgtgactagtcacagactaatgataaataaataaatgtgtaactttttaaaaagaatcttgcttgaatcaaatgcacaactgattaggtgagaggtgccgtgtgtatataggctatcatgaaatycaaacctcgtcaggaaagaaaatgactgaacatgaaaaaactgtagcacatcatcaactgtgtaatagtttggaggattatattcaccagagctaaaaacagaaagagcagtggtagttcttggaagattctgtggacttttctctgtgtagagaaaggaaaggtaggggccattgggcatatggaactaccagg

SEQ ID NO: 234349 - DNA, 396 bp, Homo sapiens
aatctaatcaatcttttctgctttgctggaaacacatgcattttctctttgtcgttattggtcatggaaaatatgctgtgactagtcacagactaatgataaataaataaatgtgtaactttttaaaaagaatcttgcttgaatcaaatgcacaactgattaggtgagaggtgccgtgtgtatataggctatcatgaaattcaaacctcgtcaggaaagaaaatgactgaacatgaaaaaactgtagcacatcatcamctgtgtaatagtttggaggattatattcaccagagctaaaaacagaaagagcagtggtagttcttggaagattctgtggacttttctctgtgtagagaaaggaaaggtaggggccattgggcatatggaactaccagg

SEQ ID NO: 234350 - DNA, 393 bp, Homo sapiens
gactatggacaaaagcctggagacttgttgaatttcagagtgggagagaccttgatggctttcttcacccagctgtgcaatagagcctagcattcatcttcacctctgcagagctaactgggatttagggagtttcatgctaatgtggggtggggtctgggggattctgggaatgtgtgcacatgctgacttgtcttcaggagccaaaatgctttccctgctcagagctgttttagtacagggttgttttctcatctttctgggaaaaaaaaaaaaaaaaaaaaaaaaaacccaaagggaraatgctagtggatacagcaagttcttttcagaacatgttctgtgccaggctcagctgcctaccaatttttaattttttggcaatttgctaga

SEQ ID NO: 234351 - DNA, 400 bp, Homo sapiens
gtagtggactatggacaaaagcctggagacttgttgaatttcagagtgggagagaccttgatggctttcttcacccagctgtgcaatagagcctagcattcatcttcacctctgcagagctaactgggatttagggagtttcatgctaatgtggggtggggtctgggggattctgggaatgtgtgcacatgctgacttgtcttcaggagccaaaatgctttccctgctcagagctgttttagtacagggttgttttctcatctttctgggaaaaaaaaaaaaaaaaaaaaaaaaaacccaaagggagaatgctagtggatacagcaagttcttttcaraacatgttctgtgccaggctcagctgcctaccaatttttaattttttggcaatttgctagat

SEQ ID NO: 234352 - DNA, 548 bp, Homo sapiens
agtaaagtttactatgtctggcatccaggtaaagttatcagaaataaaacaagcagaaaataggacccctaatgaggagaaatatttgagtcagttcaaactgactcaaaactgacatagagattagaactaatagacaagaactttaaaacatgttattataactgcattgcatatcttcagaaatttacatagagacatggaagatgtttttagaagacccaaattgaacttttggacataaaaagtagaatgcatgagatgaaaaatctctagatggggttaatgacagattaatcattgaagragtaaatattaataaactggaagatagaccaatagaaactattgtagtgaaagacaagagaaaaaagaattttttaatgaaaagagcatcagtgaattgtgggataacttcaagtgacctaatgtatttgtaattagaatctgcaaaggagatgagagaggacagaaaaatatttaatggccctaaattttccacatatgacaaaagttgtaaacccgcagatccaccaagctaagtgaac

SEQ ID NO: 234353 - DNA, 548 bp, Homo sapiens
agtaaagtttactatgtctggcatccaggtaaagttatcagaaataaaacaagcagaaaataggacccctaatgaggagaaatatttgagtcagttcaaactgactcaaaactgacatagagattagaactaatagacaagaactttaaaacatgttattataactgcattgcatatcttcagaaatttacatagagacatggaagatgtttttagaagacccaaattgaacttttggacataaaaagtagaatgcatgagatgaaaaatctctagatggggttaatgacagattaatcattgaaggagtaaatattaataaactggaagatagaccaatagaaactattgtagtgaaagacaagagaaaaaagaattttwtaatgaaaagagcatcagtgaattgtgggataacttcaagtgacctaatgtatttgtaattagaatctgcaaaggagatgagagaggacagaaaaatatttaatggccctaaattttccacatatgacaaaagttgtaaacccgcagatccaccaagctaagtgaac

SEQ ID NO: 234354 - DNA, 555 bp, Homo sapiens
actaatagatttgcaaggaggaataaagaaatgagaaaatatagtcagaaaacattagagagaagtattccccatgaacataaattctaaacaaaattttatcaaaattaaatccaacagcatattaagagcatcatggccaagtgaggtttattctagaaatgcaaggttggtttatcattcaaaaatcaataaatgtaattcaccatattaataaaccaaaaaaagaaaaattatgtaatcatctcaatggacacagcagatgcatttgacaaaacacaacatccattcctgatgaaaattctcaacaaaaattctacagataacatcatacttaatgttgaaacacagaataatttccctctaaattggcctggccaacatggtgaaaccccatgatatggtttggctttatccccacccaaatctcaacttgaattgcatctcccagagttcccgtgtgttttgggagggacccaggggaaggtaattgattcatgggggccagtctttcccatgctattctyatgatagtgaataagtctcacgagatct

SEQ ID NO: 234355 - DNA, 569 bp, Homo sapiens
gttacttccaaatcttggctattgtgaatagtgttgcaataaacacaggagtacagctatcactttgatacacagatttttctctcttttggatatatacctaacagtgaaattgctggattgtacagaagctctatttttagttttctgatgaaccttcaagctgttctccatagtggttccaccaacttacattcccaccaacagcatatgagggttcccttttctccgcatgcttgtcagcatttgttattgccttttagctaaaacccactttaactggggtgmggtaatagctcattgtaattttgatttgcatttctctgatgattcatgatgttgatcatcttttcatatacctatttgccatttgcgtgtctttattggagtaatgtctgtttacatattttgcctattttttaaaataggattattagattttattttctatagagttatttgagcgccttctatgttttggttacaaatccattttcagataggtagtttgaaaatattttctttcattctgtgggatgttttctcactttgttgattcttttctgtgc

SEQ ID NO: 234356 - DNA, 569 bp, Homo sapiens
gttacttccaaatcttggctattgtgaatagtgttgcaataaacacaggagtacagctatcactttgatacacagatttttctctcttttggatatatacctaacagtgaaattgctggattgtacagaagctctatttttagttttctgatgaaccttcaagctgttctccatagtggttccaccaacttacattcccaccaacagcatatgagggttcccttttctccgcatgcttgtcagcatttgttattgccttttagctaaaacccactttaactggggtgcrgtaatagctcattgtaattttgatttgcatttctctgatgattcatgatgttgatcatcttttcatatacctatttgccatttgcgtgtctttattggagtaatgtctgtttacatattttgcctattttttaaaataggattattagattttattttctatagagttatttgagcgccttctatgttttggttacaaatccattttcagataggtagtttgaaaatattttctttcattctgtgggatgttttctcactttgttgattcttttctgtgc

SEQ ID NO: 234357 - DNA, 602 bp, Homo sapiens
acaacatcaaatttatatctcatgtagatctctagatctgcatgatcatcattgagatgatactctatggtatcaaagatccatactcmatttatcctatcgaatctctgtgcaaaatcttcccttctcaatgttgtctcctagtccaagacaaatttcccaactgcagataaaatatctgcacttaaccatcaagaataagaaagaaaagatgaaagtattctccctttgctctacttctttttttctatttttttttattttggaacaatcttacacctatagaaaattctaaaggtagtatagagtttccatacaacccacgctcagtttcctagattattgaaaacttacactatagcttattatattgatttgttacaattaatgaatcaatattgacccattcttattaactataaaacatgatgtattcagatttatttgactttaccttaatttctttttgtctgttccagaattccatctaggatgccatattacattttaaaatatgtcaccttagacttatcttggtcataaaaattactaaggctttccttgtttttgatcatgttgacaagtttgagaaatactggtca

SEQ ID NO: 234358 - DNA, 602 bp, Homo sapiens
acaacatcaaatttatatctcatgtagatctctagatctgcatgatcatcattgagatgatactctatggtatcaaagatccatactcaatttatcctatcgaatctctgtgcaaaatcttcccttctcaatgttgtctcctagtccaagacaaatttcccaactscagataaaatatctgcacttaaccatcaagaataagaaagaaaagatgaaagtattctccctttgctctacttctttttttctatttttttttattttggaacaatcttacacctatagaaaattctaaaggtagtatagagtttccatacaacccacgctcagtttcctagattattgaaaacttacactatagcttattatattgatttgttacaattaatgaatcaatattgacccattcttattaactataaaacatgatgtattcagatttatttgactttaccttaatttctttttgtctgttccagaattccatctaggatgccatattacattttaaaatatgtcaccttagacttatcttggtcataaaaattactaaggctttccttgtttttgatcatgttgacaagtttgagaaatactggtca

SEQ ID NO: 234359 - DNA, 602 bp, Homo sapiens
acaacatcaaatttatatctcatgtagatctctagatctgcatgatcatcattgagatgatactctatggtatcaaagatccatactcaatttatcctatcgaatctctgtgcaaaatcttcccttctcaatgttgtctcctagtccaagacaaatttcccaactgcagataaaatatctgcacttaaccatcaagaataagaaagaaaagatgaaagtattctccctttgctctacttctttttttctatttttttttattttggaacaatcttacayctatagaaaattctaaaggtagtatagagtttccatacaacccacgctcagtttcctagattattgaaaacttacactatagcttattatattgatttgttacaattaatgaatcaatattgacccattcttattaactataaaacatgatgtattcagatttatttgactttaccttaatttctttttgtctgttccagaattccatctaggatgccatattacattttaaaatatgtcaccttagacttatcttggtcataaaaattactaaggctttccttgtttttgatcatgttgacaagtttgagaaatactggtca

SEQ ID NO: 234360 - DNA, 602 bp, Homo sapiens
acaacatcaaatttatatctcatgtagatctctagatctgcatgatcatcattgagatgatactctatggtatcaaagatccatactcaatttatcctatcgaatctctgtgcaaaatcttcccttctcaatgttgtctcctagtccaagacaaatttcccaactgcagataaaatatctgcacttaaccatcaagaataagaaagaaaagatgaaagtattctccctttgctctacttctttttttctatttttttttattttggaacaatcttacacctatagaaaattctaaaggtagtatagagtttccatacaacccacgctcagtttcctagattattgaaaacttacactatagcttattatattgatttgttacaattaatgaatcaatattgacccattcttattaactataaaacatgatgtattcagatttatttgactttaccttaatttctttttrtctgttccagaattccatctaggatgccatattacattttaaaatatgtcaccttagacttatcttggtcataaaaattactaaggctttccttgtttttgatcatgttgacaagtttgagaaatactggtca

SEQ ID NO: 234361 - DNA, 464 bp, Homo sapiens
atgttgaagcaatcttcatgtatttaatcaccatatatgtgcctttttatagctatttgttcatatactatacacagtattttttgcactatgatccattcgttatttttctataggcatatacttttttgtttttatttgggtttcctttatatttattagaaatatatctattttaattttgttaaatatcccaccttaatggtatttgaatattgtgctataattagaaatatttgayccacatcaagaatataagtgaaattatttgtgccttttttttttgagacagagacttgctctgtcacccaggctggagtgcattggggcaatcaaatgctttttaaaaagttttaagactcttgttggcatcttaacctagattcatcaggattttattctgatataagttggaaaaaaggttctaggtttttatcttttcttttgctccctaaaagcccagc

SEQ ID NO: 234362 - DNA, 464 bp, Homo sapiens
atgttgaagcaatcttcatgtatttaatcaccatatatgtgcctttttatagctatttgttcatatactatacacagtattttttgcactatgatccattcgttatttttctataggcatatacttttttgtttttatttgggtttcctttatatttattagaaatatatctattttaattttgttaaatatcccaccttaatggtatttgaatattgtgctataattagaaatatttgacccacatcaagaatataagtgaaattatttgtgccttttttttttgagacagagacttgctctgtcacccaggctggagtgcattggggcaatcaaatgcttttwaaaaagttttaagactcttgttggcatcttaacctagattcatcaggattttattctgatataagttggaaaaaaggttctaggtttttatcttttcttttgctccctaaaagcccagc

SEQ ID NO: 234363 - DNA, 554 bp, Homo sapiens
gtccttttggttgtggaacaagaacccagtattcaccaaactgtgggagcaaaagagctgtaacacttctgctcactgagctgtgggtggtgggagtaaaagagctctaacccttcctcccactcgacaaacacattctaagcccataaaaaccccacactcagcctcagagacaacaacccacttttgggtcccctctctgtgctgagagctttctttctrccactcaataatattctactctgccttactcactcttcagtgtctgcgtaccttagtccttttggttgtggaacaagaacccagtattcaccaaactgtgggagcaaaagagctgtaacacttctgctcactgagctgtgggtggtgggagtaaaagagctctaacctttcctcccacttgacaaacaacaggagtgaagaagtcaatgggtgtcaggcccttctacttgctgagctataggagtgaagaagtgaagcagctgggcaccactctctcctgcttgctgaactatgggagtgaaaaagctgcaacaacaccatgtaggtacgag

SEQ ID NO: 234364 - DNA, 522 bp, Homo sapiens
agaactggaccacatacaactttgatttgacagcttggactcttttcactataccatgccgtatgaaaatttgatatttagtttgactcaacttaaataattagtttatcaaggttttcttaaggtcatgtttctttagagccgtggttattgttaccaacaaaaatactttaagtgcttcgtattggaaagtagagtatttctgacttggacaggtttataaatgtgtaatggtgctggtggtggtggtagtggtatgatgatggcacaagagttaacaaatactgcactttttaaaaaattcagaaaatgtgtgtaattctcaagtgtcayctttgttcagtgttataaatgaacttattttggaatctaggtgagaaacagcatagaccagctttttgaacatttttgtggcaactagttggaccttaattataacaaagatagctacaaaaatagtgtggcctttttctacatgtgaaacctcacttaaccccttactaatctcagtacagtttgagt

SEQ ID NO: 234365 - DNA, 546 bp, Homo sapiens
aaaaagaaaaggtactaactaaagaaatagtgggatataggccaggcgcrgtggctcacgcctgtaatcccagcactttgggaggccgaggggagtggaacacctgaggtcagtagtttgagaccagcctgttcaacatggtgaaaccccattctctactaaaaatacaaaaactagctgggtgtgttggcaggtgcctggaatcccagctgcttgcgaggctgaggcaggagaatcgcttgaacctgcaggagaattgcttgaacctgggaggttgcagtgagctgagatcctgccattgcactccagcctgggcaacaagagcaaaactttgtctcaaaacaaagagggggggagggggaggggcggatatagttagggaaaaaaaagttctaaaataacatctcaaagcagctgaaatcattattaagaaccttgattaaggaaataatgaaaaaaagcatccagcagccataagcaagttcaagtgcacagaatttgcaagattataaaaagatgagaaaaataacccacttatttaaccca

SEQ ID NO: 234366 - DNA, 546 bp, Homo sapiens
aaaaagaaaaggtactaactaaagaaatagtgggatataggccaggcgcagtggctcacgcctgtaatcccagcactttgggaggccgaggggagtggaacacctgaggtcagtagtttgagaccagcctgttcaacatggtgaaaccccattctctactaaaaatacaaaaactagcygggtgtgttggcaggtgcctggaatcccagctgcttgcgaggctgaggcaggagaatcgcttgaacctgcaggagaattgcttgaacctgggaggttgcagtgagctgagatcctgccattgcactccagcctgggcaacaagagcaaaactttgtctcaaaacaaagagggggggagggggaggggcggatatagttagggaaaaaaaagttctaaaataacatctcaaagcagctgaaatcattattaagaaccttgattaaggaaataatgaaaaaaagcatccagcagccataagcaagttcaagtgcacagaatttgcaagattataaaaagatgagaaaaataacccacttatttaaccca

SEQ ID NO: 234367 - DNA, 490 bp, Homo sapiens
tccatgggccaggcctgggggcaggtacttttacatccacttctgtgagatacttacacctacccatattttacagatgaggaaagttcaagttgttcacccaagaccccacagcaaataggtgtagagccaggatccttacccaacctccagggccccctctctgctacaccagcaggcattatcttgtatttgttacattcctgtcagcatgtgttaggtttggagtaatagtcactgattttttaacagtactttttagtttttaattttttttagagacggggtcacactctgyggtgcaggctggagtgcagtggtgggatcatagctcactgcaacctcaaactccccggggctcaagcagtccttccacctcagcctcccaaatagctaagattgcatgtgcacgccaccacacccagctaatttatttatttttttaatttctggtattcttgttcacttggttacatttgtataaagttct

SEQ ID NO: 234368 - DNA, 587 bp, Homo sapiens
ctaacatgccatcatctccttttaaactctgaatctctgccagctcctttgttcaagtgcttcttattccagtgctgtttcctaggctggctttccagtcttcctgatttcccagcaggctacagccagaccacatctatcatttgatggagtttacactgacagtgagttcaaagtcagtgtaaggctgggcgcagtggcccatgcctgtaatcccagcactttggggggctgaggtgggcagatcacgaggtcaggagttcaagaccagcctggccaacatagtgaaaccctgtctctactaaaaatacaaaaattagccagacatggtggtgcacacctgtagtcccagctactcgggaggctgaggcagaagaatcacttgaacctgggaggtggaggttgcagtgagctgagatcatgccaccgcactccagtctgggtgacagagygagactctgtcttgggggaaaagaaaaaaaagtcagtgtgatggggtgatcccaagagcaaataacctactagttataaaagtacctgctttggagtcaagcagtcagacaaaaatccctgctctgccatttcta

SEQ ID NO: 234369 - DNA, 425 bp, Homo sapiens
gaattcaaatgatagctattaattattattattattatatgcttaatatttctaktctagattctggaacaagtgaggtgatgatggtggggaggaaaagatcatggacttgtccaggagacctcagttctacttgctcaacctctgtgctgtgaagtgaagctactgtactaggtgaggatctcaccagacagggtcgcagtaagacacagatggtgaacttaatgggtgaattaaaaggagtgtaatcaagagattatgtacagaggtgtggacagggttaagggagaccatgaagcatccagggattcacatcagcaaggagccattgccacccttgatccccacctgaaaggaacaagggtagggaatggtgttactagaagctggtgagagttggagccctggaagagagccagcccaca

SEQ ID NO: 234370 - DNA, 451 bp, Homo sapiens
gaattctgcctcaagactacaacatagaaaccctgcttgagcttcctgcttgctggccctccctagaggtttcagactcaaagctgctgcatcagctcctaactgcatttccggcctgctggactatagtacagatttcagacttcccartccccacaattgcataaaccaattatttaaaatagaaaaaaaatcttaaaatatatttagatacagaaagaaatgacagattctattggctctgtttctctagagagcacgaactcacctttcgtaatattctgtgcgttaatgattaacttgaacttataaagatttgcaaggaaaaaaatcaacgtaaatctagactgtcagaggctctgtgtacaacctatgttcagaggctatcagtgatagggtttgggactttgtccccacccaaatctcatgttccattgtaatccccaatgtt

SEQ ID NO: 234371 - DNA, 615 bp, Homo sapiens
ctgcgtcattgaacatccctgcccccttgtcacctgtcctgacttggctcctccagtgacatcacaggagcatctcattttatggcctttcatatgacatttcgataaccacaccaaccacactccttgaggaggacctggactcagctctggttggctgtctctctggctttcttcctcagatggctgcattaactccatgcaacaggtacacatttccaccttcactctggcataatacatgtggcagctggtaccttgatttctaatgcccttgattctaagcccttgatttctaatgccaatgcttctccttggttgatattttccccaaactctgcaatggtgttatctctctgcccacttctcactgaaatgtcagcccactcatagctctgcccagtgagacactgtaggcaggctggctgaacctgataycatgtgctttgcttctttcttactatgatgtctcccttagtatcttccgatgatgtcacaggctttaagcctgagtctcatccacgtttagtccagctctccccagccacagaaaataatctttctccaaaacgggtcctgccaactgagatttttttatcctcaaatggtctaacc

SEQ ID NO: 234372 - DNA, 597 bp, Homo sapiens
caataagacttgcgggttgtttgttaccacagcataacagcctatctttgctgataaacagttgatacatacactgatacacagacttacatagtgttgacccttaaacartgcagaggttagtgcactgaatccccacgaagtaaaaaaatctgagtattacttttgattcccccaaaacttaactactaacagcttactgttgaccagaagccttgccaataacataaacagttgttacatattttatatgttatacatattattactgtgttcttacaataaagtaagctagagaaaagaaaacgttattaggacaatcacaaggaagagaaagtgtatttactattcattaagtggaagtggattatcacaaaggtcttcgtgctcattgtcttcacattgagtaggctgacgaagaagaggaagaggaggaagaggaagaaaaagaaggggttgtcttgctgtctcaggggtggctaggtggaagaaaatctgagtctaagtagatctccatagttcaaacctgtgccgttcaagggtcaaccgtgtaatatctcattttaaccctgacatctctgtgaattattactatta

SEQ ID NO: 234373 - DNA, 558 bp, Homo sapiens
cttctagcttagaagctccctccctgcagtgcacggtggctcatgcctgtaatcccagcactttgggaggacgagctgggcagatcacctaagatccggagttcgagaccagcctggccaacatggtgaaaccccgtctctactaaaaatacaaaaattaaccgggcctggtggcaggcacctgtaatctcagctactcaggaggctgaggcagragaaatgcttgaacccaggaggtggaggttgcagtgagctgagatcgagatcgcaccactgtactctagcctgggcgacagagccagactctgtctcaaaaaaataaataaataaaagataaaaaagagaagctccttccctagggcttgaatagggcttgaaccacaggagataagagagggagaaggatccagatgtagagagtgaggctgatggttaagaatcactgggccgccttcctaaaaattttgcatttattttccatcttgatgaaaaatttgcaatgtttataccatcacagcacaagtagatccatgacttaagttttgaaacttccataac

SEQ ID NO: 234374 - DNA, 558 bp, Homo sapiens
cttctagcttagaagctccctccctgcagtgcacggtggctcatgcctgtaatcccagcactttgggaggacgagctgggcagatcacctaagatccggagttcgagaccagcctggccaacatggtgaaaccccgtctctactaaaaatacaaaaattaaccgggcctggtggcaggcacctgtaatctcagctactcaggaggctgaggcaggagaaatgcttgaacccaggaggtggaggttgcagtgagctgagatcgagatcgcaccactgtactctagcctgggcgacagagccagactctgtctcaaaaaaataaataaataaaagataaaaaagagaagctccttccctagggcttgaatagggcttgaaccacaggagataagagagggagaaggatccagatgtagagagtgaggctgatggttaagaatcactgggccgccttcctaaaaattttgcatttattttccatcttgatgaaaaatttgcaatgtttayaccatcacagcacaagtagatccatgacttaagttttgaaacttccataac

SEQ ID NO: 234375 - DNA, 597 bp, Homo sapiens
gctggttattaaatactgacttgcacactgcttggtatcgcccacaccaaagcaggggactgatcataagaggatactgggctctaawcaatgacagtaatagttttgcaggaagaatgccagtgaaagaaagctggacttcatgaagccctaagaggatctgacaaaggggaatttcattgcttatgcagccctaaccagatgggagacacagggagactgggagtaataggcattaaagagctgtttttatggttgttttggggagaacaagggtttcactgggtctcactattgtctagatcatggtttctcaatcttggcactatttggaaccaaataattctttgtagtgaggctctcccctgcgcattgcaggatgtttggcagcatgccttacctccacctaccacatgctggtatctccttcccagttgtctgaagacattcccaaaatgtctgaagacattgccccagggtgacaatattgcccctggttgaaaatcactgacccagatgaaatatcacttatatttattcaactcaagaaatattgtcatctgctataggcaagacactgttctaggcacttgggat

SEQ ID NO: 234376 - DNA, 597 bp, Homo sapiens
gctggttattaaatactgacttgcacactgcttggtatcgcccacaccaaagcaggggactgatcataagaggatactgggctctaatcaatgacagtaatagttttgcaggaagaatgccagtgaaagaaagctggacttcatgaagccctaagaggatctgacaaaggggaatttcattgcttaygcagccctaaccagatgggagacacagggagactgggagtaataggcattaaagagctgtttttatggttgttttggggagaacaagggtttcactgggtctcactattgtctagatcatggtttctcaatcttggcactatttggaaccaaataattctttgtagtgaggctctcccctgcgcattgcaggatgtttggcagcatgccttacctccacctaccacatgctggtatctccttcccagttgtctgaagacattcccaaaatgtctgaagacattgccccagggtgacaatattgcccctggttgaaaatcactgacccagatgaaatatcacttatatttattcaactcaagaaatattgtcatctgctataggcaagacactgttctaggcacttgggat

SEQ ID NO: 234377 - DNA, 569 bp, Homo sapiens
tggtcttcgcttctcacaccaaagcaaattccagatggagcaaggatttaaacataaaaaataagcccataaaagtactagaaagaaacatggaagaattttttttatggctatggagcagagacagcctttctaaacaagacgtaaaccttaaactgaaaaagtaaagaattgattcatttcagtagaaaaattgaatgttctaaacttcaaaaattacagtaaatgaactcaaaagtcaactaacaaactgggraaaaaaatctgcaccacatatgacaaaggtctggtttacttaatatattaaaagctcttatagattgataagaaaatgaaaaataatctatcaggaaaaataaatgagcaaaaaacaaacaaaaattacaacctgacaactcagagaaaaagacttgcaaatggctactaatatatttttcatcattttttaaaattgacagcattgcatgcctttatcatgtataacatgatgttttgaagtatatacacattgtgaaatggttaaatctatctaattagcaaatgcatcacctcatagttatcattttgtg

SEQ ID NO: 234378 - DNA, 559 bp, Homo sapiens
gagctgcctcttctgagcagggagctcagggagcttstcaggacgtgcaggaggaggtcggggaggcagcagcagaaatgggctcagccctgtgggctccttgggtccagggccactgaacaggttgtcctgtaggaagtccttggtgacccttgtcttgtccagcacattcttgttgtcagggaccttggatgtctcagtggacttcagtgggaactgggacagaagcttgctgacttgcaagttggagtcacctaggatgcggcccctgtcctctgtccccttgctgctcttgacctcggcggcacacagaatgtctgtgacagtagaagtggcagaatcacagtcctgcctgctgctgataacgggcatggccaccttctgcttcagaagcttgtctccgacaatgatggaggctctggggcgctcattactgcctgccactagaggaggggcaagaatgcagggagccagctctctggtcccctcgggagagctgccgggtacctccagctccccagaactctcttcgaccaggatcgagtgctctttggtgagg

SEQ ID NO: 234379 - DNA, 561 bp, Homo sapiens
ttggcaaacactgggagctgcctcttctgagcagggagctcagggagcttgtcaggacgtgcaggaggaggtcggggaggcagcagcagaaatgggctcagccctgtgggctccttgggtccagggccactgaacaggttgtcctgtaggaagtccttggtgacccttgtcttgtccagcacattcttgttgtcagggaccttggatgtctcagtggacttcagtgggaactgggacagaagcttgctgacttscaagttggagtcacctaggatgcggcccctgtcctctgtccccttgctgctcttgacctcggcggcacacagaatgtctgtgacagtagaagtggcagaatcacagtcctgcctgctgctgataacgggcatggccaccttctgcttcagaagcttgtctccgacaatgatggaggctctggggcgctcattactgcctgccactagaggaggggcaagaatgcagggagccagctctctggtcccctcgggagagctgccgggtacctccagctccccagaactctcttcgaccaggatcgagtgc

SEQ ID NO: 234380 - DNA, 561 bp, Homo sapiens
ttggcaaacactgggagctgcctcttctgagcagggagctcagggagcttgtcaggacgtgcaggaggaggtcggggaggcagcagcagaaatgggctcagccctgtgggctccttgggtccagggccactgaacaggttgtcctgtaggaagtccttggtgacccttgtcttgtccagcacattcttgttgtcagggaccttggatgtctcagtggacttcagtgggaactgggacagaagcttgctgacttgcaagttggagtcacctaggatgcggcccctgtcctctgtccccttgctgctcttgacctcrgcggcacacagaatgtctgtgacagtagaagtggcagaatcacagtcctgcctgctgctgataacgggcatggccaccttctgcttcagaagcttgtctccgacaatgatggaggctctggggcgctcattactgcctgccactagaggaggggcaagaatgcagggagccagctctctggtcccctcgggagagctgccgggtacctccagctccccagaactctcttcgaccaggatcgagtgc

SEQ ID NO: 234381 - DNA, 578 bp, Homo sapiens
gggtataatttactatatgtggggccttcagggcaggctgtcatagattcacaaaccagctatattttcacttgtgccaatccaaagggaccagagtcatctatttttaaaagataactaaasaatcagattttgctcctaagcaaccctacactccacagtgtccactagatgtttgacctaattctgctgcctcccattccacttttctttagacagtagtaaagagacattctttcttgtaatcatttcagctcataaaatctatgactagttacagcaacttctggccaagctgaagcatcaggcagtaaacccatcatcaacagccatggtgtttgcagatgctctaggtctggaaatcactgctggcatgcctgcatatttaaaaaaatactaagaagtttagtaatggccagaaaccatatgcatttaaggggaaagtcttctgagaaaactttaagggccaagatcttgaaataagtagatcagcttggtgatcacctgactcagttcagctaagcctattgaccttctcagaattagaatagaatgaatagggacttagtgtgtgataa

SEQ ID NO: 234382 - DNA, 453 bp, Homo sapiens
acttcctgcctcaaaccaatcttcataattcccagttggtttggctgaggcatggccatgaggccggtggcttcatatmaacaagtgaggcactttgtgaataaaagcaacaagtcatggcacctcattccacccacaaaggggaagaaggttgcccaaggtcaagggcaggggttggcatcaaacctccctcttgagactctcatatatccaggaacatggaaaaataaaggccaggaggaggcctactctctagcatttataggagactggcgtccgatgtagtttgctgtttagaatgtgtctgtgttaaaacatctctgtggaggtagtgggggagcgactggtttgttcactctgcagaaaaaattggaccactggccttacaaacacatcattactgggtataaggttagagaagatacaataatcatttcagctccaagcttccac

SEQ ID NO: 234383 - DNA, 457 bp, Homo sapiens
cacttcctgcctcaaaccaatcttcataattcccagttggtttggctgaggcatggccatgaggccggtggcttcatatcaacaagtgaggcactttgtgaataaaagcaacaagtcatggcacctcattccacccacaaaggggaagaaggttgcccaaggtcaagggcaggggttggcatcaaacctccctcttgagactctcatatatccaggaacatggaaaaataaaggccaggaggaggcctactctctagcrtttataggagactggcgtccgatgtagtttgctgtttagaatgtgtctgtgttaaaacatctctgtggaggtagtgggggagcgactggtttgttcactctgcagaaaaaattggaccactggccttacaaacacatcattactgggtataaggttagagaagatacaataatcatttcagctccaagcttccactgt

SEQ ID NO: 234384 - DNA, 436 bp, Homo sapiens
gcctcaaaccaatcttcataattcccagttggtttggctgaggcatggccatgaggccggtggcttcatatcaacaagtgaggcactttgtgaataaaagcaacaagtcatggcacctcattccacccacaaaggggaagaaggttgcccaaggtcaagggcaggggttggcatcaaacctccctcttgagactctcatatatccaggaacatggaaaaataaaggccaggaggaggcctactctctagcatttataggagactggcgtccgatgtagtttgctgtttagaatgtgtctgtgttaaaacatctctrtggaggtagtgggggagcgactggtttgttcactctgcagaaaaaattggaccactggccttacaaacacatcattactgggtataaggttagagaagatacaataatcatttcagctcc

SEQ ID NO: 234385 - DNA, 454 bp, Homo sapiens
aaccaatcttcataattcccagttggtttggctgaggcatggccatgaggccggtggcttcatatcaacaagtgaggcactttgtgaataaaagcaacaagtcatggcacctcattccacccacaaaggggaagaaggttgcccaaggtcaagggcaggggttggcatcaaacctccctcttgagactctcatatatccaggaacatggaaaaataaaggccaggaggaggcctactctctagcatttataggagactggcgtccgatgtagtttgctgtttagaatgtgtctgtgttaaaacatctctgtggaggtagtgggggagcsactggtttgttcactctgcagaaaaaattggaccactggccttacaaacacatcattactgggtataaggttagagaagatacaataatcatttcagctccaagcttccactgtgattttacact

SEQ ID NO: 234386 - DNA, 567 bp, Homo sapiens
tggaccactggccttacaaacacatcattactgggtataaggttagagaagatacaataatcatttcagctccaagcttccactgtgattttacactgtggttttacctttctcccaaagcttctagacaatagtcatagcttaggcccacaggctccaaaggtagccaattaaaatcctggtaaacagaagcatctgccctcttctctcttactgtttcctctgtggctaaaaataaagagtggatggaaaggcctgttactcttcagacatatttgatcctgggaggctgaaacaagtaagaccaagctgatggctgcctccttccagtagaatgttccctgtgacatcttagcctatggctgtcagtctagttctgcatgtctttcctgtgtctccatctgtctcattctctctgccttcctgtatctgtcaggatgttgrtggggcgggtccagatgggggagggggcgcgggggtgtgtgtctgcctgtttctctctttgtgtgtgggcatgtgtgtctgttttcatctccctctgtctctctgtccctgtttctcactctg

SEQ ID NO: 234387 - DNA, 567 bp, Homo sapiens
tggaccactggccttacaaacacatcattactgggtataaggttagagaagatacaataatcatttcagctccaagcttccactgtgattttacactgtggttttacctttctcccaaagcttctagacaatagtcatagcttaggcccacaggctccaaaggtagccaattaaaatcctggtaaacagaagcatctgccctcttctctcttactgtttcctctgtggctaaaaataaagagtggatggaaaggcctgttactcttcagacatatttgatcctgggaggctgaaacaagtaagaccaagctgatggctgcctccttccagtagaatgttccctgtgacatcttagcctatggctgtcagtctagttctgcatgtctttcctgtgtctccatctgtctcattctctctgccttcctgtatctgtcaggatgttgatggggcrggtccagatgggggagggggcgcgggggtgtgtgtctgcctgtttctctctttgtgtgtgggcatgtgtgtctgttttcatctccctctgtctctctgtccctgtttctcactctg

SEQ ID NO: 234388 - DNA, 566 bp, Homo sapiens
gaaacttaggaaaaacagagcattgttgcatagaaaagtaatctgattatttaaagtcatgacaagatgaatagtgttaacctttcaaaacaaaacttaggcaagagatcaaaagaggcaagacatggagaagcacagttttaccaaacaggccagattttctttatattccttrtttccaagtgatattgtaggccctgacccctcatgccttcctccaagttaatgagacaaaaaacacaggttggctcttgagggtcctgctcatgtacacataacactttcagtgagctctagaccacagcgccttaaagtatttaagtttatttaaatataaagattctattataacatagaaaaaaagaaaatcattaccaattcaggtaacaaagtagtatagcaaagctcaatgtgagttgttttaaaaaaagaaaacatagtttcttcttttaaagaaaaaaagccaattttctatactctgtaacatcaacaaataataatatagaaacaaacaaacaaacaaaacaaagctagtacctagctcagtggtcttaccattgttccgg

SEQ ID NO: 234389 - DNA, 566 bp, Homo sapiens
gaaacttaggaaaaacagagcattgttgcatagaaaagtaatctgattatttaaagtcatgacaagatgaatagtgttaacctttcaaaacaaaacttaggcaagagatcaaaagaggcaagacatggagaagcacagttttaccaaacaggccagattttctttatattccttatttccaagtgatattgtaggccctgacccctcatgccttcctccaagttaatgagacaaaaaacacaggttggctcttgagggtcctgctcatgtacacataacactttcagtgagctctagaccacagcgccttaaagtatttaagtttatttaaatataaagattctattataacatagaaaaaaagaaaaycattaccaattcaggtaacaaagtagtatagcaaagctcaatgtgagttgttttaaaaaaagaaaacatagtttcttcttttaaagaaaaaaagccaattttctatactctgtaacatcaacaaataataatatagaaacaaacaaacaaacaaaacaaagctagtacctagctcagtggtcttaccattgttccgg

SEQ ID NO: 234390 - DNA, 566 bp, Homo sapiens
gaaacttaggaaaaacagagcattgttgcatagaaaagtaatctgattatttaaagtcatgacaagatgaatagtgttaacctttcaaaacaaaacttaggcaagagatcaaaagaggcaagacatggagaagcacagttttaccaaacaggccagattttctttatattccttatttccaagtgatattgtaggccctgacccctcatgccttcctccaagttaatgagacaaaaaacacaggttggctcttgagggtcctgctcatgtacacataacactttcagtgagctctagaccacagcgccttaaagtatttaagtttatttaaatataaagattctattataacatagaaaaaaagaaaatcattaccaattcaggtaacaaagtagtatagcaaagctcaatgtgagttgttttaaaaaaagaaaacatagtttcttcttttaaagaaaaaaagccaattttctatactctgtaacatcaacaaataataatatagaaacaaacaaacaaacaaaacaaagctagtwcctagctcagtggtcttaccattgttccgg

SEQ ID NO: 234391 - DNA, 607 bp, Homo sapiens
ataattgcatttgtaatgtgtatgtatttatcacatatataaaattatacatatatcacataaatacacatacacacatgggtatgaatatgtgtccctaagtctctttcttcttcctccattccctctcacctgaaattcctcacaaaagcttaatataaccwgtctctcaaggcaggacaaagggaaggaaaaggactagacaagtgaaaccagaactcttcagcaagcagaaggagaaaaaaacaaggaacacatataattcttgtctcctcataaaagacaactatagacggtttctaatcattttagatgacttgagggcattgatttaggaattttaaaagtctatttttcatgcatcccaccttctccatttgtctttttcatgacaatctgaagtaatttccacttctctggtatcgtcagttgagctaacatgcatagaagtgcccactacagcacccagcacctggtatgacctcaatagatgtttccttcctccctttccttactgccaattcggtctaaaaatgtgttaataatcttaaataataatgaatccaggtcacatgaattcactttgccttgaaaattcctcaatagg

SEQ ID NO: 234392 - DNA, 607 bp, Homo sapiens
ataattgcatttgtaatgtgtatgtatttatcacatatataaaattatacatatatcacataaatacacatacacacatgggtatgaatatgtgtccctaagtctctttcttcttcctccattccctctcacctgaaattcctcacaaaagcttaatataacctgtctctcaaggcaggacaaagggaaggaaaaggactagacaagtgaaaccagaactcttcagcaagcagaaggagaaaaaaacaaggaacacatataattcttgtctcctcataaaagacaactatagackgtttctaatcattttagatgacttgagggcattgatttaggaattttaaaagtctatttttcatgcatcccaccttctccatttgtctttttcatgacaatctgaagtaatttccacttctctggtatcgtcagttgagctaacatgcatagaagtgcccactacagcacccagcacctggtatgacctcaatagatgtttccttcctccctttccttactgccaattcggtctaaaaatgtgttaataatcttaaataataatgaatccaggtcacatgaattcactttgccttgaaaattcctcaatagg

SEQ ID NO: 234393 - DNA, 511 bp, Homo sapiens
taagagagaaaatttgcaaactcaagaaaaaaatctatattgatttcaaggtaatatctcagggcaataatatcttcagttaaaggagaaaaaagcttgaattaaggtgtcggcacaaaaatatcagttagtggctctgctacttactatccatgaggctttaaacaagttattaaamctcctttgcttcagcttaccagtctgcaaaacgagatagtaatagtaagtactcaaaagactatgatgatattgaagagttaaatttataaagctcttagaacagtgcatggcataaagtgagcataatataaatgtttgacagataaataaatgcatagttgggtggagggaagtaaggtgatattcagtgagcatctactctattttaggagatttcatgtattatctcatttgccttgatgatcaatttgtaaatgaatattatttattgacctcattttatagaaaagaaaaggttcaagtagaataaagtgacttgcccaagtttgca

SEQ ID NO: 234394 - DNA, 511 bp, Homo sapiens
taagagagaaaatttgcaaactcaagaaaaaaatctatattgatttcaaggtaatatctcagggcaataatatcttcagttaaaggagaaaaaagcttgaattaaggtgtcggcacaaaaatatcagttagtggctctgctacttactatccatgaggctttaaacaagttattaaaactcctttgcttcagcttaccartctgcaaaacgagatagtaatagtaagtactcaaaagactatgatgatattgaagagttaaatttataaagctcttagaacagtgcatggcataaagtgagcataatataaatgtttgacagataaataaatgcatagttgggtggagggaagtaaggtgatattcagtgagcatctactctattttaggagatttcatgtattatctcatttgccttgatgatcaatttgtaaatgaatattatttattgacctcattttatagaaaagaaaaggttcaagtagaataaagtgacttgcccaagtttgca

SEQ ID NO: 234395 - DNA, 511 bp, Homo sapiens
taagagagaaaatttgcaaactcaagaaaaaaatctatattgatttcaaggtaatatctcagggcaataatatcttcagttaaaggagaaaaaagcttgaattaaggtgtcggcacaaaaatatcagttagtggctctgctacttactatccatgaggctttaaacaagttattaaaactcctttgcttcagcttaccagtctgcaaaacgagatagtaatagtaagtactcaaaagactatgatgatattgaagrgttaaatttataaagctcttagaacagtgcatggcataaagtgagcataatataaatgtttgacagataaataaatgcatagttgggtggagggaagtaaggtgatattcagtgagcatctactctattttaggagatttcatgtattatctcatttgccttgatgatcaatttgtaaatgaatattatttattgacctcattttatagaaaagaaaaggttcaagtagaataaagtgacttgcccaagtttgca

SEQ ID NO: 234396 - DNA, 417 bp, Homo sapiens
ctggaattgcacttaacacatcttggaaaacactgtctccgtagagcatagtcagcttctctgtctacagggacaccacactattattctctcactcagtacacaaagcagaaccctgggctccatttattgcagtctcagagagtgacatttttccaacttctagtgaagaaatggtcttctgccaggtctgaattcacaagatgaagttcgacattccctgaatttgagtgcttctgctgtcacagtaacaaactgttggtgaaaggttttaccagtaactgttaaatcacataagtttgtcaggaaaatgataasagagtaccctggaaaagcacccccctccaccctatctctttaaaatacctatgtttgcatttactgtttctttcagagattagaaatcagacaaagagg

SEQ ID NO: 234397 - DNA, 571 bp, Homo sapiens
gctcacttctatcttactgggccttatccttttaaacagttaaaaaaaaaaaaaaaaaaaaggttagtgggaaacaggcttagtggaaaagtaaggctgcttatctaaactgtcccagattgagaaagactttaaatacctgaataaaaattgtgaaccaaaaaaaatccctagacgttgtcagtaagtataggatccatcatatttgcatgtgatatttcctgcccgaggaaaataatctatctcacacctacttcaactcttccacctgagaaaaatcctgctcttactgtataattgaagtccaatttcctcgctttaataaaagccccctctcccctcctctccaaagctggttccttccccctctgaactctcactgctctctgcctattgtctacagaggcaatggcactgcattacaattagttatggctgcatcatccatctcctcagctaaattgttgagcttctggacacagtatgtctcggwatgtccagtgcctagccctgggcatagcgggaaaaataccctcaacaaatgtctgtggatgtactaacaaataaaagc

SEQ ID NO: 234398 - DNA, 563 bp, Homo sapiens
tttggctttgtttttcactcctgttgactgcattctattatcagcagaaacaaaagtatgaggaagttggaagtttctaagctaagtcatctataagcaagtgctagcccttcagtgacccactaatctcagatctcctatttccaaatcttttgaggataatgtttgaaaaggttttcctttatagttttacattttaaaaaaagaaaagctgttggccattgatctctgttgcaaagaggcccctctgctcctccctactgggcgccatgtgaatggggttcaccgtgagatggtaatacctaatgcatgcgttgacatttagcaatgtgctttactgctctgccctttccacacgtggaacagcaagtgggagcaaggctgcatctctcacaggtcagccacagcccccaccccaaagctaggaaatgctaatgtacctgaaggaacaacagctacatggaatcacmtacctacagagaccatgaaattaaaacgtgctcctggacaatatcatttcttgcccaactaggccctctggaaataaacaaagaccaaccaaa

SEQ ID NO: 234399 - DNA, 423 bp, Homo sapiens
ttatatcccaaccagatgtttcacaggttcacccgactcagtaccccaggaccaaattcatcatcctctcccyggtgtcctgtttcgtttttttttagtagagatggggtctcatcatgttggccaagctagtctcgaacttctgacctcaagtgatccacccacctcagcttcccaagtgctggaattacaggcatgagccaccatggcccagcctctccatcttcgtctctatcttagatctcactactatttcctcagttgcccaaaacagcctgaatcatacttctgttatctcacatctaattggtcatcaggttctgttccaacaacacccaaataaatctacatcctcctccacgttcccgctccactaccttagctcaagagctcaccctctctcctggaatattacaaaacctc

SEQ ID NO: 234400 - DNA, 420 bp, Homo sapiens
tcccaaccagatgtttcacaggttcacccgactcagtaccccaggaccaaattcatcatcctctccctggtgtcctgtttcgtttttttttagtagagatggggtctcatcatgttggccaagctagtctcgaacttctgacctcaagtgatccacccrcctcagcttcccaagtgctggaattacaggcatgagccaccatggcccagcctctccatcttcgtctctatcttagatctcactactatttcctcagttgcccaaaacagcctgaatcatacttctgttatctcacatctaattggtcatcaggttctgttccaacaacacccaaataaatctacatcctcctccacgttcccgctccactaccttagctcaagagctcaccctctctcctggaatattacaaaacctcct

SEQ ID NO: 234401 - DNA, 533 bp, Homo sapiens
acagcatttatcggatgatttttgctgccattgatatgtttctcttcttgaaagaggaattcaaatgacaatgaacatttttggggtcctcttttatggagtttgattttcaggggattgtcaggcatgtcgtctccgggttcccrtgctgcacagtcccagcactctctgtggctcagccttcccgtcccttgccctctgaataccttgccgttgactgaatggtcatcgttagcacaggtcatcacaatacatgactcctgggcaggaggaacagaggagcggaggttgtgccatgcatttaaaacccagttagcatcccagtgggtcttccaaggccgaagatggcaaaacgtttttattttactttgttgaaatcatctgtttccctccaaatggtgggctgtttgggcacaaggtcatgttgtcttcaatttcatagccccggtacccagcaaggatggctgcccataggctctattaagatgccgagtgcatccgtggcacggccaggaggagtgtgctgtggtcag

SEQ ID NO: 234402 - DNA, 599 bp, Homo sapiens
tggtcagtttaattcaaaagtaacatgacatccttccaggagagttcacaactcgtataagtactggaaagcctctatatacctatcagggtcatctgaaaacttaccaagatccccttaatttgacataagccctgaagagaaaggggacctcgaccttaatggggccatattcaccaggcatccattgtaggggctgttgagactgggacctgcctaaaaccaggattcctaggctggggtaagcttgagagagaayctggataggaaggagcagagggggttgattcccctcctggaggtaactttggggtttccttccctatttccctgagattgccccttgcagcctctcctgagatggccactaagagggctgaatcaatcctcaatgttggcaaaggtctgggctaccctgaaaggcaaagaaggcctgtacatatgggacctgggacctttctgtgcctcaaggtgcttggcactaaattggaaatgacaagaacatttttgccacaaatttacctacagataccaaagtacactttgccccatctgtgctacacttgatcttctaatttatacttttgatgactaagcca

SEQ ID NO: 234403 - DNA, 599 bp, Homo sapiens
tggtcagtttaattcaaaagtaacatgacatccttccaggagagttcacaactcgtataagtactggaaagcctctatatacctatcagggtcatctgaaaacttaccaagatccccttaatttgacataagccctgaagagaaaggggacctcgaccttaatggggccatattcaccaggcatccattgtaggggctgttgagactgggacctgcctaaaaccaggattcctaggctggggtaagcttgagagagaatctggataggaaggagcagagggggttgattcccctcctggaggtaactttggggtttccttccctatttccctgagattgccccttkcagcctctcctgagatggccactaagagggctgaatcaatcctcaatgttggcaaaggtctgggctaccctgaaaggcaaagaaggcctgtacatatgggacctgggacctttctgtgcctcaaggtgcttggcactaaattggaaatgacaagaacatttttgccacaaatttacctacagataccaaagtacactttgccccatctgtgctacacttgatcttctaatttatacttttgatgactaagcca

SEQ ID NO: 234404 - DNA, 536 bp, Homo sapiens
attactctcttctgtgaattgtgcccagggattacaactggattgttccctgtctcagagacatgcctgtcttcaagctgagtgcagacagcatttgcgctgaggtttcaatcacctaatcattctaatcttgtttaaattttatggaactaagctaattcctcataattatgtacactaaaaatcagggtgcttctgggctgggcacggtggctcacacctgtaatcccagcactttgggaggccaaggcgggcagatcacgaggtcaggagatsgagaccatcctggctaatgcagtgaaaccccgtctctactaaaaatacaaaaaaattagccaggcacggtggcgggcacctgtagtcccagctactcaggaggctgaggcaggagaatggcatgaacccaggaggcggagcttgtagtgagctgagatcgtgccactccactccagcctgggtgacagagcgagactccatctcaaaaacaaacaaacaaacaaaaatcagggtgcttctgaagcatttggggatgtagg

SEQ ID NO: 234405 - DNA, 536 bp, Homo sapiens
attactctcttctgtgaattgtgcccagggattacaactggattgttccctgtctcagagacatgcctgtcttcaagctgagtgcagacagcatttgcgctgaggtttcaatcacctaatcattctaatcttgtttaaattttatggaactaagctaattcctcataattatgtacactaaaaatcagggtgcttctgggctgggcacggtggctcacacctgtaatcccagcactttgggaggccaaggcgggcagatcacgaggtcaggagatcgagrccatcctggctaatgcagtgaaaccccgtctctactaaaaatacaaaaaaattagccaggcacggtggcgggcacctgtagtcccagctactcaggaggctgaggcaggagaatggcatgaacccaggaggcggagcttgtagtgagctgagatcgtgccactccactccagcctgggtgacagagcgagactccatctcaaaaacaaacaaacaaacaaaaatcagggtgcttctgaagcatttggggatgtagg

SEQ ID NO: 234406 - DNA, 523 bp, Homo sapiens
gaattctttgcggaagctgctaccctacatttcccttcctcactactctagcagaggttctccaggagggctcaatccctgcagctgacttccttctggacacccagttgtttccatacattctccaaaatctaggtggaggttcccaaatctcaaattcttgacttctgtgcacctgcacactcaatgcaatgtgtaagccaccaaagcttggggcttccttcctctgatgcaacagcctgagttgtatgttggctgcttttagtcactgctgggacacagggcaccaagtcctgagaccacacaaaggagcaaggccctgagccctgcccgtgaaaccattttattctactaggcctctggrcttgtgatgggaggggctgccatgaagacctctgacatgtcctggagatattttccccattgtctttgtgattaacatttggctcctcattacttatgcaaatttttgcagcctgcttgaatttcttctcagaaaatagggttctcttttgtatcaaac

SEQ ID NO: 234407 - DNA, 525 bp, Homo sapiens
agaattctttgcggaagctgctaccctacatttcccttcctcactactctagcagaggttctccaggagggctcaatccctgcagctgacttccttctggacacccagttgtttccatacattctccaaaatctaggtggaggttcccaaatctcaaattcttgacttctgtgcacctgcacactcaatgcaatgtgtaagccaccaaagcttggggcttccttcctctgatgcaacagcctgagttgtatgttggctgcttttagtcactgctgggacacagggcaccaagtcctgagaccacacaaaggagcaaggccctgagccctgcccgtgaaaccattttattctactaggcctctgggcttgtgatgggaggggctgccatgaaracctctgacatgtcctggagatattttccccattgtctttgtgattaacatttggctcctcattacttatgcaaatttttgcagcctgcttgaatttcttctcagaaaatagggttctcttttgtatcaaact

SEQ ID NO: 234408 - DNA, 545 bp, Homo sapiens
tgcatcattcccacaagacttaagagtgagtaacttgaaatgtgagtaactggtagcaatacgaagttcagacagtcagctgtgctgtgtgtaataaagtcattcatttctgatgcaggagctctgtatctccagccagtatccatgaaactatgaaaagctaacttgttaaaggctaacttgttaacatgtaagtggggtacaatttcaggcttttaagttcttgacattcagtatgttcacatataaaagttatgayatgtttatttactgccgtaagaatactacttttggtgatttttaacttgttagccttcctccctccctcctcccttcttccctcacttcttccctccttcccccttccctccttctagtattgtcaattgaagtttagcatcttagcctctggaaaggaaaagaaacgttttatgaagtgatagcatttccacaaaaacataaaacacaatcctgaaagttcacgtgggagagtcaatcatacattgccttattcagtctctatttgtgatttctcattgacagac

SEQ ID NO: 234409 - DNA, 592 bp, Homo sapiens
ccaaatatataaagtaaataataataaagctaaagagaaatactgtaatacaattaaagctgtaaacttcaacactccaagttcactattagacagatcttccagacaaaaattcaacaaggaaacatcagactcagtttgcactatagaccaaatggctctaagagatatttacagaacattttctttaatggctcaagaatatacattctttctgttagaacatgaatcattctcaaaagtagatcatatattaggtcacaaatcaagtctcaaaacattcaaaataatttaaataatatcargcatcttctctgaccacaatggaataaaactggaactcaatgacaagaggaattttggaaaccaaacaaacacatggccattatgcaatatgctcccgaaagaccaatggatcaatgaagaaattaagaaggaagttgaaaaatttcttaaaacaaatggtaatggaaacaaaacatacccaaacctatgggatatgtcaaaagcagtaataacaagggattttacagctctaagtgcctatatcaaaaaagaagaaaaactttaaataaacaatttaacaatgcac

SEQ ID NO: 234410 - DNA, 550 bp, Homo sapiens
attgaaggtttctggcaactttacccctatgttcagcaagtctatgggcaccgtttttctagtagcaatktttcaacagtgctcactttgtgtctctgtgtcgcattttgggaattctccctttttcattattattatatctgttatggtaatctataagcagtgatattttatgttactattgtacttattttggtgttctatgaaccctgcttatatgagacagcaagcttaatctatcaatgttgtttgtgttctgacagctctactgacttgccattcacccatctttctcccaatcctcaggccttccttgaccctgaaacacaataatattgccactaagccagtgaaaactatacaagggtctttcatgttcaagcaaaaggaaaaatttcacatctctcattttaaaataaatgttagaaataattatgcttggtgatatggtttggctgtgtacccacccaaatctcacgtgaattgtaatagtccccacatgtcaagggtggggccaggtggagataattgaatcatggggacagttttc

SEQ ID NO: 234411 - DNA, 440 bp, Homo sapiens
gcactaaatatattgatatcctagcaattggaaattggaattaaawattaaaatcacaatattatttatattagcatctccaaagtaaaatatttaggtaaaacatccccaaaatacatacaaaatttatattagaaaatctactaaattctaatcagaacaaaacggaagatctgaataaattaagggctagcctgtgtccatgaataagcaatctcaatattgtcacgatgtcagttctttctaattttatctacatattcaatttaattccaatcaaaatcacagaatgttgtttgtggataccaacaaactgataacacagtttatagaaacatgcaaaaatcccagaatagtaaatgcaatattgaactggtcaaataaaatcgaataatttacactacctgatttcaagtcttcttttaaagctatagtattaa

SEQ ID NO: 234412 - DNA, 440 bp, Homo sapiens
gcactaaatatattgatatcctagcaattggaaattggaattaaaaattaaaatcacaatattatttatattagcatctccaaagtaaaatatttaggtaaaacatccccaaaatacatacaaaatttatattagaaaatctactaaattctaatcagaamaaaacggaagatctgaataaattaagggctagcctgtgtccatgaataagcaatctcaatattgtcacgatgtcagttctttctaattttatctacatattcaatttaattccaatcaaaatcacagaatgttgtttgtggataccaacaaactgataacacagtttatagaaacatgcaaaaatcccagaatagtaaatgcaatattgaactggtcaaataaaatcgaataatttacactacctgatttcaagtcttcttttaaagctatagtattaa

SEQ ID NO: 234413 - DNA, 440 bp, Homo sapiens
gcactaaatatattgatatcctagcaattggaaattggaattaaaaattaaaatcacaatattatttatattagcatctccaaagtaaaatatttaggtaaaacatccccaaaatacatacaaaatttatattagaaaatctactaaattctaatcagaacaaaacggaagatctgaataaattaagggctagcctgtgtccatgaataagcaatctcaatattgtcacgatgtcagttctttctaattttatctacatattcaatttaattccaatcaaaatcacagaatgttgtttgtggataccaacaaactgataayacagtttatagaaacatgcaaaaatcccagaatagtaaatgcaatattgaactggtcaaataaaatcgaataatttacactacctgatttcaagtcttcttttaaagctatagtattaa

SEQ ID NO: 234414 - DNA, 504 bp, Homo sapiens
cgtgactgggatcggtggctcacacctgtaatcccagcacttcgggaggccaaggccatcagatcatgaggtcagaagtttgagacaagcctggccaacatggtgaaactctgtctctactaaaaatacaaacatcagctgggtgtggtagcatgcacctgtaatcccagctactggaaaggctgaggcaggagaatcccttgaacccaggaggtggagcttgcagtgagccgaggacacaccattgcactccagcctgggacagagtgagactccatctgaaaaaagaaaaaagaaatcctaaaaacattgtkccttatatactgaaataaaacaaaagcataaacactaagtcatcttaattatcatttaaaaattttgacttgaaatatgcctaaacggagttaatgtatgtaattcaatctgtgtttctcttcatcaagatgattctaaattaaatcctttaagaaaatatgccattatgaatagaaaatataaaacatc

SEQ ID NO: 234415 - DNA, 456 bp, Homo sapiens
caggtgtacaggatggaacatgaaggcggactacgagcgtgaccactgaagcacagcatcacagggagacggttaggcctctggataactgcgggcaggtctgactgatgtcaggccmtccacaggaggtggaggagtagagtcctctctaagctcccccggggaaagggagactccctttccctgtctgctaagtagcaggtgttttcccttgacactgacgctactgctagatcacggtccgcttggcaacaggtgtcttcccagacgctggcgtcaccactagaccaaggagccctctggtggccctgtcagggcgtaacagaaggctcgcactcttgtcttctggtcacttctcactatgtccgctcagctcctatctctgtatggcctggtttttcctaggttataattgtagagcaaggattattataatattggaataaagagtaattg

SEQ ID NO: 234416 - DNA, 474 bp, Homo sapiens
ggaacatgaaggcggactacgagcgtgaccactgaagcacagcatcacagggagacggttaggcctctggataactgcgggcaggtctgactgatgtcaggccctccacaggaggtggaggagtagagtcctctctaagctcccccggggaaagggagactccctttccctgtctgctaagtagcaggtgttttcccttgacactgacgctactgctagatcacggtccgcttggcaacmggtgtcttcccagacgctggcgtcaccactagaccaaggagccctctggtggccctgtcagggcgtaacagaaggctcgcactcttgtcttctggtcacttctcactatgtccgctcagctcctatctctgtatggcctggtttttcctaggttataattgtagagcaaggattattataatattggaataaagagtaattgctacaagctaatgattaataatattcatatat

SEQ ID NO: 234417 - DNA, 456 bp, Homo sapiens
caggtgtacaggatggaacatgaaggcggactacgagcgtgaccactgaagcacagcatcacagggagacggttaggcctctggataactgcgggcaggtctgactgatgtcaggccctccacaggaggtggaggagtagagtcctctctaagctcccccggggaaagggagactccctttccctgtctgctaagtagcaggtgttttcccttgacactgacgctactgctagatcacggtccgcttggcaacaggtgtcttcccagacgctggcgtcaccactagaccaaggagccctctggtggccctgtcagggcgtaacagaaggctcgcactcttgtcttctggtcacttctcactatgtccsctcagctcctatctctgtatggcctggtttttcctaggttataattgtagagcaaggattattataatattggaataaagagtaattg

SEQ ID NO: 234418 - DNA, 483 bp, Homo sapiens
tagacatattatatatgaatatcattaatcattagtttatagcaattactctttattccaatattataataatcctcactctataatcacaacctaggaaaaaccaggccatacagagataggagctgaggggacatagtgaggagtgaccagaagacaagagtgcgagccttctgttacaccctgacagggccaccagaaggctccttggtctagcggtgatgccagcgtctgggaagacacctgttgccaagcggaccatgatctagcggtagcatcagtgtcaaggaaaaacacctgctacttagcagacagggaaagggagtctccctttccccgggcragtttagagaagactctgctcctccacctcctgtggaggacctgacatcagtcagacccgcccgtggttatccagaggcctaaccgtctccctgtgatgctgtgcttcagtggtcacgctccttgtctgccttcatgttc

SEQ ID NO: 234419 - DNA, 455 bp, Homo sapiens
agcaattactctttattccaatattataataatcctcactctataatcacaacctaggaaaaaccaggccatacagagataggagctgaggggacatagtgaggagtgaccagaagacaagagtgcgagccttctgttacaccctgacagggccaccagaaggctccttggtctagcggtgatgccagcgtctgggaagacacctgttgccaagcggaccatgatctagcggtagcatcagtgtcaaggaaaaacacctgctacttagcagacagggaaagggagtctccctttccccgggcgagtttagagaagactctgctcctccacctcctgtggaggacctgacatcagtcagaccygcccgtggttatccagaggcctaaccgtctccctgtgatgctgtgcttcagtggtcacgctccttgtctgccttcatgttccatcctgtacac

SEQ ID NO: 234420 - DNA, 562 bp, Homo sapiens
acaggttgcagcctagtcactgagcaattgctcatatatcctttgtgagttccgagaatgccgagagctttccagagtagtctggagataacatcctggacctgtccacrcttacttttgaaacaaagcagatgtgccataattagtggttggttccatattttttggaagacgtaatattttttcctgaaagaatgcacagaacagatgcattccactgcagcaggctgagtgttgtaacaggaacatgcacaggagtttatgggaatggaggtgaaggagactgggaagggtgcaaaggaggaggatgaattgtccaagtggaaagtggtcccagaacagaattagagaaggcggaggtatgacagagtggaaaacagcctctaatggaataggccaactaggttaaaaacacacatgtaagaagctcccaggggcctctgcactaacaagggatcttgaggatatgagagtgatggggatgttttccactccttcccttctgctaagtcattccctttgggcacagagagacctggctctaaggtagagttcctacact

SEQ ID NO: 234421 - DNA, 562 bp, Homo sapiens
acaggttgcagcctagtcactgagcaattgctcatatatcctttgtgagttccgagaatgccgagagctttccagagtagtctggagataacatcctggacctgtccacacttacttttgaaacaaagcagatgtgccataattagtggttggttccatattttttggaagacgtaatattttttcctgaaagaatgcacagaacagatgcattccactgcagcaggctgagtgttgtaacaggaacatgcacaggagtttatgggaatggaggtgaaggagactgggaagggtgcaaaggaggaggatgaattgtccaagtggaaagtggtcccagaacagaattagagaargcggaggtatgacagagtggaaaacagcctctaatggaataggccaactaggttaaaaacacacatgtaagaagctcccaggggcctctgcactaacaagggatcttgaggatatgagagtgatggggatgttttccactccttcccttctgctaagtcattccctttgggcacagagagacctggctctaaggtagagttcctacact

SEQ ID NO: 234422 - DNA, 546 bp, Homo sapiens
gatgtctcagtgacactagagatttgagttgcccaagttggtcttctgcattctgctcccaactcatttctccttgtgctttgctgcaaatcaagccagtcgtgtctaagacctggcaggcatctcaccctccagccctcctgtgcctcccttccctcacctgtgatgctacctgtgggcttctctgggtccttcctgccttctgggctcactgctcccctcaattcagccccccaccatgtcagctggaccacgagatcaatactctctgggtaggtctccctacatccaggccacacccctccaattatccccactacagacaacakgaacctttttaaaaagcaaaatcaggattctagttcaagagcatgaaattgaaatctataggaaggtataagaggtataaaaacagtaagaccctataacaatgaagagaaaggccattagtgaaaaggacatttcaacagtttttagagtcaaaagtgaatgagaacaaattaacagataaatcagagtggagaaaaactcaccttgttgtacaac

SEQ ID NO: 234423 - DNA, 279 bp, Homo sapiens
tgtttagatagcagctaaagtcaaatctcttcacactttcaccccttctcctgtcttcccctttctatgccctctgcttgtaactcattccaaaaatagtcactgattacctactacatgcagacactgttccagtcacaggtgagaaaatacataagacccagtctctgctcttgaggaattcactatttggtgaggatgatgcacactgagcgggtagaagccatgagggaggtaamcagggaggatatggtagtacacaggatgggaagctggttc

SEQ ID NO: 234424 - DNA, 446 bp, Homo sapiens
aaaatttcttcacctaattaaagagacattaccaagtacaccaggctgtaaactctgccaggaagagccttatctgtttttgatgcttatagtaaaaagtctctaattatagcacagtggctgtcacctagtagatgcccactgaatatttgtggactracttaatgttcaaaatctcttaatagttgtacctgccctcatagaaagtgtgtgcagattgaagcttggaggattacaaggtattgaaatggtcctacatattccggttaataagaattagaatgaataaaagacataaagctctggggtgatttaggtagatctgagcatgaccacataaccccacatccacacctgctaacaaacaaaaaacaacttaaattcagctcaactgatttcctcgaatgttaatccagattagtgcccaacttttacttaatattcca

SEQ ID NO: 234425 - DNA, 564 bp, Homo sapiens
atgccttgaatatactgagaaggaatttagctgattgggggagagtttgagggttacatttataagtcttagaaaagtaaccaaagggaaaaagcatgacagttattaaactgacgaatgaagatagttgtattttgcagaaaagggaaaataatcattatcaaatttgaatggccatagttataataaatcaaacgttgaatattgatctaactgaaatgttgatgtaactatactgaaaggatggggagatggaaagaatgtagaagtttggagagattcagacacggtaaaaaaaaaaacattaatcttcgtcttcagtagtgagaagtcatgatctratacctaaaaccataaactggacagacagaaataaaaaccaagaggtaatctttagagatgtggaagtatatacccaggaactggaagggatgcctctgtgcaaggataagtggcggagaggtagcaagggtgatgactgtttaggttggatgtcttgcagaacttttttattcctaagactaagtgcacgtacagaaactttgcaaaacactaaaattacca

SEQ ID NO: 234426 - DNA, 576 bp, Homo sapiens
tgtttgaatattgagaaaattatttttaaaagtattgactaaatagagcaattcaagaaggttaatgtctttacatagaggacaagattacatttttgcccatcttcttctgtttttttttccaccctcccttcctacctcctcctttccataaaccatatcccagtaccttatactgtctaacacattaaaggctctcccctggcccctagaaaaaaaaatgasagttgagaacctttacttagacatccaaaaaatatagtgaacttccctcaattcttatcagtggtagcttaccatgtctagtaaacttgcctaatgaaaagtcaccctgagaagttattcttgctctgatgtagtgatcatctgatattgggttaaaccagttgatttcctttctttgaagacatgttcagtcaaagagatcaacaaaccagtaaaaaaactcctaatgagaaacaaaaggtaaaagaaactaaaccataatcataaaccaggtaaagtttaaatattgaaaaacaagtgggaaaagatgttaaaatagcatttcaagaacattgacctaaatatttagaa

SEQ ID NO: 234427 - DNA, 576 bp, Homo sapiens
tgtttgaatattgagaaaattatttttaaaagtattgactaaatagagcaattcaagaaggttaatgtctttacatagaggacaagattacatttttgcccatcttcttctgtttttttttccaccctcccttcctacctcctcctttccataaaccatatcccagtaccttatactgtctaacacattaaaggctctcccctggcccctagaaaaaaaaatgagagttgagaacctttacttagacatccaaaaaatatagtgaacttccctcaattcttatcagtggtagcttaccatgtctagtaaacttgcctaatgaaaagtcaccctgagaagttattmttgctctgatgtagtgatcatctgatattgggttaaaccagttgatttcctttctttgaagacatgttcagtcaaagagatcaacaaaccagtaaaaaaactcctaatgagaaacaaaaggtaaaagaaactaaaccataatcataaaccaggtaaagtttaaatattgaaaaacaagtgggaaaagatgttaaaatagcatttcaagaacattgacctaaatatttagaa

SEQ ID NO: 234428 - DNA, 553 bp, Homo sapiens
taacagaacaactgaaatacttgaaatagacctataaaatagtaattaaaatgagaaatacataagatgataaataaaatgaaggtgaaggtattccagatctaccgaaaagattttcagtatcacagattattcataagaaattgagaaaaggaacaatcagaagttgcaaaagatggtatagccgaatataatggaaataggaaaaattagtcgaaaataaaggttgatttagaaatgaagaaaatgaatatatttcttaatacaaaataagtgggaaatgagaagttataccaataaaaagcatttamaaatttaggggatattgtaacccagtataattttctgacaggttggactttgaccctaatggacttactggtgaactttttcaaatgtttaaataatgtctatccatgtatcatgaaggacagtatgcttcaaattgtcttttgaggcagacatgttctcagtactaaaagacatttttagaaggattttattctcaacagatgcaaaatgcaaaataaaatattggcaaacaatacagcaa

SEQ ID NO: 234429 - DNA, 600 bp, Homo sapiens
gagctggaatagccatatctgactaagaatttgaagcaaagtgttggagactgcagagcaacatgagagaaactagttccctatcaccactgaactaccatcctagtccaggaatgcctatctaatcttttgtaagaaataaatacaattttagcctttagtccctatgtttttctgttatagctgcttatgccatatcctaactcatacaatttataactcataaaatgcccttatgtggtttgataaatctgatttcaataatattatagatctcaaagtgattatcaagactgtcaaattttcctttacaatttttttacattattttgtaagagatgggggtctcattatgttgccaaggctggtttcaaactcctggcctcaagtcatcctcccacttcagcctctcaagcagctgggattacaggtgcaagccacagcacctggcttaataatgtcaaattttcaaatgaagaatactgagttcttaggtattatgaagttttcacygtagaactggaggcttggtttctaggtacatgcagaaacaccaaattttagaatgtacctatttctttacctaactttgccattatg

SEQ ID NO: 234430 - DNA, 480 bp, Homo sapiens
gcttctggaagaggggacctgggattggaatttgaaggtgggttgggtttggacagatagaggcaagactggaggtttcatttcaaagatgagaagaggatgaaggcatggaagaatctggcatgagtccaggattagytgggatgagacatggggtccacactaggactgggagacaggagaagctgggagcagatcagggccagagcatggttggagagaaccaggtggggggctcagatgttctccttgcgcagtggggagccccagcagggtaatgagcaagagagtgaccaattggcacagctgtttaggaagagtgccccaattggaagatttggggttactgcagggacccagcaacagacaaggcaagggctgggcagacagagaggagaggtcgggggctttgggaggagaggagttggatgtggaagatggagggggctgtcaccaatggttcaggattgtcattagcca

SEQ ID NO: 234431 - DNA, 480 bp, Homo sapiens
gcttctggaagaggggacctgggattggaatttgaaggtgggttgggtttggacagatagaggcaagactggaggtttcatttcaaagatgagaagaggatgaaggcatggaagaatctggcatgagtccaggattagctgggatgagacatggggtccacactaggactgggagacaggagaagctgggagcagatcagggccagagcatggttggagagaaccaggtggggggctcagatgttctccttgcgcagtggggagccccagcagggtaatgagcaagagagtgaccaattggcacagctgtttaggaagagtgccccwattggaagatttggggttactgcagggacccagcaacagacaaggcaagggctgggcagacagagaggagaggtcgggggctttgggaggagaggagttggatgtggaagatggagggggctgtcaccaatggttcaggattgtcattagcca

SEQ ID NO: 234432 - DNA, 594 bp, Homo sapiens
tgtgggaccccactgctcacccaagaaatagccttcagtgttcatttaaaagggaagggggacatttatatgtctaggtgtcaagtttttattccactcaacagaaagcaaaaacaccaagctgggccctcaaaactaaatatccgacaatgccattgatgccccagggccagagtgaagttgccaaggccccagcacacagtaggacctcagaacacagtgtcctcctgggttcacaccttcactgtgctgcgccaaatgtgaagcctcttgggaaatgaaggagaaagcccagccctgacacacagacttcatcgtgctggcgtccctagcttgctcctgtcttgaggccttgcaatgtgggggatctcagtggtggccagggtccctcctggctccctggcagcctcactcagccaycctcagctaccacacctgaatgaccttgggcaagacaattagcctctctgtgcctctgagccaaagtttcctgtcctttataatgggtgacaatagtcacaatagccccataggaacaccagaacagttcttggctaagtaggtgctaagtaaatgtgagtccctgtttcctcc

SEQ ID NO: 234433 - DNA, 491 bp, Homo sapiens
cgatgctgcagctctgggctggggggctgcgggatgccagcggtgctggggggctcctcaggtgagggacagctgtcaggggaggggmtgggcgaggagaaggcctgaaggctgtcatcctgtgaggggccgctgggaaggctgtcctgaaggtagatgctctccagatctggaaaagcaagggggtgatgggggaatggcgtcccagatccagctcctcgccctctctgggggtgtgagaaagggcaaggggcagaagacctgcctccaaatccagctatgtgacggccgagccttgtgaccttggtcaagtcaccaaaactctgagccccagctttctcctccaggcagtaaacggaggagttaagagtgggcttggagccagcctgtgctctctgagaactgggacaaccagtgctcctctgggcctctgtcccctccccgtccctcttggggcaggaggactaagtgcaggcttcccccagggccaa

SEQ ID NO: 234434 - DNA, 582 bp, Homo sapiens
actagatcctcccgtcctcttttgctcctggcccggctgacaccctggcatggcctctgagctctctctcacagacgcccttacctctcaccccggtttgggtctgaccctcctgccctgtgcctggatctgaggagctgaatgttgctggagaaagtgaccgctgcatgcgagattgtagccccagcctcccgtgggacgctgcccggatccttctctgtttctgcatttcctgctgtctttgtttcctgccaggttgacagcttcaccccatccttccttctcagacatgaaacacaccccctcccctaccccacacactgctgggggcttctgcccctccctcactgggtccaggatccttggaaaggtgtcaccyggatctttccacccaaatcaccagagcctgcctgcacctttgcccacatcatcgcctttccctcctgcaacaaaggaagagctgttcctgctgcacccaagaccttctggcccatccacccagggctgggtcctgcccctgccctccccccagaggctctgctctccctcctgcggtgtcactgtgccctctccactctgtcc

SEQ ID NO: 234435 - DNA, 582 bp, Homo sapiens
actagatcctcccgtcctcttttgctcctggcccggctgacaccctggcatggcctctgagctctctctcacagacgcccttacctctcaccccggtttgggtctgaccctcctgccctgtgcctggatctgaggagctgaatgttgctggagaaagtgaccgctgcatgcgagattgtagccccagcctcccgtgggacgctgcccggatccttctctgtttctgcatttcctgctgtctttgtttcctgccaggttgacagcttcaccccatccttccttctcagacatgaaacacaccccctcccctaccccacacactgctgggggcttctgcccctccctcactgggtccaggatccttggaaaggtgtcacctggatctttccacccaaatcaccagagcctgcctgcacctttgcccacatcatcgcctttccctcctgcaacaaaggaagagctgttcctgctgcacccaagaccttctggcccatccacccagggctgggtcctgcccctgccctccccccagaggctctgctctccctcctgcrgtgtcactgtgccctctccactctgtcc

SEQ ID NO: 234436 - DNA, 607 bp, Homo sapiens
tactgtctcaattagtccatttaagaacactgatcttgtttttatgcagtctgacagaaaattagttttattttatctctgattggcctattgatctccagactcccccattccccccttttttaggagacttagagtgaaacaagttggttcagaagcttggctttaacttagtacaaaggcaggcccagtagtttgttttatccaagcttgcacacctaccttgaaaagccctctagttcaaagttatcctagccccatggtagataataaagcagagttgtgtggcatgataaacaagactggcstctgagatagtgctctcttaattattagttattataacagatgctaatgccacctgatcaacaaatactatttagaattaatttatcatctttaatcatctttatgtttttatttttaggttgatggtagactgacttacccaacctgtgggattggttatcctgtctcctctgcatttgcattccagaataccttccctcattcgatatctgccaaaaataccagccaccctggttcaggaacaaaggtagccaaattaactaatacttgttctgggaaaaaatatagcaacctatta

SEQ ID NO: 234437 - DNA, 485 bp, Homo sapiens
gctgcatgctgggagaaccactgctctcttcaaagctgtcagacagggacattttcatgtttagaatttttgtcaaatgtgggaagtctcttagaaaggttttctcatgtatgagctgtaatacttgaataaatgttcacagagtagcttttattggactgttaccccaatcctacatctcttatacctttcactttctcgtcatgttttagattatgttcataacacagtgtgacctagggtctggcttctgtgtgttgccacaccgggtaagtccacatagatgtctagtaataattttatatagaagtgattaggaaccatacaaatcacaccctactaagcccaaatyaaatgcatgtccaactcagtttccctttagctagatttcaaaaatgctgtagttagtccactgtcactcaaccccacaccacttatgatgaaggaatatttagagtggaaagagagaattatcctaattctgg

SEQ ID NO: 234438 - DNA, 548 bp, Homo sapiens
tgaaattgacagcattgtcctagatggatggcatgcttggatgacagcacctaaatcttacctagagattcaaggtgagaaggtttttgaacccttaaytcatgttcaccttgtaaagaaggatgatcatccttctactgtttatattaaaatgattagacttggtaatctttaaaaccacaacaaaagctggacttctttccaaagaaccagaacgctttacctctgactttgtcttctgctaattcccttcctggtcattctgctcaagccactctgacttccttgctaatcctcacacactgcaggcactctccccacttggggactctgccaaggcagatctctctacttttctcccaggtgttcctgtggctcaatcccacaccctcttctctgtctccttctcagtgaggcctactttggtcagcctatgtacaagcattctttttgcttcctatgatgctctacattttttcttttgtctatagcacttataactttataatctactagagaatttacttatttattatgtatattactta

SEQ ID NO: 234439 - DNA, 431 bp, Homo sapiens
taaaatgctaaagaaaaagagagagagataggcggatagarcacattccaacacaaaatcaatgctatattatacactttgaactgtttcttattaaatcagaaataactgagtcaaaagtaaaaaaacatgatggctatgacaaatggtgggtgataaataaaagtgatcttttctctgaagctgtttcacttcctcatgatagaatggcatgccccacatatatgtgtgtatatatctaaacttgtgctggatccactctctgctggttttcttctgatgtacctctattgcttctactcattgacttttctctgtttctagttaaaagcacaatattaactgagtcgtcttttatatataatataaaatcagtcattttggaattacgacctattagaaagctcagtactgtaaaatctaaataaaat

SEQ ID NO: 234440 - DNA, 405 bp, Homo sapiens
acacattccaacacaaaatcaatgctatattatacactttgaactgtttcttattaaatcagaaataactgagtcaaaagtaaaaaaacatgatggctatgacaaatggtgggtgataaataaaagtgatcttttctctgaagctgtttcacttcctcatgatasaatggcatgccccacatatatgtgtgtatatatctaaacttgtgctggatccactctctgctggttttcttctgatgtacctctattgcttctactcattgacttttctctgtttctagttaaaagcacaatattaactgagtcgtcttttatatataatataaaatcagtcattttggaattacgacctattagaaagctcagtactgtaaaatctaaataaaattaagcaataaactg

SEQ ID NO: 234441 - DNA, 622 bp, Homo sapiens
tagcttgtccaatctcttgagagaaatgagtccatcaatacagaaaatcagcaatgggaggcaagaagagattctttgaactaacacaggaaaaaagcacatctcaatatttatttagataaagggtgtagattgtcactgctgggaaatatttgctgggttacccatgttaacgatctgaataaatttagagttggcctacagtggtgctcaaattggctcatctccagacatgaatgaacatagagctgctctctttgcttttggtgtttcccyaattctctcatttttttttttttttaggagaaagaggagtagcttaactatgggttgaggaattttagctagatgccaaaattccatgccacatgctagagcctggcaagttactgaagatgtttatagctgctatttaggcccaaagagtcaattctggcctcagggatcacaggcttttctgggatggaattagtaagataattatggttattcctacgcagagggataggataaaacatgcctcccagaaagactggtcttgtgacacatagaggataaataagaagataataaaaattggaagaagggtaaagaaggggcagaaataacagagctggcagct

SEQ ID NO: 234442 - DNA, 631 bp, Homo sapiens
gctatccttagcctcttccaacttccaaaactttcttgagcagcaaatatgcactgtgcctttgacttttaaaatttgtgtgggtactagtcactggcttcttttgcaataagaatattaacaatgaatctcccctctctctctctacctccccctaccctgttcatattttttgagcctagttccatgtgcaacattcagtrttggatgatctggattcagtacagaaagcctggacttttgagcctaaacaggatctgaagcagaaggatgaaaaacagatcaaccaacaacaagaatcaaccatcttggtttctcatttgtcaataatgggcaatagtcctgcccacatatcagggaatgtatatgccataattaaatactaatgcttctatcttctctagagaatttgttcctttatgtgaaaaatattatttcttcttaataagcaatgtatgacaattgaggaggcataaaaattagagaaaaataaaaaggaaaatgtctgtagttgcacattatatcataagtaatctgcattttattgtttttgtgatactctagaaatggatatgttttagtaaacctaatttaactcattaatccatctggaatttcctttgtaatattt

SEQ ID NO: 234443 - DNA, 631 bp, Homo sapiens
gctatccttagcctcttccaacttccaaaactttcttgagcagcaaatatgcactgtgcctttgacttttaaaatttgtgtgggtactagtcactggcttcttttgcaataagaatattaacaatgaatctcccctctctctctctacctccccctaccctgttcatattttttgagcctagttccatgtgcaacattcagtattggatgatctggattcagtacagaaagcctggacttttgagcctaaacaggatctgaagcagaaggatgaaaaacagatcaaccaacaacaagaatcaaccatcttggtttctcatttgtcaataatgggcaatagtcctgcccacatatcagggaatgtatatgccataattaaatactaatgcttctatcttctctagagaatttgttcctttatgtgaaaaatattatttcttyttaataagcaatgtatgacaattgaggaggcataaaaattagagaaaaataaaaaggaaaatgtctgtagttgcacattatatcataagtaatctgcattttattgtttttgtgatactctagaaatggatatgttttagtaaacctaatttaactcattaatccatctggaatttcctttgtaatattt

SEQ ID NO: 234444 - DNA, 548 bp, Homo sapiens
aacaatttttatatagttaaggatgcaaatgatatctgtaaacactggactatcaaaattttgcttttattgccctgtatccactgcaaacttatttcaacatttcttccctggctatacgatcactatctcccaaaygctcttttaattagttttcttatcttctgatttcctcattagtgagttaaataacatgttgacaaatgatcactatattttcatgagagtcacatttaatacgccagagggtgttttttttacatgttttgtcaaaaagaactggatcagatatgcaatttacataccccttattctgaagtgccaggatgttgatgggtattgtccccatttggcagggggttgaggaggacaggacccaaagttaaaatttcaacatcctatgactctctttcttataaattaacattctcctattaatatctaaccaaatgtcaggtaagtaaattaaagaaaaaaacaagtagaacactgaacgtaaacgtcaatgttgagaaggaaatgtacatttggtttcttgctcaccagga

SEQ ID NO: 234445 - DNA, 592 bp, Homo sapiens
taatcagggttaaatgaggttataagggtaggaccctcatgatgctatgagtgtccttacaaaaagaaacaccaaagagcttgctccctctctttctccccatgatcacacaaasaagaggtcatgtgagcccacagtgggatggtggccacctacaagccaagagaagagggctgagaatgaaacctgcctttctggcaccttgatcttacacttcccagcctctagagctgtgagaaagaaatttacattttttaagccagaaaaaggactgggagacagaggttccaaaagaacctttgaaacagaaagaagaaaaaaattatccaaatatgttcatactgaaagaaattttgtaaatatctcaaactgattttttaatatctcaaactgataatttttaaatatctcaaattgctaatcattagtaccacaaatgtaaatattcatgtaccatcttctcactagaccacgtttctcaaccttggtactagcggcactttgggagaataagctttgtgtgtatggggttgtcctgtgcaatgtagggtgcatggcagcatccctggcctctacgcactagatactgttg

SEQ ID NO: 234446 - DNA, 631 bp, Homo sapiens
ttaaaaggaacaaactattgagtgacacaacaacataaatgaatctcaagtgcatttttaattgaaggaagccagtcccaaaatgctacacattgtattattccatttatgacattctggaaatggcaaaagggtgggaaacagatcagtgattaccaggggtagagaggggatgttgactacaaagaaaccatayaaggaatttttaggatattggaactgtactttatagtcctggggtggtggataaatggctctatgaacttgccaaaacccataaaactgtacaacacaaagagtgaacttcactatatacattttttaaatcaaccaggatattcagcagaacccagacatactgtaaattgtgacaaataaatttaactatttataaatgtatgacaaagctttattgaaaaaggtaagggaaaaggaaatttatctgtgaaacactggaaaactgtttgcatatggtaaagctacaagcaagaataactgtacatgaacactctactctggttgtttctcacaggggtacaggtaaacaattttgaaatgactttacatgtatactaggatggaacaaataaggaaatctaatgagatctgggtgttctactgtaagagaaag

SEQ ID NO: 234447 - DNA, 499 bp, Homo sapiens
ggaatttcgtccaggcctgtattttctgatttctgatttagaacagaggatgagcacgtgatcccgctgagaagtaggtgtgtttcttacaaaataattagagacttttcccacttgatcatctattcttccttgtgcttttctaacccccagccttgaccctggcaggaccctccctttagggtgccctcttttgcaacttttccccctctttctgtctctgattctcttcccacccctcargacttttgtcattcccttaaacagacagaaaattcccctcatgacgaggcccccttcttcgggcctaggcttggaccttgtacaaagtcacttctgcattgtatggaaacaaagcaagtcacaatggcagtccaggttcaaagggtagagaaagagactctcttggtgggaagaaaggcaaagtcccattgcacagaggtaaaggtatggaaaggcatgaagaattgtggccattttcccaaaaaatctgcctcac

SEQ ID NO: 234448 - DNA, 609 bp, Homo sapiens
caataataaccaccaggatttttagtgcagggagcgattgcaaatttgacttatgtgctgccgccaaaatcactatggcctaattactgctaaaaacagatgatgataaaagttaacayggccccagtgagtcattttgtcaggactcgcatttcagaaacagccattctagagggagagttgaggataaactctttcatagtggccacaaacgattgcagcggacaacctggaaaagcctgtgtctggttcccaggaatttagcgcaagataactattccatggtcacatggaagacttttattaataaagaagacctttccttagtcttttttattaataaacacatgcaactgccatatggaaataagatctgccgtcccagttcctcctaaaatagagcattcctaattggggttatttaacttccttcagaaatactcttcttaattatttgggttagtccagcccagggaagaaaaaggaatagaaccagcaacagggaggccttctctgaaacatgccacatagtcttccctaggtaagtagtaatggcctcctcatagattttttttttaaaaaaagggaattagagatatcctattaatc

SEQ ID NO: 234449 - DNA, 609 bp, Homo sapiens
caataataaccaccaggatttttagtgcagggagcgattgcaaatttgacttatgtgctgccgccaaaatcactatggcctaattactgctaaaaacagatgatgataaaagttaacacggccccagtgagtcattttgtcaggactcgcatttcagaaacagccattctagrgggagagttgaggataaactctttcatagtggccacaaacgattgcagcggacaacctggaaaagcctgtgtctggttcccaggaatttagcgcaagataactattccatggtcacatggaagacttttattaataaagaagacctttccttagtcttttttattaataaacacatgcaactgccatatggaaataagatctgccgtcccagttcctcctaaaatagagcattcctaattggggttatttaacttccttcagaaatactcttcttaattatttgggttagtccagcccagggaagaaaaaggaatagaaccagcaacagggaggccttctctgaaacatgccacatagtcttccctaggtaagtagtaatggcctcctcatagattttttttttaaaaaaagggaattagagatatcctattaatc

SEQ ID NO: 234450 - DNA, 609 bp, Homo sapiens
caataataaccaccaggatttttagtgcagggagcgattgcaaatttgacttatgtgctgccgccaaaatcactatggcctaattactgctaaaaacagatgatgataaaagttaacacggccccagtgagtcattttgtcaggactcgcatttcagaaacagccattctagagggagagttgaggataaactctttcatagtggccacaaacgattgcagcggacaasctggaaaagcctgtgtctggttcccaggaatttagcgcaagataactattccatggtcacatggaagacttttattaataaagaagacctttccttagtcttttttattaataaacacatgcaactgccatatggaaataagatctgccgtcccagttcctcctaaaatagagcattcctaattggggttatttaacttccttcagaaatactcttcttaattatttgggttagtccagcccagggaagaaaaaggaatagaaccagcaacagggaggccttctctgaaacatgccacatagtcttccctaggtaagtagtaatggcctcctcatagattttttttttaaaaaaagggaattagagatatcctattaatc

SEQ ID NO: 234451 - DNA, 614 bp, Homo sapiens
attcactaaatggcacttctgaatttactgcagccttcgcctttagagagaattgccaaggtgctcataaaaggagaaatgatgaatattcaggatgtcttttgaatccattaggcaaccgggatgaggtctccatatgtagacttctcgttctttccttaagctgttaaggaaactgccaaaatggccgtctgcaggataaaatggagcctgggtttgccaatggggagaaagtctaaacgccaaaggtcaagtctgtggaaataaaattggtttaggagcattttgcaagtgaagagatctataaattttggatttctggacatggtgaatgagggaatgtgtctgtctgcttgtaggaacactgatcaaaatgcagtagcagcctatttatcgtactgtcagcctttctttcccaggatcagataytctgcagatctaattgtgtccactccacacaggaaaatcccagacagtctctctagcggcctcctatagttttgtcaactaatcttaccagaagcagaagcatttgtgcatttaagactgcaaaatgtttattatcaagtctgcttacttaagtcctaagcacttgctcatgccaattatataga

SEQ ID NO: 234452 - DNA, 614 bp, Homo sapiens
attcactaaatggcacttctgaatttactgcagccttcgcctttagagagaattgccaaggtgctcataaaaggagaaatgatgaatattcaggatgtcttttgaatccattaggcaaccgggatgaggtctccatatgtagacttctcgttctttccttaagctgttaaggaaactgccaaaatggccgtctgcaggataaaatggagcctgggtttgccaatggggagaaagtctaaacgccaaaggtcaagtctgtggaaataaaattggtttaggagcattttgcaagtgaagagatctataaattttggatttctggacatggtgaatgagggaatgtgtctgtctgcttgtaggaacactgatcaaaatgcagtagcagcctatttatcgtactgtcagcctttctttcccaggatcagatattctgcagatctaattgtgtccactccacacaggaaaatcccagacagtctctctagcggcctcctatagttttgtcaactaatcttaccagaagcagaagcrtttgtgcatttaagactgcaaaatgtttattatcaagtctgcttacttaagtcctaagcacttgctcatgccaattatataga

SEQ ID NO: 234453 - DNA, 566 bp, Homo sapiens
ggctgagaggttaagtgactcattcaaggtcacccagctgagatgtgccagaattgatgagcctatgactgtaaaaatcctgaacctgtgtttttaactaggacatttttctgtcttagatgtgacagtctcctatgagatgagcttatgcagttctaagatgctggtgggatgagaagagaccttgaatgtgagggttaagctccaattagatatttgtgctgaagtttgtggaccagagaccttgtgatcctgcacttacctcagagataagctctctgttctytctgtccccagtgggaagagaaaagggggtgacaaaggggatggggatgactttagattgttaggtgaatgagccagtgcagccccagggcagagaaagcagagtgtaagaggaaggctagttaaggcagtgatactttatggcttactaatgaattccattttatagcccaactcccttaagttgtctcttcctgtgattaattcttgttctctttgtcccctttaagcagacggttgttgatagggagtgttcagtgttgaatgagtaaaatgtacta

SEQ ID NO: 234454 - DNA, 468 bp, Homo sapiens
taacaagggttgggggccgtggattatctctcagagatgaggcagagagagaccacctccccagagaaagtacagatggcatcaggtttgaagccttggcctcaacatgctcctgaggctcactaaatccttaagaggatgcataaagaagagactcacattgtgggttgacatttgcaggttgatcccaggattgagactctccagatttgagtgccaagtcccagatcagcacaggcatggctgcagccccaagtgtgatgagcagaggtgtggtcagccagcatggggcctggtacagaggctgggckgggactcaccctgtgtagggaagcccaatatacagaggccaagaacttgtattttctttgtatcctgtcagcaacctgtgcagtagcaaatacctaagaggtttacaagctatgtaggaaatatttggcaagaacagtgatctgttgtgacatggct

SEQ ID NO: 234455 - DNA, 594 bp, Homo sapiens
gagttttctcttctgatcttctcccccatcaaatttcccctattgtatgtttcattctgtcaggattaagttagacaattgaactaatcatgacatgctgagctaataataacagcacacattgattgtctgtttggtactagttcctgttctcaaaaatacaatggaataaaagacagcagtcttcattttacagatgaacaaactgagacttaaagaaggtaaggaactgccttgagtctaacccaagcagtaggttttcagttgggattcaagcccccgatcttccaatgactgttttaatactagccattctgtaaacaagaagttaatatactcccctccccagagctgtttacattttaaagtcaaagagaaaaaatactttaataccagaagaatgaaattaatccccactaatgggaatcagggaagactttcaaaaagccagggagasagaatttggggaagtcagtcttcctttatgtctttcagatcacagtcccctctcctcatgagtgcaatgaaagctctgcctgcttgggcaagggaacctcctatcctcctccaagctaaggttgtaaggatatgcaa

SEQ ID NO: 234456 - DNA, 557 bp, Homo sapiens
tcagcacatctaaggttggggaagcttctttaaaaggaaaggcttgtgttgggctgttactgcacccagaagaaaaacaggagagactaaatcactgaggggtcttggtgtggactttaatatggctggacagtctaggatccattcggcagcttgcaaagcacaactgtaatcacttctttaaagggtttttgtttacaccaagcaggctctcattacatgatggtgaaataatagcacagaatttaagtgctctgatgaaaaaaggtctttaaaagacattttttttttgtacggaatagtcatttccaggatgacttatagatttacagtgagttttttatatatgtgtataactttagaatgtgctgaaagaggcttgtaggccccttttagagaccttaaaagatgatactrggcatgtgaaaaatgactggcaggcaaacatgccttgcaaagcactgtgaaattatttgtcatcagtgacaactattttgtttatgtcatgtcacacttgcctgccctagatacctccccactcctcttccttaccattc

SEQ ID NO: 234457 - DNA, 381 bp, Homo sapiens
gtgtgtgtgtgtgcttgatactttgaccacattccttaatttttctgagcctcagtttcctcatctcaaaaatgagaataattacaaagagtatttttcagggttcctatgaggctcaaattagtaaaataacatgaaacttcttttttactgctaaactgaccctacttgcaggggagaggggagcctttaaaagcttgattctaatctcacctgtcaaggttgacaaggycttggtgttatcaatattattttaaagacataaattgggaccagaagagctcattgaatttcctatattccttcaaccaatctagagtagcatgtgctaagaaatgaaagtggataatcagagccagtcctttaggcgacaagcattct

SEQ ID NO: 234458 - DNA, 553 bp, Homo sapiens
gaacaaaacagaatgtctagagacagacccatgcatgtgtggacattagtttatgaaaaaggaagcaagcactgaatacctgcaaggaaagaatgtttttttcaagatgcagatattaaaaataactgaatctagacatgtatttcacaccataggcaaaaatcaatttcatgtggaatatagactttaatgtgaatggtgaatcaataaaagaaaacaacatagtatctacaagtaggcaaagattacttaaacaggacacaaaaatcatgaatcataaaggaaaagaccaataaagtgggttctatattaaaattaagacttctgtttaccaaaagtcaycagcctaatgaagattactacctcaaggagatgtcaacatacacctatcacaatgattacaatgaaaaagactaataattcccagggatggcaaggatgggaagcagatggactatcatacactgctggggctataaatcagtaaactctttgaaaaagtatctgtggtatctattagagctgaacatatgcacattcaaaataactcagc

SEQ ID NO: 234459 - DNA, 566 bp, Homo sapiens
cgttggcctcgaacaggtccatggggttcrtgtcgtatccaaccatggccttgatgaagttggagagattttctagctggtgccagttctgcatgagccgttgatcttggggactgagcccagcttgttcatgagtgtgcataagacaatcccttccttcagactcttctggaagtcggggctgaaagagaggcgggtgagtccctcgatccagctgcagagcgccgcctgcttctgagggtcgcatttgaacaggagctggttcttgatctcggcaaaaagctggtaagaaggccccttgttgaactgcgtggaactcatggctgatgggaagggacagggtaagagggacccattagcattttaaaatctaattgaattacagcgccaattccagaaactctagaaccaattcagaaaacatattctcagaaaaaacattcttaaatttcttcctctggaatcattcttagtaccaaaatctatactggtttgagttctccagagaaatagaactaaaggaaatatctacatatctatatatttattgatatataaagttgttt

SEQ ID NO: 234460 - DNA, 566 bp, Homo sapiens
cgttggcctcgaacaggtccatggggttcgtgtcgtatccaaccatggccttgatgaagttggagagattttctagctggtgccagttctgcatgagccgttgatcttggggactgagcccagcttgttcatgagtgtgcataagacaatcccttccttcagactcttctggaagtcggggctgaaagagaggcgggtgagtccctcgatccagctgcagagcgccgcctgcttctgagggtcgcatttgaacaggagctggttcttgatctcggcaaaaagctggtaagaaggccccttgttgaactgcgtggaactcatggctgatgggaagggacagggtaagakggacccattagcattttaaaatctaattgaattacagcgccaattccagaaactctagaaccaattcagaaaacatattctcagaaaaaacattcttaaatttcttcctctggaatcattcttagtaccaaaatctatactggtttgagttctccagagaaatagaactaaaggaaatatctacatatctatatatttattgatatataaagttgttt

SEQ ID NO: 234461 - DNA, 383 bp, Homo sapiens
ccctcttttttttaatccccactgtaccatgtaaacagttctgtccaatgctgtaatactgcagatattacaattcttagaatgcaaagatttttcttgtacactcatcagttaaacaccagggaaatcctttaagggcaaacacttttaattgtaatagccactgcaagtcatgatcccatcaaagacataggatttctgcttcccatcggtttctaccacaacatcccactggccagaggatgaaaaatctgggtgcttcctcactctgcacaccttygactgggaataaagaaacaaagacagccttggtttcagagtattgttctcagtcttccactttttttccccccaattctgtgtcttaacaaataaaataggcg

SEQ ID NO: 234462 - DNA, 540 bp, Homo sapiens
aaataaaataggcggtgccttttatattcagagtttctagatctttaggaattttgttcacataaatgtcctaaaatgatcctttccagacatcaaggtaccttagagaaaaaaacacattaatttttccctataacttatattctctatttaataaaattaattgaaaactagattttaggttcaaataatgagacaatgcttttcctctgctgggaaaactaatattagattcactaatcttgagactaatagaagacatgctatttttctctgaattgtaatggaaaatgcaaattgaaaatacgccttagctttctctggcttacacaagctttgccttcaacaatctgtaggtgatgagcatacttttcattccttaccagaaactggatgtgcttcatgaggtgaaagtgcctggtgtacatcctgagatactccatcattttggaattgtgcaaatagttgggataaygatcagggaaagggtagtcgctgaaggctgtcgtctcctttgaagcgttgaagatcatagatttg

SEQ ID NO: 234463 - DNA, 561 bp, Homo sapiens
cttttgtttatatctgggcccccagccaattcgatgctgcccacccacattgagggtgaagcttctccactgggtccactgactcataggccaatmttctatggaaacatctccacagacacttccagaagtaatgctttcccggttctctacatattccttaatccagtcaaggtgacacctaaaattaactatcacaccttattaggagaaatttgtgaaattaaggatccacataatcatcatggactacacactgtttcattagttctgggtgtagcagtagactctagtagaaagtatgttagacattcactttctgccaatatacagcagctcagtgtaaaggtgatgaaggaatattgtctggactaggtggataaaagttttcagtgcccttggtccacagtcacctaagagggctgtttcaaaatgttttatttttatccttaacagagatgtataaaatcagcaatcaaaagatgcgattctgtccacttaaaggtctttcatgggtgaaggttttatacagtatttaaatctcatcttgatctttgaatt

SEQ ID NO: 234464 - DNA, 561 bp, Homo sapiens
cttttgtttatatctgggcccccagccaattcgatgctgcccacccacattgagggtgaagcttctccactgggtccactgactcataggccaatattctatggaaacatctccacagacacttccagaagtaatgctttcccggttctctacatattccttaatccagtcaaggtgacacctaaaattaactatcacaccttattaggagaaatttgtgaaattarggatccacataatcatcatggactacacactgtttcattagttctgggtgtagcagtagactctagtagaaagtatgttagacattcactttctgccaatatacagcagctcagtgtaaaggtgatgaaggaatattgtctggactaggtggataaaagttttcagtgcccttggtccacagtcacctaagagggctgtttcaaaatgttttatttttatccttaacagagatgtataaaatcagcaatcaaaagatgcgattctgtccacttaaaggtctttcatgggtgaaggttttatacagtatttaaatctcatcttgatctttgaatt

SEQ ID NO: 234465 - DNA, 517 bp, Homo sapiens
actagagagaatcccagaattcaggaaatgaaaaattgagaaaaaaawttctcactcatgactgaaaaagataaaattgaggtaaactttgagtaacaaaggccagatagaattcaggcttgcaacaaggatgagatcaaacatacatccatcatatccactggggtagagggaaaaataaggaggctcctcagaaaggcaattggagaggtcagtgattccattatctggtctcctggaattactctggttcctgcttttctttaaccagaccctctgtgttctttttcatcctgtaagctaaccaatagctttccaattaatatccccatataaatcagccaacaagagtcagattcaattacttgcccccataaaacccaaaacaaacccaaacaaacaaagaaatctcctgaaagatacctcagaagtaatgcacagacaagtgtataggtgcaagattggaacttgaagggttcaaatttgaatttgcagtgcaatctatttattaaacatt

SEQ ID NO: 234466 - DNA, 517 bp, Homo sapiens
actagagagaatcccagaattcaggaaatgaaaaattgagaaaaaaatttctcactcatgactgaaaaagataaaattgaggtaaactttgagtaacaaaggccagatagaattcaggcttgcaacaaggatgagatcaaacatacatccatcatatccactggggtagagggaaaaataaggaggctcctcagaaaggcaattggagaggtcagtgattccattatctggtctcctggaattactctggttcctgcttttcyttaaccagaccctctgtgttctttttcatcctgtaagctaaccaatagctttccaattaatatccccatataaatcagccaacaagagtcagattcaattacttgcccccataaaacccaaaacaaacccaaacaaacaaagaaatctcctgaaagatacctcagaagtaatgcacagacaagtgtataggtgcaagattggaacttgaagggttcaaatttgaatttgcagtgcaatctatttattaaacatt

SEQ ID NO: 234467 - DNA, 632 bp, Homo sapiens
aaatatctggagggaggaatgggagttcagacttttctgtcaattctaaagatttccaagtacttgtgacaggcaatacaatgtgtttattaaaattttatatccttttcatcttcctgggcacacaggaagattatatttcctagggattgttgttttgttytgttttgctcttaaattgtggccatgtgactaggtttggaccaactggatatgtacagaagtgatgcaagtactccatgcctgagcatgacaacccctcatcttatctattctctccctacctcttccatctatctcagcaatggaagccattagtttaagatggaagtgatacccttcagaagaagcttgggtccttgagtcattgcttggtgcatgccatcagggagggcatcttgaataacattagactatgatatgagagaaaaacaaacctttgttgtgttagagcattgagatttggggattttattgcagcaaggcatctcctatcctgatcagtatagcactacatgaatagcataaacttttcttccttaaggtcttgctaggctttcttgtttgttcttggctttcctagaactgtgggatattctggctgcatataaaaataacctacagaactgata

SEQ ID NO: 234468 - DNA, 582 bp, Homo sapiens
ttggtctgtcttccttttaaaaatgtctactcatataccttacccacttttacttggaattgtttytgttgttgagttccttgtatattgtggatattagttccctgtcagatcaatagtttgtgaatattttcttccattctcaggttggtttttttactctgttgattatttcttttgctgcgcagaagcttttcagtttaataaaatctcatttgtctattttcgttttttgcatatgcttttgaggtcttagtcctaaattctttgcctaggccaatgtccagaaaagtttttcctaggatttttttctgatatttttcatagttggagtttttgttttgttttgctttgttttcttgagatagtgtctctctctgttacccaggctggagtgcagtgggggtgatcgtaactcactgcaactttgaattcctgggctcaagtggccctttacctcagcctcccaagtaactaggactacaggcatgcactaacacaccttgctagctttttttttttttagaaacaggtctatgtcgcccaggctggtctcaaactcctggcctcaagtgatcctct

SEQ ID NO: 234469 - DNA, 516 bp, Homo sapiens
taaaagaaaaaaatacaaacatttacattttataaagggtagaataattcctttaaaataagacccatacaataaatcacacagytatcaaaaataaatcttacagctattaaaaatgtgatattgaagaggaaaaagtggaagataggctagtgaaaattccttgggtttcctttgaggggaagaaggtgcaaagataaattgagaaataaaagctagagtagaaacaaataacaatggtggagaatcaaaaaacaatgcaacaattacattgtgaacccaccaaggtataaaacatttacctttgtgaacaataaattaatatgtaaagaagaagacgttatgatttaacaaaagtagaataacaaataaacttttaacattgtacattattatttccaagtctagtctctcctttgaatagaatttatggctcattgcacattaaatgacactgaaatggcttaggaaatctttgaatgtgtgtgagttttgccttactacaaacaagagcag

SEQ ID NO: 234470 - DNA, 520 bp, Homo sapiens
tatgatggggtctaaaagaaaaaaatacaaacatttacattttataaagggtagaataattcctttaaaataagacccatacaataaatcacacagttatcaaaaataaatcttacagctattaaaaatgtgatattgaagaggaaaaagtggargataggctagtgaaaattccttgggtttcctttgaggggaagaaggtgcaaagataaattgagaaataaaagctagagtagaaacaaataacaatggtggagaatcaaaaaacaatgcaacaattacattgtgaacccaccaaggtataaaacatttacctttgtgaacaataaattaatatgtaaagaagaagacgttatgatttaacaaaagtagaataacaaataaacttttaacattgtacattattatttccaagtctagtctctcctttgaatagaatttatggctcattgcacattaaatgacactgaaatggcttaggaaatctttgaatgtgtgtgagttttgccttactacaaac

SEQ ID NO: 234471 - DNA, 569 bp, Homo sapiens
tagttggagatctttctaacttttcgatatgggcatttagtgctatgaatttccctctcaacactgccttatctgtgttccagatattctggtatgttttatctttgttctcattagtttcaaagaacttcttgacttctgccttaatttcattatttacccaaaagtcgtgcatgagcatgttgtttatatttccatgtaattgtatggttttgagcaattttcttagccttcacttctatttttattgtgctgtggtctgagagtgtgtttggtatgattccagttcttttgtatttgctgaggattgttttatgtccaattatgtgatcaattttagagtatgtgccatgtggtgatgagaataatgtatattctattgttttcggatggagagttatgtagaggtctattagatcygtttggtcctatgttgagttcaggtcctgaatatctttgttaattttctgcctcagtgatctgtctaatactgtcagtggagtgttgaattctcccactattactgcatgggagtcattgtctctttgtatgtctctaagaagttgctt

SEQ ID NO: 234472 - DNA, 507 bp, Homo sapiens
cttatgatagttaagtcttcttgttggattgtactctttatcattatgtaatgcctttctttgtcctttttaatttttattgrtttaaaatctgatttatctgatataagaatagtgactcctgcttgcttttgtttttcatttacatggtgtatatctcttcattcctttactttaagtctgtgggctgagattatatgtgtgtggcattgcatgtgagatgggtctcttgaaaacaacagaaggttgcatcttatatttttatccagcttgctactttatgccttttaagtgtggtgcttagcccatttatatttagggctagtattgatatgtgagattttaatcctgtcatcattacgttagctggttgttatatagacttgattgtgtgattgctttatagtgtccttggggtgtgtgcttaagtgtgtttttgtgctagcaggtgctgtcctttcaatcccatgtttagcactccctgaaggacctcttgtaaggctggtc

SEQ ID NO: 234473 - DNA, 402 bp, Homo sapiens
aaccacagatccctgcctggcactcccaagctatgctctggggcaagttcargttttttgttacctcaccagcttggggatagcaggagtgggacccacagtggtggtgatggcagagggctgtcaaatgcctttgggggctctactccagagaaacaaagaggcacaaccaattggaatgataagctgggcgtcgagcaacagcactgcaggcccaagctggccctgcttggtgaaaagcagagcaggggtcagggggagggctgtgaggaagacatctggcctgctctccacaggtcagctgtggcttgttggaggtgcaagcaaagcaatcaggctctttattccctctccagcccagggaagcaagggttggtaccacaatggtggcaatggcagaag

SEQ ID NO: 234474 - DNA, 402 bp, Homo sapiens
aaccacagatccctgcctggcactcccaagctatgctctggggcaagttcaggttttttgttacctcaccagcttggggatagcaggagtgggacccacagtggtggtgatggcagagggctgtcaaatgcctttgggggctctactccagagaaacaaagaggcacaaccaattggaatgataagctgggcgtcgagcaacagcactgcaggcccaagctggccctgcttggtgaaaagcagagcaggggkcagggggagggctgtgaggaagacatctggcctgctctccacaggtcagctgtggcttgttggaggtgcaagcaaagcaatcaggctctttattccctctccagcccagggaagcaagggttggtaccacaatggtggcaatggcagaag

SEQ ID NO: 234475 - DNA, 532 bp, Homo sapiens
atcaattggttctattattatcaaatgttaatttggtaactaggttggtatgatatctacaaagattccccactgtagagttaccatttctctctttgtaattggtaagtattttgtggagaaatactttgaagcaatacatttgctttgtgaatatatcattctttattgtattttcattagttgcctttgattcttgcctgaataaattattagtatggtggttgggaattagtgaattttgaatactattaatgcttctatatttatacataagcgtttgaaggtaaagagtaaatgagatttttaatgtgatttttaacttgtctattgacaatttaaaaatatatataattttaatataataaacttttaatttttgacctttgtgatggttagttttaggtgtcaacttgactggattaaagaatacctrgagaactggcaaagcattatttttggtgcacatgtaagggcgtctctcaaggagattgattagtgagttggggtttgagtggggaagatctgttct

SEQ ID NO: 234476 - DNA, 522 bp, Homo sapiens
agacatttccattggttacttgrtgtatgccctacgtaaataaagaggatatttcctgtcatagctgatgtgtttccatttgatttcattctaggaagtctttaggttccctgtctccaggccctattcgccttccttttttcccccctgaaagatgtgatctccataaatctttatgggaggtggcaggtctgatgctctttcttctgtaactgcttcatgctggcttggagcatagtccctacctattggggatcacagaactctcgccatgctctgtctagtggaggcagtgtactccttgatggccaggggtggtgtcttcacctggaactggctggtacccttgtcgcatgatcatgtgaagcttgatggtgcgataagatgaatttggttaaaagatttaatggaatttcagcgggtggatacctatgctgtcaggaatgtttgttatagagatttgcaggagaaaaacaaaacctgttctgttctaggatctatgtgtttccttaaagtcttagc

SEQ ID NO: 234477 - DNA, 456 bp, Homo sapiens
aactttataggcaaatctttccagtcttaatcagtttgaccacaaggtgagattctcataaatcttttataaccctttgcaaatttttgttaaagagcacatcaatgctttaagaaaaccctgtttgtgcttttatttcgatgtttaatttatggaaaaaccrgaaaatacccctttaaatttagccaatatgttcacacacagaattttttatgagattttattttttttacaaaccttctacagtttgttcaaacctttagctttatcctaacttaaaacaatgctttaaccatttgggctaaaaaaatccatattcccatgtcttcttataaccttttaccaaaaacgcatttcactatgcttacacactgttcatgtaaaactgtttcttcagtagtctcaattaaatgttacaatgttaactcttagcaacttttactttgggtgaaaacc

SEQ ID NO: 234478 - DNA, 578 bp, Homo sapiens
agcctagggcccagagagaagttcagataaggtctatctctttccagcatctaattccatgtgtcctaggccttacttagctgtaaagcaggcaaggtggacagttaagagtcatagtggcattttatgaagcatttaggaggcctaatctcctttaaattgtacaacatttcttgcataaattctcttttataaatgatttcacaacttacacagaccatctataacatgcttggactttctggctgtcctaaacatctcccatttgaaacatccagttattttactttaggacragaatttaccgtacaagatctttcttatataaaatattttttctttataaccttctttgcatagctagggggcatggctaatttcacatgtcccctggtcttatctagaatcaattgctccaaaataaactgaacaatttttaaaagtcaaagaagtagtatatgaacttaaagcatttaacaaacctaatatctgacctgcataatttagaccaaatgtttgtattttgaagatatttttattttaccaataatctttaacactgtctttatttcccaaag

SEQ ID NO: 234479 - DNA, 496 bp, Homo sapiens
atattaaatgagcatcagaaataattttaagattttaatttacacaaaaagtttgcctacaatatttgttccattcactgtactcaattctttcactttaaacaatttatctagattacttctgtaaactgagacattagacactataattkaaagttagttatttccttgttaaccatgtttttaatagccagtgaacatcaggtgctcacctaaacctaagtaacagtctcaaagttaaatacataggtaattttgccagtaactcagaagatttagctaacattaaattattcttatttgtcaaaaagaggcatgcaaaccaagatcattttgttttgtctgggtttgtagttttataaccttctatgccaaaccgtgacatcttaaaatatctagtagagacaaacataaaatccagacaaaaatgtgtgctgacaattctgaaagcatttccatttttattttaccaatcatttttaaaatcagcttgttt

SEQ ID NO: 234480 - DNA, 356 bp, Homo sapiens
aagcacgggggctcaagagtgccattactgaattttctggggtttaaataccctgtagaggtttctattggttacttggtgtatgctctatgtaaatgaagggtatatttcctgagaattacaactaaagttgaattctcagctttgtgagatgtctactgttaaaatgaaagcatttgtagaaaaaaatgggatccttattggttttatgttacatgtatgtctttttttgagaagtgtctgttcatgtcatttatccattttttaaatggagttattygttttctgcttgttaatctatttaagttccttatagattctggatattagaccattgtcagatgcagaatttgcaa

SEQ ID NO: 234481 - DNA, 380 bp, Homo sapiens
taatatttcattgttaactgagtggaatgtttgtacamtatttattaggtttgttcctacgtattgaagtttgtgatgctaattgcaaatggtttcatttattattttcattttaattatacattattggaatattaaattacatttgaatttcatatattgatcctttattcagcccacttcaaaagttcaattactgattctaattgttcttttgaaagattaattaaaattttttatacaaaatcatgagtctacaaaaaatgagaatttaacttcttcttttgtatccttatgtttttcatttcttattcttgcattgttgaattggataggagttagagtggcattttcaatagagtttgtgagaagggagatac

SEQ ID NO: 234482 - DNA, 380 bp, Homo sapiens
taatatttcattgttaactgagtggaatgtttgtacaatatttattaggtttgttcctacgtattgaagtttgtgatgctaattgcaaatggtttcatttattattttcattttaattatacattattggaatattaaattacatttgaatttcatatattgatcctttattcagcccacttcaaaagttcaattactgattctaattgttcttttgaaagattaattaaaattttttatacaaaatcatgagtctacaaaaaatgagaatttaacttcttcttttgtatcyttatgtttttcatttcttattcttgcattgttgaattggataggagttagagtggcattttcaatagagtttgtgagaagggagatac

SEQ ID NO: 234483 - DNA, 610 bp, Homo sapiens
tattcctgcatggcatcagttcaaatcatttgtccattaaataaatatttaaaatatagtaaacataatagctgtgttaataaataaaatgtatacgaggcactacataaagatgcctagaaaaaatcttacctatgtattgaaccaacaatcaatgatagaacacagaaacacacaaaaaatggaacttagtatttggagccacatttatcgtggagccctttgcctattctgaaagacgactgagagtttgcagagggctctgacagcctccatgtctagggaaacaaaagttcctttctgatattggaatgctaagatacagacattaatataaatataattctgtttcagtttaacttcaagaaggtaaaagaatattcacaattttagctcaaaactggaaaatataaagaatatataatagatttgaaaaaaaaggtatagatttgtagtggaaatagcctgcaatacaaatttgaaaattaacaaactaaaaggttcttcttaattcaatacaaataatrcaacaagagcaaaccagtgaaaacttccgaagacaaagtaagaaacagtagatagtgagactaatataaccatattctgagag

SEQ ID NO: 234484 - DNA, 564 bp, Homo sapiens
tagttttattcttctgcacatggatatccaattttcccagaaacatttcttgaatagactatctttccccaatgtatgctcttggaacctttgtcaaaaatgagttcaccttaggtgtatggatttgtctctgacttctcygttctgttccattgtctgtctgtttttatgccagtaccacactgttttgattactataactctgtagtataatttaaagttaggcaatgtgattcttccagttttgttcctctttacttagaatagctctggctattctgagtcttttgcactttcatataaattttatggggtttttttccatttctgtgacgaatgtcatggtattttgatagagattgcattgaatctgtagattgctgtgggtagatggacattttaacaatatctatttttcaatccatgaacctggaatatttttccttttcttatcttcttaaatttctttcatcagtgttttatagcttaagtcatgaagatctctcacttacttggttaagttaatttctagatatttaattttatgtatgcctattgtaaatg

SEQ ID NO: 234485 - DNA, 512 bp, Homo sapiens
gaattcacaaggtgccaatgctgtggtgtgaaattgaagtatgcaactctgcccccaggaatttagcagcctggagttgaactttgataaaaatgaatggattacttctccccaatgggaaaagctgaacgacctggtgtgcaaggcwttagatggtgaatcagaagtcatagccttgtcactttcttgctgtgtgaccttgggcaaatcaattaacttctctgtgcctcgggttctccatctgtataatgaggactgtgatacctaccttaaaagtaagggaaaaggattaatgagcaatgtctgcaaaacacattaagctccacggaagagaggtgctctataattacaagccattattactgaatgtaaaagacagtaaaaggaaaccattattttatcttcttcagtaggagttatttcaactaacgcaggatttggtagaatcttaaagccaagtggcttatttaaaatgctttaatttttcaagaatttctcttaattatataaaa

SEQ ID NO: 234486 - DNA, 633 bp, Homo sapiens
catttttaattttccaagtgtctatcaccttgttaatcaatcatacaggtggctgtcactactgcccaagaagctgtaaaaacccacacaccactcagtacagttttgccataaaacaaaatgtactactgcaagtaattcagccgcttgtactactcttctgctttttccatgacttttttccttcactagatgaattgctaaaatcccaaattttctgagaagttctacacaccctgccatataccatgcttccagcattgtttcatcaagatgagagttatatggtcaggttattctgcaattggatatgggagattgaaggggtccttgggttggttgaagatgaggtaaatggtagccaaatcatgtgattttcctcctgaggcactgcttcagtatgtctgtrtgtatacagtagacatgcacacacacacacacacacacacacacacacacacacacacacacacacacacacttttacttgataaattaactgttggaagcctcttccttagactagccattattttcatcataggctcagagtgtcctttttctgaaattttctaaccttttgccatcttcaaatcccatgcaacataatttaaaaagcaaactccctactgt

SEQ ID NO: 234487 - DNA, 584 bp, Homo sapiens
tgtactctttgatttacattacctaatactccctggcccatcccccagccaaatcacagttctactttcagtttctttcacttttttaaaaaaaaagagttcaaatataagtgagattatgtagtatttttctttctatgtttggtttacatcacttagcataatcttcctgattcatcaatgtcacaaaaggtaggatttttttatttttcaaggttgaataatatttcastgtgtatatatatcacaatttctttattcaaatttctgtcaatagacacttaggttgtattcatatctgactattgtgattaataccgcagtgaacatggcgaggccagataccttgaggaactgcagatttcatctttttggggtatgtatgtacctagaagaggaattgatgcatcataggaacttctatttttaattttttaaggaacctccatactgttttccataatggttgcatcaatttggatttccaccaacagcatatgaaagttttcttttctccacaccctccttaacaattgttatctcctgtctttttcataagagccatactactagatgtgaggtaa

SEQ ID NO: 234488 - DNA, 525 bp, Homo sapiens
aactaccacatctattctaatgtttctctaaactgggtccaccctgcttatcaatccttatcacctaccaaatgtcccaatagtaccatttgatcatttttgtcctcactttacttatgaaaactctttactgatgctcatttggcaaaaaaaaaaaaaaaaatctatattaacacttgttctccayatgaagttgatccttataataacgtcttgcttttcctattttcacctggaaacatcatgcttccctacacaaacactaaattccaggtgtctagagatgataacataggaagcaatatattgtagtaattaagattcaaactctggagtagactgctcaactccaaattccatctccagcacttaaaagttatatgagctcaggcaagccttttaacttctgtgtcttcgtgtccatcattatctgtaagatggggataataatatctatttcatacagttgttataagaatcaaatgagcttctacatacatatacagtgcttagaggtggacatgg

SEQ ID NO: 234489 - DNA, 525 bp, Homo sapiens
aactaccacatctattctaatgtttctctaaactgggtccaccctgcttatcaatccttatcacctaccaaatgtcccaatagtaccatttgatcatttttgtcctcactttacttatgaaaactctttactgatgctcatttggcaaaaaaaaaaaaaaaaatctatattaacacttgttctccatatgaagttgatccttataataacrtcttgcttttcctattttcacctggaaacatcatgcttccctacacaaacactaaattccaggtgtctagagatgataacataggaagcaatatattgtagtaattaagattcaaactctggagtagactgctcaactccaaattccatctccagcacttaaaagttatatgagctcaggcaagccttttaacttctgtgtcttcgtgtccatcattatctgtaagatggggataataatatctatttcatacagttgttataagaatcaaatgagcttctacatacatatacagtgcttagaggtggacatgg

SEQ ID NO: 234490 - DNA, 554 bp, Homo sapiens
accaagaaaagaccagtctataaaaggtctactctcactcacagggcagagatcagactgtgtggagagggcacagctatgtatgtcagagaaacttactaaggtgccatgccagcaaaatgcactagaaagccactctctgtgatgccagaacaagtcatctactggacaactcatgccagcggaatttgttgggaagctgaccttcgcgatgccaggggaagccacccatggggaggcagtttcactaggaaattgcatatgagagttgctgctaaaactccttargagctgggtgccattgagtgtcccactagttcctgcatgctatagaagcaagccacaaagggcacactagactcagcaagaaacacccctcctccagggtccttctagtctctctactgacaaagtttaacagtaactggcaagggaaaaacttccagtatcacaaacgggacaatgaaagatgtgtttagagctgaaatgaaaaaagataactggtacccatattttacagatctaaaatataacttgctcaagagtacaaaggt

SEQ ID NO: 234491 - DNA, 456 bp, Homo sapiens
ctaaggtgccatgccagcaaaatgcactagaaagccactctctgtgatgccagaacaagtcatctactggacaactcatgccagcggaatttgttgggaagctgaccttcgcgatgccaggggaagccacccatggggaggcagtttcactaggaaattgcatatgagagttgctgctaaaactccttaggagctgggtgccattgagtgtcccactagttcctgcatgctatagaagcaagccacaaagggcacactagactcagcaagaaacacccctcctccagggtccttctagtctctctactgacaaagtttaacagtaactggcaagggaaaaacttccagtatcacaaacrggacaatgaaagatgtgtttagagctgaaatgaaaaaagataactggtacccatattttacagatctaaaatataacttgctcaagagtacaaaggt

SEQ ID NO: 234492 - DNA, 203 bp, Homo sapiens
atgttttctctctttggcttcatatacttgagtcccagaaggcaaaattacyaaccctattttgatcaaccctgtaactagttaggatttactgtttgagcacacttagcgctcatgagtctggaaatcccagttccagtgcccctcatggcaccagcaactttaaccatgtattttataagtttatgtgattggtcagaaac

SEQ ID NO: 234493 - DNA, 617 bp, Homo sapiens
aggctatgctgctgaacactgtaacttaaccttccttgggtaccttatagataacctttttaagtcaccatggtaacaatcacttaagttgttctttaggagcttaggggtagctcccatccaggtcaaactggttgagaccactgacccttcaactggggctgtggaaatacctgagtggtggccttttgacctcacagacacaaatacttcaccctgtcatcatgctaatgctgccattctctgaaaaatacatcccatgaaatgccatgaacacgatgtttgtatagataactgattagttcatttttcccactgccagtcacctttctctatgtcttagaccaccccacttctgtaacccataaatatccctaagccctatctttaggaaggtggatttgaaacctgttctcctgcctccttgcttggctgcctcatgaataatccctacctcttttgcaaactctgtcatctcagtgattggcttgctatgcgtgggaagaatgaaccaggttcaataaggcaactagtcaattggtaaaatgtgctttacttctcctttgctacaactaacatacacacacgcacwcacccctatgcaattttattggtct

SEQ ID NO: 234494 - DNA, 467 bp, Homo sapiens
cagtataatcttattttaaggtcagttgattagcaacctcaactctatctgcaaacttaattcacccttatacctatgtccatattcattttctggggattagaacatgaacatctttggggtgaggggctgtttttctgcctgccacagtcactgatttgtaaggaacctaggtgacttctatgctggctcagaagaagcaaattacacaatatcataaaagcatctgaacattcatgacactgaactaggaaatttatatttcattttttctcttaatactgagaatagagcgcctgaycacccaaagacctgagtgaaaggtaacaagtaaaaatggttcaaggtcaaaaagacactagattatcaacagtggaaccccgtaatctcagtttctcaaaatgcctctctgcctgtagcctgatctctcactccacttttgctaagcagccctgtgcttctgcaca

SEQ ID NO: 234495 - DNA, 467 bp, Homo sapiens
cagtataatcttattttaaggtcagttgattagcaacctcaactctatctgcaaacttaattcacccttatacctatgtccatattcattttctggggattagaacatgaacatctttggggtgaggggctgtttttctgcctgccacagtcactgatttgtaaggaacctaggtgacttctatgctggctcagaagaagcaaattacacaatatcataaaagcatctgaacattcatgacactgaactaggaaatttatatttcattttttctcttaatactgagaatagagcgcctgaccacccaaagacctgagtgaaaggtaacaagtaaaaatggttcaaggtcaaaaagacactagattatcaacagtggaaccccgtaatctcagtttctcaaaatgcctctctgcctgtagcctgatctctcactccrcttttgctaagcagccctgtgcttctgcaca

SEQ ID NO: 234496 - DNA, 409 bp, Homo sapiens
tgaataactaaggaaacctatgaacttcagcttaataaaagtctagcacaggggtgcccaatcttttgacttctttgggctacattggaagaagaagaattgtcttggaccacacataaacttaatactaatgatagctgatgagctaaaaaaaattcacacacaaaaaatcttataatgttttaagaaaatttaggaatttgtgttgggctgcattcaaagctgtcctgggctrcatgcagcttgcatgccacaggttggacaagcttggtctagaaggtttttctctgaaagcaattttcaaaaagcacgtgcccctttggtaagttctaaacaggaaatggggcagtacccctcaaattagcccattcacattattcatggaatagcaggaactgccactttccaa

SEQ ID NO: 234497 - DNA, 409 bp, Homo sapiens
tgaataactaaggaaacctatgaacttcagcttaataaaagtctagcacaggggtgcccaatcttttgacttctttgggctacattggaagaagaagaattgtcttggaccacacataaacttaatactaatgatagctgatgagctaaaaaaaattcacacacaaaaaatcttataatgttttaagaaaatttaggaatttgtgttgggctgcattcaaagctgtcctgggctacatgcagcttgcatgccacaggttggacaagcttggtctagaaggtttttctctgaaagcaattttcaaaaagcaygtgcccctttggtaagttctaaacaggaaatggggcagtacccctcaaattagcccattcacattattcatggaatagcaggaactgccactttccaa

SEQ ID NO: 234498 - DNA, 665 bp, Homo sapiens
cataattgccaaaacttggaggcaacaaagatgtcctacaataagttgatggacaactatggtacaccatacagtggaatattactcatagataaaaaggaatgagctaccaagtcatgaaaatacatggatacatattatatgtttatttttmattgaaagaagacagcatgaaaaaattatatcctttataattacatttctgtgtcaagacagaaccgtgcagatggtaaacagagcagtgtttggcagggttcaaagtacagtcgggttaacttggtgaagctaaggggattactttagagtgtgaaaattattctgtaggagcctgatgtggacacacggcatggtgaatttgtcaaaacacatagacctttacacacagagtgactattaatgtatgcaaatttaaaatatatatttagaagattggaggttctcagtacgacatggagagtgtgacaaaaggatcttactatgtatactattaaaatctcactaaagggaatcagtgctgacctaagcaactttggaaatcatttgtggttaataagggtattccctgtaaatgtatggctaaggagttctgaacccactgtacatgtacaccagaactgagtaaataaatggatcacagatggtgacagccatgttttgtgactgct

SEQ ID NO: 234499 - DNA, 563 bp, Homo sapiens
gattaactctttgaaattgacctacataagatagagccgaatgcctaaaacaagggtgcaactggccagggatggtggctcaygcctgtaatcccagcactttgggaggctgaggcagctgataaatggtcctaaaggagcagagaagatgtgagtcttcatcactcagagtgacaagggaggcagagagcatgtcaaaagaggggacagttgagccaggttttcctgcatgttcacaaaaagataatagttaataaatatgcaacaatgatccacaaaatggtagcaactcaattgacatgaactaccaaagacttcaagatagtagagataaaaatgtttcttaaagtctaggacagttgcgtatttatctttgcaacctccacaacaaccaggtcttccacatactagcagaacatcaattgactattacaaagatacacagtagctcctcccttcaatggtttcctctcatggccacctactgtcaaacacataggtatgaatcttgcaaccaccctactaaagtggactgtaactgatggtaatcatctcataatgtg

SEQ ID NO: 234500 - DNA, 563 bp, Homo sapiens
gattaactctttgaaattgacctacataagatagagccgaatgcctaaaacaagggtgcaactggccagggatggtggctcatgcctgtaatcccagcactttgggaggctgaggcagctgataaatggtcctaaaggagcagagaagatgtgagtcttcatcactcagagtgacaagggaggcagagagcatgtcaaaagaggggacagttgagccaggttttcctgcatgttcacaaaaagataatagttaataaatatgcaacaatgatccacaaaatggtagcaactcaattgacatgaactaccaaagacttcaagatagtagagataaaaatgtttcttaaagtctaggacagttgcgtatttatctttgcaacctccacaacaaccaggtcttccacatactagcagaacatcaattgactattacaaagatacacagtagctcctcccttcaatggtttcctctcatggccacmtactgtcaaacacataggtatgaatcttgcaaccaccctactaaagtggactgtaactgatggtaatcatctcataatgtg

SEQ ID NO: 234501 - DNA, 576 bp, Homo sapiens
ccactgcacccagccaggagtaaatatttttaataaatatctttactaaaaggtttcaatcaatgttctcattaagaatcacaatttatcattttgtaatccccactgatcaaggaagaatattgtctcattttacacatattgatcctatggagaaaaaaattacataaaagtgcaaattatctaaaatatgaaggttaggatcatattcttaggcgrccatggaatttgaaatttggggagttggcaaattctcctagtataagaacacagaaagaagagcagcgctgggcctgaccctagaaaatgttttcaatgaattattttctaaatgaaaagtgtacacagggtgatcatcaaaggggttcccatccaaaaaaaaaaagccagtgttatgatatcttgctaggaagaaaaagcaattggaatgtattgaatgagttctgtaacgttttaagggaaatgacaaaactattatctacaggagataagtgaattggggtttttcaccaaaaacttcttcccagctactttaattatttgaataacctttagtaaaatagaataagaaatcaa

SEQ ID NO: 234502 - DNA, 571 bp, Homo sapiens
tatctaccagccattacaagtaagcaccatctcctagattgcagcctaacatcaacaccaataatacttttctaacatagtcttctgtgaaaccaaggacaagagttcatctacaaataaaaatcctgcacaaacccaagaataaagccaactgactatactcaaaatacaccacagttaaagggatattagcccacacaatgagaaagcaccastgcaagaactctggcaactctaaaagccagtgtcttcttaactccaaatgactgcactagcaccccagcaatggttcttaaccagaatgaaatggctgaaatggcagacaaagaattaaaaatctggacaacaatgaagatcattgagattcaggagaaaagttgatacccattccaaagaatctaaggtatccaataaaatgattcgaaagatgaaagacaaaatagccattttaagaaggaaccagactgagctgatagagctggaaagctcactataagagtttgataacataatcagaattattaacaatagaagagttcaagctgaggaaagaatctcagagttggaaaac

SEQ ID NO: 234503 - DNA, 634 bp, Homo sapiens
  misc_feature (1)...(634): n = A,T,C or G
accttctaaataaatcctttccatgaagccgaatatactcactcactttacttccacgccttacacttcttgtgactctgttctgtaaatactttcatttctactactccaattaaaattttcttatgtaaaccaaaaaatctgttttgtaaaacccatacatcactgctaaggtctcattttaatctcagcatcatttaacacaatcgwtgactttattcatcttaaaaggtgtcctttacttgacttccacaatcctgtattttccttatttatcgctatttcattagtcacttattctaagtatactttattggatctctcttttattttttatgtcacaatgttcaagtcccctanaacttgttttgcggattttcaacatttattataatcattatcacatgaaaggtggtatatagtgatttagtgcatgtgatctgcaggcttgatgattcaagcttgattacttattagcaggtaaccctggacaagatatttaatctctctgaacatatttttaaaatttttttaagtgaagacagtaataatgtctacttcttagggttgctgtttgaaataagtgaataattttttaacaattattttaaaaaattagtaatagctagtatgg

SEQ ID NO: 234504 - DNA, 638 bp, Homo sapiens
ctgttggtttgcactgtatgctttttaaatcttgaagcatgaacactgtctgtgtgaggacaagttttttgatagagctaactctactgatgtttccctggaaatacagcataaaactgcttgtggcgagaggaaaagtagagaacaacctaatgactccaaatagtgtaaaaaatatgcaatgcatggattactacttttttcccacctgtactcaggtcatttaagtattatgaaggagaaattctttcattcattcaccaagtatttatgtgagattgtatgagctagttactgttctaggtacttgagatacatcagtgaataaaacaggcccaaatcactgcctggcaccttgggggatctgcaatcagccctccacaagtggtcacttttatygcctgccagaaacataactctcaatattcttgaaggactatatgaagtacttggaatcaatgcactagaaatcgtgagtgcataatttattggactaacatgatgataaaagtggattagctgaaagatgatattcagaaagacattttagctgaccacatttgatgtatgatacattatgtcaataagcaaaaatcaaaccatttttcaaagtacaacctaacagacattaaataatt

SEQ ID NO: 234505 - DNA, 638 bp, Homo sapiens
ctgttggtttgcactgtatgctttttaaatcttgaagcatgaacactgtctgtgtgaggacaagttttttgatagagctaactctactgatgtttccctggaaatacagcataaaactgcttgtggcgagaggaaaagtagagaacaacctaatgactccaaatagtgtaaaaaatatgcaatgcatggattactacttttttcccacctgtactcaggtcatttaagtattatgaaggagaaattctttcattcattcaccaagtatttatgtgagattgtatgagctagttactgttctaggtacttgagatacatcagtgaataaaacaggcccaaatcactgcctggcaccttgggggatctgcaatcagccctccacaagtggtcacttttattgcctgccagaaacataactctcaatattcttgaaggactatatgaagtacttggaatcaatgcactagaaatcgtgagtgcataatttattggactaacatgatgataaaagtggattagctgaaagatgatattcagaaagacattttagctgaccacatttgatgtatgatacattaygtcaataagcaaaaatcaaaccatttttcaaagtacaacctaacagacattaaataatt

SEQ ID NO: 234506 - DNA, 620 bp, Homo sapiens
cagcctccatactagctgggaccacaggggtgcacaaccatgcttggctaaattcttttttttttaatttttatttttagtagagatgggatcttattatgttgctcaagctggtctggaactcctgggctcaagcaatctactcacctttaactcccaaagtgctgggattacaagggtgagccaccatgcccagcatgtgatgtttttatatgtatacacatttttaaaatttcatattttcctagatggctacttttacattgttcatagattttttttttaaacttttattcagtaggaaacagattttctgtttaactgattgaatcttctttacttctgtttcttacctacctttctccatgatgggaacagtggtgaaagggaagtgttataatatttcattggtgctcaaggtttgagatggaaagcaacatgagaatgacttgcctstttatttttttcacgtttcctattcagagcataacaaaatcaaatcttaatagtaagtacttactttgcaccaaacagatcaatcttttccattagattgtcacatgagacatgaactcaactctaattgatttcaaagtcatgtggacaacagcccttataga

SEQ ID NO: 234507 - DNA, 538 bp, Homo sapiens
ttcaaccaacaactccatgttggtgatccttaaatatttatctttaactccagtagtttttttttaacacctttacctactttcattcactattgacattttccatttccatgttcaattgtaacctcaacgaatgctttcctttaccttcaaaaawtgggatcagaaatctagccacttccatcaatggcatttccaccttcctagttccacaatttaagttcattaatcaattttcacttctttagtctcaaattaatcatggaattgattcactgctacttataatacattctttataggaatttcagaaatcctgagaccttctggacagagaaagtgcttcactctaaaagaggtaacacactgtggtggtgataagcaggacttgcgaatgagaaagtttggttctccaacatgtaattgctacaaaaatataggtgtatttcttgttttctctgatcctctgtttttcataacaatattaatttgtttattttttccaataaatattgttagaatcttacaagtttcatca

SEQ ID NO: 234508 - DNA, 526 bp, Homo sapiens
  misc_feature (1)...(526): n = A,T,C or G
ttttttttaaaaacatcactgttttttttttganagctaacttgatagtaactttaaaacaccaatttgtcaaaagtgggtctttttaacaaaatgaattgaactcataaatgtccagcaaatgtattaaaaacaaaaaactagagtgagaaaatgaaaactactaatatcaagaaagaaataaaagacatgagcataaattccacagatgggaagaacataataggaaatatcaasgaaaaatttatgccaataaatttgacagctctgatgtaatggagaaacatcttgagaaaaaagtttgccaaaattcatataagcagaaataaatactctaaatattatatctaataaaaatgaagaaataatcaaacacctccacccacacacacaaaaaaacatatccaggaatcagatggcttaataagtgaattccatcatttatttctaggagaagtaatacaaatcataaggaagtttcttccaaagatagacaagaagcaatactttccaactcaattgatga

SEQ ID NO: 234509 - DNA, 602 bp, Homo sapiens
ctaattaacagtgttatacttaaatttttacaacaaaaaagacaaaaattattgtgttatcaaccaactcttctttaaaaaaaatcccaatgttgaagtctcttaaaaagtattttattcctataccatcattttctattttctcaygctaaatacactccactgaatccactagttgcttccattcttccaagatatttagatcttcctttgttgtttaaacatgaataaaattaagtggaaggttgtgtaatgtttcccattttatactaaataaattatgtatgtaaagtatatctcaacaatttaaaaaactgtatatcaagtgataagaactgtgtatcaaactatccatcaactattttttttcttcttaaaagattcaagacaggcaatatatacgcattaactcagtttctgtagcacactttcagtgattccacttcaccatatgtaaaatcacaacatgtaataccatctcaatcccacagtcttacagtaaattacaaatctactagattttttatcctgagttcaggaagattttgatggctcagaggtttatgttattattttctttagtaccagtgttacagctcttt

SEQ ID NO: 234510 - DNA, 635 bp, Homo sapiens
aagaaagaactgagcaggaatatccatctacattgtgtaacaaactctaaaggtatcaactttgttcttagtcattgctactattttattagctttaggtagacatttgcatagactcctattatgagaagattacaaagaagagtggaggttgtctgttctggtgcgagaaactgggaaggaatttatttaatacttagggactttagtacttagtccttcaaacaatcctctgaagaaatcctcacaaggaagtactttcaatgccactgcaaaattgagctcagtattcctgtatttrccttgtgtcttttgtctgagtatttcaaaatttcaaatgactttataaacctccacattataattcttccactggtactatgatataagggtgtgaatcttctaccttccctctatttttttttttaacaggaaagaaaagttttctttaaagaactcttactaggaatggccatcctgttcaaaaatagcttcactgacagcttcatgccttttcagaactgaacttaagctgtgtcttctccctttctctttaaaggctctgaaataattggaagaatatttttattatgccatccatctggaaaaggaaggttggaatactatgagaaggg

SEQ ID NO: 234511 - DNA, 434 bp, Homo sapiens
  misc_feature (1)...(434): n = A,T,C or G
gaaccttgtagtcttggaagctagaaacttctaacatttcaataaaatacagggccatattttctggctgatttagcatataagagtggtcaatcacaagagctcaagtttttttttatttctttcactgaaaaaagaggtttttttttattcaaaagcaacattatatggtttaataaggtttaacagattcagaaacatatgaatgaaactaataatgaaacaggatggatgggataatatgtctaatgaagaatatgtctaattctactaatatgcataatatgtataatctctcactattttggaaagtgtccagtgtaattaattagtttctatctgttcttctnncaaggtatatgcaaagaaaaaaaggaaatcgcagcaggcatgtaacttattccyttcttccttggggacacctaagtaaatgt

SEQ ID NO: 234512 - DNA, 564 bp, Homo sapiens
atggagggcaagtgatcaatgggactttagcacagatctgtctcacagtggatccagtggaagctgaactcatcctcttgtcatttccccagttygtgaatgtataatttaataaatatactcatcaactggcagaattttcacattggtttcctgacctgtggagtaaggaccattatggtagaagaggccaattagaagctactagaactgattctacctaggaaaattttaaaccaaaagcaatattacattctcagagagatttggaagattagtgacttcatcaaggacttgaaaaatgtagaggttgtgatttcaaccacatccttcaactcacctatttgtcctgttcagaaaacaggtggatctcagaaaataacagtggattatcataaatttaaatagatggtgattctaattgtagatactgtactaaataatgatttcattgcttgagcaaattaacgtatcccctggtaactggcatgcaaatattgatctggaagattgctttattttctgctttcctatagtgaagaagcagttttcttttagctggaa

SEQ ID NO: 234513 - DNA, 449 bp, Homo sapiens
gtcctgaggaaaatcagcattgtcttgcctggcacctgccccaagggaggccatcactgttacctcaggcagtgcagggttaatttcctcagcaaatgtggaagggctgatggcagcgtgggtcatagattgggaaggggatgttgccaccacttggagtggggaggctgtttcctccgcccaaaaagtctcatcagaatttaggagctcagtgcctccagcctcatcagsgtcctcccacatgtccccattttaagttgcatggtcccattcttttccaatcaatgtcctcactttaatagtggatacctggtgaggttgtgcatgcatcttttgttgcaggtcagccactcacaggataagagcttgtgtctgattttccacaatttcagctttttttctacagaagataagactctcacttagggcaaccttagaagatttgaggc

SEQ ID NO: 234514 - DNA, 581 bp, Homo sapiens
ggcaggaccaccacacagttggatgcaccctgagaacaggctctccctgacaactgccattgctgttaatgccacccaggcacaccacttggggtcctggggatttccccaccctgcctgccaaagcatgtgcccatgcataccattgggggatctgagaaccagccctctcagcctagagccgtgtttcagtgcccaaaaatgcctcccaggggccaggggattaccttgccccatcakttgccctgattaccaggggacctcacaataggcccagaaacctgtcagcagcaccaaagcatgacacccaaaggccgggggctcatcctgccccatttaccaccacaggcatctgtgcactcttcctgggtcctggaggatgaactcagctagccagttgtagccactactaacaccagtgcatgctacttgggagcctgtgggttgtttcaccactgtgacttttattgcccacatcatgtacactgtctggaggctcaaggacccacctacctgctggcaccatggccagcactcaagcaagccacctagaggcccaaggattagcctgcctggactca

SEQ ID NO: 234515 - DNA, 494 bp, Homo sapiens
actatatttcatcaacttttaactttgacctaaagtgtgaataccctatgataactagagaacaaaagtaatgatactttttggttggtatttgaatggtcattaattataagtagtatcactgcctccacacatgctcatgaaaactattcacatgattttctcattttacttccatgggttgaaattctgatgattacttggcatatccagaagttctattgcacatctatttttttctatttagcgtttcctttagaaatcaaaaaaaaggatatatcacttgaacatctgttgcctgaggagaaagttttattatcaagaagcgaatctcaaacsaagaaacttcaagctaaagtaacttcaagaaaaagtaagtaattatttataaatcttataaattgtttttattaaattcaggagaaatttgtttttggtttataaatatgccttcaaccatatgcttcttctgctaattatttccatcacactac

SEQ ID NO: 234516 - DNA, 600 bp, Homo sapiens
taaaacctttgtacttgtctatgggtgtgcctgaaagatcacacacaacattttaacttgaacccatactccttagaatacacgtatatatttatgtgtatatatctacttatacatacacacacatacacatgcatgagcacatatgcatgcatgtgtacatgaatacacatattttagaaatcatgagatctcttggacacctttaattttagtgtctmagggcttgttcttgatttccttcattttgtatgtatatatcctttcttttgtattttgaatcctttctctcgaagcaccaactgatttatgcagttgctctatcctataatactttgaaacttttacaaaattgcttagcatatactactacaaaaacaaacctactaaaagaatttcatgatttctttgcagtctgcccccaacactcttgcccaagactgagggtatgtttcaaatactgtatttattagttacatggattagtacttgtttttttgttccatatattaggttagtttcctttcagttttagttcccacttcttatccttattgaattaattttatttttagaatattgtgttcatgcattttgtat

SEQ ID NO: 234517 - DNA, 600 bp, Homo sapiens
taaaacctttgtacttgtctatgggtgtgcctgaaagatcacacacaacattttaacttgaacccatactccttagaatacacgtatatatttatgtgtatatatctacttatacatacacacacatacacatgcatgagcacatatgcatgcatgtgtacatgaatacacatattttagaaatcatgagatctcttggacacctttaattttagtgtctaagggcttgttcttgatttccttcattttgtatgtatatatcctttcttttgtattttgaatcctttctctcgaagcaccaactgatttatgcagttgctctmtcctataatactttgaaacttttacaaaattgcttagcatatactactacaaaaacaaacctactaaaagaatttcatgatttctttgcagtctgcccccaacactcttgcccaagactgagggtatgtttcaaatactgtatttattagttacatggattagtacttgtttttttgttccatatattaggttagtttcctttcagttttagttcccacttcttatccttattgaattaattttatttttagaatattgtgttcatgcattttgtat

SEQ ID NO: 234518 - DNA, 393 bp, Homo sapiens
gacaatatcaactatgggctataatgtggtccaaaaaactgtacatacagttacaaaaggaatgaaaaagatccctacaaactgacttggtgatatttctatgaaataatgtttagtggaaaaaaaccaaaagggagaatatctagtatactatcttttaggtaagamagaagaggaaataagaaaaatatggggagatatctatctttattaaataaacacagaaagataaaccagaaaacaaagtagtttgttaccaagtcactgcaaacactgcttgctgagtggcacccaataactattgttaactctaaatatgtccctggcatgaacagacagcctatgatgacacattgtttgagatttatattaaatttgaaagaataaagatct

SEQ ID NO: 234519 - DNA, 576 bp, Homo sapiens
agagcaaactaagtccacagttaataggaggaaggaaataatgaagatcagagcagaactaaatgcaatagagactagaaaaactctagaaatggtcaacaaaactaagagcttattctttgaaaggataaacaaaattggcaaaattttagctatacaaaaaagaaaattcaaataaatacaattataaatgagagatgagacattacaactgaccacagaaatacaaaaaattatgactattatgaacaattatacaccaaaaattgaataatctagaacaaatgtataaattcatagaaatatgtaacttaccaagactgcaatatatgtctttatgggcctggattatttcacttagcataatatcctccaggttcatcratgccgttgcaactgacagaacttctttatttaaggccacataatatttcgttgtgtatatatacagcacatttttatctattcatttgtcaaaggacactgatatggtttgtgtgtgtccccacccaaatctcatattgaattgtagtttccataatccccatgtgtcatgggagggacccagcaggaggt

SEQ ID NO: 234520 - DNA, 560 bp, Homo sapiens
aggtgctttccccctttgattggcacttctctctcctgctgccttgtgaagaagaatgtgtttgcttccccttctgccatgattgtaagtttcctgaggccacccagccatgcagaactgtgagtcaagtaaatctcttttctttataaattacccagtctcaggtatttcttcatagcaacataagaatggactaacacagacacttaagttgattccacatcttgtctactgtgaataatgctgcaataaacataggattgctgatatctctttgacatactaatttaatttcttttgactgtatgcccagaaatggaactgctggatctgatggtaattctrtttttaattttttgaggaactgccataataaatataaaacaataaaactactagaagaaaacgtagggaaaaatctccctgacattggtcttagcaatgatttttttaatacaaccccaaaagcaaaaatagaataagattgtatcaaactaaacagttcctgcacagaaaacaaaactatcaacagtatgaagagacaacctacagaatgggag

SEQ ID NO: 234521 - DNA, 543 bp, Homo sapiens
gaatcatatctaaagaattaaagtgtaataatatctcactgtgaaagaaaatcaatagcatgatataaatttcccgaagtaaccaaatagaaattctggagttgaaaaccacaataactgaaatggaaagatggaatcaaaggactattttaaaagacaaaaaaattagtgacattaaagacaaataagttgaaattacctagtcagagaaacataaagaaaaaggaatgaagcaaattaacagagcctcagaaattggtacaacaccatccaagtgtaccaacatayacataatgggcattccagaagaagaaaagaggaagagaagaaaaaacttttttaataaatagtgaatgaaaagttccaaaattttgttaaagcattaatcttcacatcaagaagttccataaattcaaaaataaactcatagaaatccacacatacatgtatcatagtcaaattgtgatatgaaattgttttctagaaattgcaacatttgtaatttgagatgggcttttgagtttaaaatttatattcaggtgt

SEQ ID NO: 234522 - DNA, 307 bp, Homo sapiens
atggaattcagaatcttgacggcaaagaagctcattgagatcacagagaaagttgaaaatcaatccaagaaagccaagcaatccactaaaacaaagagctgaacaacaaaattccctttttaagaagaaccaaactgaacttcctgagctgaaaagctcactacaagaatttcataatacaatcagaagtattaacagcagaatagaccaagttgaggaaagaatctcagagtttgaagactggktctatgaatcaactcagtcagacaaaaataaagaaaacaattaagaaaaatgaacaaaacat

SEQ ID NO: 234523 - DNA, 570 bp, Homo sapiens
ttctcatccatcagctctcacttagaagtaagaatatgtggtatttagttttctgttcctgcattagttttctgaggataatagtttccaactccaaccatattcctacaaaaggacatgatctggttcctttttatgactgcatagtattccatggaatatatgtaccacattttctttatccaatttgtcattgataggtatttaggttaattccatgactttcctattgtaaatagtgctgtaacgacataaaacaccataaaaaagtkgacaaaggacattaacagacacttctcaaaggaatatatacatgtggccaacaaacatgaaaaaaaattcagtatctctgatcgttagagaaatacaaatcaaaaccaaaatgagataccatctcaagtttgtcagaatggctattattaaaatgtcaaagaataacagatgctggcgaggttgtggaggaaaaggaacacttttccactgttggtgggagtgtaaattagttcagccactgtggaagacagtgtggtgattcttcaaagacctagaggcagaaatatcatttgaccc

SEQ ID NO: 234524 - DNA, 608 bp, Homo sapiens
cttacctagtgttttcttttttaaaagcatcatataaatagggattatgcaaaatgttgctttcggcatatcgcttttttgtttgctttgctttttgtgtatttttaatttctaatttttatgaatacatatttgtacacatttatggagtacacattatattttaacatgagyatgcaaggtgtaatgatcttatctgggtaatggggatgtccatcatttcaaacattgattatttctttgtgttggaaacattccaaatctactcttctagttattttaaaatttagagtaaattattgttaactatagttgccctattgtgctacaaaacactagttcttacctaaccgcatttttgtacctattaaccaacccttcttcatccttccctccccaatatccttcccagcttctggtaatcaccattctattcactacctccatgagatgaatacttttagttcccacatatgactgggaacataagacatttgtatttctgtgactggtttacttaatgtaacataatgttctccacttccatccatgttattgtaaatgtacttatgattcatacatgttattgtaaatgtacttatgattca

SEQ ID NO: 234525 - DNA, 608 bp, Homo sapiens
cttacctagtgttttcttttttaaaagcatcatataaatagggattatgcaaaatgttgctttcggcatatcgcttttttgtttgctttgctttttgtgtatttttaatttctaatttttatgaatacatatttgtacacatttatggagtacacattatattttaacatgagcatgcaaggtgtaatgatcttatctgggtaatggggatgtccatcatttcaaacattgattatttctttgtgttggaaacattccaaatctactcttctagttattttaaaatttagagtaaattattgttaactatagttgccctattgtgctacaaaacactagttcttayctaaccgcatttttgtacctattaaccaacccttcttcatccttccctccccaatatccttcccagcttctggtaatcaccattctattcactacctccatgagatgaatacttttagttcccacatatgactgggaacataagacatttgtatttctgtgactggtttacttaatgtaacataatgttctccacttccatccatgttattgtaaatgtacttatgattcatacatgttattgtaaatgtacttatgattca

SEQ ID NO: 234526 - DNA, 433 bp, Homo sapiens
gtgtctatgacaaagcaactgtcccaagcaacacttctcctagctcagcaagtctcctactgttcccacttcagtcttttctttcctcagccatgccctgcaatcataatgaaggcattcattcttctgacaataagtctgacttcaaccctttaatataaacaagcaggtagaactgtaagaaaaaatatctttctaataaaatacccccaatatttttcaagtatatttatctgtatatatatatatatagacagaaagaaagggagagagagagagagagagaaataaagagagagagagagagagaaagcggctctaatatgtttgtttacaggtgaaattttayataaatggctattgattctctttatgattacttttgaaaataaatgatgtgtccattgatagaagtaaaaagtcaaacataatg

SEQ ID NO: 234527 - DNA, 505 bp, Homo sapiens
tagtttactgtacgataagtttattactagttttattttttaattttaagcaactacatctgaaacatacacaygctaacatggtatgtctatgtatctataacttaataaaataggaaaatgaaattatcctaacaccataagccataaaataaaaatatttttcagaaaaaaaaaatcattgcattaacagaccaaatcctttatgaagtcaatgttgtattccgtcaaaaatctttaaaagaaatacatttttcaataaggatatgtgttgccattgagagcacatagtctcttcagcatttggattcagcatatattgcagcagtcaaccatttttcagttaagaggagtgttttatcccctagtaacgtataatctcactttgagaagagaaaatcgagttcatggacaactactaaaaacagttttcaattaaattcatactattataggctatttttatttcatttttacattgtaaaagaaggtacctgttactgtt

SEQ ID NO: 234528 - DNA, 615 bp, Homo sapiens
gtcagctaaattatttctttgtactttttaaattgtttgaaaggtttcatattttaaaagtttcatcaggtagtatgactctgtagtttaattgtttagagtactagttgtagtttaagactgccctggcttgtcatctgagtttttagtgtttgtatgattttgtacctgtttcttattttcttcaaatctcagtttccaaatctggtatctgtgaaaattaaatgaaataacccacatgaacatcttagcacagtgtctcatacacagtatgtgctaaaacataattttattatcaactgaaattaatatttctttgctcataaagacttcatggaaatatttatgatatatagataaagaagtcatcgttatagtaataagtataaccataacatattttatattttaagttgaagagatgtcagaaaatatttataaaatcaattttagctttaaaatgaaaacacacaagtaaattatacctagaccataattatttgaaaaggaaatgaacaaaaatagcaaaccaaaacatcataagataataaatatcaaagaagtcacaaggccsgacaattcaaaaaacgatctttgtgattatttcaatttatg

SEQ ID NO: 234529 - DNA, 467 bp, Homo sapiens
acattctattccatatattttgctgagaaaattggatagccacgtgtagaaaaatgaaactggatccttatttctcaccatgtacaaaaatgaactcaagatggattaaagacttaaatctaacccctaacaccataaattctaaataaaaacctaggaaacactattctggatactggcctaggcaaataatttatgatgaagaccccaaaagcaaatgcaagaaaaataaataaatgagacctacttaaactaaaaaagtttctgtacagcaaaagaaataatcgtcagggtaaagagagaatctacagaatgaaaaaaaaaattgtcaactctgcacctgacaaaagactaatawccagcatccacaaggaaacaaattagcaagcaaaaatcaaataaccccatgaaaaagtgggcaaagaacatgaatagacatttcttaatagaagatatataaatggcca

SEQ ID NO: 234530 - DNA, 609 bp, Homo sapiens
ccaatgtaattttcagaacttcattaatattatgtgtagtatatatatgaatgtttcaatatctatagttatagctgtctatatacatatatacatttatgtaacacctctcatttgtgtataatgttattgcagttactggtgagagtacaatgtacaaagacagaagaaagggtctttgcttccaagttggaaatgttaacaccagtaatctttttaataaatatatttctccattgacataatattcatttataggtgtttaccttttgaatttaaaatgtgtgtttaaagaatctgtataagtcaatgaaaatgaataattttacttttctatatgctgaaagatccactggttctaaggtagagagttttgaacagagtttggaacttattgaatacgaattggaatayattgaatatgaacattactaaatatatacaggtataaattctataatcacttagagaagaaaggaaaaaactgtcacatgggtgaatggactcaatgacctcaatccattgttctattccattgttctaactagaacataatagcattgttattgaatacctgtgtactgatcacctgacaaataattcaaatct

SEQ ID NO: 234531 - DNA, 609 bp, Homo sapiens
ccaatgtaattttcagaacttcattaatattatgtgtagtatatatatgaatgtttcaatatctatagttatagctgtctatatacatatatacatttatgtaacacctctcatttgtgtataatgttattgcagttactggtgagagtacaatgtacaaagacagaagaaagggtctttgcttccaagttggaaatgttaacaccagtaatctttttaataaatatatttctccattgacataatattcatttataggtgtttaccttttgaatttaaaatgtgtgtttaaagaatctgtataagtcaatgaaaatgaataattttacttttctatatgctgaaagatccactggttctaaggtagagagttttgaacagagtttggaacttattgaatacgaattggaatacattgaatatgaacattactaaatatatacaggtataaattctataaycacttagagaagaaaggaaaaaactgtcacatgggtgaatggactcaatgacctcaatccattgttctattccattgttctaactagaacataatagcattgttattgaatacctgtgtactgatcacctgacaaataattcaaatct

SEQ ID NO: 234532 - DNA, 443 bp, Homo sapiens
gagccctatagaaagggttctagcaacatataaaagtatagtttgcaagaggtacatatgaataacaatgtttgcattgtacaaaaacttcaayggccagatagatggatacatagcaaaatagggaaaaatagaaaattccccattacaaccctaactagtatattaaggatattagccatagttcttgaagcaaaatttgaccaagtttgaccagcactgtacaggtaagagttttttaatcgtgtgagggaccactaaagctgttaatggaggcaggtcatctgctgtagggttcattaagcctcaccaagactccaatataatagtcctacaggtcatatgacgctttttctctaagtgtaggctaacaaataaactttcttatttcaagtcaacctataacatacctcaatatcaacagaagaattggggcagggtgg

SEQ ID NO: 234533 - DNA, 402 bp, Homo sapiens
tccttcttccttttactaaggtagaatgagccaaggtcagtggggcctgacggatctcagggcctttgctgttcctctcatccctggctatggttggctaagtctctttttcttaggtctcagggtgttcagctgttttgggaacttgttgaaaattgttgytttgcagtacaaaagacactctgttactttttaatcaatatctttttttttgagacagggtctggctctgttgcccaggctcgactacagtagcccatctctgttcactgcagcctctgcctcccgggttcaagtgattcttgtgccacagcctcctgagcagctgggactacaggcgcgtgctaccatgcccagctaatatttttgtatttttagtagagatgggattttgccacgttg

SEQ ID NO: 234534 - DNA, 441 bp, Homo sapiens
ttactattaatgatttaacatttattgagcactgtctaaggctctgttctaaggctcccacatgcattattgtttccagtctttacagcaactatctcaatttaagtcacacggctaagctggaatggaagagctgggattcaaatccagaaagacttgctccataggattctcaagcctataaccagtatggaaacaggcttgacattaaatccagcatttccccatcttgtttggttatggaaccttattatcttttagtatttatagagagattagtcagttgtccacggcatggaccctgggaagtgtygcctgagtcagtttacactggtgactacagtcttttaaacagcattgtttcagactataactagttttttctaacttggttctctgttgataatacttaaatgttatatttatttttctatttgagag

SEQ ID NO: 234535 - DNA, 509 bp, Homo sapiens
atatagctcggtgtggaattgctggatcatatatggtaattctgtctttaacttaatgaggaactgccaatctgttttcctcagtgactgtaccattttatattcctattagcaatamacaagtgtcccaatttctccacatttttgccaacactgttttccattaaaaactttttattatagtcattctagtgggtgtaaagtggtatctttttgttttgatttgcatttccccagtaactaatgacattgagccttttttcatgtgcttgttggccatttgtatatattctttggagaaatgtctgtttaagtcctttgcccactttaaattgtgttgtctttgtgttgtagagttgtaagagttctttatacattctgggtactagacatgattttcaaatttagatacatgattttcaaatcttttgcctctagatgttttttacttttttatttttgatccttgaactcatctatattctatggttgtgatgtaatgatgacag

SEQ ID NO: 234536 - DNA, 509 bp, Homo sapiens
atatagctcggtgtggaattgctggatcatatatggtaattctgtctttaacttaatgaggaactgccaatctgttttcctcagtgactgtaccattttatattcctattagcaataaacaagtgtcccaatttctccacatttttgccaacactgttttccattaaaaactttttattatagtcattctagtgggtgtaaagtggtatctttttgttttgatttgcatttccccagtaactaatgacattgagccttttttcatgtgcttgttggccatttgtatatmttctttggagaaatgtctgtttaagtcctttgcccactttaaattgtgttgtctttgtgttgtagagttgtaagagttctttatacattctgggtactagacatgattttcaaatttagatacatgattttcaaatcttttgcctctagatgttttttacttttttatttttgatccttgaactcatctatattctatggttgtgatgtaatgatgacag

SEQ ID NO: 234537 - DNA, 589 bp, Homo sapiens
ataattgtgagcagaaaaatacctaattggattctgtaaatgggtatattttgaattatgctgtacagtgcttgcccaaaaaaatactgtgcctgaaaatggcatcaatttattmataaaaaatatgatttaagtgattttctaacaacatttcaaaggcacctttatggttctcaaagtgttgccatataataatattcctttagaataaaattatatttatttaaaaaaataaagagaaaaatctattgcttctgtaccacaaactgaggcagatatagaataattttctgaagaagcaggattagcaggagacgagactatggaccctagtctttctcaaacacttgattacgtttctcaacctgacaatgacagccgctcggccacaaagaccagatcaaggaagctgccttccagtccaagttgagtgttttcgctggtctcaggttgagagggaggtgaatagatataacatacaggctgataaataaaaggccaccatttttaggcttaaatactgctaatctaaaggaggttgagcatcactaaaccaaaaacccagaaatccaaaatgctctaaaatcca

SEQ ID NO: 234538 - DNA, 589 bp, Homo sapiens
ataattgtgagcagaaaaatacctaattggattctgtaaatgggtatattttgaattatgctgtacagtgcttgcccaaaaaaatactgtgcctgaaaatggcatcaatttattaataaaaaatatgatttaagtgattttctaacaacatttcaaaggcrcctttatggttctcaaagtgttgccatataataatattcctttagaataaaattatatttatttaaaaaaataaagagaaaaatctattgcttctgtaccacaaactgaggcagatatagaataattttctgaagaagcaggattagcaggagacgagactatggaccctagtctttctcaaacacttgattacgtttctcaacctgacaatgacagccgctcggccacaaagaccagatcaaggaagctgccttccagtccaagttgagtgttttcgctggtctcaggttgagagggaggtgaatagatataacatacaggctgataaataaaaggccaccatttttaggcttaaatactgctaatctaaaggaggttgagcatcactaaaccaaaaacccagaaatccaaaatgctctaaaatcca

SEQ ID NO: 234539 - DNA, 589 bp, Homo sapiens
ataattgtgagcagaaaaatacctaattggattctgtaaatgggtatattttgaattatgctgtacagtgcttgcccaaaaaaatactgtgcctgaaaatggcatcaatttattaataaaaaatatgatttaagtgattttctaacaacatttcaaaggcacctttatggttctcaaagtgttgccatataataatattcctttagaataaaattatatttatttaaaaaaataaagagaaaaatctattgcttctgtaccacaaactgaggcagatatagaataattttctgaagaagcaggattagcaggagacragactatggaccctagtctttctcaaacacttgattacgtttctcaacctgacaatgacagccgctcggccacaaagaccagatcaaggaagctgccttccagtccaagttgagtgttttcgctggtctcaggttgagagggaggtgaatagatataacatacaggctgataaataaaaggccaccatttttaggcttaaatactgctaatctaaaggaggttgagcatcactaaaccaaaaacccagaaatccaaaatgctctaaaatcca

SEQ ID NO: 234540 - DNA, 565 bp, Homo sapiens
aactcattctattccccaagggaatgtggcgatgaagccaccatcttacatgaagccggatactggagccgcccagagaaggacaaagtgaggatgtgcagaagcaagttcccgagaacatcccgggagccttgacctcagtgaggactaaggctagtctcatcccttgacatctcaattaaggaagacaatacatttccttttttaaaaaccaatttgcattatatttccatcctttgctaccaaaagtgtccttagtgatacgctggtcaccgtgggagggttacagaggcaacatggaagggggatgtctgctttggtctcagaccacctgcaacttgtttgggggaaaaaatgggtttgttataaggatgcatgaggatttgaaccagaattgaaaagtcctcaggaataggcgagacaacttcagaaatagccattgctccctctcttcatggagcttcctagacmggtttcctcctgactgtgctctgccagctctttccaccaactggcgccctctcctgatgctgaatttctgctgctttgaaactgagttgccacc

SEQ ID NO: 234541 - DNA, 270 bp, Homo sapiens
ttgggggaaaaaatgggtttgttataaggatgcatgaggatttgaaccagaattgaaaagtcctcaggaataggcgagacaacttcagaaatagccattgctccctctcttcatggagcttcctagacaggtttcctcctgactgtgctctgccagctctttccaccaactggcgccctctcctgatgctgaatttctgctgctttgaaactgagttgccaccacgccagctcctcctagtggcacstcttcacatatccttcatgcttc

SEQ ID NO: 234542 - DNA, 374 bp, Homo sapiens
gatggccacctaggttgattgcatgactttgctactgtgaatagtgctacaatgaatattcaagtgcttatgtctttttggtagaacaatttgttttcttttggatatatacctagtaatggrattgctgggtcaaatcatagttcagttttaacttctttgagaaaaccccaaactgttttcaacagcggctgaactaatttacattcccaccaacagtgtacaagcatttccttttctacacagcctaccaacatctgtcgttttttgactttttaataatagttgttctggggctgggagtggtggctcacacatgtaattccagcactttgggaggctaagacaagaggatcgcttgagctcaggaattc

SEQ ID NO: 234543 - DNA, 372 bp, Homo sapiens
atggccacctaggttgattgcatgactttgctactgtgaatagtgctacaatgaatattcaagtgcttatgtctttttggtagaacaatttgttttcttttggatatatacctagtaatggaattgctgggtcaaatcatagttcagttttaacttctttgagaaaaccccaaactgttttcaacagcggctgaactaatttacattcscaccaacagtgtacaagcatttccttttctacacagcctaccaacatctgtcgttttttgactttttaataatagttgttctggggctgggagtggtggctcacacatgtaattccagcactttgggaggctaagacaagaggatcgcttgagctcaggaatt

SEQ ID NO: 234544 - DNA, 372 bp, Homo sapiens
atggccacctaggttgattgcatgactttgctactgtgaatagtgctacaatgaatattcaagtgcttatgtctttttggtagaacaatttgttttcttttggatatatacctagtaatggaattgctgggtcaaatcatagttcagttttaacttctttgagaaaaccccaaactgttttcaacagcggctgaactaatttacattcccaccaacagtgtayaagcatttccttttctacacagcctaccaacatctgtcgttttttgactttttaataatagttgttctggggctgggagtggtggctcacacatgtaattccagcactttgggaggctaagacaagaggatcgcttgagctcaggaatt

SEQ ID NO: 234545 - DNA, 372 bp, Homo sapiens
atggccacctaggttgattgcatgactttgctactgtgaatagtgctacaatgaatattcaagtgcttatgtctttttggtagaacaatttgttttcttttggatatatacctagtaatggaattgctgggtcaaatcatagttcagttttaacttctttgagaaaaccccaaactgttttcaacagcggctgaactaatttacattcccaccaacagtgtacragcatttccttttctacacagcctaccaacatctgtcgttttttgactttttaataatagttgttctggggctgggagtggtggctcacacatgtaattccagcactttgggaggctaagacaagaggatcgcttgagctcaggaatt

SEQ ID NO: 234546 - DNA, 516 bp, Homo sapiens
agccttgaactcctgggctcacatgatcctccctccttagcttcctgagtagctgggactacagatgcatgccaccacacctggctaattttttttttttttttaatagagacagagtctcactgtattgcctaggctggtcttgaactcctaggctcatgcaatcctcccacttcagcctcccaagtagttgggactacagacatgtgccactatgcttggcagtaccattttcatcacatcatattaaggggayatactgtcaatatgactaatcagtgttgatattgaccttgatcatctggttgaggtagtgtttgtgtatttctttactacaaagttactcttttttctcctctgtttacatactgtactctttggaaggaagttacatatgcgcagcctacacttaaggcatggggagttatgatacccctcctcaagggcaaagtgtctatataaattatttagatttcttctgcatggaagatttgtctcttcttcctcatttattta

SEQ ID NO: 234547 - DNA, 516 bp, Homo sapiens
agccttgaactcctgggctcacatgatcctccctccttagcttcctgagtagctgggactacagatgcatgccaccacacctggctaattttttttttttttttaatagagacagagtctcactgtattgcctaggctggtcttgaactcctaggctcatgcaatcctcccacttcagcctcccaagtagttgggactacagacatgtgccactatgcttggcagtaccattttcatcacatcatattaaggggacatactgtcaatatgactaatcagtgttgatattgaccttgatcatctggttgaggtagtgtttgtgtatttctttactacaaagttactcttttttctcctctgtttacatactgtactctttggaaggaagttacatatgcgcagcctacacttaaggcatggggagttatgatacccctcctcaagggcaaagtgtctrtataaattatttagatttcttctgcatggaagatttgtctcttcttcctcatttattta

SEQ ID NO: 234548 - DNA, 492 bp, Homo sapiens
gaattctcctccatcagatctttggctttcttctccaatggtttcttccctttagcttcaaatctttattttattttattttattttattttattttattttattttttgagttagggtctctctctctcacccaggctggagtgcaatggtgcaatcatggctcactgcagcctcaagctgctgggctcaagctatcatccagccacagcctcccaaatagctgggactacagatacatactgtcaygctcagctacaagtctttaaaaataaaaccaacccccccgcccccacaaacttgtttgttgtttcttacatctcatttctcctttaatcttcaaccacttctactccaaccattttgctataaaagttttcactatggaaaccaatgaccttctagaagccaaatccaaaggtcagttttcaatacttttagtaccatttgaaactgtttatcaatccctcttttctgaaacattccgcttttt

SEQ ID NO: 234549 - DNA, 492 bp, Homo sapiens
gaattctcctccatcagatctttggctttcttctccaatggtttcttccctttagcttcaaatctttattttattttattttattttattttattttattttattttttgagttagggtctctctctctcacccaggctggagtgcaatggtgcaatcatggctcactgcagcctcaagctgctgggctcaagctatcatccagccacagcctcccaaatagctgggactacagatacatactgtcacgctcagctacaartctttaaaaataaaaccaacccccccgcccccacaaacttgtttgttgtttcttacatctcatttctcctttaatcttcaaccacttctactccaaccattttgctataaaagttttcactatggaaaccaatgaccttctagaagccaaatccaaaggtcagttttcaatacttttagtaccatttgaaactgtttatcaatccctcttttctgaaacattccgcttttt

SEQ ID NO: 234550 - DNA, 492 bp, Homo sapiens
gaattctcctccatcagatctttggctttcttctccaatggtttcttccctttagcttcaaatctttattttattttattttattttattttattttattttattttttgagttagggtctctctctctcacccaggctggagtgcaatggtgcaatcatggctcactgcagcctcaagctgctgggctcaagctatcatccagccacagcctcccaaatagctgggactacagatacatactgtcacgctcagctacaagtctttaaaaataaaaccaacccccccgcccccacaaacttgtttgttgtttcttacatctcatttctcctttaatcttcaaccacttctactccaaccattttgctataaaagttttcactatggaarccaatgaccttctagaagccaaatccaaaggtcagttttcaatacttttagtaccatttgaaactgtttatcaatccctcttttctgaaacattccgcttttt

SEQ ID NO: 234551 - DNA, 373 bp, Homo sapiens
ttcaaccaatgtggaactgcccattatctgcatttttcrtaggctcttaggactacagttaatcacaaaattttggaactgaattttattaatgttcagaaaaaaagtcatataataaagtccccgagtcattccccaccccaaaatagggcccaggaaagctgccctaattgccttacccaagggacaggcctactatgggtaatctccaaaatgtttaaaaggcatatacgacatttactgcttctgtgtcctcacttaatattttctcctaaatgttctgcaacctttcatttcctatctgtgataagacaataatgaagtccaaattgccaaataagaactcacagtgcttcaccactgcagttgtgaa

SEQ ID NO: 234552 - DNA, 373 bp, Homo sapiens
ttcaaccaatgtggaactgcccattatctgcatttttcataggctcttaggactacagttaatcacaaaattttggaactgaattttattaatgttcagaaaaaaagtcatataataaagtccccgagtcattccccaccccaaaatagggcccaggaaagctgccctaattgccttacccaagggacaggcctactatgggtaatctccaaaatgtttaaaaggyatatacgacatttactgcttctgtgtcctcacttaatattttctcctaaatgttctgcaacctttcatttcctatctgtgataagacaataatgaagtccaaattgccaaataagaactcacagtgcttcaccactgcagttgtgaa

SEQ ID NO: 234553 - DNA, 304 bp, Homo sapiens
cattctactctagtatacatgtaaggtactcccacagttttaaaaaytggtggcttggctatgaaacacaagcaggtctctgtaattttacctaggctcagatcccagacctgctcaagtgaaaggcttgatctcagtccttaaatatttgaagccagtgattaactgttaaattaaagctgcatcatagcccacacccagctcagttacatattggattgactcagactcccttctagtgtcctaacagaaaaattgtcatgtctttttctggaagtaaaatattacttaatttaataagtaa

SEQ ID NO: 234554 - DNA, 584 bp, Homo sapiens
tgaaattctattaaatagaggtgaaaaatatactagcagagaccagggaaaacaaaaaaaggaaagaaaagaaaaggaaagggaagggaggggagggaagggagaaagaaaaatacactagcagaaatgaattcattacatgggcttaacagtttatggacatagcagaagaaagaatcagtgaatatgaagacagattggaaagagaaaagacagaaaaagtcagggaggggtagaaaagagattttagatctgtgggataatatcagatggtctaacatatatgtaattggagtttcagaaggatagaagagaacgtggcagaagacatatttgaagaggcaatgctcaggaacttctaaaattgatgaggtcatcaattcacaaatggaggaagwtcagcaaatcccaagcaagttaaatacaaaacaaaaataagccaacaaatttaaaaatcccatatataggcatatcataatcaaactgctgaaaactgaagatggaagagatcttaaaagcaacaggagagcaacaggagaataaaagacacattagttatgtgagaatggcaacatgggttatgg

SEQ ID NO: 234555 - DNA, 553 bp, Homo sapiens
aagcttgttcatgtcatcatgaatttattttcaggcaatatgacaatctattaacactcagcatactctgarcttacagaataagtaccacgccatacttcctcattaatgactatcattttacatgagcttcttccacaatcacaatgagagaacagattgctacatgtttgctggtaaatacattcagtaaggcactcaaatcctagacacgaactaaccacagaacgctcttccctgctttaataaattgaaacatgatctcatttccttcactttcaatactttttatagaaagacacgcttgtcttgaacttgtctaaacataggtttatataaactaatccattatcattatagttataatcaaggaaatgatttcacattgacggttttttaggtagggataagcgaaagcactgcagcagtttctgaaggagtgtcttctctgtggttccccatacttagtacgatgcctggaatgtagcagggactaaatacagtgaacaaatgggcaaacctttaattcccagggatctgctacatattgcct

SEQ ID NO: 234556 - DNA, 553 bp, Homo sapiens
aagcttgttcatgtcatcatgaatttattttcaggcaatatgacaatctattaacactcagcatactctgagcttacmgaataagtaccacgccatacttcctcattaatgactatcattttacatgagcttcttccacaatcacaatgagagaacagattgctacatgtttgctggtaaatacattcagtaaggcactcaaatcctagacacgaactaaccacagaacgctcttccctgctttaataaattgaaacatgatctcatttccttcactttcaatactttttatagaaagacacgcttgtcttgaacttgtctaaacataggtttatataaactaatccattatcattatagttataatcaaggaaatgatttcacattgacggttttttaggtagggataagcgaaagcactgcagcagtttctgaaggagtgtcttctctgtggttccccatacttagtacgatgcctggaatgtagcagggactaaatacagtgaacaaatgggcaaacctttaattcccagggatctgctacatattgcct

SEQ ID NO: 234557 - DNA, 553 bp, Homo sapiens
aagcttgttcatgtcatcatgaatttattttcaggcaatatgacaatctattaacactcagcatactctgagcttacagaataagtaccacgccatacttcctcattaatgactatcattttacatgagcttctwccacaatcacaatgagagaacagattgctacatgtttgctggtaaatacattcagtaaggcactcaaatcctagacacgaactaaccacagaacgctcttccctgctttaataaattgaaacatgatctcatttccttcactttcaatactttttatagaaagacacgcttgtcttgaacttgtctaaacataggtttatataaactaatccattatcattatagttataatcaaggaaatgatttcacattgacggttttttaggtagggataagcgaaagcactgcagcagtttctgaaggagtgtcttctctgtggttccccatacttagtacgatgcctggaatgtagcagggactaaatacagtgaacaaatgggcaaacctttaattcccagggatctgctacatattgcct

SEQ ID NO: 234558 - DNA, 615 bp, Homo sapiens
cttccacaatcacaatgagagaacagattgctacatgtttgctggtaaatacattcagtaaggcactcaaatcctagacacgaactaaccacagaacgctcttccctgctttaataaattgaaacatgatctcatttccttcactttcaatacttttyatagaaagacacgcttgtcttgaacttgtctaaacataggtttatataaactaatccattatcattatagttataatcaaggaaatgatttcacattgacggttttttaggtagggataagcgaaagcactgcagcagtttctgaaggagtgtcttctctgtggttccccatacttagtacgatgcctggaatgtagcagggactaaatacagtgaacaaatgggcaaacctttaattcccagggatctgctacatattgccttgactggtagatcatttctccagaagaaaggaagaaaccaaaagacaaaaacaatctttttaaacctcacaggattttcttagaaaaaagttttaatttatctagtgcaattctctttgtaaaatatatttcataaaaaatccaaagcaaaagccctgtcattcatttatttcaaaagacaaatcatttcagta

SEQ ID NO: 234559 - DNA, 553 bp, Homo sapiens
aagcttgttcatgtcatcatgaatttattttcaggcaatatgacaatctattaacactcagcatactctgagcttacagaataagtaccacgccatacttcctcattaatgactatcattttacatgagcttcttccacaatcacaatgagagaacagattgctacatgtttgctggtaaatacattcagtaaggcactcaaatcctagacacgaactaaccacagaacgctcttccctgctttaataaattgaaacatgatctcatttccttcactttcaatactttttatagaaagacacgcttgtcttgaacttgtctaaacataggtttatataaactaatccattatcattatagttataatcaaggaaatgatttcacattgayggttttttaggtagggataagcgaaagcactgcagcagtttctgaaggagtgtcttctctgtggttccccatacttagtacgatgcctggaatgtagcagggactaaatacagtgaacaaatgggcaaacctttaattcccagggatctgctacatattgcct

SEQ ID NO: 234560 - DNA, 406 bp, Homo sapiens
aactgttttgcatatcaataaaactggattaacaattttcagtgcatcctacatcttaatgctatgtagctgataaaaagaatgaagaacayttgcaagtgctattagggaaggagcaccaggatagactctagggaacaacaatatgaacaatattcttctgtccacatgcttctaaagaaagggatacacatgtgctgggatgaacataataaatcactggaaggacatacaaaaaaccttctcaccagcatggaagcagcactggtgggagagggttggatggtgaaggagactttcactctttgttttataacctcctatgtagtgtgcattttaaccatggcatgtggtacctattttataactacattgatttttaaaaaataaattgagaacagaattc

SEQ ID NO: 234561 - DNA, 390 bp, Homo sapiens
tcaactgaattctttcctatcagaaataaactgttttgcatatcaataaaactggattaacaattttcagtgcatcctacatcttaatgctatgtagctgataaaaagaatgaagaacatttgcaagtgctattagggaaggagcaccaggatagactctagggaacaacaayatgaacaatattcttctgtccacatgcttctaaagaaagggatacacatgtgctgggatgaacataataaatcactggaaggacatacaaaaaaccttctcaccagcatggaagcagcactggtgggagagggttggatggtgaaggagactttcactctttgttttataacctcctatgtagtgtgcattttaaccatggcatgtggtacctattt

SEQ ID NO: 234562 - DNA, 390 bp, Homo sapiens
tcaactgaattctttcctatcagaaataaactgttttgcatatcaataaaactggattaacaattttcagtgcatcctacatcttaatgctatgtagctgataaaaagaatgaagaacatttgcaagtgctattagggaaggagcaccaggatagactctagggaacaacaatatgaacaatattcttctgtccacatgcttctaaagaaagggatacacatgtgctgggatgaacataataaatcactggaaggacatacaaaaaaccttctcaccagcatggaagcagcactggtgrgagagggttggatggtgaaggagactttcactctttgttttataacctcctatgtagtgtgcattttaaccatggcatgtggtacctattt

SEQ ID NO: 234563 - DNA, 390 bp, Homo sapiens
tcaactgaattctttcctatcagaaataaactgttttgcatatcaataaaactggattaacaattttcagtgcatcctacatcttaatgctatgtagctgataaaaagaatgaagaacatttgcaagtgctattagggaaggagcaccaggatagactctagggaacaacaatatgaacaatattcttctgtccacatgcttctaaagaaagggatacacatgtgctgggatgaacataataaatcactggaaggacatacaaaaaaccttctcaccagcatggaagcagcactggtgggagagggttggatggtgaaggagactttcactctttgttttrtaacctcctatgtagtgtgcattttaaccatggcatgtggtacctattt

SEQ ID NO: 234564 - DNA, 413 bp, Homo sapiens
agaaataaactgttttgcatatcaataaaactggattaacaattttcagtgcatcctacatcttaatgctatgtagctgataaaaagaatgaagaacatttgcaagtgctattagggaaggagcaccaggatagactctagggaacaacaatatgaacaatattcttctgtccacatgcttctaaagaaagggatacacatgtgctgggatgaacataataaatcactggaaggacatacaaaaaaccttctcaccagcatggaagcagcactggtgggagagggttggatggtgaaggagactttcactctttgttttataacctcctatgtagtgtgcattttaaycatggcatgtggtacctattttataactacattgatttttaaaaaataaattgagaacagaattc

SEQ ID NO: 234565 - DNA, 406 bp, Homo sapiens
aactgttttgcatatcaataaaactggattaacaattttcagtgcatcctacatcttaatgctatgtagctgataaaaagaatgaagaacatttgcaagtgctattagggaaggagcaccaggatagactctagggaacaacaatatgaacaatattcttctgtccacatgcttctaaagaaagggatacacatgtgctgggatgaacataataaatcactggaaggacatacaaaaaaccttctcaccagcatggaagcagcactggtgggagagggttggatggtgaaggagactttcactctttgttttataacctcctatgtagtgtgcattttaaccatgrcatgtggtacctattttataactacattgatttttaaaaaataaattgagaacagaattc

SEQ ID NO: 234566 - DNA, 552 bp, Homo sapiens
ggctagtaagaataatccattatgagaggtaatcactgaagattaagaaggaaaaacaaaacagggtgcagaaaccaaggaaaagttcaatcaccacagataaccttataagcctagcccagacttctcttgcaaattgcatttctttacatctaaccactttccaacttgttacctctcaggaactcaagctcaatatgatcaagatttctcccaaggttacttgttttaataaataatcttattgttcacccaactgtcaatgatttgcaatgtacctgtgctctctctttacctaccaatcactacatcttgcaaactattttctgaccattctcaaatctgtccacttctttttattcctacygcttcctctctagtcaagccaccatcatctcctctccaaaataaggcaacagcctcttaccgcttctctgcactagcttcattctaatccactctccaacgcacagctaaactcacttctgatgaacagaatttggtagaagtgatgccacatgacttctgagtctaggtcacaaaaaggctggc

SEQ ID NO: 234567 - DNA, 552 bp, Homo sapiens
ggctagtaagaataatccattatgagaggtaatcactgaagattaagaaggaaaaacaaaacagggtgcagaaaccaaggaaaagttcaatcaccacagataaccttataagcctagcccagacttctcttgcaaattgcatttctttacatctaaccactttccaacttgttacctctcaggaactcaagctcaatatgatcaagatttctcccaaggttacttgttttaataaataatcttattgttcacccaactgtcaatgatttgcaatgtacctgtgctctctctttacctaccaatcactacatcttgcaaactattttctgaccattctcaaatctgtccacttctttttattcctaccgcttcctctctagtcaagccaccatcatctccyctccaaaataaggcaacagcctcttaccgcttctctgcactagcttcattctaatccactctccaacgcacagctaaactcacttctgatgaacagaatttggtagaagtgatgccacatgacttctgagtctaggtcacaaaaaggctggc

SEQ ID NO: 234568 - DNA, 552 bp, Homo sapiens
ggctagtaagaataatccattatgagaggtaatcactgaagattaagaaggaaaaacaaaacagggtgcagaaaccaaggaaaagttcaatcaccacagataaccttataagcctagcccagacttctcttgcaaattgcatttctttacatctaaccactttccaacttgttacctctcaggaactcaagctcaatatgatcaagatttctcccaaggttacttgttttaataaataatcttattgttcacccaactgtcaatgatttgcaatgtacctgtgctctctctttacctaccaatcactacatcttgcaaactattttctgaccattctcaaatctgtccacttctttttattcctaccgcttcctctctagtcaagccaccatcatctcctctccaaaataaggcaacagcctcttaccgcttctctgcactagcttcattctaatccactctccaacgcacagctaaactcacttctgatgaacagaatttgrtagaagtgatgccacatgacttctgagtctaggtcacaaaaaggctggc

SEQ ID NO: 234569 - DNA, 635 bp, Homo sapiens
tttctgctttcaaacccttatatgaggcaagtgggattaatttatttcattaccttaactagattcatcgctttactttgtcaaactctgattgatttgctcaactcaatcttatgtgttcaagaacttaatgtggattcctgttccaccttatgaaagtcttttccaaaaacttgctaaattcttgactcaagacattgcagtcagtaatgcatttctctcctcaaatacaatggaactgtgttctaataaatactcttcaacaatgtgcagttatttctccacaactatcaattccccttaaagcagaattttactaaaaatggctttatccttctggggataatcagtaaaayggcaattggtgggtgaattaaaaatatactaaaagcagatggcagaacatgagtgcagatttttactacaaagcttaggaaaagcaaaaggaacttgaatagagaaaatgcagaaaagccctcctttggctattaggacggagagagcagaagtatgtttagagcttcaaagagtctgactctttgcaactgttatcttaggactttaaggaagtaaaagtgcaagtgaaacactctggattataaaatagaatctgacacagagggattcaacccagt

SEQ ID NO: 234570 - DNA, 409 bp, Homo sapiens
taatacatgtataattggagttccagaaaagtggggaaaggtagaaggcaattactttaggaaacagcgtctgggtggccaggtgggtggctcacacttgtaatcctagcactttggggggccgaggggggtgcagatcatttgagatcargagtttgagaccagcctgtccaacatggtgaaatctcttctctactaaaaatacaaaaattagctgggcttggtggcatgcgactgtaatctcagcttcttgggaggctgaagcatgagaattgcttgagccagggagatgtaggttgcagtaagccaagatcatgccactacactacagcctgggcaacagagtgagaacctatctcaaaaaaaaaaaaaaaaagaaaaagaaaaagaaaaagaaaataagaaaata

SEQ ID NO: 234571 - DNA, 578 bp, Homo sapiens
cactttctatatgataattcttagaatgtctagtcctctctttacataagagtacaggtaattgaggtcagtgaaggttttagttacagaactggtctggctactttttattaaaacctgcaaagacttaactgttcttctataatttagggatactcatcatttaatagggaataaacaaaaatttgagacaaaaggaaattctgtatccatttcatatatatacatgtaaattacatatagaaaaaatggtttagaagaggagttaatatcaatttaaaaacgggaattttaaagctgggaataatacatagcataaatatgtataaggattcagcaaaatgttagttgaaacagggggctaaataaacttgaagtttaagaaagttaagaaatgaacccaaatatgcataaatctgaggacaaaatttgatattgctgctaataaamaagggaggggcatcatattgggaggcttcattaataaaagtaacaaattatgagaacaaatagtcttgttatagtttatctggtgaagcattttaatgaggcatagctgtctgttccattaccgaacg

SEQ ID NO: 234572 - DNA, 615 bp, Homo sapiens
atacctaggtatgtaatgataaaattagtgccagtcatggtggctcatgcctgtaatcctaacactttgggatgctgaggcccggagtttgagaccagcctgggcaacatagtgatacccctatgtctacaaagattaaaaaatagaaatataaaaagttagctaggcatggtggcacttgtctgtaatcccacttacttgggaggctgaggtgggaggattgcttgaactcacgaggtcaaggctgcggtaagccataattgtattccacccagggtgataaagcatgacgggagatcctgtctcaaaacaaaacaaaaccaaaaaaaggcgaggcacagtgactcacacttgtaatcccagcattttgggaggtcaaggtaggatgatygcttgagcccagaaattggagacaagcctgggcaacatagtgagaccctgtctctcaaaagaaagtttaaaaaggcgggcatggtggcatgggcctgtagtcctgtctactcaggtggctaaggtgggaggattgcttgagcttgggaggttgaggctgcagtgaactgtgttcgtgccactgcactccagcatgggagacagagcaagatcctttgtcaataa

SEQ ID NO: 234573 - DNA, 505 bp, Homo sapiens
tactggattaaatctcagtgaactaaaaatatctgtgcatagctgtaaacaaaattaaattaatatcctcagtacctcttatgcctttaatgctatcaggatcagtagatgtgattttaaatgacgattcatataaataggaatatacgtaaaatttaaaaatactaagtgaatttatacctaattgtactacattattaagtataattttctgagtgttactcctaaccagtagcaaatatgttatatatatgagatatatgatatgtgtatatatgatatatgatatatatgttatgatatatatatgatatgtgatatatatgttactgggtagsaggtacagtagcaagttttctttcttaaaagaatggtatactctgggtctaagaatgacaaacagatgatgtggtggtcacttaccagagtattttatttatactgatctgtacccctagaatattcaaaaatgaggatgtatgagatatataatactttttattct

SEQ ID NO: 234574 - DNA, 377 bp, Homo sapiens
ttcttgttccctttcttgccacttgacacacttgctccccttccaccttctgccatgagtagaagcttcctgaggcctcaccagaagcagatgctggcaccatgcttcctttacagcctgcagaactgtaagccaattaaacctcttttctttataaattacccagtctcaggaattcctttataagcaatataaacagtctaatgcacccaccatgttgcaaggctgtgggagtacaataccrgtacagggaagagagaacttgagaccaatcgtttaattgaccacagaaggtaaccaaagaacagccttcccacaggctcagcacttttaactgatttttttatggaagtgaaacctcagccttgagcactaaa

SEQ ID NO: 234575 - DNA, 377 bp, Homo sapiens
ttcttgttccctttcttgccacttgacacacttgctccccttccaccttctgccatgagtagaagcttcctgaggcctcaccagaagcagatgctggcaccatgcttcctttacagcctgcagaactgtaagccaattaaacctcttttctttataaattacccagtctcaggaattcctttataagcaatataaacagtctaatgcacccaccatgttgcaaggctgtgggagtacaataccagtacagggaagagagaacttgagaccaatcrtttaattgaccacagaaggtaaccaaagaacagccttcccacaggctcagcacttttaactgatttttttatggaagtgaaacctcagccttgagcactaaa

SEQ ID NO: 234576 - DNA, 377 bp, Homo sapiens
aagtgaatcagagagagattgcaagatggagaaaggaggtacagttggagagagtggagggggcaggaaagaccagacagagctgcatctcccatgaaaacaactgtgtacatawgatagagtgagtacatagagtacatagaagagtgagctctgaaagaactctcacatggaccccagaaagaggagtactcaacgcctgctgcacagaaggcatcagcagttaagtactggctagaaaagcagagtccatcaaaggagaggaccacagtggtagctgcctggtaagtaccactgtcccctttccttcttttctccctccccagctcactggaggagctaggcctcaggaagctgggaaggaatggggagaattc

SEQ ID NO: 234577 - DNA, 560 bp, Homo sapiens
catagctatcaagtttgtgtgtgtatgtttctttctcaagcaagttatcttatttctccttatttcttcagacttatcctttcttttcttttcttttcttttttcttttttttttgagacggagttgcactcttgttgcctaggctggagtgcaatggcatgatctcggctcatcacaacctctgcctcccgggttcaagtgattctcctgcctcagcctcccgagtagctgggattacgggtatgtgccaccacgtccagctaattttgtatttttagtagagacggggtttctccatgttggtcaggctagtctcgaactccrcccgcctcagcctcccaaagtgctgggattacaggcatgagccaccgagcctggcccctaacctctcatttctaaggaaatgacaaattaagtcttttatgaaaatacagtgtagggtcatttaaaaatattttttgtaataggtgtctctgtacataaatctatttaattttttctcttttacagtaaaaaggcaatactgtgttttagtttcaccaaaaatttcagtagacca

SEQ ID NO: 234578 - DNA, 480 bp, Homo sapiens
cctggctaactggaattgtgtgtcttttgaccgacatctctgcaatttccccatgccctagcttctgatgactaccaattaactgtctgtttctatgagttttacttatctaaactctctatataagtgagattatgtcatagttgtttttaagtgcctggcttatttcacttgatgtaaagtctcccaggttcatccgtgttgttgcagaagatttcttccctttttaaagcccattaaccttttatagatctggtactgaggcaatgcaarcttattggacaattatatgttatttgaataaattgaaacataacagcttataaagggtcaaatggcagttaatagcctaagaaataggtttggaatattatttcttagcataaaggataatattggtcagagtcttctaggcttgaattcttggctacttagattttatcaagtaaattgtaaaaggatagtcaatcacttttttca

SEQ ID NO: 234579 - DNA, 550 bp, Homo sapiens
taatcattgaaattcactgaaatatgttgaacatgaaaatyatacaaatataattttgtatgctgtttcagattctttggaattttattctaagcatcaatcaagatggtatagtacgagaaaggtagaacatgtaattataaattcaggattcaggaagtttatttttctcttctttttaattctctcaaaatgatcttgattcctgcaaagtgttagtgtatctggtaagtaagagtctatttcttttaaacttcatctgtattaaccagctttatatgaccaaaatgtcccccaaatttaaatctttgcacagtaaggccttatatgtacacctggcctcatttcaaaagactaaagcagttgttctcaaattcagctgcacattaatataaactggaaaactgtttaagctcctgatgacaaagccacatgtgagactaatttatgctgaatcactgggccaaggacccaggtatcagcattttttaaaactatagaggaataaccagggttgagaaccactgcacaaaatggtacatgcaacttt

SEQ ID NO: 234580 - DNA, 550 bp, Homo sapiens
taatcattgaaattcactgaaatatgttgaacatgaaaattatacaaatataattttgtatgctgtttcagattctttggaattttattctaagcatcaatcaagatggtatagtacgagaaaggtagaacatgtaattataaattcaggattcaggaagtttatttttctcttctttttaattctctcaaaatgatcttgattcctgcaaagtgttagtrtatctggtaagtaagagtctatttcttttaaacttcatctgtattaaccagctttatatgaccaaaatgtcccccaaatttaaatctttgcacagtaaggccttatatgtacacctggcctcatttcaaaagactaaagcagttgttctcaaattcagctgcacattaatataaactggaaaactgtttaagctcctgatgacaaagccacatgtgagactaatttatgctgaatcactgggccaaggacccaggtatcagcattttttaaaactatagaggaataaccagggttgagaaccactgcacaaaatggtacatgcaacttt

SEQ ID NO: 234581 - DNA, 588 bp, Homo sapiens
actgtttaagctcctgatgacaaagccacatgtgagactaatttatgctgaatcactgggccaaggacccaggtatcagcattttttaaaactatagaggaataaccagggttgagaaccactgcacaaaatggtacatgcaacttttatttaagttatttttttwaaataaataatggttgaatcgatattgatcttagtaccaagtcatggcaattttttcagacttagagaattcatcctggcattgagattattaaagaacctagaaatccaagtgtttttgtttatatttttcctgtaaatattagagtatgctagtgctcatccttatttgataattttggaaaatatattaaacatttgagattgaatatcaaaaatctctaaaagaattttagaaataccattcttctatgaaataagtaagctcaatcaagatacatattatagtgcccatttaagaaagtctaataataatgcttgcactgcttaaagattaggttgataaattaattattgttaatcctacttgcataatcaacggacacctagcgatggagtcttaagtatagacacagaagttga

SEQ ID NO: 234582 - DNA, 555 bp, Homo sapiens
gtacacctttcatatattcacctggatgaatttggacatgtgtgcatacaccaataycatcatcacaaccaaggtactgaacatacttattcacctccaaaaattttcttgtgttcttttttaatggtggtagtatatttttaagaattcagcctttgagcagggtacgaaggaccttcaacaacaaatgcaaaagtaaatgagctaagttcatataaagggttagctctcagtgagttattcaagttatgatcatatcctcaagaggcttgtaaactgactgtgggtttccagtttggttattcacagataggccttcatttgctcattcacctattcattcatatagccactcattcattctcaagaagaggtatttgtccatatctcaccatgtggatgagcagatggtcagttctcacttcttttgccattaagtgtgctcaccgttgagctccaggatggtattttctctcactttgcgtcattaccaaagtggctatcaagattccctcccctaccttctttttcttttttcaatgtttaagagctgga

SEQ ID NO: 234583 - DNA, 555 bp, Homo sapiens
gtacacctttcatatattcacctggatgaatttggacatgtgtgcatacaccaatatcatcatcacaaccaaggtactgaacatacttattcacctccaaaaattttcttktgttcttttttaatggtggtagtatatttttaagaattcagcctttgagcagggtacgaaggaccttcaacaacaaatgcaaaagtaaatgagctaagttcatataaagggttagctctcagtgagttattcaagttatgatcatatcctcaagaggcttgtaaactgactgtgggtttccagtttggttattcacagataggccttcatttgctcattcacctattcattcatatagccactcattcattctcaagaagaggtatttgtccatatctcaccatgtggatgagcagatggtcagttctcacttcttttgccattaagtgtgctcaccgttgagctccaggatggtattttctctcactttgcgtcattaccaaagtggctatcaagattccctcccctaccttctttttcttttttcaatgtttaagagctgga

SEQ ID NO: 234584 - DNA, 555 bp, Homo sapiens
gtacacctttcatatattcacctggatgaatttggacatgtgtgcatacaccaatatcatcatcacaaccaaggtactgaacatacttattcacctccaaaaattttcttgtgttcttttttaatggtggtagtatatttttaagaattcagcctttgagcagggtaygaaggaccttcaacaacaaatgcaaaagtaaatgagctaagttcatataaagggttagctctcagtgagttattcaagttatgatcatatcctcaagaggcttgtaaactgactgtgggtttccagtttggttattcacagataggccttcatttgctcattcacctattcattcatatagccactcattcattctcaagaagaggtatttgtccatatctcaccatgtggatgagcagatggtcagttctcacttcttttgccattaagtgtgctcaccgttgagctccaggatggtattttctctcactttgcgtcattaccaaagtggctatcaagattccctcccctaccttctttttcttttttcaatgtttaagagctgga

SEQ ID NO: 234585 - DNA, 555 bp, Homo sapiens
gtacacctttcatatattcacctggatgaatttggacatgtgtgcatacaccaatatcatcatcacaaccaaggtactgaacatacttattcacctccaaaaattttcttgtgttcttttttaatggtggtagtatatttttaagaattcagcctttgagcagggtacgaaggaccttcaacaacaaatgcaaaagtaaatgagctaagttcatataaagggttagctctcagtgagwtattcaagttatgatcatatcctcaagaggcttgtaaactgactgtgggtttccagtttggttattcacagataggccttcatttgctcattcacctattcattcatatagccactcattcattctcaagaagaggtatttgtccatatctcaccatgtggatgagcagatggtcagttctcacttcttttgccattaagtgtgctcaccgttgagctccaggatggtattttctctcactttgcgtcattaccaaagtggctatcaagattccctcccctaccttctttttcttttttcaatgtttaagagctgga

SEQ ID NO: 234586 - DNA, 550 bp, Homo sapiens
tccttttctattttttgttttcctttgttttctttttgtggtagatgctttcctcagatgagtggtaatccttggctrtttgcagttatgcctctaaaagctgattggaagctcttagtacctcattggtacttgttgactagagttcactctagggtgatctatctgtgtcatttgctggggcacccttcatgtcagcttctgattacttttcccttttctgaaaagggagagaggtcttttaatttcctgtctggtgggaggaggtctgtatgccacttctgtgggagagtgagggaagtagggcagtgaggatttcagtattcagtacatatgtgttttcttaaggcctctgttttcattaagcctcccccgcaccaatgtgctttatgtttccctgctctgaaatcctcctgagggaataatcctctagaattttgccttggtgggaaatgcatagtaacctaaccatgtggtatttaggaaggtactgagagattgagcgtttcctaaggagctttcagccagccttctttatttagtgctccct

SEQ ID NO: 234587 - DNA, 497 bp, Homo sapiens
aggatgaagtcactaggggacagaagggtaggagggagtgggaccagacaaacactgagctctgcatgcacacgtaacagtctaaaatagtcatccagcacgcagactctaagtcaagataaccaagatgaattgccaacttctccacaagcaatatgactttgggtaaggtatttgagttttctgtgtcttagtttcttcaactgataaataaaaatgatggtcatatctacttcataaaattgtgataattgattaatacatgtaatgaatarcgtttggcatttagcttaataataagacttttcattaaaatattagctacttttgttagctagcaactctcagttttgcctaaagctgaccccatatctagggtgaggttttgaaagaaattcaacaccatcagaagtaggtctggaagttataaaggaaagcttaaagaaacagaaatatgtgcaacacctatttacaaagaatccattgggaaaacccca

SEQ ID NO: 234588 - DNA, 575 bp, Homo sapiens
gtaaataggcagatcttgtttgtattctagctccatcacttactaattttgtgatatgggcaatttatatcctatctgagcctgtgtttcctctacaatatgaggtaatttctactttgaagtattgttatgagggttaaatataaattactttctggtttatgatgttggtatatactacttctatgcacaaccgttatttttatgaataagattttaacagtaagccacagaaaatataatgtaagactgattcttagaatctatcaaaacaggttgtaaaaatgacttaaacatctagcatggcagtgactaacattttgaaaagcttaatttttccattaagaactatagcccaacacagtgtctgtgcttcagtgttcctcttatcaggaaggataatatstgtgatgcatggactaactctaatgaaaatttttattcttaagacacaaaatatttcccagcacagtacataaggtctttgtgcttatgtcagcattggagataaatttctgggaaagaagtagagaaactgctcatttctatagacatcaaaacaccaaagtagccgg

SEQ ID NO: 234589 - DNA, 550 bp, Homo sapiens
tccttttctattttttgttttcctttgttttctttttgtggtagatgctttcctcagatgagtggtaatccttggctatttgcagttatgcctctaaaagctgattggaagctcttagtacctcattggtacttgttgactagagttcactctagggtgatctatctgtgtcatttgctggggcacccttcatgtcagcttctgattacttttcccttttctgaaaagggagagaggtcttttaatttcctgtctggtgggaggaggtctgtatgccacttctgtgrgagagtgagggaagtagggcagtgaggatttcagtattcagtacatatgtgttttcttaaggcctctgttttcattaagcctcccccgcaccaatgtgctttatgtttccctgctctgaaatcctcctgagggaataatcctctagaattttgccttggtgggaaatgcatagtaacctaaccatgtggtatttaggaaggtactgagagattgagcgtttcctaaggagctttcagccagccttctttatttagtgctccct

SEQ ID NO: 234590 - DNA, 550 bp, Homo sapiens
tccttttctattttttgttttcctttgttttctttttgtggtagatgctttcctcagatgagtggtaatccttggctatttgcagttatgcctctaaaagctgattggaagctcttagtacctcattggtacttgttgactagagttcactctagggtgatctatctgtgtcatttgctggggcacccttcatgtcagcttctgattacttttcccttttctgaaaagggagagaggtcttttaatttcctgtctggtgggaggaggtctgtatgccacttctgtgggagagtgagggaagtagggcagtgaggatttcagtattcagtacatatgtgttttcttaaggcctctgttttcattaagcctcccccgcaccaatgtgctttatgtttccctgctctgaaatcctcctgagggaataatcctctagaattttgccttggtgggaaawgcatagtaacctaaccatgtggtatttaggaaggtactgagagattgagcgtttcctaaggagctttcagccagccttctttatttagtgctccct

SEQ ID NO: 234591 - DNA, 584 bp, Homo sapiens
tattagtaaatcaatttttttacctaatttttaatctgtattgatttcttataacataaatatctgtggttacagagacctcagtattttctttttcttctgtagcagcatttcaatcttttttgaagttctacctctctttcactgctagttcacaccatgtgagagcaatggacctaatcatcatgggcagtggtcataatatgtctcaacctgcccaaaataaagatgctaccccattaaccatatgttttattttgtaatacgatcatgatccaacctagtctaatgagaaacttaactagaaattttgttggaattattgaggaaaacagtgttcattttctgaaaaagtagcttagctagtaagatataagctcagtgctactagtggccatcttgatgtggaacaatactgagaatatttcttcaggtaatcctacaagaaatgtgtgcaaaacagaaaagaggaagttacaatkagaaatttcttacgtactatattcagtagagcctcagggtagctctaaatctagatacttaataagaatactactgataataaataatactcatatagcaaa

SEQ ID NO: 234592 - DNA, 472 bp, Homo sapiens
tgtcagttaccatttatgcatttgctttctagcttttaagttttgtttatgccttaaaaatacctgatcagggccaggcgtggtggctcaggcctgtaatcccagaactttgggaggtcgaggcaggtagactccttgcatctgggagtttgagagaagcctgggcaacatagcaaaacccgtctctactatagaaaaattaacccggtgtggtggtgcacgcctgtggtcccagctacttgggaggctgaggtgggaggatcgcatgagcctgggatgtggaggttgcagcgtgctgagatcatgtcactgtactccatcctgggtgacagaatgagaccctatctcaaaaacaaaaacaaaaaamccccaaaaaccttattagtattttagcacaatttggggaagaaatgaagttaaatatatgtatgttccatcttctctttacccagaacttatttctaattttttt

SEQ ID NO: 234593 - DNA, 554 bp, Homo sapiens
tgaaagttacaagaatcagatttcccagttggagaaagcatttacttacatggagagggggaagatcaaaaagaaattgatgtgttgagttagaattggagatatcatatgagggcatgattttaagattttccctttttttattttttaactttttgtagagacaggggcctcactttgtggaactcttggcttcaaatcaccctcctgcctcagcctcccaaactgcaaggattataagcatgagccactgagatttccttcaatagagctatcctcagatggttccttcctcagtgagccacaagccagttggcacttatgaccatgsctatagagatcctagttgcagtagaagaggcactaaaatatgcttttcttcttgttttctcttaaagatcaccaaacaaaactttaaaaactaaaagaaagaaaataccttaaataaaaatttaatttaaaaaaaaacaatcaggactgactaggtggctgtcatgacccatggagaggaaggaatagcagtgtggtgtggcagcccatctgaaagccacaca

SEQ ID NO: 234594 - DNA, 590 bp, Homo sapiens
agttgccatgcaattttatcagaattgcttatagtaaccaatttcatgttgaatatgacaacttatggttgtacattgttgatatagttagtattgacatctggtggtttgtaattggggtagatttscataaaaatattttacctctaaatgaatatgatgatttgaataattttttagtctaaggataatatcaaagaagatatagaagcacattttaattggaatttttaaagtctattctatcaatgtaaagaaagaatttacccaaaaccagtttttaacatattatttgttgacaaataagaatgtatcaaccttttcagaaaatgatcttcttttaagaaaagctaattaaagcttatatagcatatgctcaggaaaatgaaatagggcactcatttcagtatgtgttatgttttataattctgtttacttgtttatacagtacataagcgaatcacatatacaaatatgtataaataatagtgcaaaatgcactctggtaagtttactattagagactgaaactcctggtgctttagtagagatgaaatatctttgtcttgaaggagtttgaaaagtcagaa

SEQ ID NO: 234595 - DNA, 498 bp, Homo sapiens
aggtctatccacatactttttccccaaatatttttgttgccaattttccaatcacgttccttccaattccctgaccattcagccaaaccacggggtatagcccataaatcggtatataatctcaggtctggccatttcttcttccaagcaaagtaaacaaycaggagcattgcccaaagttctgcacactgacaggatttcccttcaccactctccttcagggatatgcagtgaggggctgcagtgctacagctctccactttcaggcggtgcctgcacatcatgcagagccatctataaaccagacccaagtcttctctttcttggtcaactgattcatcatagagaattcctcatgtggcctaggtgcatagagagaaggcaatgtggcaggggtagggaccatgggtatttgggctacttcttcatgtaactttcttatacctccaaggcctgcttccattttatgatggagtgctgccgtgcatgcccaacttt

SEQ ID NO: 234596 - DNA, 542 bp, Homo sapiens
ggaggctgtcaaagactccaaaaagcattcttatctgccactgacacttcaatcaccattggatcttctggatcatgtggcccaagtaggagaatagcttgtacagtagcctggacctgttgcagagccttgtcttgttataggtccactcaaaactagcaactgttagagccatttagtaaatgagctgcagtgacacacctaaacgaggaatatattgcctctaaaatccaaataggcctagtaagtattgtgcccctttcttgattgtaggaggggccagatgcaataacttatccttaacttaaaagggatatcttgatataccccacaccactggatccctagaaattttactgaagtgaaaggccctgaattttagtcagacttatttcccaccctctgacatgcaaatgtcttaaaaatacatctagagtagttagtatctctcaytcactaagtccatttagcatactgtcatcaatgtaatgaaccagtgtgatatcttatggaaggtcatcaagatcccaaaaaaccaaatt

SEQ ID NO: 234597 - DNA, 542 bp, Homo sapiens
ggaggctgtcaaagactccaaaaagcattcttatctgccactgacacttcaatcaccattggatcttctggatcatgtggcccaagtaggagaatagcttgtacagtagcctggacctgttgcagagccttgtcttgttataggtccactcaaaactagcaactgttagagccatttagtaaatgagctgcagtgacacacctaaacgaggaatatattgcctctaaaatccaaataggcctagtaagtattgtgcccctttcttgattgtaggaggggccagatgcaataacttatccttaacttaaaagggatatcttgatataccccacaccactggatccctagaaattttactgaagtgaaaggccctgaattttagtcagacttatttcccaccctctgacatgcaaatgtcttaaaaatacatctagagtagttagtatctctcattcactaagtccatttagcatactrtcatcaatgtaatgaaccagtgtgatatcttatggaaggtcatcaagatcccaaaaaaccaaatt

SEQ ID NO: 234598 - DNA, 535 bp, Homo sapiens
tttagcatactgtcatcaatgtaatgaaccagtgtgatatcttatggaaggtcatcaagatcccaaaaaaccaaattatgccatagagatggacagttgatatacccctgatatacaaggtatattgttggycttgccagctgaaagcaaacttcttctaatgggtcttgtagacaggtagggagaaaaagtcattcaccatatcaatagctgcataccaggtaccaggagatgtgttaatttgcttaagcaataaaaccacatctggtacagcagatgtaatcaaagtcactacctggttaagcttacaatagtctactgtcattctccaatatccatctgtcttctgcataggccaaatacaagtgttgaatggagatgtgatgggaatcatcacccctgcatctttcaagtccatggtggcactaatctctgcaatccctccaagaattcagtattgctttgatttactattttcctaggtagaggcagttctaatggttttcacatggtctttcccatcataatggccctt

SEQ ID NO: 234599 - DNA, 535 bp, Homo sapiens
tttagcatactgtcatcaatgtaatgaaccagtgtgatatcttatggaaggtcatcaagatcccaaaaaaccaaattatgccatagagatggacagttgatatacccctgatatacaaggtatattgttggtcttgccagctgaaagcaaacttcttctaatgggtcttgtagacaggtagggagaaaaagtcattcaccatatcaatagctgcataccaggtaccaggagatgtgttaatttgcttaagcaataaaaccacatctggtacagcagatgtaatcaaagtcactacctggttaagcttacaatagtctactgtcattctccaatatccatctgtcttctgcataggccaaatacaagtgttgaatggagatgtgatgggaatcatcacccctgcatctttcaagtccatggtggcactaatctctgcaatccctccaagaatkcagtattgctttgatttactattttcctaggtagaggcagttctaatggttttcacatggtctttcccatcataatggccctt

SEQ ID NO: 234600 - DNA, 542 bp, Homo sapiens
gctgacactactatgggtggagaagctacttccactggggatggggcgacctcttccactggcaaactagactcatcagaatttagagactcaatgtccccagtttcatcaagatcttcccacacatgcccatcttcacttatggaatcccattctttcccaattaatgccctcactttaacattagacaccctgtgaaggtgggaattccatctgcattgtaattcagccaatggaaggatgaygttctatcattgattttcagcaattccagccctgcagctacaggaaataaggctctctttcagggcatacttagctttcaggtcatttatgctgtgcatcagctgggaattcaaatctctgatctcacccttttctttcaccactttgtccagagacattaggagcaatcaattaatgtcactatattttttaatttacaaaaaaatgtttaaaagtactatatagagagtcacttatctccctgcttcttataattggttgattaagagtaagcaatgcagatattttgcaaagct

SEQ ID NO: 234601 - DNA, 542 bp, Homo sapiens
gctgacactactatgggtggagaagctacttccactggggatggggcgacctcttccactggcaaactagactcatcagaatttagagactcaatgtccccagtttcatcaagatcttcccacacatgcccatcttcacttatggaatcccattctttcccaattaatgccctcactttaacattagacaccctgtgaaggtgggaattccatctgcattgtaattcagccaatggaaggatgacgttctatcattgattttcagcaattccagccctgcagctacaggaaataaggctctctttcagggcatacttagctttcaggtcatttatgctgtgcatcagctgggaattcaaatctctgakctcacccttttctttcaccactttgtccagagacattaggagcaatcaattaatgtcactatattttttaatttacaaaaaaatgtttaaaagtactatatagagagtcacttatctccctgcttcttataattggttgattaagagtaagcaatgcagatattttgcaaagct

SEQ ID NO: 234602 - DNA, 575 bp, Homo sapiens
aagtgcctttgctgatttctgtacatagaccaagctaactgtgggagaaatttagtttataatttaactttaaagtgaggataataacagtcccttcccaaaactcacccctctgtttagggtctgaaaccacatttataaaaytaatagaagcctacaaagttaagattactgtaggaccctgaattttgttaaaatatatgcataaacagtaatcaatcattgtctcttagctcactttttataattgcttactgctcgaggagtcacataaccagtggttacaatattggtaacttctccaattgctcttataggtaacacccctattgtgaaacctaagactgatctttgagatatttttcagacttggcattctgatggaccaactgacaccacccggactggttacccccaccaaggagctgacttaacacgtgaagacagttttgacacctctgtgatttcatccctgacccaaccaatcagtagaacccattccctagtcccctgaccaccagacaattcttaaaaaccctcatctccaaattttcagggaggtggtttgagaaata

SEQ ID NO: 234603 - DNA, 575 bp, Homo sapiens
aagtgcctttgctgatttctgtacatagaccaagctaactgtgggagaaatttagtttataatttaactttaaagtgaggataataacagtcccttcccaaaactcacccctctgtttagggtctgaaaccacatttataaaattaatagaagcctacaaagttaagattactgtaggaccctgaattttgttaaaatatatgcataaacagtaatcaatcattgtctcttagctcactttttataattgcttactgctcgaggagtcacataaccagtggttacaatattggtaacttctccaattgctcttataggtaacacccctattgtgaaacctaagactgatctttgagatatttttcagacttggcattctgatggaccaactgacaccacccggactggttacccccaccaaggagctgacttaacacgtgaagacagttttgacacctctgtgatttcatccctgacccaacsaatcagtagaacccattccctagtcccctgaccaccagacaattcttaaaaaccctcatctccaaattttcagggaggtggtttgagaaata

SEQ ID NO: 234604 - DNA, 662 bp, Homo sapiens
aagctctttgaataaacaatactgcagatggtattattatgggtagaccaaaaattttacagcctttcaatcagtgatattgtcttagctcattttttgttgcttataacagaatgcctgaaactggtattctaaacaccatatgatttatagagaagaggaatttccttcttacagttatggaagctgagaagtcccaggtcgagagagtayatctggtgaagaatttcttcctggtggggactccctgcggagtcccaaggtggtgcaaggcatcacatgacgttccagctcagctctctcttcctcttcttataaagccaccaatcccacctccatagcccattaatcaattcacccattgattcgtgaatcgctcacaactcagtcacctcttataggcctgacctctcaattctgccccatggaagataaattttaacatgagttttggagggggtaaatattcatactataacagatatgacttccaagactcattgtcaatgctatttttgatctaatcatttctaaagaagaagattagcattgttccttgtatagagttgctgagaaaattaaataaattagaaaagaaaaagaaatttttaatgcctgatacacaattaagtgctaaatagatgttaattattattactgcc

SEQ ID NO: 234605 - DNA, 662 bp, Homo sapiens
aagctctttgaataaacaatactgcagatggtattattatgggtagaccaaaaattttacagcctttcaatcagtgatattgtcttagctcattttttgttgcttataacagaatgcctgaaactggtattctaaacaccatatgatttatagagaagaggaatttccttcttacagttatggaagctgagaagtcccaggtcgagagagtacatctggtgaagaatttcttcctggtggggactccctgcggagtcccaaggtggtgcaaggcatcacatgacgttccagctcagctctctcttcctcttcttataaagccaccaatcccacctccatagcccattaatcaattcacccattgattcgtgaatcgctcacaactcagtcacctcttataggcctgacctctcaatyctgccccatggaagataaattttaacatgagttttggagggggtaaatattcatactataacagatatgacttccaagactcattgtcaatgctatttttgatctaatcatttctaaagaagaagattagcattgttccttgtatagagttgctgagaaaattaaataaattagaaaagaaaaagaaatttttaatgcctgatacacaattaagtgctaaatagatgttaattattattactgcc

SEQ ID NO: 234606 - DNA, 609 bp, Homo sapiens
ctaccctttccaaacacatccattaatgaagaaacatgtatcttaacaaagtacatttcatttcattaagtaccaaagcacacacttacttttgctttcctggatgagtacaatagagtgaaatgtttcctgagctctgggctagtgaatagaaaaactacacactgcttaccctccccaagtttgtttcaggtaatcctctgtgatttctacaccattaacattattttttagtgctgtttttttgtttcaaagaaattagtttaattattttccaaaatataaacaacatgaaattccaaaactactagcagatgctaaaacaagttttcccaggcttccaggagaataaacagtctggtaactgaagatatgatctagatctggttaaaaccataaaccccagattgtatgttaatcayattacccctgtatttcttctgaaatgcaattatttctgtgcagttttcttaggctatctctaagtaaatgagccaatatgccaaagcaactcatcctttaaaaggaattcagctaatctgaaacatcaacataagctaaagataaaccacaaacacaagcatcgtatcctaaaatagactttatcaa

SEQ ID NO: 234607 - DNA, 652 bp, Homo sapiens
tatgaaagtttaaaattcctagatatagaaagaagcataaaaatactacccataagcaggaaaaaaaaacagattttacagactcagaaatatacatatacacatatatatgtgtatatatatatgtgtgtatatatgtgtgtatatatatatatgttgtgtatatatatgtttaaagggcctaatgagtgaatagatgcaatatagtctaccaacagaaaaactgaaactttacaaaagaaccaatcctggagctgaaaaatacatcygacatgaaaattttattggataggtttaatagcagattagacacttcagaagagaagaatcagtgaacttaaaaacaaagcagaggcagtaggaattattcaaattgaaacatataaagaaaacatgttgaatataattatgaaatcttcagtgacttgtaggacaaaatcaaatggcctaaaatgttgtaactgacatacaaaaaaagacagagggaagaaacaatgaagcaaaaaaaattttgaagaaataacagccaaattttttctaaatttgataaaaattatcaacccacaaattcaagaggtttcatacactctgagcagcataaacttaaagataaacacatgaagccataatcaaattgtcaaaaaccaaagat

SEQ ID NO: 234608 - DNA, 551 bp, Homo sapiens
gtcacactgtgtgtgtgtgtgtgtgtgtgtgtgtgtgtgttggggtgggggggtgcagtgggagataaaagaagaatattgaaggaaagaaagaaaaataatcaatattacccacatgaaaattattagaggtgccagcatctttaaattaaaaaaaaaaaaaaaaaaaaaaaaaaaaacagggcaagaattctggcaccatgaaaaacctgaatgtaatgacaccaccaaaggatcaccctagctctccagcaattgtccctaaacaaaatgaaaactcaraaatgacagataaggaattcaatgcatggattgcaagaaagctcaatgatatccaagataagattgaaaataaactcaaagaaactcctaaagcaattcagaaaatgaaagaaaagatgaacatcttaaaaacaaatcaatcagagcttctggaattgaaaaactcacttaaggaatttcaaaatgcagttgaaagctttgtcaatagactagaccaagaagaagaaagaatttcggagctcgaagctcgaagactagtctttgaatct

SEQ ID NO: 234609 - DNA, 551 bp, Homo sapiens
gtcacactgtgtgtgtgtgtgtgtgtgtgtgtgtgtgtgttggggtgggggggtgcagtgggagataaaagaagaatattgaaggaaagaaagaaaaataatcaatattacccacatgaaaattattagaggtgccagcatctttaaattaaaaaaaaaaaaaaaaaaaaaaaaaaaaacagggcaagaattctggcaccatgaaaaacctgaatgtaatgacaccaccaaaggatcaccctagctctccagcaattgtccctaaacaaaatgaaaactcagaaatgacagataaggaattcaatgcatggattgcaaraaagctcaatgatatccaagataagattgaaaataaactcaaagaaactcctaaagcaattcagaaaatgaaagaaaagatgaacatcttaaaaacaaatcaatcagagcttctggaattgaaaaactcacttaaggaatttcaaaatgcagttgaaagctttgtcaatagactagaccaagaagaagaaagaatttcggagctcgaagctcgaagactagtctttgaatct

SEQ ID NO: 234610 - DNA, 412 bp, Homo sapiens
aaaaatgagtaggggtctctattsttatatcagataaaacagactttaaaccaaaccaacaaaagttaaaaaaggacaaagaagggcattacataatgataaaggattcaattcaaaagaagacttaactatcctaagcatacatgcacccagcattggagcacccagattcataaagcaagtacttctagaaatgtgaaaagatttagacagccacacaataataatgcgggacttcaacaccccactgacagccttagacaggtcattgaggcagaaaactaataaggaagttctggacttaaatttgacacttgaccaattggacctaatagacatataattaaaagccgaaactataccagtcatactcttggaccacagtagaataaaaatagaaatcactaccaag

SEQ ID NO: 234611 - DNA, 494 bp, Homo sapiens
gaattcaaaaggttgattattaagctgctcaagaagatatcagagaaaggtgaaaaccaacttaaataaattgaaaaaacaatacagaatatggatgaaaaattctccagagaaatagatattataaagaaaaaacaatcataactgtaaataaaagacactggcaagtgtcaacaatagactagaacgatagaagaaagaacttaagagctcaaagacaaggctttccaattaagccaatcagataaagacaaagaaaaaaaaaagaacamagcctccaagaaattttggattatgttaagtagccaaacctaagaataattggtgtccctgagaaagaagagaaatctaaaagtttgaaaaactcaaatgaggaaaaaatcaagtaaaacttccccagccttgctagagatctatacatccaaatacaagatgctcaaagaacacctgagaaattcattgcaaaaggatcatcaccttggtacatagtcatc

SEQ ID NO: 234612 - DNA, 543 bp, Homo sapiens
accagcaggagaaactttgagctttgccagattgatattgggtgctaaattaagagactagtgtttgtttagagtattttgctttggcttggatgggaaatgttaattcggttccccatgtaccccattaggcagcatcttgaaaaactgagaggctcttgtctatggctccataaaacagaaaatgatacttttctttataatgtggcttgcccccacagctatggcagtgagcarggtcatcaaaagctgctccattcttccggaagctgcccaaaaaggggaactcagaaatgccagcaaaaaggacaaggatttgttaccatccagatttctgcccccccgccctccatgtgtgtgtgtctgtgtgtgtgtgtgtgtgtgtgtgtttgtgtgtgaatagtaaacatcactgtctcctctgcaagggtttgtttaatagaaaaaaaggatttgtgagactagtctcaggctgtagcgaatctggtgtactttgtgctatcaatttgtctttctgtgtcattctgtaatggagagaggggt

SEQ ID NO: 234613 - DNA, 399 bp, Homo sapiens
cctgtaattccagcactttgggaggctgagatgggcagaccacctgagttcaggagtttaagaccagcctggccaatatggtgaaactccgtgtrtataaaaaatacaaaaattagccaggtgcagtagcatgcacctgtaatcccagctactcgggacgctgaggcagaagaatcgcatgaacctgggaggtggaggttgcagtgagccaagatcatgccgctgcactccagcctgggggacagagaaatactccatctcagaaaaaaaaaaaaaaaagaaagaaagaaagaaagtaaaaagaaaagattctatctctaaataaggttatattctgaggtggaaagagttaggactgcaacatatcttttttgaaaagagggacactattcagcccat

SEQ ID NO: 234614 - DNA, 590 bp, Homo sapiens
aggactacattgaaacccaatccaaggaagataagaatcacaataaaatgacacagtagctgcagacaaaatagccggcatagaaaactatgtaactgtaacgatagagtggaagaacacactgaaataattctataattcaatcacaagtattaatagcagaatagaccaagtggagggaagaatctaagagcttgaagaccggctttttaaaataagacagtcagacaagaatagaaaaaaaaaagaatgaaaaggaaccaaaaaaaaccctccaagaactgacatgatagacctgaagaacacactgaaataattttataatgcaatcacgagtattaaaagcagaatagaccaagtggaggaaagagtctaagagcttgaagattggctttttgaaataagacagtcagacaagactagaaagaaaagaatgaaaaggaaccaaaaaaacctaaaagaaatatgggattatgtagaaaccaaacctatgactcactggtttccctgaaagagatggggagagtggaagcaacttggaaaaaaaatttcagratatcattcatgataacttcccaaacctagctaga

SEQ ID NO: 234615 - DNA, 561 bp, Homo sapiens
caatgatagaggagtggccataacaaaatgtaagtgtaaaaaactttataattagatttcttagtgtctgagaggatgggctctgaagttagattatttagattcatattctggctccaactttttatttcttatgtgtctttgaaatattattaaatttctctaagcctcaatgtcctgaattgakagatcaagccaataatagaacttattaatttaaataatttagaacagtatttggcacttgaaaagctctcaacaccctgatgtgtgtgtgtttccatactagaatcttatgtaaaccagaaaacacagagatgcactaatgtgtgcatctttaatgtagataaggaagaaaagttttatatttgtctctaggccctgtgagaagtgcagttggtgctaggctgacaaaatcaatggtatctaggtttttttcaagatactttttatatgattggagcactacaacactatcctagaagcaggagtcataagaaaacttgaaatgtagcagttagttaggcaaccttggcataacaacaaagcctttagttttcc

SEQ ID NO: 234616 - DNA, 555 bp, Homo sapiens
ccgtattatgagaacagatggagattctgaacctgaagttcatgctgttgagagtacaaccttagcagtggatagggaatagaattagtatgaaaattggcccagtttctcagaaaaataggatccaaattctcacagagaggtaggaggatrggaatggttcatgggctagaggagaacgagcaaggtttagaaggggctatggaagaaatgtgataggtcatcaactacagagaattttttttaatgcaaaacagctagagcccaatgagaattcatcttaggcctcaaatggacaagagtttgatgtgactatggacaacttaaagtaatattttagagtaatttttctttataatctttgtatgttaaataaaaatcagaataaaaataaagtggattatataaaaggtatttgcatttgtcatacaattctttttctagctcattgaacaaagatgttttgtagtaaaatatccacactttttttaggtttgagagaaactaattttaacatagcaataagtcttttgttgggcctgtgtaacatgaaaa

SEQ ID NO: 234617 - DNA, 509 bp, Homo sapiens
ggatcctccaataccttacttgtagaatataatcctggttgccactgttattagagttcagtgatataaagaggttcttgggttgatggggggaggattgtctcacaattttgtatgtcaattttagccaaatcccttctcaatacagagcttcccttccattttcctctacgattgattcaatgcttctatgtcattaacctttggtctcctttagtctggaaacttcttatacaaactttcaatcctccaccctcacatatcctcaacccccaatttgaagcctcaatgctgaatkcattgatttggtgccttcaattcttgagccttttcaggattttgcaatatgaatcagcctgcctgtcattagcatttgcctctgaagcccttaggttcagttttttcagctctggtaatttcttcgtgtgcttttcattttccaaaaatttgttgatatattttgtctgctgttgtctcttctactcattaactttttccctgtagttcta

SEQ ID NO: 234618 - DNA, 509 bp, Homo sapiens
ggatcctccaataccttacttgtagaatataatcctggttgccactgttattagagttcagtgatataaagaggttcttgggttgatggggggaggattgtctcacaattttgtatgtcaattttagccaaatcccttctcaatacagagcttcccttccattttcctctacgattgattcaatgcttctatgtcattaacctttggtctcctttagtctggaaacttcttatacaaactttcaatcctccaccctcacatatcctcaacccccaatttgaagcctcaatgctgaattcattgatttggtgccttcaattcttgagccttttcaggattttgcaatatgaatcagcctgcctgtcattagcatttgcctctgaagcccttaggttcagttttttcagctctggtaatttcttcrtgtgcttttcattttccaaaaatttgttgatatattttgtctgctgttgtctcttctactcattaactttttccctgtagttcta

SEQ ID NO: 234619 - DNA, 518 bp, Homo sapiens
gaattctgtcaccttttcagaaagtgacagttttgwacagttttgcctttttgtaaagtgtaggcaattataatggtgataccaacatacacagtttgagcggcccctctctccctctctcccaagctccatgatgaacatttctaggccctttgtgggcctcctcaccacactcaatggaggagggcaagctggggttcatcttgccaggctcagctcagttcccctccttggggtctgccctggctctgctctcttcaggttcctacccacagctcaattattcagcctcacagaacaggtcttctttctcctctctgctttcctgggtagaccatgggctcctgggacataagaagtgaatcttgtgtacgttggtgtctctgggacccagagcagagttagatgtggagttgaacaaatagccttgaaccgatctaatgcttttatttttttgtccaagattccttgctccaagaagctgttgtaagtaaggagccaggttccctctgtcccgc

SEQ ID NO: 234620 - DNA, 442 bp, Homo sapiens
ccaccaaagatacatcaaatttgggtcataatggacaaggctatgtgcaactgagtattccactgttgacctacatgtccacattaagtggcttttcaaatagcagtgatgcccttgctcagttctacccaaagatgcctgtattgatcttctgcacccaagacacctgcccatgagataactggcaggggtaggggagcggtgtgtgtgtgaagtstgtgaagtggtatcaaagagcacaaaggagactagtcaataattaagcctcaacaatcatctcatgagcaacaatttccaaccaatcaatgtcaggaaaatacagtgctttataataattgcaatggaaaaacacaccaggtttcttcccacagcctatcattttattattttatataccatcattttaacacttagcaagaatatactttttaatatctatacc

SEQ ID NO: 234621 - DNA, 592 bp, Homo sapiens
aatacaaaagatatgttgaaagtattttgttgtatgattattccatcacttatatttcctgcatcagctactcccctttcttctactargattgatgtaactgcttccagtggcattttcaaaagtccagttgtacctctaggaccaaattttcagtgctagatttgcctgcagaaatccatattcacaggtttgagagaagatggatttgactcaagtaaaattatcacccaacatggcatatagctgttatgctttctttagcgcagcctgggattaagggagtctgaattatgaatccatattttttatatgagagaaagtcaactctgtactttttgaacattttagctcttaatgtacatttggctctcaaggggaaactcaggcatcactgtgtatttcctaaattaatccaattataatgatttctatatttaacgatgagccacaaatgtttttaatcatgccttgttccctgtggtacagcttacacaataccatgcatgcgtgctaaagaatagcacaaaaatatcctgtacactaatggaatacctggcaacagagggaattcatcctcaaagctcaaaca

SEQ ID NO: 234622 - DNA, 473 bp, Homo sapiens
cttttgaaacttcctgtttttaattagccatcagattctggtttgaatagcaattatttcacctcaattttaacaattacacttatgagtatatttaatttaggcaattaaaatctgacactatctttagtacaatatggtcawgatacaatgtgtagagttcactccttattgcacaattgtttaataagccatgataagagcatgagctgagcagatgtgcctgagctttgcctggcatttagctgagcacagtacatatgtgctgaactagtgaactcacttgtataattttacatgagtagacctgtgcaggcttgaattcaaagaaagaccagagcaaaacctccttcttcctaatcaattacacattgtagaaaggtcacatatatgcataaataaaaagagccacagactgaaatctgcatgaaagccagttaaacccagtgcacatgggtgcttaatcgtctcta

SEQ ID NO: 234623 - DNA, 465 bp, Homo sapiens
actttgtaacccataaataaatgccactttaattttttaatgtgaaaaaattaatataatagatgcatgtatgtctgatcttcaagagtaaatctttgaacacaaaaagcagtagttctgaattaaaataaccaccaaaaatcrtcattgaaaacttcacaaagtctaccccacaattttttctaacttttcacattctaacttttaacttttaaggcatgtaacacacatcacttgttttgaatctgactatatacctttgaataagcttatgcaaagagacaaagaatttttgaaatcatatttttttagtggctacagggacacagtattattgtacatatgactttgggcaagtcatataacttctctgagctgccatttcttcatgtgtttcatgtgttaaacatgaataagaatattttattgcaagattaatgtgtaaagattcactaaggtaatgta

SEQ ID NO: 234624 - DNA, 449 bp, Homo sapiens
gcagtggtgcaattttggctcactgcaccctcaacctcctggggtcaagcaatcctcctgcctgagccttccaagaagctgggactacagatgcacgccaccatgcctggctaatttttttttaatttttttggtcagcacaagatctcactatgttacccaggctggtctcaaacccctggcctcaagaaatccttctgcctcagcctccaaragcactaggattacagttgtgagccaccactctggtaaaactgccttttgtttaattacttgtgcaagggatctttttgttttgaaagggtaagctgaataagagaaagtttgtttttagattattcaaattactttaattccaaggagttgggtgaggcaacaatatgtattgcccataatatgaggatgttatttaattatatctggagttacttggccaagagggtggttaa

SEQ ID NO: 234625 - DNA, 537 bp, Homo sapiens
gatgttgagcaactttgcttatgcctgtttgccatttgtatgtcttcttttgagaaatgtctattcagatgtttggcccatttttaatgggattattagatatttttcctgttgagttgtttgagctccttatatattctggttattaatcttttgtaaaatggatagtttgcaaatatgttctcccattttgtgggttgtctcttcactttgttgattgtttcctttgctatgcagaagctttttaacttgatgtaatctcatttgtccgtgtttgctttggttacctgtgcttttaagttattacttaagaaatctttgcctagaccaatgtcctggagagtttccccaatgttttcttgtagtagtttcatagtttgaggtcatagattcaagtctttaatttatttttatwtgatttttgtatatggtgagagataggggtttagtttcattcgtctgcatatagatattgagtttttccagcaccatttattgaagagactgctttttacccaatgtatgttcttggcatct

SEQ ID NO: 234626 - DNA, 550 bp, Homo sapiens
ctttgcttgggctccacgtaccagcaggagcctgatgaggagggcggctgtgttctgaattgttttaggaagtctccttcagcccaagaccgtctggacaaaattgccatgggatcctgttgctgcagcaggatgttaccaagtgagacgttgactcaaagaaggggagctgagatcaggaaggccaagatggcatccaaaaattcaaacacaccaaggaggccaggtgcgatggctcacgcctgtaatcctagcactttggaagacccaggtgggtggatcacctgaggttaggagtttgagaccagcctggccaacatggtgaaaccccatctctacttaaaaaaaaaaaaaatcagctgggcgtgctagaaggcacctgtaatcycagctacttggaagtctgaggcaggagaattgtttgaacccgggaggttgaggttgcagtgagccacgccactgcactctagcctgggcaacaagagtgaaattcagtctcaaaaaaaaaaaaaaaaaaaaaaaaaccaaaaaacaaaacctccaaaggaca

SEQ ID NO: 234627 - DNA, 517 bp, Homo sapiens
aggcatattgttatacataaagaaaggccggagaaaaacaccaagaactttctggggtaacttctctacaggaggttgctgtgtccccctagacagctctatcaacaggtgaggactgggaatctagtggtgaattgatgtgactgggttggggcagaaatgccatggggcctgatgcagcacagctgtacgtcatggaaaatgatccctgagacagtcagcaactggatgtagaatgaatctgtttaagtaatgagtgttcgctttaggagagcaggatgcaggacaatagccaggagagagcaaaacctgtttgaaagagttgagggatttgtgatgtcctgcctgacacaccagcacccctgatratgctgtcaatggctttctctcaattagtccccctggacaggtggaagccgaggtaagttgggtaattgatgtcttcatgcttccacaaagggcctactttgggaagatggaatatgttaatgcaggtccctgcatgaagcagggaatt

SEQ ID NO: 234628 - DNA, 530 bp, Homo sapiens
tgaatgtgctgttatgtgtctttgaacatgtaatgttgcagagaagcagcagggtgtagattccacaagcattcctggattgagggactccctgcctttaattagggagcaggcagcaatggttgataatacaagcttctgaagcactgcaatggatgaagtagcactctaccttcttccatttcccagaccatgggcctgcttcaggagaccgggaagaccaggttagcaccatgttgagcaagctgtggaacagggccaagctaagaggccttgacctcacacactcttgtagaaccccagaattattctgagaaaacatcttttcattctggctgagttttggtgaagataaaaagggatagcatggtaaattgcctttggagatatatgagacacttagctcttgcctacrtaggcaaaatgttaaaacagaggaaaacacgttactaacaaaatgaaaatgtcactgtagctttattcaagatcactgacttagaagttgtaatttgaagatattttgttagtat

SEQ ID NO: 234629 - DNA, 530 bp, Homo sapiens
tgaatgtgctgttatgtgtctttgaacatgtaatgttgcagagaagcagcagggtgtagattccacaagcattcctggattgagggactccctgcctttaattagggagcaggcagcaatggttgataatacaagcttctgaagcactgcaatggatgaagtagcactctaccttcttccatttcccagaccatgggcctgcttcaggagaccgggaagaccaggttagcaccatgttgagcaagctgtggaacagggccaagctaagaggccttgacctcacacactcttgtagaaccccagaattattctgagaaaacatcttttcattctggctgagttttggtgaagataaaaagggatagcatggtaaattgcctttggagatatatgagacacttagctcttgcctacataggcaaaatgttaaaacagaggaaaacacgttactaacaaaatgaaaatgtcactgtagctttattcaagatcactgacttagaarttgtaatttgaagatattttgttagtat

SEQ ID NO: 234630 - DNA, 559 bp, Homo sapiens
tttaagcttaagaacaaaactcttttgattcaactgaatactcaccatgccctcatctcttagccactgccttacctcttcctctatcttagcacccacatcacttacgcatggtgctggagcagaaaaaaaaaaaaataccctccctgctgcgatcactttyttttttctcctcctctgcctcagtccagcctccagccccaacagtgccctgaactgtatccagatttacctataatctctatgttgctgaatctgttggggagtttccaataatctttcctggccattgggcaacatttatgcagcagacctctccctctttctgtaacactcttttcttgcctcctttgatgccatttcctcccttccttctttgctccttttttcttttttatacttctctgtccttctcactccccctttgtagttatttcttccctatcttgcctttaaccatggtggttaaattcccttttcatatattgtctctctctgtctgggtgacttcatccaaaccagggttggccaatattttttgtaaatggccagatagtaa

SEQ ID NO: 234631 - DNA, 559 bp, Homo sapiens
tttaagcttaagaacaaaactcttttgattcaactgaatactcaccatgccctcatctcttagccactgccttacctcttcctctatcttagcacccacatcacttacgcatggtgctggagcagaaaaaaaaaaaaataccctccctgctgcgatcacttttttytttctcctcctctgcctcagtccagcctccagccccaacagtgccctgaactgtatccagatttacctataatctctatgttgctgaatctgttggggagtttccaataatctttcctggccattgggcaacatttatgcagcagacctctccctctttctgtaacactcttttcttgcctcctttgatgccatttcctcccttccttctttgctccttttttcttttttatacttctctgtccttctcactccccctttgtagttatttcttccctatcttgcctttaaccatggtggttaaattcccttttcatatattgtctctctctgtctgggtgacttcatccaaaccagggttggccaatattttttgtaaatggccagatagtaa

SEQ ID NO: 234632 - DNA, 570 bp, Homo sapiens
tggtgaaaaaaaaaatgaggtagaggtctatttttcttagcttgcttactttttgttttatgcttcctcccttagataaaaaggcattcctccatccctaattgtatttgactttgcttttgctgtggggagtgggtagatgggttattgaaagagctgattctattttagtcartaattccttaggtatgtagataatctctttctcttgcttcccttttctccctgtcttctgattatgctgcccgaacacatgcacatacacacatgtattcttgtacacatgtacacacatccatacatgcacacacatgcacatacacatacaacacacacattcatatacacacatgcatgcacacacataaatgtgcacacaggcatttacacaatgcataaatacacacacaaacacatacatgcacacacagcatatacatccacacacacacaccccctgccacagttcattccttctagtttcactctccaaagctgcatggatttttctcaagcagctgcatgctgttcataggacactcaatggaccaacaaagaaaatcaggaagg

SEQ ID NO: 234633 - DNA, 570 bp, Homo sapiens
tggtgaaaaaaaaaatgaggtagaggtctatttttcttagcttgcttactttttgttttatgcttcctcccttagataaaaaggcattcctccatccctaattgtatttgactttgcttttgctgtggggagtgggtagatgggttattgaaagagctgattctattttagtcaataattccttaggtatgtagataatctctttctcttgcttcccttttctccctgtcttctgattatgctgcccgaacacatgcacatacacacatgtattcwtgtacacatgtacacacatccatacatgcacacacatgcacatacacatacaacacacacattcatatacacacatgcatgcacacacataaatgtgcacacaggcatttacacaatgcataaatacacacacaaacacatacatgcacacacagcatatacatccacacacacacaccccctgccacagttcattccttctagtttcactctccaaagctgcatggatttttctcaagcagctgcatgctgttcataggacactcaatggaccaacaaagaaaatcaggaagg

SEQ ID NO: 234634 - DNA, 565 bp, Homo sapiens
ttgaattaacttaaaaaaattatcaatgcagccgaagattaaaatgaatgtttcaaaagttctaaaattatgatggtagtattgtggacatagaacttcaaataaaataataaaacttaggtttttatgcagttgtttagaactataaaatgtttttattttaatgatttaagctgagtcaagttctttatgttgaaatatattttactgtagaaacaataagataatagaacttatattcctcatcagaacttaatatacaacaaactatataaaataaatatgtatgtcatatttaattgtgatatacctttttctaactgaaatttagcatgataatacaaggccagaaacatactttttatttccctttaagtatttcattttatcttcatttaygagacattatcttgtatagaatgtgctgcttggggaaaaaatgtaagaagtagagattttgataaagcagagaagaacaagaaatcttcaacagaatagcaatgtggaaattatgaacttagaagtatccaaggaaaggaaaattcaaaagcaggaaaatctccta

SEQ ID NO: 234635 - DNA, 482 bp, Homo sapiens
tggctcttgtaattggtctatgtcatattttcagatgtcttgacaatttagagactgatgctagcactttttttgtcaaaaatgtatacaacaatgggctaatattcaagttatacaatggacctcctacattccctaacattcacaggactctggtattggagaacattggaataaccttctcaaaaatcaactcaaaaagatttatgaccataccttcctcaactcttccttatccacacactttaataaagcagtttggctactgagtatagctctacctagaaacatcattccttttcagttacttcctccgtaatgatcagtatgaaaaatataagaggtcatgtaatcatattttgaaagtttgagattctgctctgattgttactgggcatgatacttgttactttcycccaatagcaatcccaagctggactgatttgtatgcactctgtgtggctccctgggcaaaaggaggc

SEQ ID NO: 234636 - DNA, 431 bp, Homo sapiens
tcctttccaatttggatgccatttatttccttcccttgtcagattcctctagctaggatttctagtactatgtcaaataacagtggtgaaagtgagcatttttgtcatgtcccagatcttaaaggaaaggctttcagtttttcaccattcagtatgatactagctgtgggtttgtcacatacgatttttattatattgaggtgagctccttctataaccagtttttgagggtttttataatgaagaaatgttaaattaatcaaatgcttttcggcatcaattgaaatgatcatgtggtttttcttcattttgttgatatgaagtatcacactgattgatttgcatatgttgaactgttcttgcgtctctgggataaatcctagttgagcayaattatttttttaatgtattgtttaatgttgtttattagt

SEQ ID NO: 234637 - DNA, 549 bp, Homo sapiens
tatacttttacaacttctattcaccactgcagtggaatttccagctaggcaatatggcatcaggaagaaacaaaagtcagaaattttacaacagactgtgtaaaaatctacttattcacatattcaactctatataatttctgaagcaaaaccgcactccgtagtgtagacgggtgccatcgatgtaggcaaccaaaggagatgcagtttaagttggaaaataatggaaaaagagcctattaaattgctggttattatagaaacataaattaacaactacatacaaacatacacaatttaaataatactaaatatttacaaaaataaaaatcactagaactaataagtcaatttatcaatgtttcattagaaaatatctgtattttaaaacaattgcattttacttttactaaagaaaaaaataggtaataaaaatgaactctttgcaatagcattaaaacttatgaaatacttaggaacataatatattaaaaagtatatacatcraaatctataaagcagaaagaaatttaaaataacctaaataag

SEQ ID NO: 234638 - DNA, 625 bp, Homo sapiens
atctaataacaaagtggatggctagggtacaattttaacattattaatgttatgacaaagatataacacagtattattacattataatcctgccacattcctgctcttctctttagacattattttacatctatcytttttccctataaataatcatctagttctgtgttcttttttgaaatctcttttttctctggtgaaattattactcatcaaaaagcattcaatacttaaaatgtgagcatataaatacaagttttaagtggttcaaagtacatataaattctctgttggaatttgaagatgtgacttgacctctaagttgacctttaaggattctgaacaaattgagataagataggttcagcaatggtccaaatgttagcttttttatggattaaagaataagtcactactgtattatggggaggggttaaagcctgaaagagctgcaggaatgagaggaaatttttacttatactctcttggaacagcagagattatagggagagatttctttatcatagatgcagaaaacagaaagggcatattctcctataccatgatgcctgcttatagttgggagataagatatgtatcccagtttcttagtgatcaagagacc

SEQ ID NO: 234639 - DNA, 613 bp, Homo sapiens
tccagttttaaactcttgctgctgaagagaatgaaattgatatggatgaaatgtgactagatagaatgaaataaatagatgtgttaagtctcttttttctctctccttcaatctgaagcatatctagatgtgtggatagcagttacgctataaataacctagtcatctaagggataacaggggtcaaaacttaaagaataaaaaatcatatattttcagcaacaaaatgatctaggattaagtcagaaacatcatgcatatttttcctgggtagtttggctgtcttgtttgctaagaaagaatgagtcagttttcatatattacaggaaaataatatttgccttctaaatagctgacactgggttttgcatttcctagagcaacgaggaagagttgcctgcaaaagaagggagatgaattaaatggttctgaatgtaggccagaatcttagagaagatattgcagcctgtaaggtaatagcaatgtaaagatactcagttagtaaaaattattccagaaggcttctgtttaatgacttcctgggaccacatatcttcacayaatgtcaaacagtcaaaaaggtgtttttacatctttgagggagaaaccaact

SEQ ID NO: 234640 - DNA, 631 bp, Homo sapiens
catgggagccattttacagcttgtaaaatgtagataactgatagaaatgaaaactaattcttggctctagatctgtacatttaatcctgccagtagaggttcaattgacttccctttcccaccctggaagaagctggcttgagctctgttggtgaatgtgtttcaacattcctttgctccatataattgagcttttctgacttctcctttgaattagttataatctgccattggagagtcatgattttatcttttttttttktttttgagatagcgtcttgctctgtcgcccaggcttgagtgaagggatgcaagcttggctcactgaagccttgacctcctgggctcaagtgattctccaaactcagccccctgagtagctagaactacatacatgagccaccatgcctggctaatgacgatgatgatgatgatgatgatgatgatgatgatgatgtagcagggggttgcactatattgcccaagctggtcttgaactcccagccttaagcgatcttctcacctcagtttcccaaaatgctgctattataggcatgagctgccactccaggctgatgattttatctttttaataaatgaatcttttaacaataaggacaatataagttag

SEQ ID NO: 234641 - DNA, 631 bp, Homo sapiens
catgggagccattttacagcttgtaaaatgtagataactgatagaaatgaaaactaattcttggctctagatctgtacatttaatcctgccagtagaggttcaattgacttccctttcccaccctggaagaagctggcttgagctctgttggtgaatgtgtttcaacattcctttgctccatataattgagcttttctgacttctcctttgaattagttataatctgccattggagagtcatgattttatcttttttttttttttttgagatagcgtcttgctctgtcgcccaggcttgagtgaagggatgcaagcttggctcactgaagccttgacctcctgggctcaagtgattctccaaactcagccccctgagtagctagaactacatacatgagccaccatgcctggctaatgacgatgatgatgatgatgatgatgatgatgatgatgatgtagcagggggttgcactatattgcccaagctggtcttsaactcccagccttaagcgatcttctcacctcagtttcccaaaatgctgctattataggcatgagctgccactccaggctgatgattttatctttttaataaatgaatcttttaacaataaggacaatataagttag

SEQ ID NO: 234642 - DNA, 631 bp, Homo sapiens
catgggagccattttacagcttgtaaaatgtagataactgatagaaatgaaaactaattcttggctctagatctgtacatttaatcctgccagtagaggttcaattgacttccctttcccaccctggaagaagctggcttgagctctgttggtgaatgtgtttcaacattcctttgctccatataattgagcttttctgacttctcctttgaattagttataatctgccattggagagtcatgattttatcttttttttttttttttgagatagcgtcttgctctgtcgcccaggcttgagtgaagggatgcaagcttggctcactgaagccttgacctcctgggctcaagtgattctccaaactcagccccctgagtagctagaactacatacatgagccaccatgcctggctaatgacgatgatgatgatgatgatgatgatgatgatgatgatgtagcagggggttgcactatattgcccaagctggtcttgaactcccagccttaagcgatcttctcacctcagtytcccaaaatgctgctattataggcatgagctgccactccaggctgatgattttatctttttaataaatgaatcttttaacaataaggacaatataagttag

SEQ ID NO: 234643 - DNA, 435 bp, Homo sapiens
taaatggaaacagatcatttcatcatttagaagactcaataatagaaatatttgatgctttcctgaccttaaggaaaaaaaaaagaaaaaaaacataatggaaatatgccaatattctccaaattatttcacatggtcaatccaatgaaaatctcaacatctttattttttgtttttgtggcacaagacaatgcayagaatatgcaaaggtgtaggcaaaggcaatcctattgaacaagatgagaggagatgctttgtcagataacaatgattataaagctgctgctattaagacagtgttgtgttagcccaaggataaacaggccaatggaacagaatagagtgttcagaaatagatccacacatatcagtatgtatgatataagatagggcacatcagtgaagactgaatgtctcaataagtagctctgggat

SEQ ID NO: 234644 - DNA, 569 bp, Homo sapiens
ctatattgaagtatgacatgttatcttcttgatttctaattcaataaaagaataacatattaaggcataagctcaatgtcagactttttatttttatccccagaacattttttggatgaaatacttctgtaataattttaggtaaattaaagaatgcttcatggagactctaaatttgtattatataaacctagaatgtctttccacaatatcatgtgatgtatgatmtaataatttcaatttcagattttttctgctttgttatacatacataatccaaatgcttatactggctcaatttgattattcaggacttttgtttagaggagaggttatctggagaaataaaatatggtagcattttaggaatagaaaaggaaattaaagagcattaaaactagggaaaatagcttttgtttacttaaagtaatacatatataatcatgttcttaagtgtcaaaaaatgaaaaaataaatattttctcagatgcaatgtttgattatttcttgatatatttttatatgcctaggaggtgtcgtgcaagtactcttacatattggaaaccatt

SEQ ID NO: 234645 - DNA, 583 bp, Homo sapiens
gtgggagagaaaataagttcttaatatgttaaattgtgctggttataatacaaatatgctaaagtgggacagagattaatgggattatgcatttcataatatggttatggaagacaatgatgaggtggacctgcaggaactgtgattgcatgcttccrgggaaaattaatagcatgtttggtgtgtcttaatgtcaaagaatatatgaggaaaactgtgggaaatgaagaatggggagtaataagccaataccagagaagactgaaagagtagggaagagactttgtgtttcactcgtataaatagaaatgaagtggtgaattttgagcaaaaatatgatatgcagtaaacaatgttatgagtatcactatacctgctgtgaagattattgaatgtaaggggggaaatatggatgtagaactattatatacattttttcattatttatgaggaataatgtagacttaggaaaaaatgttagaagaacctgatttaaagctgtctaatctggatatgttttgataatagagcccacaggatttgctcatgaatagatatggtgtgcaagagcaagaagcagaaa

SEQ ID NO: 234646 - DNA, 523 bp, Homo sapiens
gagataaattgactaagaagatatacaaatcttaatmacatataagcatttaggacttcatttgttgttatctcattctgtttatatttttttcttacatctgtgagatattttgtgtcaaacccagctagctgcctttgtaaaactgatcagtctcttataccttattattatattcccaagtttctttggggaagcaaacggtccagtgtccagagtaatggttactttcccagcctcccatgaagtaatggatagaaatctaacatacttgcaacaaatgagatgtaagtggaagtctactggtgggattttcagacaacctgattgttctcctgacaaggttaaataattagctcgtgtactcattttgctttttttttttttttgtaacctcctttactttcatttgtctgttctactcttcttgcttagagtgtggttgcaatgctggagttttcagcccattttgtggacatgagactgtaaaatccatgtgaaggtaggtagactaaaaagataa

SEQ ID NO: 234647 - DNA, 518 bp, Homo sapiens
ctgtgatatatttcaaattaaaatacccgaatagttttaaagtaaagaaattggaaaccatataccaagtaatcagtaaccaatagagagctggaatgactaaacttataccaaacaatgtatacttaatgtatagaatgtcttcaaagtaaattcaggacttttttaaggattaaaaagtcaatacattagaaagatggagaaattttgaatgtatatccagataacatggtctacgtaagttaattttcatttacttctgttaataaacckacaaactttatttcaccatttacttatgactgagattaaagaaaaagtttaacccatcatacattacctagtcatacaatacaattttatatagtaccccaaatcacacatttttttcatgaactacatgttttagcagcttcattttgatataatattttatattattgagatacaaaaccataatattcactcaaattgtacaattcaatgcttccttggaatactcatagttgtaccattat

SEQ ID NO: 234648 - DNA, 584 bp, Homo sapiens
gtaatcaaggttgagaagaccctgcttacattgtctctgagacatgataatttcccagtagtataatgatctctaataaaaataaaaaatcagaaggacataggaacataataaattttcagttggaaatcaaattaagtcgagaaaatagaaaggtatttttctttcagagggagaaaaaagccttacacaaattgagagcttcgttgagattattttagattcacttttttttgtgacagaaaaatcaccttaatagtcttttgaaattttttgaaatgttcaacacttaaataaaattttaaatcatttatctattttgttatgtctaatgccagcacgcaatatatattattgtcttagagtaggyattaacttattttcataacattgtattgcatatttaattagccataacaggataagtcaataattaaaagtggcatctgtgttgaatatcttaaaaatatcaaaagtcactttattttgaataaatttgaaagcttatatacaatgaattgaaaaatataattaaaactggctatttggtagtggaatgagtttaaatctctaataaataattt

SEQ ID NO: 234649 - DNA, 584 bp, Homo sapiens
gtaatcaaggttgagaagaccctgcttacattgtctctgagacatgataatttcccagtagtataatgatctctaataaaaataaaaaatcagaaggacataggaacataataaattttcagttggaaatcaaattaagtcgagaaaatagaaaggtatttttctttcagagggagaaaaaagccttacacaaattgagagcttcgttgagattattttagattcacttttttttgtgacagaaaaatcaccttaatagtcttttgaaattttttgaaatgttcaacacttaaataaaattttaaatcatttatctattttgttatgtctaatgccagcacgcaatatatattattgtcttagagtaggtattaacttattttcataacattgtattgcatatttaattagccataacaggataagtcaataattaaaagtggcatctgtgttgaatatcttaaaaatatcaaaagtcactttattttgaataaatttkaaagcttatatacaatgaattgaaaaatataattaaaactggctatttggtagtggaatgagtttaaatctctaataaataattt

SEQ ID NO: 234650 - DNA, 584 bp, Homo sapiens
gtaatcaaggttgagaagaccctgcttacattgtctctgagacatgataatttcccagtagtataatgatctctaataaaaataaaaaatcagaaggacataggaacataataaattttcagttggaaatcaaattaagtcgagaaaatagaaaggtatttttctttcagagggagaaaaaagccttacacaaattgagagcttcgttgagattattttagattcacttttttttgtgacagaaaaatcaccttaatagtcttttgaaattttttgaaatgttcaacacttaaataaaattttaaatcatttatctattttgttatgtctaatgccagcacgcaatatatattattgtcttagagtaggtattaacttattttcataacattgtattgcatatttaattagccataacaggataagtcaataattaaaagtggcatctgtgttgaatatcttaaaaatatcaaaagtcactttattttgaataaatttgaaagyttatatacaatgaattgaaaaatataattaaaactggctatttggtagtggaatgagtttaaatctctaataaataattt

SEQ ID NO: 234651 - DNA, 394 bp, Homo sapiens
actaccagagaaaatcacatcacaaatgaaagcagggagagagaaaaacaggaacaaaggatctacaacactaccagaaaacaattaacaaaatgacactaagtctttmgctatcaataattaccttgaatgtaaatagatcgcatttcccaatcaaaaggcataggctgaatagatttgaaaaacacacatagaagcaataaccactataaacaacaacaagacccaaacaggacctctttatatactgtccataagaaactcacttcctctgtaagagcaaacgtagaatgaaagtaaaacaatggaaacatattttccatgcatgtggaaaccagagcagagcaggagtagctatactcatgtcaaataaaatagacttccagtcaaacac

SEQ ID NO: 234652 - DNA, 394 bp, Homo sapiens
actaccagagaaaatcacatcacaaatgaaagcagggagagagaaaaacaggaacaaaggatctacaacactaccagaaaacaattaacaaaatgacactaagtctttagctatcaataattaccttgaatgtaaatagatcgcatttcccaatcaaaaggcataggctgaatagatttgaaaaacacacatagaagcaataaccactataaacaacaacaagacccaaacaggacctctttatatactgtccataagaaactcacttcctctgtaagagcaaacgtagaatgaaagtaaaacaatggaaacatattttccatgcatgtggaaaccagagcagagcaggagtagctatactyatgtcaaataaaatagacttccagtcaaacac

SEQ ID NO: 234653 - DNA, 550 bp, Homo sapiens
agatctggaacagcagggccatgaacaaggaggagaagaaggactgcacctccatctgccgactgggttccagcaggagctcatggatggccctggtggccttggagggagraggagagtgaagcattatcgtatcttcgactcataggtcctgtcaccaggaaatctctttccacaacccatcaccatgacagactggcccagtaaaacccgtgctgctagagcaagtgaagactaagttagtgtgagccagacaaataaagggcaatttctagaatgtcattgttttaaagcgctcttctaatcatggtggttgttttagtctcttaccatctttgagagttaaagagcagctgggaaatccagttcttctatctccctgacaaagcaaagttaactggaaaaccctccctgcaacccaactccaagactgccattatactgttctaccaaacaccgatacctaaaaggtcaaggccaaagagcccaaggcagccgagaacaggacagcagggagtccccttccccaccccggcccccctcttctggc

SEQ ID NO: 234654 - DNA, 558 bp, Homo sapiens
gtgtccttcctaaggctatttttaaatttggagagaggtacagcagggctttccttggtattagaataggaggggcctggttgttcataaaatattggaatagctttaggttttcatgcttctgtatttatacgacttaaaagaagaaaccccgctggacttggaggaaagagatttaggttttagtgctagttgtggtactaactagtatataactaggtcatttacattatagtccttatatttctaactttaaaataaagttatttttcagcataagcaatattttatttgggttttacacccattcatagaaactccttcttggaaattgatatctaaacaaacatcttcaaattggtttgaagctttggccagaactcatgatgtttacatttgtcaagtggaattaccccttgaccattaaaaaagaaatcctgtttggatgtacttttgagctgattaggaaaaaytatttgttttgaaaagatgaatgcattttaatactggttgatgaggcttgattggactatgcaatacaggtgaggcagtttttat

SEQ ID NO: 234655 - DNA, 559 bp, Homo sapiens
gctaccacattattccattagtcattctctacatcatcagaccagtaattaacatttcacctgtctcaaattgcacgtagtatcttagatgaagtgaaaacaaagtgaaaggcgggttttaatcatacactgcaccagtcgtcatgatagaaatgttgtgactttggtaagtatagtacttcttttgttagatggtaattttgattgacagatcaatccaactatttaaaaccactgatgattatccaacgtgtttttttctcccaaaatcagctaaaaaattgttctgcttaatatgctgatcgaaacaagtctgtgaataaactcttcacccttaaattgtgacctttattctatgaggtgaatcttcactaactgggatgttgcttccggtgaagtaaatgagaccyggatgtcccaatgcccttgcctgacatgagtaaggagtttatactcattaagtcattttccagcctaaggattaaatccaaagagataagagtgaatcattcactctagaggaagtgtgccatctattttaggccagaaggaaacaatt

SEQ ID NO: 234656 - DNA, 459 bp, Homo sapiens
gtgggagggacctggtgggagataattggatcatgggggcggtttcccccatgctgttctcgtggtagtgaataagtctcacgagatstgatagttttataaggggtttcccttttcacttggttctcattctctcttgcctgctgccacgtaagatttgccttttgccttccgccatgattgtggggcctccccagctacatggaactgtgagtctattaaatctctttttctttgtaaactgcccagtctcaggtttgtcttcatcagcagtgtgaaaatggactaatacaggagagctgtctaaggtatacactgatgaaaaatagtttaggggtccagactgtcaataaattcattaggattcaggaaagctattgtcaccaagaaggctaatacaatctcagttcatcactcagtagaaatgaaatattttaaaggtgttgtgtaataaagcag

SEQ ID NO: 234657 - DNA, 579 bp, Homo sapiens
tataggtgttttcttattcagcacttcatagaaatttttaattggaaagatcttgtcctcttcagttctaaaaagtttattgcattatctcttttctattttctccttctatattttctctttccttttggtgaaacttttacttgccatatgttagagtacatggattggtcctaatatctaacattttatctcatattttccaattgttagatttttactatttttggaatatattttcctctttgtccacccaatctgctcatttaaaaagattcacacacacacatttatatattttatatgtgaacatacaaatatacataacatatacatatatatacacacacacacacacatctatacattttatatatatatataaaatctycatgggtacttttttgtctctcttgttcatggcatcttgttttatgaatgtattatcttctcaaatctccctgaatataatagtgatagttattataagtgatctgtttcccgaattttctgggatatttattctactgtgcttttttttagtgctgcattcttcctcaaatgtctgaagattctgat

SEQ ID NO: 234658 - DNA, 579 bp, Homo sapiens
tataggtgttttcttattcagcacttcatagaaatttttaattggaaagatcttgtcctcttcagttctaaaaagtttattgcattatctcttttctattttctccttctatattttctctttccttttggtgaaacttttacttgccatatgttagagtacatggattggtcctaatatctaacattttatctcatattttccaattgttagatttttactatttttggaatatattttcctctttgtccacccaatctgctcatttaaaaagattcacacacacacatttatatattttatatgtgaacatacaaatatacataacatatacatatatatacacacacacacacacatctatacattttatatatatatataaaatcttcatgggtacttttttgtctctcttgttcatggcatcttgttttatgaatgtattatcttctcaaatctccctgaatataatagtkatagttattataagtgatctgtttcccgaattttctgggatatttattctactgtgcttttttttagtgctgcattcttcctcaaatgtctgaagattctgat

SEQ ID NO: 234659 - DNA, 603 bp, Homo sapiens
ggtcagtgtattacatatgttgggacttctttctctccagttcatcagagcacatacttccatccattttatattttgaagygcgatggtcagtcttaagtgtcaacttggccagtccacagttcccagttattcaatcaatactaatttagcagttgctgtgaaggtattttgtagataagattaaagcctgtagttagtgactttaaataagggagactatcctagataatccgggtgtgcctcactcagctgcaagaccacagggcagagccaagacacccttgagaaagaagacatctacctggggactgcaactgcagcccatgccagaaagttccagccggcccttctgacagcctggcctatggatttcatatttgtctagccagccccacggtcaagtaagccaattccttaaaatacatttcttaatacatatctcctacaatttctctggtaggaccctcattgatacatctagaaatttattgaactctctcatccactgagagactcttctccctatgtagtgttctttactgcttatggatttatactattaaattttaataagttattacaaaggaagaagttatgaat

SEQ ID NO: 234660 - DNA, 603 bp, Homo sapiens
ggtcagtgtattacatatgttgggacttctttctctccagttcatcagagcacatacttccatccattttatattttgaagcgcgatggtcagtcttaagtgtcaacttggccagkccacagttcccagttattcaatcaatactaatttagcagttgctgtgaaggtattttgtagataagattaaagcctgtagttagtgactttaaataagggagactatcctagataatccgggtgtgcctcactcagctgcaagaccacagggcagagccaagacacccttgagaaagaagacatctacctggggactgcaactgcagcccatgccagaaagttccagccggcccttctgacagcctggcctatggatttcatatttgtctagccagccccacggtcaagtaagccaattccttaaaatacatttcttaatacatatctcctacaatttctctggtaggaccctcattgatacatctagaaatttattgaactctctcatccactgagagactcttctccctatgtagtgttctttactgcttatggatttatactattaaattttaataagttattacaaaggaagaagttatgaat

SEQ ID NO: 234661 - DNA, 610 bp, Homo sapiens
caaaatatctggaaaaaaagtttctgtagtgaacatgcacagacttttttcttgtttttgttccctaaataatatgttataacaactatttacatagtgttacactgtattaggtaatataagtaatctagagatgatttaaagtatatgggaggatgtgtattagggacttgggcattcatggattttggtatctgaggaagatcctgaaaccaatccctcatagatactgatgggaaactgtactatgtcatggcccccaaggctacataattttgcagaaatgaagaaattatttctttctgagaaatatttgtttgaatgactctaaaaatttcaatcttgcctaattaccaaaygatcaatcttcaatattctaagactagtctttctctgagtcataataaacatgatttagttatggcagttggagtataagtaccatatactgtatttaggcttaggctcaaatttgaatgctgtttctctcacgtgtaagttgtatgtccttgaacgtgcattgtttaatttctatcactgttttcttctactgtagagtaggaatattaacacctacctgatggtaatcaactggtgttagagttaaatg

SEQ ID NO: 234662 - DNA, 604 bp, Homo sapiens
gaagaataagtcatattcagattatttccttatatctactacatgtgttcatttcacaattgataagaccttcccatgtgtttgtaatgaattttatttccctacccctaggtagtttccatgcagagtaatgattgctgcacagaggcatttttgaaaagtgataaaaaatgcatttcaccaatttcagaagtccttgacagcacttgaagggtaatctctgtccaggcaaatggaggtaaatattacaagatgccagagtcaagagtacttcctcagcatttattccttccatgcccrggagatgattttatttcagaatgatccatgcaggtcctggggcacatactagagaagtctatgtgtatttataagatatcccattatctggtttcaaataccaaatcagaagagagtcatgcaatagtgtctagaaaagcttttgttatgaaaactcaaaataccaatctatcaaggatgacttgattacattttgaatagtaagtcacacacagtctattatgtctgcatataaattataacctgagtaatcaaaccaaatgttctagtatttttgtacttttgcccaaggttcagagtccat

SEQ ID NO: 234663 - DNA, 604 bp, Homo sapiens
gaagaataagtcatattcagattatttccttatatctactacatgtgttcatttcacaattgataagaccttcccatgtgtttgtaatgaattttatttccctacccctaggtagtttccatgcagagtaatgattgctgcacagaggcatttttgaaaagtgataaaaaatgcatttcaccaatttcagaagtccttgacagcacttgaagggtaatctctgtccaggcaaatggaggtaaatattacaagatgccagagtcaagagtacttcctcagcatttattccttccatgcccgggagakgattttatttcagaatgatccatgcaggtcctggggcacatactagagaagtctatgtgtatttataagatatcccattatctggtttcaaataccaaatcagaagagagtcatgcaatagtgtctagaaaagcttttgttatgaaaactcaaaataccaatctatcaaggatgacttgattacattttgaatagtaagtcacacacagtctattatgtctgcatataaattataacctgagtaatcaaaccaaatgttctagtatttttgtacttttgcccaaggttcagagtccat

SEQ ID NO: 234664 - DNA, 620 bp, Homo sapiens
ctgcaggcaaacgccttcctccttggatgaaaatttaatgatgggttacgtttccagtgggaaagtaataacttaggtaagtaaagttgtacactccaaaaatgaaattattttctgttttaaaagattaccccaaagctatatacctgtgattttgtctgtcactgtcattaagtgagcacctaaaatgcactttgaacatctcattctctgaattactttctggcccttatgatttgtcagggaatgaaagtggcatgccgggcatgtggatcacatttcttggctccttggaagttttgggaaactactctgggtcaatgaaggaaaacgrgaatgagatggcagtagctgttacctctcccattgtgtgtctgtgtttaagagaatatattttatctccttgaggtataattctacttctttttccattagtcccatcatggaagaggtatgctctccgacgggtggacattgtgcatacacattacacacctaactgcatgatgcctcagatgtgtgcacggtcaatatatgataactgtgtcagtgtgttagctcatgatgtcaggttcattttctatgtagtatctaacacaaatactacatcctggtggcat

SEQ ID NO: 234665 - DNA, 510 bp, Homo sapiens
agcattggccctacccaaccaccacctgaagattatattgccttgtggaactgaaataagaagcatagcagaattttgctgaggcaaactagataggggagggtgtggtgacgcagtgaacagagcccaggcacgaattcccttggttcctacaggagtgacttctttcttccatgaccagctcaggaaatacatataattttcctatcatctccacacccagggtgaggttggggttgacattttaatgcactgttttgtgaataacaaaagcatctgtctgaaattctgctgtctttgttctctgtgagatactcctcatactttaagggctgcatcaatagttggagtgataagaaaaataaatgartaatgaaagggatagggaggtaattagtagttgcacaaataatgaggtgaatcagaatctatatctaagcaactctatattattgtcaattcttcacattgcttttgagtcaaggccaatcctgcttttatactgttttt

SEQ ID NO: 234666 - DNA, 601 bp, Homo sapiens
tattctgttttaaatactagctatcatgctatactaattgtcttggtttgaatgtgtcccctaaaaagcatacactggaaacttaatccccaaaacaatactgttggcaggtgtggcctaawgagaggtgaatagaccatgaaggctccatgttcatgaatggattaatgctgctattgtagtagtgtgtttgttatcataagactgagtttattacatttatattttaaaagccagttcattcccctcttgcttttttgcttaccctctctttgcccttccactttctgccagggaataatgcagcaagatgaccctcaccaggtgccagcctcttgatcttggacttcccagcctctagaatcatgagtcaatacatttctattgattataaattacccagtctgcagtattctgttacagcagcatgaaatggactaagaacatgcatattaaaaatggtattgacaaatattacaggcccgagctctaaaaatatttctctaatttaaacaactcattatgaaacaataaataagtaaacattttagccaagtacaatattcgcttaaatcttaaataagatttatttgagtctagg

SEQ ID NO: 234667 - DNA, 553 bp, Homo sapiens
gttccaagaagcagttctgggctgcctgtgcacgggtggatcttactggaccaaggatgatcaagtgacctgaggggaactcatctctaggctgactgaccctatagggtggccaggagcacagatcactgcccaatcagacaatgatccagagctacccaaacagactggctcactccaggaatcctactggtggatacagtaggttgacagttaatcaaaagggggatgcaggcatacagaaataagtgacatcacagggagagaccaygtgaaaactagagaggtcagtacttcaagctgcctcaggctgatttccaaatccaactccaatcctcattttttgccttacaataatctttcctgcctcacactttttcttaaaacattgtcatgtaactcaatatgcagagggtcttacattgttttgaaactggaaaaacagttattccaaatggcagaagattccaaaggtaaaattcaatatgcctttgggagagaaccctccagtaggacattgtcattccacagatatgacaatattcccacccat

SEQ ID NO: 234668 - DNA, 412 bp, Homo sapiens
cacatgttctcactcataagtgggagttgaacaatgagaacacatggacacaaggaggggaacaacacacaccagggcttgtcagtgggtgaggggctaggggaggratagcattagtagaaatacctaatgtagatgacgggttgataagtgcaacaaatcgccataacacatgtataccaatgtaacaaacctacacattctgcacatgtatcccagaacttaaagtataaaaataaaaaaaatatataaaaagaatcaaacacatgccatgaaccaacagttgaggtttcccaatcctcagaaagtcactcttggttcaagactgagctgaataatacagtgaagttcccctaccttttctgcatccacctcagaaaagagtttagcaaaaatgagtccccaaacagca

SEQ ID NO: 234669 - DNA, 568 bp, Homo sapiens
aacaacacacaccagggcttgtcagtgggtgaggggctaggggaggaatagcattagtagaaatacctaatgtagatgacgggttgataagtgcaacaaatcgccataacacatgtataccaatgtaacaaacctacacattctgcacatgtatcccagaacttaaagtataaaaataaaaaaaatatataaaaagaatcaaayacatgccatgaaccaacagttgaggtttcccaatcctcagaaagtcactcttggttcaagactgagctgaataatacagtgaagttcccctaccttttctgcatccacctcagaaaagagtttagcaaaaatgagtccccaaacagcagtgacattaaacaaaacattttttaaaatgatcatttctattttcttggagaacaaacagtcaaccatcagagttgggtcatcaatttattgatgactattatagtgtgatttgaattttgtgacaaaataaaacattttctccacttttccctgtaagtgctgcttattttatagtatatctaaagagctactaaatatgaggttgaagacccag

SEQ ID NO: 234670 - DNA, 579 bp, Homo sapiens
ctagaaaggtatttgaagacttgcttattaccaaaaagattagctattactctacattggcttcactctaccgcaatgtggcattaacactctttcctgccttttctgtgaaaaatctttcctactgagcctccgggaactctcattctgtctcacatgtatgtctctgaaatatattctcatcatttgcagaggtgcctgcttcccaccacccactaaagtggtgtctcttcccagcgattctcgactactgcttctctctttcaatgagttattcatggaaaatttcatctactcccaaggattgtttctactcctacaagtttgagtcattaggttkaatcttaatctctgactcttcactgagtttcagactcacatatcccaaggcccagtgagtacttcaagccactcacttcccatgtctaaccaaggacaatgtcattcccattctgcgtgttcttgatgtggcatttcttgcatcaccttactctcagtcctaattaacactgccctaatagaagctcccgtggtctttcatcaagattattaaaattgcttctcagttgggttccctat

SEQ ID NO: 234671 - DNA, 530 bp, Homo sapiens
ttactatataataccttaagatttaaactaatcagcaactggtatccttatataaatatttttctccaaaatccctctaaactgccttctaagagtcaatttgactgaggaatattttttttcttattcattaatgaataagcatcttccaggaccccatccagacatatatatatatatatatatatatatatatatatttatgaagagtgtaatccatactcagctttcagtttcacatagcatattaacatgagcctttcctaaaagatttctgtataacattatcattttcaccttcactaaacaactctgtaatggaagcagctaagtcacgtatgtttgctactttggtcaacactttktttttttttttgcaaaatagttgtaccttatagatgagttctcagcagtaagcccatttaaaattttttatgcctcatgatcctgacaacacatcaagaggagctgatttaggaaaacacagattgtttgctaatccctaccgtgagtgactttcttactaatta

SEQ ID NO: 234672 - DNA, 553 bp, Homo sapiens
actttgaatttatcatcccatttctcatgacctgtaagatttctcctgagaaatttgctgctaggtgtattagatgtattagaactcttttatatgttatttttttttctcttgctgctttcaggattttttttctctctctctctctctttgttttttattttgacagcatgattagaatatgtcttagggtagtcttatttggtttgaatctgattggtgaccttcagcctgaatatttacatcttcttctaggtttggaaagtcttctgctactagttttttagataagctttatagccctttatctttctattctccctcttacattcttatgacttgaatatttgattttttgatgttgtttcrtgaatcctttcttcattccttttctttcttttttatttttcttctgactatattttttcaaataacctgtattcaagtacacaagtactttttctccatgatcaattctgctgtgatgttctctattgcatttttttaatttcttttttttttcagctccaggatttgtttgatttaaaaaaaa

SEQ ID NO: 234673 - DNA, 521 bp, Homo sapiens
tggtggttcctgctcgaaaggagatttatattctggtggtaggaaagacacaattaaaaataatcaaataagattctttcagaaaccaacgagagctctgaggaaaaaacacttttcatgcatcacataccatgtccctatctttacatatctgttgtttggctccccttagggattgccaccaccatgaacagaaaggaatttatttatcttcctatctcccgtacagattatggaggatgcagcagctcccagcagtgcatttctcactacctgatttgttcagtctagaataatctcctgctgtacttcagtcatcctcccccaggtctgattgggtcaaggtttccctgtcatcrtgtggtgcaggttgtctgctcatctggttgtcatccactgggtgatcacaggatccaaatagacactcagccccaagagtaattctcagagcagtcagaagacacattgagaaaaagaagcgcagtcttcacagatgcccctgcccacaccaaggaaaccat

SEQ ID NO: 234674 - DNA, 567 bp, Homo sapiens
atttgcctttctgcaacaacagtgcctttaaaagcatcacatagtaatacatacttgttactgttatgcttctcatagtagcgattcaatggtgagcattatggatgtggtctgttagggtttggttgtgtgtcccctccaaattgcatgttatgtgacctttaatgttgcagatggggcctagtgggagatgtttgggtygtggaggtggatctctcatgaatggctttgtgctgtcctcctggtgatgagtgagttctctgtcagttcgtgggagctggttgtttaaaagagcctggaacccccttctttctctcctgctccctctcttgccatgtgacatgcctgcccctcctccaccttccaccatcagtaagagcttcctgaggcctcaccagaggctgagcagatgctggtgacatgtctgtacagtctgcagaactgtgagccaaatgaaggtttttccttataaattacccagtcttaggcattcctttatagtaatgcaaaacagactaatacatgctcccaaccttgtgaaccttcaagcctaatgtggactgaagc

SEQ ID NO: 234675 - DNA, 394 bp, Homo sapiens
gaattctgagatgtattgcctaccatttctggttgtcagttttaatgtttgctgaatactgtgttggcatatgacatctgtcttaagtagcagcaatgcatcctcttggactccctctgaggtaatgcatcttccctccactactgagctgggcctttttgctaccccaacattttgcagctgctggaacctctcctcagtctgggatgctttcctctatgccatccagagtcctaaagggaacactggcggaagaagggaattagaaaaaaaaaaaaaaaaaaaaaaaaaaacacttagaatttatctagttcacacataccaagttaatattwaattttttcaaatttatatcttttttcatggatttcctacaactaacaatttatggtac

SEQ ID NO: 234676 - DNA, 416 bp, Homo sapiens
tgaaaaagttctagagattttgtaaaacatgtatatagttaatgcaattgaactgcacacttaaacacgattcagatgataaattttgttctgggtttttagcacaatttttaaaaggtctctatgatgttacctttttgtacagagtgttgagttttgttttgttttgttttgtctttyctggcaggcagttaacttactagtggctctaattgatcctattgaagcttggttttagtcctttaagaatatgtctagagcaacatttgctctagggcaagaataggcttactccttagataatggtttttgacatctcaactaaatacccagtgttcgatgtattcagcaaggtccctctactctgacttattggacctctactatctctcagcactattcaacctctaatatct

SEQ ID NO: 234677 - DNA, 456 bp, Homo sapiens
caatagaataatctttgtaacaccttcaaagggtagtgaattaaccagggttctttcagctgaaagtgacagaaacccaacttaaaataggttaaacaagagagagagagaatttattgaccaatggaattgaaaggaaaagtttctgaggggaatagaaatttcatcttttttctttaccttcttctctttgttcattaacttcttccttcctcctgttctcctgccttcctstattttactcaaatctcttcccaagtgttagggaatacatgtctgtgcccccacaccccaaaattcatatgttgaagccctatcccccaaagtgatagtatttggaggtgagatctttgggagatcattaggtttagatgagggtaggggccccatgatgagatcagtgtccttatagaaagagaaacagaccggagctcacttgtttccactccctctccc

SEQ ID NO: 234678 - DNA, 600 bp, Homo sapiens
acagtcactgccacctgatccatctgcttattttgggtggtagaaattaaacaaaccaacagaagcagaagtggcttttcactaggaaaccacttttaagttttatatcacacatattcaatcatcattatgaattatcttaatttctaccaaactctaaagcaacatgttagtttggtaactggttgcttgcccctgaagaaagaaaagactgaaattttcactggacattttaatgggtttggagctttctagacagcatcagtggtgagcttaaattcagatttctgattgggcagccgaactcttaatttagagccaacggtagcagagcgtggctcaatgctaaacattggacaatggtatagggaacacaaagtcacctgctagtacaattttatctcataccaygctctgctagttgaaaagcaaaacaggaaatgttcatgagatttgcttcagagagaacattttatcttgtttggaaggcagttactaaagagaaaagagcatgggctttgccaaaagtgagatgaataattgaatctcagctcttccgtgcactagttgtgtgacattaattaagttacttcatctttc

SEQ ID NO: 234679 - DNA, 585 bp, Homo sapiens
atttcccttgctccacatccattctaacacttgttatcttttgtatttttgataatggccatcataacagctatgaggtgrtatcttattgtggttttgatttgcatttatttgatgattagcaatgctgagcaccatttcatatacctattggtcatttgtgtgtcttctgtggagaaatgtataatcaggtcctttgcccattgtttccattgagtttttgttttcttgctattgcgtttcatgagttccttacatattttggatattaacttcttattgaatagatcatttgcaaatttattttctattctgtaggttgccttttcagtttgttgattgtttcctttgctgtgccaggaagctttttttagtttgatgcagtcccacttgtttatttttgcttttgttgcctgaacttttggtattatatccaaaaaaatcattgataaagccaatgtcaaggagcttagtccctttattctgtttaggatttttataattacaggtcttatatttacatctttaatccattttgagttgatttttgtgtatggtataaagtaagaatccaatttcatcttc

SEQ ID NO: 234680 - DNA, 585 bp, Homo sapiens
atttcccttgctccacatccattctaacacttgttatcttttgtatttttgataatggccatcataacagctatgaggtgatatcttattgtggttttgatttgcatttatttgatgattagcaatgctgagcaccatttcatatacctattggtcatttgtgtgtcttctgtggagaaatgtataatcaggtcctttgcccattgtttccattgagtttttgttttcttgctattgcgtttcatgagttccttacatattttggatattaacttcttattgaatagatcatttgcaaatttattttctattctgtargttgccttttcagtttgttgattgtttcctttgctgtgccaggaagctttttttagtttgatgcagtcccacttgtttatttttgcttttgttgcctgaacttttggtattatatccaaaaaaatcattgataaagccaatgtcaaggagcttagtccctttattctgtttaggatttttataattacaggtcttatatttacatctttaatccattttgagttgatttttgtgtatggtataaagtaagaatccaatttcatcttc

SEQ ID NO: 234681 - DNA, 543 bp, Homo sapiens
gtttacttaacttctgatgtggagagttcattgttaatgtatagaattcaactgatttttgtatgttggttttgtatcctgcaacttgactgagttttttattctttttaacagtttattggtggactggctagggtttcttgtgtatgagaacatgtcatctgcaaacagagacaggttttctttttcttttccaatttggatgccttttacttttccttgtctaattgctttttctaggactaccagtcctatgttgaatagaagtagtgaaactgggcatttttgtttctttsctaaaattagaggaaaaaccttctgcatcttgccattgtgtaggatgttagctattggcttgttgtatgtgttctttattgtgttgaggtacattccgcttaaacctaatttgttggaagtttttatcatgaaacagtgttaataaactttgtcaaatgctttttcagcatctattgagatgatcatataatttttgtccttcattctgttaatgtggtatatcacattttgattcatgtatgttga

SEQ ID NO: 234682 - DNA, 569 bp, Homo sapiens
tgtgattaaatgtgagtgttatgattccattttacttatgatttttaaagcattttatatgctaggtcaatgtttttgatagagtctacatgaaataaacttattgaaatattcattatttttgcacactctaagaaggaatcaatctcatatttgcccatgtttttagagtttgacatgcttttaggctaattgtttgtgagactgtaagaagcagagagagggccactactcaagtgaaatattcaggaagcatttgtaagaatttgtaagaatacagttgaataaacctacactaggtctctcaaaagcagagtgccttatactccctttcttgggataatggtaataattttgaaatgcaattgaagagactctgtttctgattatctttttttttttcastaaatgtcaaatcttagatctttttcatatcttttaaaattctaaatctatatctcattgatattaggttatgaagtattctgcaaattaccaaatgctgttattaaatattatgttttttcattttgttttatcatattttgaataatcttccaattcactct

SEQ ID NO: 234683 - DNA, 579 bp, Homo sapiens
attaatgagccatcacttgatcatggtctgtttttttgtgtggtgttgctagtatttagtaggtgtgcattgatattaataagtgatattgataacttttttcctgtactgtctatgtcagatgtggcatttgtgttataatttcttcataaaaagaattaaaaagtgttccttcatttttattgttttatraaaatatatataacatttaaactacctggtctttgaaaccatagtagaatttccctatgaaacctctggtactggtattttttgtagagtaatttctttataacttcctctatttcatctacagaatcttttccatttaagctacttttttctaaatttatttatttctaattaacagataaaattgtatttataatgtaaacatgatgttttgaggtatatatacattttggaatggttaaatctagctaattaaaatatgcattacctcacatagttgtcatttctgtggtgcaaatgtttaacatccagtctctcaacattttttgagaatacaacatattatcattaaccttagtgaccattctatacaataaatctgttaag

SEQ ID NO: 234684 - DNA, 579 bp, Homo sapiens
attaatgagccatcacttgatcatggtctgtttttttgtgtggtgttgctagtatttagtaggtgtgcattgatattaataagtgatattgataacttttttcctgtactgtctatgtcagatgtggcatttgtgttataatttcttcataaaaagaattaaaaagtgttccttcatttttattgttttataaaaatatatataacatttaaactacctggtctttgaaaccatagtagaatttccctatgaaacctctggtactggtattttttgtagagtaatttctttataacttcctctatttcatctacagaatcttttccatttaagctacttttttctaaatttatttatttctaattaacagataaaattgtatttataatgtaaacatgatgttttgaggtatatatacattttggaatggttaaatctagctaattaaaatatgcattrcctcacatagttgtcatttctgtggtgcaaatgtttaacatccagtctctcaacattttttgagaatacaacatattatcattaaccttagtgaccattctatacaataaatctgttaag

SEQ ID NO: 234685 - DNA, 596 bp, Homo sapiens
tgcagttaaagtttcacagagacatgctacatttaarcaactcaaaatggaaaaaaattaacttcttgtaactattaaaatatgcatcatattttcacacgatagccaaatatatgatcaaatatcttcattgcagggaacaattataatatcttcatatttttctgccttatgatacctattaatattcaaatttcagattaagaatgaagattatcaagcataaaaatagctcaatagactcctttttacatatacttgctcctgacaaatatttcagtaatgtgatgactataactgaatatgccattgaagctaaatgtttttaataccgctgtaaaaaggacaagctatataaatgaattcatctttctagtgtaaatatttccacttatcaatatacacttattgtttccattcattagcgcatcccaaaagaaagttttcatctttttaacaccacagaaatttgtttggggttagtgtatgaaggggtcatatcaaaattgaagccttttgtgtgtagtttcatttttttaatgtgtgtttaagagcccctgaattctcaggggtgttattcaaaagtcataacatga

SEQ ID NO: 234686 - DNA, 596 bp, Homo sapiens
tgcagttaaagtttcacagagacatgctacatttaaacaactcaaaatggaaaaaaattaacttcttgtaactattaaaatatgcatcatattttcacacgatagccaaatatatgatcaaatatcttcattgcagggaacaattataatatcttcatatttttctgccttatgatacctattaatattcaaatttcagattaagaatgaagattatcaagcataaaaatagctcaatagactcctttttacatatacttgctcctgacaaatatttcagtaatgtgatgactataactgaatrtgccattgaagctaaatgtttttaataccgctgtaaaaaggacaagctatataaatgaattcatctttctagtgtaaatatttccacttatcaatatacacttattgtttccattcattagcgcatcccaaaagaaagttttcatctttttaacaccacagaaatttgtttggggttagtgtatgaaggggtcatatcaaaattgaagccttttgtgtgtagtttcatttttttaatgtgtgtttaagagcccctgaattctcaggggtgttattcaaaagtcataacatga

SEQ ID NO: 234687 - DNA, 565 bp, Homo sapiens
caatgtcatctttactttggacatcaatatatgaatagtttctataacatttagaattttacatttaaaggaatttagtaaaattaaatttcagaaaattcctcaaaatatgttttaacatgtaatgctatagcataacataaaccctcaagatacattttctttttcggaagcagtagcaaattaaatgcaaacactattatacactttaatagaaagaagcactacctggatgagttttggaaagaagggcattatattaaaggaatttccagagaacacagtaatattaataatacagataaaaactggaaagtgwtcctaatctagctcccctctactatttgtcttttatcctttccacatctaccacatatattgaaagattttgacttccaaaagataaatttatatctatattttaaaaattgaagtagtatcaacttgccagagcacctgattagtatgtaataaacagcattactacactgagataatacaatattagccaaaatcaatttgtcattttgagaagtatgaaagttttatagctaaactattcata

SEQ ID NO: 234688 - DNA, 581 bp, Homo sapiens
taaatctgtttttcaaaatgtaggaaatgtataaataattatctactttttattattattttcttatagaataagaagccttggccaataatacataataatttcagagattattcccaggtgaatatatctttaattaaagagggttacacaaaatgatattataagaattcttagcgatgcctctcatgacagttatgcatcgttaagcttcacagaacacttttctggtttcttggcttcaactggacaagayagtagaaagtaaaacaaagctgggacattggaaagcacttgggattgctggaaattgaaggagaaaatggcaaaaagacaagcaaactagaattgtggctaatctggacataagtatatgacactatggacaatactgtggaggaatattattcactctcacattttgagtcagatatctctcttacatcaaatttcttagatcttcaaagaaccccacaggtttggaattactattaatcaagaagctaaaggtaaagaatgacctccgatacatgctacaacatggatgaaccttggaaacactatgctaaatgaaataagcc
